United States Patent Application Publication US 2021/0254056 A1 - sequence listing, part 28

SEQ ID NO: 55585 - DNA, 1777 bp, Homo sapiens
aggagtgttctctgtaggctcagatgctcacatgacccaagacacgtgaagggtctgcccatcattcacccctctatccccacaagtggtcagaaagttaggaaaatctccaagagaccatgcagaagggtcaaaggatcttgcagatgttctgagcaaaaaaatgaaaactttaaacagaacattgtgccatgacttgaaaaggtcattatctagttcacacttacatcagactataaatattgtcagaaaaatggatatgtttgccaggaccatgaacagtaaaattgcttaaaataggccacagaaaccctcaaggccagtggggccatggcaggccatgacactcaaacctgatgctgccttgtgagagacctcagcaggaacaaaagccaacagctgcttattggaaaatttatactcagtggccctcaaaaattgcaaaagcctttcaagtcatgtaagttaattttgtctcactcttccaccaggtagaagtgagacagggagactcatgctccttaaatgaggtcccttgtcaaagactagctgtcttatggcctttgaatactctgcccttcccccttcctatggtatagctttgtgtccagttagcactgagcagaagctgctctcctgctgtccccacccactgttggctaaagccaggtcacctcctgccaggcagcggctgggtgaaagtccagagaagctctcctgaataaacaagtcaaacaaaggcagttcccagcagtggatggggctgtactccagaagtctatttgcaaatctgtcctttagaactcggaagacattccccaggaggagcaatgttatgcagtgtggcaaggttcccaggctagcccacacctctgatttaacccagaatgggctggggaaacagtgctctagaactcatcattatgggtaatacctttgtagtctctgctcttcagtttacaaatagttgctgagctaggcatggttccaggtgatgtgaaggttcaaagctgcctcagctttgtggagtaggtagattcagtagctcctgggtgcacagtggctgagattttcccagtctcatgaaatccctgcttctctttcctatctacatgttttaggctgaaagtgaagggatgaccattccggcttttctttggtttgtttcttcaagataacctggtgtagggaagggtgagagtcctggctctatcattacacacagcagcatctccaagcttcagtttctcctctgaaaaataggataatatgtagctaagagagccttggagttgcctccccagcccttgttcttctcttggtaactaccatgacttttgttagggtatccacatctcccccaatagaccactccactcctgaagactcaggcctagtgcaattccattttaaggccactattacaggacccagtgatgggtgctggcctaattcaggccagtgagcttgcataagtttattggcttatttccagaaaaacaaatttcctttttcctgctagataagaatgggacacatatgtggtctcactagcaattcaggccaatgagtttgcataagtttactggcttatttccagaaaaacaagttccctttctcctgctagataaaagtgggagacatatgcagtctcagcagcaatagaaagccactctgagactaaaacaggggcaagccctagatggaagctctcattgtgaatggcagagtggagtgatggaaaatagaactccctgataaagttgttgaactccta

SEQ ID NO: 55586 - DNA, 1105 bp, Homo sapiens
gttggttgaagaggaaaaattccaggccttgtttaaagatggttctgtccaatatgctggcactacccaaaagtaggtggttgtaccgttgcagttccaccacagcatggccttgaaagacagggtgaaggaaaatcttcccagtggacagtatgaatctatattgacttagggtagcggctaatggtttggctggatggtcaaaccttaaaaggatcatgattaaaaacctggtggcagggagagctgagaaagaggtttgtaggtagaatgttacgaatttgcacggaatgggaagatagtatatcccatgtgaatgctcaccaaacagcaatcttatcagaagaagatcttaataagtaggtggatgagattgctggttttgtgaacatttgttaccctctttccccaggttccccttttttgttctatggaagccacataaaatggtccatagggctatctgggggctcagcaacatggactttgaatcaccgctgctgagtgtccaacctgccaacagcagacatcaacacagcatttatttggcaccattccctgggagtaccagtttagccacctggtgaaaagttgattataaaggatcactttcatcatggaagggacagaactttgttctcactggaatgaatagacacttactctggataaagatttgtttttcctgctcacaatgcttcttccaaaaccaccatccagggatttacagaatgtgttattcacatggtgtttcacagagcattgcttttgaccagggaactcacagcaaatgaagtgtggtaatgggctcacgctcatggaattcactagtcttgcaaaataccccattacctcgaagcagctgtcctgataaagtggtagaatgaccttttgaaggcatagttacagggccagctgggtggaaacaccttgtagagctggggcagtgtcccctagtatgtagcgtatgtcctaaattagtgaccaacatatgttgctgtttctcctatagccaatttttctgggttcaggaatgaaggagtggaaatgagagagtttcttcttattattaaatttagtcatccactatgaaattttatcttcc

SEQ ID NO: 55587 - DNA, 1893 bp, Homo sapiens
tgttaaactaagtatttttttcaaatttatctatgtatttaattgacaaataaaattgtatgtatttattgtgtacaacatgatttttgaaatttgtatacattgtggagtggctaaattgagttaattaacatatgcgttacctcatgtactttttttttgtggtgggaacacttgaaatctactctcttagcaatattcaagaatgcaagacattgttattaactatagtcaccgtgttgtacaatagatctcttgaagattaatatttacctgtggtctgcaatataaatgtcccttctatgtccccatggagtcagtggtagaatctgcattattcactattgctttaaaggtatctttgtgaagtgctggccttaaggcaggtccagagtaaggccatggggctgagcatacttggggtataattaaatgagataaggtaagttaaatctccacccagcacctggcccacggaagctaatcagtaaatatttccttgggagcccatgaccttggctgacctcgtgtgtgtcccttcccacagcacggggctctttgcatgccgggaagtctcagaatgtctgcctccttgctaagccgattttgcaaggagtcttcttgatggtatcaccaagctctgagatatggagactttgtgccacttcactctaggcagagttccttcatgctgtgtgaggtaggagcacacacgctcaccaaagaaaacaccctttagcctggttgggagactcccgggttaggcgctgatgtaatttgttttcacaaaaactgtagcagccttctgagttaagcatttgctcagctggtctttgccagacgacagatgctttgtgtcattgcctgttgacagtggccttagtcacacattgtacctcaaaggctgaaacatcccagggtaaaatgattatgaggaaggcgagctgctccagagatctggagggatcacgttgggtacccagccgggctggccccagggattctactccaggtgtaagagaattggttaaacaaaggaaatgacaatcagttcaggcccttactgtgattgggcacgaatgttctcagagctgccatagatattttaatcaggatgtccttttcacttgaatgagaggaatgcaggttctatatttacttgtttgtcccttctatcagattgtgaggcccaagggggcaggcgcctctaactgattcatcagcctgtgcctgctgcgtagcacaaagccaagcacaaagccgggcacaaaggactcacttggcgaaagtttgtgggatggaagaatgaatgcggtgtcttcctcggagtcccctcttttcaggctccgctttataccctttctctggcgcaggtccctgctcactgcaggtgtctcctaagagcttatgtccctatgtttccttctcatcctggaaacggaagtttattttgaagcctgctctattgttcgtccggcttgtaatcccaaactgaatgggactgatttgttgtatgcttggctggtcttcacaacgcatgtttttgtgatatgtaacatttccttttagatcaagtgtggcctggtatagttgcaagggccagagcgtccagggcagctggtgttctgaatttcagccttcccattttctattgttttatttttttaattattattattatattttatagagatggggtctccctgtgttacccaggctgatctctaactcctgggctcaagtgattctccctccttggcctcccaaaggcatgagccaccattcccagccccattttctaattgtgtaattcagtaaattggatttcatagaacctcagcttcctttgtccataaagtggatataacaaggtgaacttggctgagattagac

SEQ ID NO: 55588 - DNA, 1384 bp, Homo sapiens
tttatcaagtgcttttcagaatataggtttgggtgatttattttcttaaggatgaactgtataattttaatacatttcctaatgtcaaaccatccttacgttgttaaaccctccttgactatcatggatgattttttgatgtgctttaattaaatttgctaatttttttccagatgtttttctgtccccattcaaaagtgagactggtctttgtgtgtgtgtgtgtgtgtgtgtgtgtgtgtgtgtgtgtgtgtgtgtgtgtgtgtgtatgtgctgttcttgacaggttttgttatcagggttatgataacctcataaaatgaactgggcagcttttcttctttgcttttttgcccaaattcttctctgctctcctggcctggggagaacaaggctggcctgtgttcagacctgctccaggacctctggtgacctccagcatgttcccagctctcttcttgactcttagtggtgttgtctctggcatctctctgcttctcctccggtctggcttcccaatgtgatcccctaacatctatggctcaacctgaactggcctctgtgtgaactcaagggaggggatttccttggcagatggaggttctccatgtgccccccatccccccacttcctccaagagctctcccagctgtgatctttagctcctccttgcgcttctgcctctagctctctgctgccctctagccacaacatctgtccttgtcgtggctttccgcaggcagaggcattgagaatggaactctgttcaacagatccagttgaactctgttcaacagatgtctcgaagcccttggaagttctccaaagtgactggtttgaagggggtgctgcaatgaggcaatgggttgttttggctgcctctgaagaaaaggggtgccagaatagacccaaagcctggactctgccctcagtggggaacatgaattacattgctgccaaaggacaactctgagaaggcctggtgccgctgggcagggcagctctgcaaagtccggagtagggaagggatcatattcagtatggacctttgctcagcatgcttctttcctgtccttccctgctaactgagacaacatgtatgtccagcctttctgttcagctgtcaactgtgaatgacacccgatagtgactcttgagctatgcttggaattgtctggctttaggctgacaccttccttgccatccccctgatgccatctaaggccacggccatggagagggacttttgtaagtatgctgttcatcaccatttaatatcatctagtggttctagaatcaggcagatttgggtttgaattctgtgcatgccacttactagctctgtgattttaggcaagtaactcagcatctctgagccaagttt

SEQ ID NO: 55589 - DNA, 1057 bp, Homo sapiens
cacccctgcccctttcttttctctctacctcttatgagttttatggagttagtattcctcccctggacaaaaactccaaaggccttccgacttcctcagtaagatccaaagttcttctcatggacttaagaccctctatgacttggcctcccaccccttctcctggactctcttttgtgtactctattttggctgcactggcctccttgttcctggaagatgccagcgtgccatgccacgcggcttcacatctgctgggccctctgttgggacgctcttcttgcacagtgccgcctggctcactccctcactccttctaggcctccgttcagaggctcccttaacaaagaggctttctctacacaccccacatcaattagacactttcttcactcacactcccactcgccttaccatgattaatttttcttcgtagctctttatcatcaccacataacatattctgtatcaatctctttactgtctatctctctctgcctgaatgtcactgttttgtttgctgctgcattcccgatgcctagaagaatgtctggcacatgcaggctttcaataaatatttgttgagtgggtgaatgaatgactacatctgacgagaagagaggctttggtcactctttagcattgatatgtaatctgttgagtgcgtgtttgctgcatttatcaacattcttttaaaactagattcattttctgatagtattatctcatcagtcaggggaccgcctgagcattaggccacaagccaggctattcctggaaggattgcaggacaggcttgcaggatgatgcacaggctggtaccctggggctcttcatgtttgagaagagagccatggcacttctgggatgttcacagtgacctcactcttatttgattttccctggaagacacctcaggctacttccttctctgaggatgaagtagaggaaaggagtgtattattagtcagggctctctagagaaacagaaccagtaagatatctacccatccaccctattggatatatatcctatcgagtatatagatacacacat

SEQ ID NO: 55590 - DNA, 2696 bp, Homo sapiens
gcccatgctcccctctccaccactacagtccttgcatctggtaagggtgggaagggggttcagtggccactggtcctaggtgatggcaagggtggtgtcactggctggggatggtggagactttgccgtgccacaggggtggagaagatgagggcagagaggagaggtggaatcatggaagagaagccacaggctcgacctcccaggcaccagggagcaacagagggatgcttgtgaaagtttttatctgtcaggacccaagatagctataatgcatgtgacagggatggcaattttgcaaatataaaacagatatatttaattactcattacatcactgttttccctctgagatccagctacaaaaattatcactagagggcaggagaggtctctttagcaagaaacatgcgtcctagcccagggtactggcttctcccatagtgtgggggcagtgctgactaatgcttccctgttcacaacacgcttagaaagtgagaatatgcgtgtggcacactggggtcagctaaaggggatttgggaatgcctacatgggagctagtgaaaaaaattcacattttcttcatgttatattattacaataatatacaaaacaaaatattaaatgttgaatttatataatattctaaagaaaatcatttaaatattttattgttaaacatgagcttgcttcaaattaacatgtcttttttatgtagttttaggcttgaaatggctacatggaatttctgatcaagatttttaagggtttcttcattcttttttcaaatttcatttgtttctaatttttaaatgtttatagatttagtgggtacaagtgccattttgttacatggatatattgcaaagtggtgaagtctgggcttttcctgtaactatcacttgaatagtgtacattgtacccataatcatcattaacaggaaatttgtttgtacagattggtgataaaaagttaaaaacaattttgcacctgttaaaaaatatataccagttgaaatcatatagagactataacggcattttcttttttcaaacaacaaatgtggtattgaaattttttgggatgagcattggatttagcacccttcaaaccttttggattctagtgcacttaggtaatggtgaagccctaatctgcagaatacacatgcaattttacatcagatatcctgcaggcagtgtggaggtgactaaagaggctcatctactgagaaagacaggaacagcccatatacatcgagtgactgttgtcctgatttgtcctgaagggctctgattcattcttctgacatgacatgactatccagagcacttccctttgctaaaaaacaaacaagaagcgtgccagtttggtgttcatacacagtgtggatgaatctcgaaacattgcccagaatgaaagaagccagacacaaaaaagtacatgctgtatgattccatttatttgaaattctagaataggcaaaactaatttgtagtgatggaagacagatgagtagttgtctcaggcagtggtgggggtgagtgactgcagtggggcatatggggcatttggggggtaatgacaacattgtgtatcttgatcatggtagtggtgacactggtggatcacccatgtatacatttgcagaaactcatagtactatatagttaaaatagatgcatttcattatatgtaaattatacctcattaaagtcgatttaaaaaaagaaagtatactattttggacaatgaattttatggtttctgtacataggcgtgaagacagattcagggctgccatttctactgtggctgccagaagctccctcctgctctccttgcccccggccccatccctcttggtctgtgctctgtgctcacccgacgcaagggacacacactcctccagtgggtttctggctctgtccatgtgggagtggcacactatgcagcaagctgccaaaggacgtgtcctcgccgcttgggatgagatcactgtccttgctgtttgatggggcccactcttggctgccctccaaggagctgtaggtgaggttctccttagaggtacccagcctgtgcactttggctgccctctcacctgaggaccgagggcatcaccattgtgctgcatgcctgtggcccatctgaagcacttccacggggaagctctggcctagggaaggtacctgtgcctgtccctaaggctttctcatgaggctagagtagaaagggggaggatctgacataaaggaagcaaataagcacccatttcttggtcccagggaattgtgggaggaagaaggagggaggacaggagatggtggagagtggagggcagtggcgggggcagtgcaaggagaaatggagcgggatgggaagagaagttgagagtggtcagccagatgggtcttaaattccctttctgggctttggtctagagcaagtgttggcgaactattctgtaaagggctagatagtaaatgtctgaggttcgtaggatcatatggtgtctgtcacaactactcgactctgccattgcagtggaaaagcagccaaggacaatgggtaaatgaataaatgtggtcatgttccaagaaaacttaatttatgggtggcaaaattggaattcatgtaattttcatgtgtcacaaaatattcttctttagatttttttctcaaccattaaaa

SEQ ID NO: 55591 - DNA, 1557 bp, Homo sapiens
gggtgccaactctggaaactgcactccaagcgtttcaggaaggaagacgtggtcagcaggctcagatgccaggaagaggtgagcgagggaggctgcacggcacccagtggctttggcaactaggaggtcattcaggactttgaggggcaggtgaaggcagagcgaggagggttggagagggagcgtgtgcacgtggtgtgtgtgtgtgtgtgtgtgtgtgtgtgtgtgtgtgtgtgtgtgtgtaggtgatccaagtgaccagaaggacgcctggaagagtggacggttggcgagggagtgtgtgtgtgtgtgtgtgtgtgtgtgtgtgtgtgtatccaagtgaccagaaggacgcctggaagaaaccaatgcttgcgggttgctgcaactacagggagcaagtcacctgtgcggggccgagacccccagagtctcgcgctgggaaaagttgtgcggggaggggaggacgtcgggcaagcccgggcggcacggggagcggtgtggaagcccggcggggccagcgcagttgaggtctggggagcccggctggcatctgctccgggctgcggcgcgggccccgcggagcccaggaggcggcgggtgcttccggccaagggccctggcggccgccgcgcccctgctgctctcaagtttcccgttggcggcgcggcccgggcgcttcaggtagcctctcggctctctctgctccgctccgcgcccaggtagggcaccgacgggggctgcacgcggctggccggcttcctccctgctgaggcggccctccctcctcccgcggggccctcctggccggggatccgcagcgctgcgccctctgaacgcccggcccccgcgcctgctgcggggcgcggcctggccgggccctggccccggctggcctcagtgcccagcagccccgctccgctctgcccagcgcgtcccctttgctccagccctgcggccgtccctttcggccggcggcatggccctgtcgtccgaacccggtgagtgcgcgcgaggctgcgctgctgaccttgggccagccccgcggaccctgcggcccaggcgggaatcagcagcgccctggggtctgaaccgcggcttccgccttccctgctcgcagaggcggtggcgctgactccggtccgatcccttgccctgtcccctgttcctgtccctgtccctacccctgcctctgcggtggcccgagccccagcggcctcaggtgagcgggcagcatcccgattccctggcggcctagaatggaatcgcaaggtttagagaaattaagggacctgggacttgccaccctgggcaaagttcctaggtgcttgaggactggctggatgtggacagctgaggtggacttctacctggaggcgagggatgcactggatgatagggtgatgaggtcgtttgaggccttcatccttacctctttggctctctcccggcaagggaggtgtacagccttgggctctggcagtctgctttctgcccttgatcttctggtagctgctttgccagcagagctgctaatggctgttgtaggctggcaga

SEQ ID NO: 55592 - DNA, 3276 bp, Homo sapiens
acgtgatgtgcaaatgtcaggagggagggatggtatgagagagtcgagagagtcagaacagtgtgttgacataactgcaagcagtgtggtgtggttggagctcaggcattgggagcggggagcagcgggttgtggggagagtaaggctgcagagatgtggggaggtcctggatcatgcaggggctgtgggtttcccacagaaggcagggaggtgggccggggtgtggtggcgagctgggagagaagctcctgggggaagagtcgggatcaggctttgcttggaggagggatggctaaagctgggtggagtcacagtggggttgccatctccacaggagctctgtcccagctgggaacctcttggggacttcttctttttggggtcagctttgataagggagggtaggccaggggaggatgtggctcctctgggaaagcccagctccagcctccctgaccccctggctgggagcatatcagcaatgcagatggaagaccctacctggaggccctaagaccacttctgttacacgccaggggtccaacacagactcccacttggatgggatcaagagctttaagaagtgagagtttggcttcagctcatgtgccctgagaggcttacagaagtgttttggggatttccaggcagaagtgaaaggtgttttagacaccacttacgtgggcaccctggcattttcaccttcaagcaccatttgttccttctctgtgaggcttaggcgttcagacaggtggatgcctccatcactgtgtgaactcctctcagccctgcccaaagaacttcacacgcctagcacatgcccaggcccgtgttcaaagaaacgccttgcccagcccgatgcagccctgccctgagcatacgtgaatgctctgggcttacctgcttcctgctgcctggggccaaggtgtcctcactggctgtgctggcactgacactgttttcttctaaggtggggccccagtgggtgttcctgggtctaccagctgccctctggccacaacatgagaaacagtcctggcgtggggctagggtaacaaatcagagcctatccccagggttctcctgcagtcttggggttaatgttttctctggacagagatgaccttgatatctatgacccagtggcctgttcttaggcaccacagtcagtccataaacatgggcgcaggtctgctatgagtcaggtctgtgcccgcccctgggtgctgcctacttgatagcactctgtctctcttttttttttttgagatgaagttttgctcttgttgcccaggctggagtgcagtggtacaatctcagctcactgcaacctcagcctcctgggttcaagtgattctcctgcctcagcctcccgagtagctgggattataggtgcctggcaccactcctggctaatttttgtatttttagtagagatggggttttgccatattgcccaggctggccccgaactctcagcctcaggtgatctgcctgccttggcctcccaaagtgctgagattacaggcgtgggtcaccacacctggccttgatagcactctcatagcctctactatggggaggagagctgctttctaaaatccagaatgggctggatgatggcctccgtatgtctaaagtggctattggtgtccctggggcagacaagggctgtggtctgaggcaggagctgcgacgtggccgtggatctgtgtgggtggtatctgtgaaggcacctgtcacactacagcaggtgaagggctgagacaccccgaggcccagccagcaggactgtgtgactgagacacttgttttctatgcagaagcaagacagaagagctgagtgtgtttgctgcttgggaattgggtagaagtaggtgacatccactgtggtttaagtgtcatattaagaatagcaaataggttttaccttctgtgccaaacctgaccaattaggggccacccctaaagcttagtgaaaagagtgctgtgttcgattattgatgcctgccatgggtatggaaatggtcaatgttggcttaggtcccaggtctggaaactctgctctttctttacatctgaggtcttaggtgaacacggggaatgcacttggatcctctggtgaactgaaaacactgacctccaatgaccttcaattattttgttcctaaaataatcacccttgagttctgaagtttggatggggtgcttcctggattgtccagttgttttcctcatttatcttgtgactcatgggggtaaggacaggctgacccccctgtggtgtgtcattggtaagccagaggacaggaccagaaagcccagaatccgctgagtcatgctgaggtcattgtaccaagctgtgtccagctgagctgagccaggctgaccttcttttgtgcatcccacgtgagcccagcctcatctctgaggagcctgggctttggggatgttttagttttctgctttgctttgtttccccagtgtccagtggtctgtctttctggtaagaatggcaagattaatggcaggaaggatgctgatgagtgagtgctgtggctaacgacatgggctggctggcataatgctcacagaggtccagtggatcaaatatctggtttggcattacttggagatgctcagccagccgtggacagcattccctgccctgaggtcagccgcctcctcaccccagcccgggctgagcgcccagtcggccgcagcagtagctccagagtgtggtctaatggctgtcagcagcctggccttgaggctgctgtcgtcctcccccggagctcccataggtcccttgtgctcagggagggggagtcagtttacccatagtgacttgaggccatccctcagcttagctggggcttcatttccttagggcttgtggttgtcctatgagtgaagcacagtgaaaaggcagactggggatgaggggttggggagatgggtaggatccaggcaatattagcagagccctcatcctaagattaatgaagagggttcagtaacagaatcaaattacatttaaagaatcccttctagcttctgtgtatggagaatgaattgaaccagagcacaagaaaaaggaacaagaccagttaggaggtcactgtgaattcaggcctgagaacatgcaggcttgaactcccgtggtggcagtgaggttggagaatattgtatggatttgacatccatttggaaggtagaactgatgagactcactgagggaagggagtagtaggaaggccaaggatgactcccag

SEQ ID NO: 55593 - DNA, 1618 bp, Homo sapiens
atactatttttgagctctgaattcagaaagcatcacttctcagacgggtgacttcgacatggaggtgactaatttaggatcgtcggccggtggcagctcatgcccccagacaaaattctgaatgggtagaggtcattttatagcaagaagaatgggcagaagggagtgaaaacgaataaattcgtgctgaagatgtaagaattataaacaattgaaagtgttccagcagctttatatatatgccagaggcaagaactgaattagctggcaccgctaaataggacagtgtcagaatataaaaggtacactacctttaataaggggcatagggatcgatttcaataacaatcgtaaatccacattttgtaacgccgagacaaataactgaaggaataatttcaaaagctaacacagaagccttctgctcctgctgtgtaatcactaccttcttattattagcaagaaaacgttcttttcttagccgggtctcaaggtagcagctagtttgacaaggaaagacctttgggaagggtagcagcctaagccaattcataagtgtggggctggctaagtagatcgacgtggctatttctgagctatcgtcccaggcaaaaggtttcttatttgggtgtccagcccggcggagaccgagcccgcgggccaccctagcgctcgctctggctacgccgcctcagcccctcctcaagcgcacctggacatttaaccaacagctaagtccggcggccgaatgactgagccggcggcaatattcaaacaaccgttttgggatagagaaggaaaaactctctccgggtccctcagaaccaccccgaggcgggacaagccaccgccaccccgggcaactggaacccgccgggcagaagacgggcgtcaatagaatggcctccccagccgtccccacgccccaatccgaggcccggggagggcggcggggctaggcctgtctccccgcggaagcctggctcggcagcggagggccctctggggtttctcttcccagacccagagtcctggagcagctagcaagggaaacacgaaaggacagcgccgcggagctcaccccaggttcaaggcatcgcgcaccctgcggcagcggctgcgctgcctcagcccacagctcagacctgcgggtggccgcgactcaggccgggacccggtcgcacctctgtgacgcaaagccccgccccccgcgcgttgccgggagacggcgcccaaccttcctctgcagcgcccctaccgacccgcgctccgcagctcctgagggctttcgagcccagatggtcatctgagacgagaggtggcggcgaaggagagtctcgcctgtcacgctcccggagcaggggcttcatgaggtggccatggaaacagcctggcagactcccatctctcctggtgccatctccggagcggaaagtggagcgccccgctggcgaccaaggccgcactgagagccctggtttggtcaacagttgggctccaaggtaccacttcccagacctccagcctccccactgatgatagatacacaaaggtcatcttgtttctttatgaggcaatggattgtgttcacctagccgagttgttaagcataagagaa

SEQ ID NO: 55594 - DNA, 944 bp, Homo sapiens
atcttgatctcccgacctcatgatccgcctgccttggcttcccaaagtgctgggattacaggtgtgagccagcgtgcctggccagtcttttggtattcttaattgattttgtctttttttctatcacaaaaatattttcaacttcactgaaggcaaaattcaaacaaaataacagtggagtggtaaaatgagtctggaagttatcaaaaaggattctaattttcagaaaatgatggcaatctaaaattctgcactaaatgctaagaaagcgtcctaggcttcaaagactaaaatagaaatatagagaccaaggaatcaaatttttgccaatacttattagctttgttgttactgagggaactcaatttgtttttaattacccacagtccaaaacacactgcagtttagtttctctattaagataaatatcagtttgacttacagaagtgagtcaatggccaactcagagagtaaagttcaagtatagtagcctttatgcattcttctggcttgttcatagttgcattctacaccaaaataaagtattcaagaagaacaaaatttaagtggacagaaacagttagccctgtactgagtgaccttagcacttaatgcagataactggataaaggtataacttgcagctcatgaaatctcagtgaataaatgtatacatgatgaatgtatatacatgtattcattcaacatttactcacagcctactcagtaaatgtgctagatttacatatactacccaagtgctaagaatgcaaggaaaaataaaatatgtacacaattaacataatacaatgtggcatataacacagatgtgtaaacaaattttaaaaagaaagaatgagaaaaattcattaatgtgataggaggcagccttctaaaatggctcccaatgatctcctcatcttggtattcatgcccttgtataa

SEQ ID NO: 55595 - DNA, 583 bp, Homo sapiens
gttctcggcaggcagcagcagcctctcatcatggcgccaaagatgcctctcccagagccttgcaacctgcctaggagagaccaaactcctctctgaaaccacagtatcccaggagcacagcccgtaagctaagcggctctcagattctctctgtgaatctttgagcattgagggaagagccaagaagccctttcgggaaaccatgggttaacctagcctccactgacctttctggagtgactcagtattctcagaagggagtttttttgttcttccagctttgaatttttgctttcattttagcagcacaaagaatgtgaaagagattaggttgctattaataccacgggtctatctctagatggacaactgatggggggaattgttgggggtgactgcacgtggagctctcttagcccttctgcaaatccagagggtgatggagggacactgagaactcaccagtcttacccctgcacccatttttaccaatggggaaccgaggcccagaggggcaggcatgtgaccaaggccacatctatgagtgaggggcagagtcagaaaagtccccagagcacccatg

SEQ ID NO: 55596 - DNA, 1114 bp, Homo sapiens
gtttttgttccacaggtgagacatgaggcctagtgtggaatccctcctggaagagagccagccacagtgtctggccaagtaggtatttgtgctgtgctgaacaagtgggtaagtgagtgactgaagggggtacagccaccccccagtgtgtggtggaagccccaggattctctcctgaaagtggatctagattgaagggaattgtgcaggagcaggaatggtgaagggcggagatgcagggagaaagcctcggtggcaacagaaaagggaggatgaggaagtggaagtcacttcccccaagactgtgtcccctaaacaaagtcacgtttcgggaggctggccctgagaaccccgacaatcctggggtttgcacctctgtgggaaaccttcttagggcccgattttctccagccctgctctccgctcctgtggagctcgtataggctttgttggctgggggtgccctgggaaggagccagcacctgctcagaccaatgacaggaaataagcctaaacatctccccaggtttcctttccagcttgttcacttcaggaattctttttttaaaaataggtccacttgaaaaaattttttcttcttcaaaatatgtacaattgctcaatcggaggcagttcaaaggcaccgagaatagcagcaaagtatctgagcctcccatttagcgcctagcagatataaatcttgcccagttctgtttgttccaggctgctcagcagcctcttccctgagtcactcactcaagagtgacatgagtcatcatcctggggtcaaggaccacacggcattctgggtctgtgagatcccataaagggcagggcaccgaggggtctccaggaagacatggaggatcaggaactgtctcctaggccctaggcttggctctgcctccccacatgggtgactttagagagtcactaagcctgagaagtaggtggatttctgggcccttctaacttgtactttggaggaatctctttagtggtgcacaggagcctgcttgttccagctcataagagtctaatgtaattttcaagaattctgtgaactggtggttaaacacagacattattaaaaaataaattacatgaactcaca

SEQ ID NO: 55597 - DNA, 1858 bp, Homo sapiens
ctgtacccaatatgtagtcttttatccctactcccctcccaaccttccctccacccccaccagtccccattgtccattatataattcttgttggggccttccattctgactctgctgctaccaccttgctggcccccaagggtctcccccatcccccaaccctcgcccccgtttatgagcaaaatcccttttcccctaagcatagatgatagggtggaaattttaacaactttcctaacgaaaaaggagaagagaaaggaaatccattcagagagcataagaaacctagaaaatcatttctgacaatgtatgtccctgaaccaattatgacctcctatttcccccactcagctgtctcagagccttcccagctccctgcctggcgctaactgctggaggccaccctaggacgtttgtcccctagcagccaaggccaaaaatctcatttgcacatttgtactcaccattccacctcagggccctccgtcacccccacccccgtcctctgtcctctcctcccgcctccttggagaaacttagtgacatttccaacaagggccccacggtaagaaagacggcttccttatactctgtggtgaggatcagcacatgtaaacacaaataggaacgttgcctcaagcgctccatcagcgcactctagagtcctacaaaggattagacaaaacaaggtcatctccccgagtcccagcccagtgcctggccgcccaccccttgctccgcccagggcctgctccctccggtgatcccagtccagtgcagccctctgctgccctctgctgggcccttgcctacacagccccggggctcaccagccaccaagaacaccgggggctcttggccaaccttttcatgttcctctgtgatctggaggctggaacaggttcaccaatactttcacccacccatcacttctcagtgtgctggaacctgtgaacggtttcctagtcgttcagagtctcatgtcctcgatttttttttaaagcaaaacagaggttataatccctacctcacaggaccagggtgaagattaaaagggcttattcattcatttatgagtcatatgtttattgcacctctactatttgctaggcactgggttggtactaaggatacaaaaagaaactatccttgcccaaatggcgctcactgttctgtatacacaaatacacagttgtgaatcatgataaaggaactcagtaagatgctgggatagactaagacaaggggaagcttcagggaagataaggaggcaacttaagcatgaacacgagtcacatccaagggataaggggtttggggtgggtattccagggagaggcacaagaaggctgtcgtgaaggtcccagaaaaggtgatagaggtagggagtagctatagctggaggttagccagagggggcagggcctcgatgagaatggaaagggatttggactctattctaagtgctgtgggagccatggaagggttgagaagtggggttgtgaggcgttggctcacacctgttatcccagcagcttggtaggccgaggtgggcagatcacctgaggtcaggagttcgagaccagcctggccaatatggtgaaacccccgtctccaccaaaaaaattaaaaaattagctgggcatggtggcatgtgcctgtagtcccagctactcaggaggctgaggcaggagaattgcttgaacccaggatggggaggttgcagtaagccaagatcacttcacatcactgagtgacagagggagactccgtctcaaaaaaaaaaaaaaaaaaaaaaaggcccggcatggtaactcacacctgtaatcccagcactttgggaggccaagtcaggcag

SEQ ID NO: 55598 - DNA, 2247 bp, Homo sapiens
ggcaactgagatcagtgtatgcatgtgaaatacatatcgaattttcaagactcagtataaaaaaatgtaaaaattatctgaatttttatattgactacatgttgaaatgagattttggatatattacgttaaataaaatatattactaaaattaatttcctcttttttttttttttgaggtggagtctcgatcgatccccagtctggagcgcagtggctgatctcggctcagcgcaacctccgtctcccgggttcaagcgagtctcctgtttcagtctccctggtagctgggattacaggcgcccaccaccgcgccgggctaatttttgtatttttagtatagacgggttttcaccatgttggtcaggctggtctcgaactcctgacctcagatgatccgcccgccttggcctcccaaagtgctgggattacaggcgtgagccaccgcgcctggcctcatctgcaattttacttaaatcacaaatatactagatcttcttacatgcttcgaagaactaaaaaaaataagacatgaattatcacaatgattaccgaattaattgtaaatttttttatttaaactagtcacaaaggtatcacaggtatgacttacacctaacgggggccaaaagatgggttgcgaaacgaatgactgaattatccctaacaatcttgggaagaaaacaggattggccaggcccatcccgagaggtccacgtcaggcaggggccccgcccaccgcgggaccaagcggctacgccttccaagttttcattcggggccgcgccagcgctgaggagagtcagacgccagatggttccgaaggtcctgcaggctctcggggcaccctacagccgacacgccaacaaaagcttcggagccgccaaccccaaaacggaaacaccggagccacaagctgagctcgcgtagggcacgctcccccgggagtgcttccgggacagggggcggggtcgccggaagtggccgtccgccgtccgctgctcgttgtttaagcggctgacgggaaggagaagccagagctccagcggcgccgcggggcggcagtcaagaccagagccggagccgtcactcacctctggattagcctgaagcggagactaccggctgcggagcggcggggcgagacacttgctcgccttttgaccccatcatgtcgcggggctccatcgagattcccctccgggacactgacgaggtaagtgtcgtgtatggaggcgggtgggggccatgaacttgtacgatcgcccccaccgacttcgctcgacttcgtttctgaagcgagagcatcctccttccctaagagccctgatcgaaatacctggccaaggtctgatcatcatcttcttcagcccctgtgccctctcaggctgggggcaccgcgtctctgcagcctcagggccactcggagaaggagttcttgaaagttcctctccagcctgttcgaatttgacagtgcgctactcttttcctaaccaacccacgggagcagaggtgtgagagtacccgataaactgtaaaacacctcgcagattacagaggtgggcgctgatgtttccggggtttatatgcttgctgctcaaactcgagatctttccctgggaatatataggaggtcgcctcttctcccttagaaactcgagtctgtcatggtgcgctgtgttctctacaccaactctccttcaacgagatatcccaagatttagccgcccctgtgtgctgataaaatttaacctcctctcgcttacctatgtctcattcatgggtggcctgtggcttgtctgagtaaagctctcagctttgatgttcagtcttcttgtatatcttttatttttattttttttgtttgagatataatattgaggtataaaattcagtggtttttagtgtattcgcaaagttgtatagtcattacctctaattccaggacattttcctattattatttttgtgcttacagtcaggactgtctgttacacgcaggtgccacctccatgattaatgtgtgcagtggcattcaactttgcatggcttgtagggtcatgcatctcaaggagtcagacctatggcataatagtctctagggtgcttatctgcactttacttggattctatgttaagtaggattttgttttgttattttttagtaagcagaccatttctagtattttatagttccagtgatctggggacaagtagcagggtttgtttgcttctctgtgctttaac

SEQ ID NO: 55599 - DNA, 625 bp, Homo sapiens
taaatttcatgtttagtaaatacttgttgcttgaattgctttgtggttatttgtgaatttactgataatattaaatataacttagaccatcttgatgaacgtgtctattaaatgtaatgagtggcataaatttgtgtaaatcagtcaatatgcaaaccttttctcagactttgtagcacagattaaattttttaagagctttatttcattagaatctctttttttaaaagtgaagtattttctcgtttcatttagatacttcagttatttgagtaaagtgggagataaaatgagatttgatttggcccttgctgctacagaagccaggtaatgttactatttatggaaggtgactttgggtgaggcagtgatatttacatgggctgggaaagtgccacagtagggaacagaggttcctgaccttccacaggtcagtctttcacacttctcttggggactctctaatctttgccaggactttttcctttcagggaattggacaaaattgccttagtacaagtacttgagttctgggggaaaatacttttctattttacttatgtcagctatgtcagcctagtcaagataaaattcatgactctgagttatatgtaaagataatgtt

SEQ ID NO: 55600 - DNA, 3022 bp, Homo sapiens
tgtgttaactactttttgagactggccttttcaaaaggattccccaaaataaatctacaagtacctgaaacgagaagcacccccttctgcaatcgcactctccactttggcggcttgacaacgaagaatcttcaaaagaataatattaatagatggggtggggaggggaggggacaggagaaatgaaatacctggaacgagaaagagcaccaaaattagacactgctaacatacagatctataagccttcattcaattacaacgtatttcagatcctggcactgtcactgcattgcagatctgtaagactaacctaaaatgtactcaaaacactgacaattacattttgtttagccacctggaaattccccggtgttcaaggatgcaaagagacttcgtagaacacaagagcattttaaacggctcagaacgaatcttttgaaaaagccacattctactatctttaaaactgagcactgagatcaatagaaaagtctaactacagacacgagcaacatcacgtggaaaatgtctgccctaggaatttttactgccttgacgaggccagcgactagatgaggtctctccgaaagctcttcagcagttttcccctgtccaccctttcgcctcctccccgtggagagctcgtggaaagacgcgcgagagggggccgggtgtacaggactagcacttgcaggcggaagaccagggccacaacatggcagcaggaacctccgccccgtttttcccttcctgggaacaaaagagcggagcattcctcccacccaggcgcaagttagggaagtgcttccgacaacctccccgcgaggcccgggtcgctcgacggggaggagcagctgaggccacccccgccagcccggcgcccagctctttgttctccaagcaggaaggcggcctcctgcccacccgccgcctccaagcgggccccctcctgcaccataaatccccccgggactgacaaccgcctcgccacggcctcctctgctgacaaaaggggcagaaatcatcactctctctttcctccccgacgaagggcagcccctgccgactccaggtcctacacacctccccgccgggaggccaggctccgggacgcctgcggttccctggtcccgcgccaacggcctggccttccctgccggcccgcgtgcctcccgccacggcgctagcggtccgagccacgctccctcgccgtccgagcacagccgtgcctcggtccgccacggcctcgtccctgcaggcgtcggccatccggccatgaccgcacggcggcctggccaacactgacgttttccttctactccgtcagcaacaggaagagagaacaaaagccaagactttccaggtatctgaagcgcagaggaaatgctaaaaaagggtcgccccacccggctccgcctgcggccgccattttgtaccactcgagaagaagcgaccagggacggcggccattttagagcgctccactcggcggcggcagcggctcaactcaccttcaccgagaactcagcagctgccaccgcagctgcctcctcaggatccggtcgtcggggatagggaagggaggggaaaggggaacggaaaacaaaaaaaagggggagggaagggggaggaaggagtcggggacggcctcaaactcagctcagaggagtcgctgctgcagccgccactcggtacccgctgccacctccatagagctccgactcactgctggcgctaaggcgtgtctgaagccgaacttatcactcttggggcagccgaacccaccagagtctccccgaatggctccttcgccgcccaatcagcggcccggttgccgtctgccaccaatccgcgcagggcagcgaggaggagccacagggctgagctcggttgcggcgcagccccgccgcagtgcgcaaagccatattcgcgaagtctctgaggctgagccagtggcgtaaggggcgccgagcgctgtcgagatgagggttgcgtgcgtaaagccggagagcccttttgagtctgcgttggcgtggctgctgcttcttgctccagtccctttgttcactgagtccatatgccatgctccagttgtatcatccccttttccctcgacctcgttttctcaccgggaatatgggaagaaaacgcacccttacctcccccgaaccctgtgcgtggcgagtgagcattgcttttcttggcgccccttggagctgtggctgccctcgcgtgcctggcctctcccggggctgagcccttcgggttgaggcctggagcccccgggcgcagcgccgggacactacccggctccaggtcctcggcttcggcagccttagggaacccagaaagtagtggggaggaggcgagacgtgcgcccggatgccaaaggggagcttcattcagctccttattggcccaccccctgcagagtgaatgagaaagtgatgaaaggaaggggttgattttcttcgaaccgcacagaagaagctgcttttcccataggaatgtccggctggcggtcaccgaggaaaacaccctgtgtgtcagacttccgcgggtgtttggaggatttcgaattgctagctcctgtttttttttgttttttgtttgtttaagtgcacgttaaacattgtcagttgtgtattttcattttatttaaggttcaccataagaaataggattaagcttttcaaagccggcaagttgaactatttatacttaccaggtaatgtattgatgagtaccttattccatcgtttgcgacattgtagctatactaaaatggagtcatacttccataaacttaaacaacaaaaatgtccccatctccattttaacatgtagtacttttacagtgtatagtcaaaggcaagaatgtgtgtgttttaacatgaatgacttttaaagtgttcagtaagaggcaggattttcaaagacccaaacttaacctttgatgtgtcaaaacagctcttggtattagagcacctggtccttaatacaattttccggaaaattg

SEQ ID NO: 55601 - DNA, 2716 bp, Homo sapiens
gaagcagttctttcactacaatcatttttagccccccagtgaccaatctcctcaggtaaacaatgtctaatgactgatgattgtttactgtatgccaattactgctaaatccctcatatagattatctcatctatgaagacacaaggattattaataaccccactttagagataaacagacacaggttaacacatctcgctaacacctcttgtaagtgaaaaaccaagttcagagcccaaaaagtttgactgcatagcccatgtgtctagccattacttgggtgttcctgaatacttttaattccccaactactaaaaaatctcgttactaggagttgggttatgcagcgaaacggatgaacaatggattataactgccagaaagtcgagggtctcatactagcaacagcataaagccctgcttcttattgggagcaaaaaagcagattctccttccacagtctccttttggattttgcaacggagaactctgtggagctgctggttcacgtaaaagatcaggatccctctcgttgccagaggacacagaagagtaggaagcttttgttttcagaaagaaggtcctcaaccccacctcttcgaaggtgtttccccgaatttctcgaggacaaagaatctggactcctttgagagtaaagtttcctttccactccctgaagagcggggaaaacttccgtctttagtctccttccggttaaactgacaagtatcacaatcctttctcccctatcttcgggcggttccggctgggaacaataccctcagggtcaggaggacaggatctgagtgcaggccagccaaaaaggtgggaacagatgctccttccaacacctaaatgcttttttaaacggtcacctggatgtgcagccagggccaactatccctcagctcctccctgtcacaggtgcgcgctgcccacagattgccacgactggggggctccctaccagtcgcagcccaccctcgcctcaggtcttctctcgcgtccccgggcggccgcctgcgctaacgaccacatgaaaacgtctcagcacccaacaccatctctctatttcatctccatcagcgatggagagaacggattttgccgcggctgggctgcacagcagcgccgcggtccacagcagagcccgcgaccgccatcttaggcagttccaggaagcggccatttcagagcgcaccgcttagccgcggcggcggctctgcttctcaccttcaccgaggcctgaacagggtcaacagccagtcgtcgtggactggagggggaggggagagagggaggggaatgaaaaacaaaacagagaggaaagaaggattcggggacagggtgatgctctcagctcagggatatcgcctaggccatctccatagagatccgattcgcggctggcgcggtcgccggtctgaagataaatttagcactctagagcacccgaaccctacaatcttcacgagcgactctgccgccgcccaatcagcgccagatttgcgtcccgccaccaatccgcgctgagcagcggggcgggaccaaaggaaaggaccaagctcggttgaggcgcggcccagccgcagccgcagtcacagcctcagccgcagcggccgtgctacctaggtgatagcggagcggctgggtaggaagcaattgttctcaaacttcactagccccgtcggcgcggacgcttgtcgagaatgcagattcctgggtactgccagatacggttggtgatcttgtagggctggagtggaagccatgaatctgcattttcatcatttctggccctctgcccgggctggggtgattcacggggattcgtagtggccccaaaggagcacgcagaacctcggctgctgtgcatttatcacctcttttgttcccggaggccgcaccccaggtccagtttacacagctgccaactccttttcttggttcccactggaatctaggaagaaaactcgccctttacttctccgccccacacccgacgacggagtgtctagaggtctggtcggccttggctgtgcggagggctaggcctgacgagcgggcgctgatgcggcgcagaccccgccggacctcttggtcggcccggggtaggctggggagccgcgggaacaggactggatagggaaagcggcaccgcagcgtccacgggcaagctgaaagtccgcttgatgtctttgcatcacagtggcgccctccccgcaggaacgcccggccgcctgcaccgaacgtttgcctgcagggaacggccaacccgccctgaaatactctttttgtgggctgcagctttcgggtattttaagccatggttctgtgcccttccttgttttcaaaaacaccacagccaaaggctgcgggttgtgtgctttcattttgtgttaagttctgtggtggagacctggagtctgtttttccaaataggcaccttgaaatagatacgcttcttaagcggggaaagtacgagtaggtcctattatttgcaatgttttagcctttccagactccgtacaaatgactaaatgaagattggatcgtattttcaggcactgcaccaatgatagaaaattctcaacttggggtcaaaagcaagggcagctttcgtttttcttaaatatgcttctgatcaaatatctaaagtgttgaaagaaacctaacccttaatagcacaatttacaggagtgcataatttcctag

SEQ ID NO: 55602 - DNA, 866 bp, Homo sapiens
tttgctccattaatcaaatatttatatttagacatatgttaaaaatatacatcaagaattatatttgtcctgtctgcttcatatcttccagaaattcaacatttatttgggggtcatagaattcttcctgatttttttagtgttggtatttttttttctttttatatctttattatttcaatggcatttttggaaaaagtggaaaaactttgattccatttgtcatttttttaaatccaaaagtatttcttctatttggaaataatgggaatttggactttgcactagtttggatggatctttctcccaactagttgacttgaatagtgaggttttaggtactttatgacttggaggtgcactcttcacctcactgtcaactttggttgtgctgcttccttccagagttcacatcaagggcagggaggttatacaagccagagacgtcatggtgtatcagtctttctagttggctcaatcccagagcaatgctctgtttttactctaaacaatccctcactgaatttggcagcagggattgagtctggtttttaaggtcctgtttaaaaactatctatccttttcagcatgttttcattacttctttcatgttttctggtatgaaattaagataaaaatttcttttcaccaagtttgaaatcaaacaaataaatggaaatctttgtgggagagctattggaaggatggttgtagcatcaaaggaggctatgtatcattaactgactgactaatgcagaattcaagataaggttatcattcacaatgagtttttttttttattgcaattattagcaacatatcgaggtcttcaaggccaggaaagattagactctgtattgtattta

SEQ ID NO: 55603 - DNA, 1873 bp, Homo sapiens
ctaaaggattccactggctacagcctttgaatttcttttttctctgggccccaaacttccttatttcctagattccagaggactgaagcatatggatcctttagatccctcttccacaaagagctgaaatccaagtgtctttacaggtgaagagaactgcaaaggaattgtattagaaaggagttattagtggagccaggagaggcacatgactggctcaggaggcttctccttctggcaaaagcatattcctgaatttaaccaaagcggcatcagaggctttactgagaaaactgatgaggaaagccaggtatccttagcatgttattgaatgtcaacatgtccattaaaaaggtacagtgcaggctctgtcaaaacatggggttggtggacaaggtaactaagatcctcactacttctgggtaatggaaagaaatgctgagattcacttgggttgtggtccatagttttacctgcaaggtgactcatccatgggacagtcaatcattataatcagggttaatcatttataaaaagaattttctgctgagacagagcagcttcatgggatatcaggccagatgttcttctaagcatttacagctctgtgatgaggttgctattgccccattttatgtttatttttcaactgatgtcatgtttttcaaagtggttatgatttcagccttgtcattcctgccactaggcagcttccaaattgttcattcttggcaatgtttaatgccatgtcccctgtcttgctgtcaggggcagctcatctgagctgccaagagggcctgctttattgctcagccagccaaggcctaagctgctttatgacatttcaaagtgaattgatgatagaaatttcaatttgtttcagaagagagttatcaacagacctagagctcagaaaatgagtgaccaggtctttaaaaggcgttgatttgagtgtacatagatgaaagacaccctgaatgctgtttcagcatgtgtttagtctctgaaatttatccttatttatatgtagttactgcttctgaagaatgcttgggtagcctaatactgctgattagaattctttcttgtctactttgataaatgtggtgatcataggttgtttttgtctgtccctttgggggactaccatacttccactctcagtacctgtggttttgatggagctaatttcagacctttgtcccaggggtaggcctgcccagtgagacacatggatttgtcttagggatggacatgttagctgtatcggtcaggatcttggaaacagatgacactttcaaaatcggttatcaaataacccttccatggaggtgtaggtggagtgtgggaaaaccgtaaaggatagtgcagtttctggggctgctcacagtagggcatagtactgcttttaggttgcagaggcaaaactgggaagccattactggaactcaaagagagaagatgtatggagaagctgcaggcaggacctgtgactattggctgagagatatagccagctcatgtggacccttgcaaggggtgctgggggaaattaacatcctgacttcattcttatctcttcctccagcctcccactggtctcactattgacaatacccaaggcaaggcacagaggaaaggagccattgatatatccaatctctcacctaccgagctggaagaagagtagagagtggccaacctcccagctaccaagctcaaagaagaggagagagtagatttggaggtcaagctgaggatatctggcaaatgagccaatttaggccaattgagagttagttctgggacttttaatggaacaatcgggcaataagttcttctttctgctgaaatttctgtgaaataggcctgg

SEQ ID NO: 55604 - DNA, 3829 bp, Homo sapiens
aaagtgtaagtgaatataattgctggagaaggagaatttattacagaaatcttgcacctctttcatgttccacctgttgaagaagtagagcttctggaagggtgcacatagatgtggtgtgacttcagcacaagggtcagtcacaattgtctgcctcattcatttcccatgagaaggaaaaaaattcaaggaatgttaggaggtgtttgggaatttctccatagccctccaggccttctatatcagattaagctggtaactgaagaaacacaaaccacttttatatgaattatgatggctctagaaatattgctattactgagtcattcaaaggtatagccaaagagcaattccaggcaggtgaaaatgagaagttttggattactccactgtttgaagttcccttgggataaatgccgagcatggtgtcaacagcagtgtgacttggccctgtgctctggactttgcattatccaggccccaagagcccagctctgcaacccagagctccctgcaaatatgatctgttggtaaaagggaacctacacgggcgacagacggagcagcctccagaataagtccttgcttgccttcaaaatcctcatgctaagggcaggacttctgcgctatttattctaaatccccagcacctgccacagccctggcctacagtaggtatcaacatctgctagaaggatgaacagatggatgagtgagctggctagaccagttccagctgtctccagtactggcggcctggtgttcatgagtgtgcagagctgtcccttagcaatgaaagacagcatgacaaaggctgctgtggactgcagaggctaccagctggagatttggagtcagccacatctgggtactaattttgctctgtcacttgttagttgtgtgaccttgggccagtcatttgatctctgagcttctgtttcctcacatataaaatgagcataataaaatctacctcacttggctattgggagaatgaaatcagataatgcctgtagaatgtttagctacgtacctggcacacagtgaatgctcaacaaatgggtctgtctgggattctatacatttttttttgagacagggtctcactctgtcacccaggctggagtgcagtggcgccatctaggctcactgtagcctgtgcctcctgggttcgagtgattctcatgtctcagcttcccaagtagctgggattacaggcgtgcgtcaccacgcccggctcatttttttctatttttttgtagagacagggtttcaccatgttggccaggtgggtcttgaacccctgacctcaaatgatccacctgcctcagccttccaaagtgctgggattacaggcatgagccaccgctcctggccttgattctatacaattatagatgcaatgctgtaggctagagagttagcttgggaggaactgcactcatcactgtgtctagaggaggtgatattataggttctggagcctgcaatgtcagccggtgtggtggtcagtgcttagtattgtcctggaaggggtgtaagtcatgaatcacgagtgaacggctcagaggtcacatgtgtggggacaaggtaagggcaaggctgttatgaggtcacaatgctagattctcaggatgagagttatggctgagtttatagaagatgagggatggaacggaccttatttggctctagtctgggccttgaatttgatggggcttccttatgaatcaaggtatatttctagtccacagggatggactctccctgccaagtgccttcatgggaaccatgtgacagttaaatttgattcatgcaagatgcttctctgggcaaatttcattgtgagttctacatgccaggaattcctacaatctgtcatctgagaaagcccccagaatgctgagacaggagccaagctctgccctgtatgccagaggggtgatgattctgtttgtgaaaatttagttgctcagaaatgactgatggtgctgtgactgattactgaattatacctttggcaattagtcattcactcaacaaacatttatttctcttctttgctttcctctcagatgaaaccatagcagtcagagaccatacattggagcccacaatgtgtcagaagcatggcatgctctgtgcagcctttttcatcctgtttgcttccatatacaaagtgtctctgcatatgagtcccaggaggtttggtgactttttaatattccccagagctacctttcaaagcagcgaggttacttgagttccagcctagaggctggattcaatgctgagcagcaactctagagagaagatgcagactgcagctgttgtttagcatctttgagcattaactattctcactctcagaaaatggagtatttagagagcagtcactggaggaggccaaaggttttagcaagagaactgttttacattcaacagctattaaacaagtcgcacccttcttcctgcagtctttaagtatggtcactcagtggagctcatgggaataaatacacttggaggagatcaaatcccagtgttcctggtctatggggcatgagttccccagttactctttctccaagcactcagcaaggtgtggtgattctgagctctgaactggaggttaggatattgaagttcaaaattccagctctgccacttacctgccagttggctctgtcagggctgttgctcccttgtttacagaacaagggctgtccctagagtgactcccagctccagcgttctagaagactgagttagctctgagtgtcatttcaaattctggaaacaaagtaatgactgttaaaattagcatactttggtaactttgagcaagggtcacagacattggcactggctagcaaaatctcagagctatggaatttcactcaagtgcgaagtccccagaactacttatttgtcactgatctttaatgtgaaattctttgacagataatttcatcatgtttgacagacttttattaaacaaatgctctttaaaatgattagcaaactctagtcaatctttttttcatttttattaatagtagtaaaaaatagtaccaactattcagtgtgtatgatatactaagcactttttacactgtaataagcattacttcattagagccttccaataatcctatcattgtttccattattatttatttatctatttgagacagagtctcactcttacccaggctgaaatgcagtggtgtgctctcggctccacctcccgggttcaagccattctcctgcctcagcttcccgagtagctgggattacaggtgcccaccaccacaccctgctaattttttgtatttttagtagaaacggggtttcaccatgttggccaggctggtctagaactcgggacctcatgtgatctgctcacctcagcctcccaaagtgctgggattacaggcaagagccaccatgccccacccattgttcccattttatagatgagaaacttgaggttcagaggaattctgagaggttcccaaggtcacatcattagtaaatggaggcagtaggatttgaatctggctcagtttaacttctgaatctatgctcttttcttatggctagaaattctagtgttttgtatcacttatgaccagcatcattataatcaaccacacttgcaaagtgtctgctatgagcagaagatagaggaggagaaatcagacatggtccttgcctttaagatcttcaaatctagaagacagagcatgtctgtaaatgatgcaacaacataaagcaatgagtggtgttgatagcaagaactggaggggctcagaggcaggaaaaa

SEQ ID NO: 55605 - DNA, 1881 bp, Homo sapiens
agaaattatttcagatttaaaaaaagttcattaaaagaaaaaaattacagcaaatcaaaggagattgcacacaccatcccttgacctagagttctttggctacagaaggaactcctattcatccctcagaaaccactggggtctcaccccctaacagagtttagcatccatggtaccttttatcagtagaaagcagtaaagtccattttggagtcaatcaggcagtttaagaatccccgcttccgtattactattagctgtgtgactctgagcaagaagttacacaactgagcctcggtttcctcctctgtgaggtgggataatagtagcttttaatagtagcttctgaacagatgaggactgaaatatatgtgaaatgtgttgagctgtttgtcgcgtgtgtgtacagaacgtgattcctttcacaatttcccacgatttgtgatttcatttaccacactgtattcgccacacggggtcccgagggcagagactccgctttactgatctctggtaccccatgcctggcccacgggggcttgcaattaggtgtttacagaagaaaggaacggaacgacttcgagggctctgctggaagcttcggcagcggctccgaacgcttcccgccgcctcgcccggccgcagccggttcttcgtgctcctcgctcggcgcccactggccgccgtcgccccgaggctgcctagcgtctcccctcagcttctgctcggggggcagcgggttttgcccgccgctcctccgtcagaagggcggccagggctgggacaggaatgaattccctgcgggtccggcatcctcctccagcctggggcgccggcagcgcggcgggcagtgctgggactcgtggcgcccgcgctccagcccccgccccgggccgctactcttcggcggggcccgcggggcgcaggctgctctgccgctggggctccggtccgcctgcactgtgacgtgggcagcagctggggcgggcagtgcctcggtctccgctcggggacgcggtgattttcttttttttttccgactgccggagcccgtggtggtggtgctggggggcggggtcggcgtgggcagagctgcgggggctgccgcggaggccgccctaggagggagggggcggaccggggtgtgaggtgagcggccgtaatgagcactcgcaggagcaaggggcccggcgcgggcctccagggcgggaggccctgacgcggggaggaggcggccgggcggccaagggcctccctggggagtgtgcggaggccgggacggagcagcgcgtaactagggagaggataggccgggctggtggagatgcggggagagaccagccaaagctaaagagccaaagcaaaggtgctgcggggaggacagaggagcgggaggaaaggggaaggagagaagaaaagaggcagggaaacccggagagaaagtgggagggaggccaaggggacaggggaggggtgggaagaacgtagggcggggagcagaaaggaaggagggatccagaaatggacccggagggagagaggaaggcggagagcagctgtgagggagaggcttggcgggagcctcagcaaagaggaggctttgaggaggcaagtctggaagctgagagagctctctccatgctttgccaaataaaaaggctcaacaaacaggaacagtgcattccttggtactcctgtcccttagtcaatagcaggctagggctggcctcaggggctgctgagtacttccaggtgacagaacaggaggaaaggggtcccaggccccttggaaggagagcggggcgcgggggcagggaggaggggaaggaggtggtggttgggagaaagaggaggaggtggtggtgggggaaggagagtggg

SEQ ID NO: 55606 - DNA, 856 bp, Homo sapiens
tacagtcttcctgcggaataagacaggaggatggtgatagtccgagacctggtgctcacgtgctctatgagatgtctggtaaagccctggggaggacacaggaagagtatggcctagggagcctagtgacccaggggagaaggtactggatctcctgcaatgatgacacatcatcaggtggttctacgaggacgtctccagatcacagcagcgcctcctaggcagagacacaaagtctgcaggctcctctctccaggccctggggactctctctggggaggagtaagctatgcacattcaagccaagagccttcttgccagggctccagagctcactcaccctgaggccctcccctctttggctatttgaaattcctgactgatgctgtgaagaaagagaacattccagcacagagaagtctttccccgcagcagctgccaaacaggctctttgccgaggtacctccctgctgcctgccagccagccatatttcaaaggtcacaatttcctccctgtggttttctacagagctaaagtctccaggaccctgaaataaattaaaatattgattgattcttaatattctctcaaatctctcaaaatctccaggtcttatataaatcagtgtgccggttccagggacttattcaataatctgcaaagtatcctggtaattacttttgggctgaccccatggcagagggaggccacctttccatcatttttagggccctgggtacagtagctgatcagaggactctcatttcttattttacttactgaacctcttcaacacagtgccttggacagcacgaggcagcccacctgctggaacgagtctgtcgggcagacctg

SEQ ID NO: 55607 - DNA, 2547 bp, Homo sapiens
gtatccctcctcttaatcttcacaaagcctctgtaaggtagatggccttaaccccattttacagaagaaaaaacaggcttcagattaaggctgggaattttcaaaggctgcgtgtctgcaggctgctaggagggctctgtgaggaagactggctaagccttcatttacataaaaaatcaacaactttcttaacattcatttaggaaacagaggtgcattgagtggcttccctgtgccaggcggtgcactaggaacaaggggatacctggagaataaaacaaaggcctctccctggaggaactcaccatctagtggtggagaaagaccatcaggtgtaacaattcacaaagaatcaccaaatccaagagctgtgaaaaaatcagacaaggtacagagatctaagaataacaagtaaggacaccttagataggatggtcaggaaagactgccctaaagaagcaggcttttggctgaggcttgagggataagaaaggggagaagggaagtggggggctttggctctaatgctcgggccctggaatgctgagattagatatctcccagtggggagatgagtaccccaattcctcagagaaagtggagaaccttaaaggcaggaggcatgtgcagacagccctcacaagccaggagggagctgatgagcctgtggcctgtgttcaagcccagggtggatggggaagggtagcgctgattgagagatattttcaaatctcctccaaccatatcttagaaacctgccatcagtactgtcagggagaaaactgcaaattagattcagttttcctttagatcctaaggagaagagtatgcctgggtagttgactaatcaggaagtccatcccatattctcattgcaaccttcactcatgagcaagtgtgcactgcatgttgcctgtgtgccaagctggcattacaccaccctgtgatggcttattgttctgtctctgtctagagaacttcctgagagcaggggccacatgtttaactaaactagggagacagtgctgagtcatggctctgagcatggggtctgaagttaggcaacctgggttccaaaccaggttctaccactcggtaattgtgtaaccttgagcaagttacatacctgccttaagccccagttttctcacctgtaaagaatagcagtgcctacttcaaagggccattgagagttttaactgagcttagatatacaaagcacttagaaagatgcctagaaacagtaagcaacaaatgcaagctacctttaataatcatgaatgtttgttgagagattactccagtttgaacgagagaccaatattactgagcccagttctgtgcccgatttggtgctaggcacatgcaggtttgttactttatttaatagcacccgcccccattttactgatcagggaggctcagtgaggtaatgtgacttggcagagagcacagagccaaggcgggatctaaaattagctcctctgtcactgggtttggtgacctgtccccaaggccagagaggcctgggaagcaagactgtccaaagaacggtgggtggagggcaagagactcagcccctctctggttagtgagtctgaacattggtccactgtggagctgctaatgactgcttctccccagcctgcaggagtttaataaaagtcatgcaaaactcactgtttacaactctaattgtggagtttggacatgaagtgaagaacatatcatgtggaatgaataacaaatcaagcagctcctttttttttttttagcatggaagctgcaggagcagcccagagttcaccatcacttggtgcacagaaggttaacactgcagcactaacatctgtgtgcctataacatccgttggctccctccctgtctgcctgctcccctgaccctgagctgatgtgtccaggcaggagatggctggtctgcctctcttttgcaactaccaaaagagaaatggaaataaggttctttctaaaagcagggtgggaagctggctgggtgctcacctcacccagagaatgggcaccagctctgggtggcctgagaatcagggataactgcaggcaggttccagggggcagctgtgaaagtcctttgggctatgccctgtggaggctgtggattctaaggagtcagtgctggtagagaaagcagcgctgctgggtggtagccctcctcttcccagccttcgccgtgggagcagttgctcctggctgtgacatagtaaaacctacaatcatgttctaggacttatggcctacacactcaactattggtggtggggcctagggatatctttacatgtttgagccaaatgaggataagctggcaaggtggttttaagattacatcaactgacatactgaaagtgtctagcagagatggacacatactaattatatgtgtgtgtgtgtgtgtgtgtgtgtatgtgtgtatatatgtgtacatacagaagtaaatgcataaacagatatataaatattatatattaagacataaaaacaatataacccacagttaaatggtatttcc

SEQ ID NO: 55608 - DNA, 833 bp, Homo sapiens
cccccatgcctataccaccagctctgagggcacagactggccttgctcacagcctcctgcccactgcctcacaccatgatgcaagcagcaggtcttccattggtgtttgttgaataaattccctttcagtttccacaaaacacacgttcatgccacatcatgacacggtctgtagttcgtatcttcacctcaacactgaagcagaatgtacattgctgaagggcaggggcaaaaagagggaagaagagcatatcaagcaagacatctacatccttcctggtcatgccatcctcatcactgcagacactgaactcaggacagagggctttgtgctgtagtccaagtcaccttgaaaagaacacgcctccaagagctgcgtgggagaggactgctctggacccaagcccagagcttttgctgcagagtccagccactttctcggcctggcaacccagcactgacccagtggcctttgctcccaaatctgtactgctaagatgccctcccagagcacctggattttccagaattgggccacccacacactctgctccagtcctgccgcagccgggaccctgcctactcgcccagagcctccctcccctctgccctgatgtctgcctctgcacttgcctctctgctcacctctgcagagaagggctgaggacacagagctctgggagtcacactctgggaccagcccttccgtgtttaagctcctcgagaactcacaactgcacgagaccgagcccatgctcattttgagaacaggcatattctcctgtaaaattaagccataaaaacctccctttttacttttattcttgttgaaa

SEQ ID NO: 55609 - DNA, 1253 bp, Homo sapiens
taaatacttcactttctcaacatctcttaaaacccaattctgcagttgtgatctgagcagcagagtagaacaaagctatcacctccctcttttaaaacattatacttctattaatatagctcaagattacatttcaagaataacattatactcttggcccacaacgaaattaatattaaccagaaccagaggtattttcccaaagtactttagttaaagagtaattcccctttgtttgtacagttagtgtgttcaattcaatggcaaaatcatgattaagaatgtttattttaaccctttgtccttaagttgccttcatggagaacacattgtccatagacctctgggtctcctccacagaggcaagatcccaaactaggaaagttcacctgggcagggctgggcagggcaagctgataaaatagtgtcctggaatcataagaccccagtaaaaataccggctcggccacatagcgcctgtgggaatttgaacaaatttcctaaccttgtgaatgttcggtattcccctttataaaatgggaataataataacaaccccagagccacatgaggataaaattaaataggaaagtgtatgttaagcatttgtacagaacctggcacacagtaagcgagcaggtgacggctcgtgaatctttcgctcatggttagcaactctgggatggtccagcagtcatggcctacctgctcctgctggagccatctccctcctcctccagggccagctacagaatttgtggggcccagtgcaaaaggaaaatgcagtgccctgtttaaaaattattgttatgaactttagtatagtgacagcagagccttaaaccaatcacagagcctttcttcttccaggatcctgtgcaacaggctgtacactgtcttgttttcctaatactaatattgtcactgtaacaaattattacaaacttggtggcttacaacaacacaaatttatcatctcatcatgctggaggtcagaagtccaacacagttctcgctgggctggaatcggggtgtgcagcactgcattactttctcaggaagacctattttcttgctttttccagcaacttgaggctgctcacgttccttccctcataactgtctcctatcttcaaagccatcagtggccgatgaagtctttctcacattgtcatctctcaggttgatcttttgcctccctcttccacttttaagtgcccttggggttagattgggcccagccaatgaatcca

SEQ ID NO: 55610 - DNA, 3870 bp, Homo sapiens
tttttccccagtctgcctccctgccagagatgttggccccagccctcaaactgggcatctgcttctctgtccctagcctgtacccccatttcctgcaattcccaagcccaccccacattgaggcacccaagctgggagtctactcctccacccagttcttgccagcccttctccctcttcactgtctggtcctccagtgagttgcctggtgcaccatgtgacattcacctggctgtcagcaccccggccagactgcctcctgctgcttccagacactgcccaccagaatagcaaatccatgacacaggtgacagccaagccacacccagcctgccctgcgctctgggccctgctcatgggagcccttgtggacttggtggaggcagctcaaggccagcacatggtttcccaggaacttcccagaaaaatggaggggaatcactaactgtgagagcagaggctttgaagtcacacagtcgtggattccagtcagtgctccaccacgtcctggctacatgaccatagcacagtcaacctcccaaggccaaaattccccaacctagaatgcagagataataatacccaaccagcctccagagattgtgaggattccattaaataaagtgtataaagcatttagatcagtttatgtctcagaacaagtgcacagccaatggcaattagggttattatagcaagggaaggttattgaaatctctctttgatgggggctaaaagatagatcttgccaggacatgggctgatagtccaggactttggaattacttccctgggacaggccatcaggtgaatcatttgaggtcagaaatcagagaaattggacagaactggcaagcccactggacagggtcgtctatgctcacaaattcatgagggaagtaagagatggagccaggagcctggaatgagacagtgatcagaaaaaacagaagcaggtcagggacaggagaggcaggcttgggacacctgcccacatccccttgttggcctgtatggagtcaatgggtgtatgacacacctaggtacaggctggagatgagtaaggagctagggttctgaagtcttcaaggctggagtgctggggctatggactgccacctcctcatgcgatgctctcctaaaagcccatctgagagagaggagactgcctgggaacaaaagagggaggcttccaaaacataggctccccctaccatggaaggggtgctccagtggcaggaagcctccatcaccagaagcaggcagaggctatcaagagtagaaggggacttagcaagctcacgatcctgaaagcagagatgccagagacctcagtgtgagagatgcaaaaagatctgtcaacaaactcccaggtgccgaactcactgggtgcacatgcattaaggtacctctccgggccacgtcctccaaatgggacacccctgtaactcttgggataaccatcagagctaacacttgatgagtgctcactcctaccacgagccaggctctgtcctaagcattttctcttatcaactcatctcaccctataaggtaggaattgttgtcatcttcattttatatataaagaaagtgaggcatagagagaataaaaaacttgtccaggttcacacagaagaaagtgcagtagctggatttcagtcctgggaaggctctccccaggcagtggtcctcccactatgctatacagcctctataaggcaatgagctgctaaagtacgtgaagtacaaagacaaacatggcataccatctcggtgactgattttccttaaagacataaaagcaaagtcggaaaatttaaacagattaggatatactgaagaataaaatgcaaactatgcaaactcttctaagacacagcattgtcaggattgcagtggcttgcccaaatctccatctcagaacttgctcattcttctcccctactaggcatgcttgaagggtagcacaagcatgcatgatcttgaaggtccttgttatctctaaaaagatgtatgactcattcgtttggaatggggggtagtaaaaatctaaatcagtgaaccaactgaatcatataatatttaaaagaaatgtagttttattgctctcgaatacctaagtggatattactaagtaaaatgagatcagttaatggaaaattatgatccaaaattaggcctgcattgcataataatatattataaacatattaaagtcctggtgacaccacatggtcctaccttttcactcagtatgggcacgaaggatgacaaactcaaagccagtgagtcctgaaagatgaggtggagggcctacagcaggaaaggtgtaatatttgttgaatttctgccaagagtcaagcactgcgataggtcatttccttatcgaatgttgcctctcttcctcctcactggtgcaactccacagagcaggaccacatctgacttgacccctgctggactgccagctcctagcacagtaactgcttcttacaagggactcaatcgatcatttcaaaatacatcagttaataagtaacccatagtggttagacaagatgaaaccaaaagtgaaaaggttaaatgtctaatccaaggccacccagtgtgtcagtgacatcgaataaaggcctggctcctccaaactccacattcttttctctacaccaggggtggcaaaccatggtccaagggccactacttgtctttgtaaataaagttttattagaacacagtcacatccacttgttaacatattctctttggagctgaagagcagagttgagtatgtatgacagagatgatatgacccgagaatctgaaaacactatctgattctttaaaaacaaaaaaaagtgtgccacccccaacattttcccgagccctgtctgccctgtaccttagagttgactctcctgaggtaaggaggccttgcctctctgaactctatttaattttctttacttccaaagaattggttaagaacactggctgtggagtcagaatcctagggtttatcctccagctctaccatttgccagtttggtccacctcaccctgagcctcagtttcctcttctggaaaatggggttgataacaatagtgccttcttcatagaacatgtgtgaggataaatgagatggtcaggtaaggagcttggcacggtgcctggcacatagtaagctctccataaacactgctgaagcccgcacaaagcccacagccctatcgggccgccggagttgggacaggaaggtgaccttgccaaggtccccagctctagaagatgctgacgccttccagccccacatgaaggctttccatgtccatagacaagtggtctatgcttaaccagacctggactccactcccgtctccagtgagaaagcaggcctacatggtcatccagcaaaggggaccacctttgacataagggggacaggcaaagaggcctcagagaagtgtctgggctgggtcttctacaggggtcctggggtgtttggcatatctggtgatacccagaccctctgatgtctggcatctagggatgaggcaccttccaggattggactctggctgaagcccctgcaggcattcagacctacctgggcatgtctgaccaactgatgaggtgacttaagagaagcacatctccaggggctgaggactccccaggagggcccattcgaggcagagattgagcagggcacaatgaactctgtgagctgcaaagccagagagtgtgaaggggagtatttggaggattctgagcacaacacagaggctgttactcgccccctgccctcacccagccctgagtgcttgtctgggtcccagggagaaataggatgaaagggaaagtgaagg

SEQ ID NO: 55611 - DNA, 1588 bp, Homo sapiens
tgacacctggagctccttgtgaggaggggcagtgaaagagcaggtacgattaagattaattgataacctgtctctttctgaataaatgattaagcccattcctgtgtgctctaaggccatgccaacagacaattgtataaatcaatgtgctaagccctggaatgctcaagagctaatttccacattttcactctgtttcagtgaggagagagccctgggagcaggggttgtgaagaatgtggcttgaacattctgtagtcaacctctgagttgtgactcagtgagttctcctataaaatgccttcagaaaacctgaaaactcaacaaaagatgtgccccaacccctcagtgtggtggcttcctagaggatgagaggaaggccaggtggagggagtctggacggtggaaagttctgtattattcaacttcagacaaaaaagcaaaatggaaattgagttaaagagacagacagatatctctgtgaaacagactctctttcacaatcattttgaccctggggttgccactaactcaccattgtgacctttggcctgtcacattccatgtttgggtccaggtttcccagtttgttcccaagatgcaaaccccttggtgaaatacctcggcagactcagggcaaacctcatgtgttctcaatccgacagcaaggaaggtgccatcttattccttctccctcccgccacccccaaagactagccctgggtcctcctcatcaaatttgctttcctaagaccgtccctgagatgtagccatgaacatcccaggcttctcatgtttcccggcttttgcccagactgttcctccacttaaaatccctcccttccgcatcctgctactgaactcttcttcctcatttttccagtgcaaatgtctacagttctgtggccaggtagctcagccactggagttgtagattaatgagacctccgcacagaaatactattcaaaatacttaacaactggaacagatgggcactgcccatgcagaacacccaaccaatctgaacagatgttggtcaagacagcccatatggccatgccagcatgttccagtgaccattggccctgcccacaccaagggtcatcacaccatagcagggctgcctccatccctaactcactcctgggctcagcagggattagggcagaggatggacagctctttaccagctgtgaagcatctccaagggcagttctgtagccacaggatccagggttatttctaacctaccctggactaggcagtggcattgtgacttttgtaatctccaccgtcctccggcacaaggcactttagtgaaaggttgccaaagactgtgtcatcctccacggtgccaccctgaagcctgcttcacagctccctgcggccgttggaaagagggagacagtgtgtgttgataaggacaatttatgtgctgcatgtgttttgtctatttgctggtgtcccgagagaagccggcttgctgagccaaggctgcggcagccagagagacttccaaagacatgagacaaaagtgccctgaggcctgaggtggggcagggctggagtaggggccccgacagcact

SEQ ID NO: 55612 - DNA, 2794 bp, Homo sapiens
gtcaatgtccctcttttctgggaaggtgccgaagccatgggcttgttttgaagtcattagtcaggaagcactatggatgtggatgcctctcctgcactcacctgaacctccctgaaccttcccctcctggaaaggaactattctggacacctggggaaacaccaaattcagacggaggagccatctctactctggcaagagcagcaggtgcaaggattggaattcagacatccacgtgtaaacaaaagggagtgctcctggcgggggggtggggggtaagccttcagttcaattcgattttgccaaggtctgccatgcactggcccctgagcctggtgggcctgctaggtttacaggggaaccaagctcggccctgcccttaagaagctcacacacctggaagaaagcagggggcgcggggaggggaggaagtgtggacgtgagcgcgcgcgcgcgcgcgtgtgtgtgtgtgtgtgcacacccggcaccagtgctcctggcgcccggaactccattccctcccatgacagctcattgaccaggtcgcctcgggagagcgccctgcaacccccaccctccctttggacccccgcgctggtctggagcgcacccaaccagcgtaaccttacacttcagacccaacccaggtctgctcagccccggctgctcccagggcctgagagtggagctacagtagggatcggccttcacccggtcccgggcggctccgcggggaaggcgcagcccagggcgtgttcttccagtcttgggcggagtcatcaccacagtggacagagactccagcgctacttcccggcgttgacacctgctcctggagagggtcctggacccgcgggctgtggtgggggtagggactgctataggttcaagcggcttttcaaccacagagggctccttgcattccctatcgcctaccaacgggatcacagcaagactggggctggggctgatacaacgcaattttcctagcctcgcttgtccggcagcctgcgggtcttaactgccaatagtcagggccgccgcgcgggcatctcgcctgacgcctacagtggccaaaaaagctcgtttgcccgcgcgttccctcttgtacacacacagacattcacatgcacacacactctgagccggacttgtgtgcgatcccgagagcccgcgagcaaccagcccagagtcacacgcacatttggacacgtgcgcagcgcgcccccataccgccagctagctgcacacatccgctcgtgcagccctgcgcacacacgtgtgccccggggaagagcgcacggccgcagacagaaggtcccgaacgcaggcaggagctcacacgcaggccccacgactaccacgcatctgcggccccagagccccgccgtggctgagttgatgcgcaccagccccagcgcaccccgcgccgcgcggggcactcccgggcctcatgggcgacccaagtttccggggcgcccgtaccttgaatgtgctgcttgatgacattctccaggtggtccagccgctcaataatcttcagagtgtcccctttgtcttcctccagcttcttgtcgggcgccggctcctgcccccgcacatacacgctggcgatgtagttggtgacccagcccacgtagagcaggcagatgatgttagtcatgccgctcaggatcacgcaagtggacaccaaagttttggtcttcctggtgcacaccattctgggctccttcctccatatagagctcccgggggcccttccttgtcgtgcgccccgaactcccccgcgctcgcaccccgtagcacgtccggagccgctgggcacctcagcacctgagtcccgaggttctccaaagcccggtccgctgccggtgtagccgccgtgcccaagtttgcagctcctgccgctggccacccggagagaccttgacaaaggaaaccaggtggatttttttccaaattaaaaatccctgaacccttcctagaggggtcacgggtagccggcagccgcgcgtccagatgtgtacgtctgggaaactttgccactgcctgtgtcggcggccacgccgcttcccatcgccagcgccggctgccttggcggtccgaccggcccgcgctgctaggagaacagcggcagcggcagcggcggcggggagagccgcgaagcagagcggcccggccccctccgagcgacaagcgctgccaccaatcgcgctccggctcgggagaggggccggtgctgagcggcagcggaccaacggggagggagcggggggcggagtccagctcccaggccccacctgctggccgcccctggctcccgcccccagggacgcgcccgggcctccacccgcgcctgcacaggctgccccagacctgaagctcccggagagggcgcgctgccagtcccagcccttaggtcggcagcttcctccgttaggggaattccatctcttgctcttgggcaggaatctcctggttttgtggagggggtggggggttcgcacgggtcagcttctttcatccgcccggggcttctcgcattggtgccaccagtcgactcctggaatcttttcttggttgccaggacgctgagaagccaaggaagtgccagccccagcggcatccactccttccttggcctcacttgggcctccaccctgccctctgcccttcagccaccggcctcctgagtgtgtccagacctggccctaaacctggctgaaaggagccaaccctccggcaacctcccagaagcaacattggtgacctattagatgactctctcgaccac

SEQ ID NO: 55613 - DNA, 2556 bp, Homo sapiens
caataattattataaaagggaagaggaacaaaagggaatcctgggaacaccaaggataagtagacaatgagacaacaggaaaggaggagaggagaagtcggagagatggaagaaggaagacagcaaagacgccaagtgagacgcccgcacctggtgcatcgtagttgcaggataacgacttgctgaatgcaaggtggagccgtgtccctaggagggaagtgctcaacaggtcacagagaagttgtggaggatgagaactctaaagaggccactggaggctgggcgtgctggctcacacctataatcccagcactttgggaggctgaggcaggcagatcacctgaggtcaggagttcaagaccagcctagccaacatggtgaaacccaatctctaacaataatacaaaaaaattagccgggcatggtggtgcacacctgtaatcccagctactcgggaggctgaggcaggagaattgcttgaacccgggaggcagaggtagcagggagccgagatcgtgccactgccctccagcctggccaggcgacagtgagactctgtctcaaataaataaataaataaataaataaagttaatttaataaagttcatttgtatgaaaatattttgaaatatttttaatagtacttgaccaatggcttccaaaagggagttaataatgatctgtccagtgttctcatcttttgagatacaggctcatgaccttggaagggtggcaatcatagaagatatgtcctctgcagtgtgaagtttctgacactggtttacatgagtatgattagcagtgtactgtggtattcagtgaagctggccaacagtgtaagcattccaaagttcatgctttggcctggaggacctgagtcacaatgactgacgcaagacagtattgcccagaagttatgggctggtgggctgattaatggtctcagcatgaagctttgggtctctaaccctgacagatcattagctcccagcaaatgtccagcctctgaaggtcgtggttattattacaaaccaatagatacatgaattacataaaacaaagcaaatgacctttttatgtgctagggatatttaaaaactaagctgtatatttccgtgaatacagagtctgtttggagcataaatctttgctgaactttcacaaagcaaaagcagagactgaagaaccatacttcactgttaatgtctcattaaattttaaccactgcagtcatggttaaggagatatttttattataatccagcattttcaggaccttacaatttaacttagttccacattctcttttggtgaattaattatttttatattggtctctcactcaagaaatatgaatgtttgaagtttgataaaacttaatcagtacttaaggtaatttaaatgttagaaaagagaaaatcctcacatacagagtaatatattattatatggggaaactattaagcccctattgggaacaaacattgttcagcctctgtttctctgttgagtacagtatgtttcagtgaaaaatacatacggtaccaccataaactggtggtatgtaaggccaggcactgtggctcacacctgtaatcccagcatcttgggagaccgaggcaggcagattgcttgagctcaggagttcaaaaccagcctgggtaacatggtgagaccctgtctctaccacaagtacaaaaattatccaggtgtggtagcacatgcctgtgatcccagctactcaggaggctgaggcgggaggcaggaggatcgcttgagcccgggaggcagaggttgcagtgagccaagatcacgccactgcactccagccggggtgacagagggagaccccatctcaaaaataaaacaaaacaaacaaacaatcagaaactctatagtatgtgaaaaggaaaccaaaagcactactggaatcattgtctacttgtttagttctactttacctgggggtcggggggttgggctaacaaaaagggacaaatgaaaacagggtagacggcaacaattccactaataaggaccacgttagttactgggatggggctggggatcagagctccttggtactaaggcccagagggaaacttcataaccagatgtaactgtcatcagaaaggggaaaatgtgggaggtccttcaggaaaacaaactattgaagtttagaagcctgttaaagtttaatcatgtcccattctctttggccattagactgtggtaccttagtgacactttgttatagactgaattgtagcccatcaaaatgagtatgtaaaagccctaactcacgatgtgactgtttctgggataaggcctttaggagggaaataaagttaaatgaggtcacaagcatggggccctaagttgaaaggacgatggccttataagataaggaagagagaactgtctctcttcctcttgtatcccgccccagaaatggccccctcttgtgaacacacagccagaaggcagccatcggcaagccaggaagacagccctcactagaacttgaccatgctggcaccttgagcctatacttc

SEQ ID NO: 55614 - DNA, 3721 bp, Homo sapiens
attgatttccttaaatatttttagtgagaataacaaagatttttataccattaatatggaaaataactaagttattttaaatgtttatgtcatctttgtcttagcctttttacattttacaaatgttttataattctgcacacagcaggacacgtataaaacttatataagtatatggatttttttttggtaacgggattacaataaaaaaaagtttggagaacacaagtgcaggcagttaatgctgtgggtgttaggaacatgacaagattatattatctcagcatgctgtaagatcactgtatccataaaagtcttcatgaaggagccccgccgagtctccataatggaagcaggatttggagaaatgacttctgcaaactttgtttagtataacacaaagcaccatgcttactactagagaagattaaaattctctaaaaaccttgttaacggagatcacaggttgaagcatactgcagctctactcttggaaggctagctcagtctcagacttggccctgatggagaaggaagttccctggaagagggcaggggagcgcctctccaatgtagttgcggggggcgggcggtgaggacaccgcttcataagggaaggggtggctgcctccccaagcagggggtggcccctgaggtccctccagctgggggcccttgagagggagggtggggagaggggaaaagaacgtcaggagagtgaacgggagcaaataaaacgctgtccattctgactggaagggccagagccgtgtctaagggcgggggccgggaggtggcccgcggtggtgtctctaccaggacgaggcctggggtatctgaagaggggatgacgtccaggcgctttgctaaagggaagccagaagggtatgagttgctagggtcagagatggggctttcggctcgagtctttccctgcagggcagagagtccgaagagcccgagaaggcagggaggacagtgggcctggtccttccccggccggcagagggagtcccgagatggaacgtccagctctcctctaacgaaaagcgtttgcatggctgtctcgccaattctgtacctcccggggctgaggaagagccgaggtgactagaagctagcgacaagtgccggccacctccgacgccaggcgccgggcttggagcccgacgggccgaattctcgcgagagcggccgccgccatttttccattgattgcagcgggctgggggaggggccgacgacgaaggcggctgtggtagcggcggcggcggcggcggagccctgggtcggtgtctgcgcgctggtgtctgaggcccaggctgaggcctccgctattgctggagcgcaggcggcggagaggatgactgccgctgccattctctcttgagctagcgagccgccgccaccctccaccctcccccggcagggcggagaggagcggccggagtcagcgatggtgcccggcgaggagaaccaactggtcccgaaagaggtgaggggccccagaggaggttaggccttaggcctgcggccgctcgaggcaacacaggcccgggccggggttcggctgcgggcccggccggggtgcaggctcggctgtgggggaatgaggaggcgtgaggcagtcgggggtggacggtgggtgcggcgagcagttgggagacccgctggctctaggggccggggagcggacctcccgcctcgggttttatggggctggacgaataaaggagcggacgggaaagaatcaggttctgctctaggggagaaggtggccttttaagttcttgtttaacgtgtggagccgggagagatcatttcaaagaaaacattctggaacagttgcctatgggcacggcagggtgacggtgctgcttctgggtttgacagtggcagcgtatagctttcagcgcttgtgaaatctacacccaagtgagatctgtgggagggcagacttaactgttacgacttttttcaactcctgttacttggtagtactattggcctgcctaaatggggcctaccgaagatcgtggaaaagtagtacatgggacattaatgtaaaggaaggagataggagaacattaccacatggagagctgaactctttttttttttttttttttttgaggttgggttgtgtatgccaatttgagtgacttcttaaattcttaaaagcaagtgatacgagaagccttgactacttggcttctcttgaatagtagtagaagatttagggtagaatccagcactggccagcgaatttcaacgtattaatagtatctctgttggctttataaatatcttcggcgtattcaaatgtgtatttttaactggctgatcatcaggctaatgctttggatttttatttctcatataccttaaatagagacaagtgttggattgaaattaactgtgtgcgatcttgaaattaatgagtgatcattacagattcttaaatttttttgtgcctgttttacttgttttgtagcaattctttgttacttaagcaagctctgacagtatgcaagggtgatattattggagttatgtacctgtatgatacaagtattttcccagctttgtcagaagggcagtgatagttgttttgcaaggacgatttttgtaaaaggcagagagttatgtgtcagtatttgttcatcaagcgtcaccaactctgtgcaaagcagataaacagatgagttaatcagaattcttgccttgggaactttctgagctactaagaaagggaacactagtgtttgttgaactccaattagggactaggtactttaccacgtaagtaattcttatgcaaggaaggaagtgataggtgctgtaagaaaggtataaatgtgtatttcattttagagcttcatattgctggttttcatttttataaaaaacaaaattctttcttaattttttgaccattagaaaaatatcatataggtggaactctgctttaagaaaacccaacattagatttatttccctaataacttgatttatagaaaacatgatatgataatagataccgagctttgcagaaacatctgttgtgtaaaaagtgataacagcaacggaagtttaaagattaaatgcctgtccttttaagattaattcccttccctgaggctttaaattcatcacaacttatgttttttccctttcttctttttatggaccatatgcctttattgtctattccttagtctcatcttcagtcttctttttccctggttcctttcatgattcctggaagcatgatctgtggttcttaccttttatagctagccaactagctttttcttctttgatggccacactcattctttattaaagtgattgcctccagttccatatttgcttctggattactggaaactttttctgaaaatcaccagttatctcttaaatgaccaaattctttgactttttttttcttgcctcttctgctgttcgaattctctgcaggatctgatagtttttttaaaaaaacaatttcttgattttagtgatactccacttttctggtcattttcccacctgtttgtcctatctgcccactcatttagtcaaggcctttctcttcttttttgtattcttaattggcacttttgtgtgatccttgaagctccgggacaggtccttttaaacagtagtagaatcatacagtgctagagctaagagaaagcataatcatcatctaagttac

SEQ ID NO: 55615 - DNA, 3962 bp, Homo sapiens
cccaaaaaaaaaagaaaagaaaagaaaaggaaaaagaataaaagaaatacgtaagagaaaggaccaaaaaggaaaatcataaatacattttaaggttgttctgtgaagacatagactcttcagtctgaagaggtagataggaaaaatggtacaatagtaatctctaaaactacaaagtaattatagccaataaattaacactctttgccaaagctatgctaaacattttacatgtattgaccccagaacataactttgaggtttaaatactattacctgtattttatagtaaaggtaattgaagtacagaaaagttaagaagtcagagtcacaaatctaatatatgaagaggagccaggaattcattcaggccaggccatcaaattccagaaccagttggtcataatcaccatattaaacgatatcagtaaccagcaaacatttttgtcttcctatgacacagcactactagaggttaggaaagaaaccaaaatggcaataaaagcttgtatttgagtaatgctttagaaaagacttttactacatttgtcacaacaatgttatatgttatgatcacgtgggaaaacaggttgagggagattggatgacctgcctacagccatttatcagagtaaagtgacaaaactgaaatctagccataggctttccatttctaatccggtaatttttgcattacacccttctgttaagaaatttagtacctcgttggatagcatagacagaagcttgtttgccataagctggattattgacatagaggggcactccttaaagcttaaaaagtgacattttaaacaaattaagagaaatgctgcctcaaaactcaaaaggtagatagtaaataaagctcatcaccctcttcatactttcttctaatttgttcttgtcacattttctattaatgagcctatattttatagccaggaaaacaatgaacattaatttatttgacaagtcatctgagaaaaattcaacccaagtgttgatatgacatgggaatgttggtttaccaggagtgttttaaggcctcatcctttaccttccatgtagctttagcagaaaaaccagacctaacatggagggagccttagagccagggaggtccagtggcctgaggcagcgaggcagcactgccttattaactgagagtctggtttctgctttcttctacaatatgaagaccacagtcaatagaagcattccagatgtgtcctcatgagtggcttataaaattagggacaaaagattaaaataataagcattagggaaaaacgaagctcatcaaagataatcctattacaataccaagagagcttaaatttaagccgggaagaggtaagagtttctgatccatttaaatacagttcctgttaattacagcccaaccacatgataaatcagacatcttagtatgccagtcgtgactttttttctagtgaaaatctgaaaattaaataatattactaacagtttttgaggcaatcacgctgtatttggcactgtgctgaaagcatgataaatgaattacctcactgaagtcacattgcaacactcaggtgggcactattatcatctccatttttctagtgaggaaatggaggtacggaggctggcgccgtgtcccatatagtaagtaagcagaagaggtgggattggaaccaccagagcttacactattactgtgtagagctagaagtgtatatattttaaaagaattcctagaagcttgtttttgagtttggcaacctaaacaaagaaacaagcacttaaatagctcagaacattttaagctgtcagataaaacctatcagaaaccctgtgtccatgttttttgtccattcagtgtggtatattagctaaagtctaactgaaaaggggtactctttactgcatacagtgtaataaaaagtatatgatctgttttatttatactcagaggtttcttttacatttttgttcctgttttggttttttttttgtgcttagggttgatggtgcatgttgataaaagaattactctggcagctttcaaacaacatttagagccctttgttggagttttgtcctctcacttcaaggtctttcgagtgtatgccagcaatcaagagtttgagagcgtccggctgaatgagacactttcatcattttctgatgacaataaggttgattaaaataatcttcgagtagttagagtctattttaaatgatagatttgagaacagcttttactacttccaagtgaggtgaagtagataaactggaaggatttttttttaatgattaatggtaatttggggggttttttgttgttatttttcttcactcatctaacaaacatttgtgaaatgttagctgtgtgtcagttactattctaggtgctggggattcagaggtaaaagatatgcctgttctcagagagcctataatctagagtattttggaaagtttaaaaatgggatgagaatgggttgtttattctgctgagacagcatgtctaaaaaaatgtttttaacttatagattacaattagactggggagagcacttaaaaaaggagaatacagagttaaagtataccagcttttggtcaatgaacaagaggtaagtaatacgtttaagaataatataaggttactttttacagttactgaaaacatagaatatattttattcatagtcattttatttctctgaagcaaaggtcagcaaattttttctgggccttgcagtttagcaggccatactgcctctgttgcagttactcacttctgctattatagcacaaggagccatagacaataataagccaatgagatggctatgtctcaacattttatttacaaaagcaggcagcagtgaacttggccctcaggccactgtttgtcatccctgtgctctaaagtgttgctacaaatgctgaaatgagacaaaattttcctgcttttaaaaggaaaagaaatttttttgtgcgtgtgcttgctttctggaaacaatcatacagtgctacaggtgaatagcagttgcaagtcattttagtatgtaacaagcatttatatagtgtctactgtgtgctttaggtgcttgcaaatattaactcatttaatcatcagttaactaagatacaagcactatttcttattctcattctatagatgaagaaactgaggcacagagaagttaagtatcttggtcaaggtcactgcttgtaaacggtgtgggtgaatgatctaaacaggccgtgttttttaaggggtcaataaaatattttagtcctgtggtatactagccttaccacaaatacccaaaagaataaggcaaagatcatattttcagaatgttataacatcctattgttataacattctgttataacatgttatagcatcctgttgaagaactagacaaatgtgaaaaccataaatttatcataaaatgcctttattcatataagatattttatctggcatctgttatttctcttaatgtgacccattacagtcattttgatttacatatttaatctgagtttgtggaaactgtctcttttgagacaattggttaaagtatttggagaattagtatacatttccctcattttagtccataaaagtggttctttttgctttcaaaattataactgttaaaagaaggaaaatacaagtgtgttatcctatttaacctttacaatgactcagtgaggaagatactgttcccagtttacagaactgagacacagagattttaagtaaacttgcccaagatagctgagctcataaatagtggagctaaggtttcaaaaaaggaagatagactctgaaactcaggcccttaattgcaaataaaatgttttggtaatttttattttaatgtgttaatattaatgtacttaaggtataattcaagctctgattgtttatgtttatatttctagccatgcaagtt

SEQ ID NO: 55616 - DNA, 997 bp, Homo sapiens
tcagcacccaactgggctctggatggctgagaagctgagatcagaaataagaggcctgggagggaaggcaggggctctgggcttggggtcttgttttagtaaggaatgagtaccttgcagggcctctatctacctcttagccctgggaccagaagagggactccatcctgaagtgaaaggcacatcaaaaagcacttcaaaggctatgcctgcaatccatcacatgcaggcacagagccctggccagataggaccactagtgcccgccacctggcacaatttctctctagtctccttgacatagtccttatccctacttcacagatgtggaaactgagacttaaggatagaatctgcccagaggtcacccagcttgactggactggagccgacagacacttttcatttcctgctggggagatcaccatttctctctcctcttcttcagtcacaacttagtagcacctgcccgggacagggctctgggccccatgcatccccagagacagaaggcaggaactcacggtcaaggccatagccactgagcgtctgggcccaaatgtcatatggctggaagacagcaccctgctgcatggacttcagcagctcctctccagtcctggccactcctgtttgcccccactcctccctcccatcctgctgggggaatctgacaaacagcccagaagctggccatggggaatgcagtcattcagaggatggcttctttgttgtcccgaggagggaactatatttagaaagctcagaagctggcgggagcgagggctgaccgggaacacagcatagatttggcaggaatgtcaggctggaagcagccccggtgctttgacactatcatgaaatagtggaaaatggcaaaggagccattcagagtctttgattttccagtttagagttgatcagaggagagaggctctgagtgagcagaagtcaaaacttggaggagggagaggacaacaatgagtccctggaggct

SEQ ID NO: 55617 - DNA, 2058 bp, Homo sapiens
aggcttgagccagtgcccttcccattaccaacagcacaacttcctgcttcatcctagagccctctgctctggaggggaagacaagaagaaggaggacagttgcaatggaaccaagagagggcccaggatgggccaactaccaacaaggacaaggaggctgcacggaacaagaaaaaacagacacaattcgatcacccctgggggctagacccctgagcatccatcacctcagctcgtcctcacactatcctgtcttccacagtaagcaagagaagccccatttgacagatgaggaaactgagacagtacaatgaagtcacttgccaaaatcagaagtggcagagctacactcaagccaagttctgctcaactgcaacccagtgctctgtggagctctctctgggagtggttgggctgggtcggggccccagccagggggcaggaggtggcagtgtgaggcaggagggaactctggaactctcagggaggtggagcactgccagctgtgcctgctgcaggagggcagggtccacaaggctggccctggcacaaggtgactggaggattagcaacagtgccctgaggaagagcagcaggaagcttcccttttatcctacaggattcccaagtcaggttttccccattcctgagagtccttttttgaccttaaaaccaggccagtcgcaggagcctgtaagatgcacatttgtctggaacgcagcagggcgcctccagtctttcctggatgctacactggaaactctcagccagctcagggggtgggggccccaaacctcactgaggggctctagcctgacccgctgcagagactgccctgtggaaaaacccaggcaggagccaggagcccatcagtgccagctattattattctaaagtgccaatgtctgcaaaggcctggctcgcctggggctgctcccaccaattttcttcccccaagtcacactgcccaggaaagaggaaaatgcacccccgagcagagcttggcaccccagggtatggagaacactgctcctaaccctttagtgcctgtcatgccttccttaatcaggaaagagtcctggagttctctctctcctcctatcctccctcttctccttccaatatatacagacagctcccacctccagagctcctctgggagccttctctctttgtcggtccctggaaaagcttgttccttcctccaggaatcttgtcctgctgccaggccaccgagagccagccctccacacacagagcctcccaacattctttcagcctgagtggcatttcctctggagaagttagacgcatatttaactccaaaggaagcagcttgtctctactcatccaagtgcctgtcatcccacctgggttggcagccgttgggagagccctctctacccactccccccaacacttctccggggacttagggtctccacagccccgaccacctatccaaaggcacgctgtgtgggtggagccactgagcctggccggggtctattccccagacacaccgagtccacagttagcactccatatgcagaagatcaggaggctgatgggcatttcaggcccaaatgcactgacaagtccagcagcacttccaggtctcccagacccgctgcctcctccatggctccttattccacttgcatgggacctctttgtttaggggcctcaaagtggggaacctcatgaggttattggacagattaaaggagatttagccaaatttagcaaataatttagctgaattttatttgtcagatttagcaaataaaattataggatgcccagccatagttgaatctcagataaacaatgaataatattttcatacagtatgcctcaattattacatgggacacactcataccaaaaattattttagattctatagggtgtcttgtattttatgtgccaatccgatcaatgtgaagattcaacaggtgcatttcttggaagagagaaagtggggttggccttgagcaggagaaggttgagaaggaagggctggtggccacagaaagagaggtggcctcaaagaca

SEQ ID NO: 55618 - DNA, 1594 bp, Homo sapiens
tgagggctttccgaagccgtcaccaggtgcagacactggtgccatgctcgtacagcccgcagaacggcaagccaaataaacctttctttgtaaattacccaggcttgtgtactactttatagcaatgcaaatggactgagaagtgcctttgcttataaaatgagcagaaacagagacccgtagagaactgtctcccaagcaagtcttccatggctacctggttttcccctgcaccatgcccccacaatgccctgtgcaacctttgcctttcaaaattatgcatccatattgtaatgacttgtttattttttttgtccactatagcctggatgcttctccgatgttagagactgtcttttacacttctctgccaaaaacgtagcaggtactcaaggaatgtgcaaataaatgaatgaattaatactgataattttgatagccaaggattgggctaccaaaataatcaaatcataacaaatgcctgctatttactgacttcttactctttatgttccaggtattgtataatattttgacctgggttattttattttatcttcatgacaatactatatggaaggtactgttattaagcccattttacatatgggaaaactaaggcttagagcagttcaggaacttaaccaaaggcacacagctaataagcaatagaattgccatttgaactggatctgcctgtgcccgagctgttaaccaccccctctgaagtgctgcttctatcagcagtcatctaaaccttgtctgtattcgcaggggtggaggcagtagcctgcatgtccccaccacccaccctctgtgactcagcccatcagccgcctcacatagacattgagcactcaaatgttcctgctaggacttcccacctccctaatcacctcacactggaatagatggtatttgctcttggtatttgctcttgggcatggcctggaatgcaaaactgacctttctccctgacaaagaaaagaagggataagataaatttgcagactctacatttgataaaatttacagttctcaaacagccatcccccttgtttatatttctttgatctaataatcaaagaaatataaacaaggtgccatgctcgtatagcctgcagaactgtaagccaaataaacctcttttctttgtaaattacccaggcttgtgtactcctttatagcaatgcaaatgatctttatatttctttgatctaataatcaaagaaatataaacaaaacgaagatatcttttttctttgcctatcatatgatcacgcactgttaacacccactgtaggtgagggctggtgaaacacagcctcagaagttgatgctaaaaataaaatgggtgtagccttcctagaggaaaatttgtcagtatctctcaaaattttagatatgcataccctttgacttagcaatttaatttctagcatttacactgaaagtatttgcaaaaccattcaaaaatatagagatgtttagaccaaaattgtaaattcacaaactcttttgaaaataaagaaatctataaagggtctctgcaagcttaaaatcctctggaaagatctactaatgatttaatata

SEQ ID NO: 55619 - DNA, 825 bp, Homo sapiens
atgggagctgacatgcttcactgtttccaatgccactcttgagcattgggaatgtaactgagagtggcaatgcctacctttacatggccatgggctggggatgctggttgtgctgccatgtgtagataatggaaagtgttcccttaagtctgcctttctttggttctcaagatatttaaatatttgcccagctaccctaaatttggtgccattctatttgatctttcacattcagctgtgagtcatccataacctctttgaccctgctggaattctgaattagttccctatttatgccgctggagttcccagctctaatgaatggcagtggttggagcctccttgcgactcatggcttgctcagctcccctgtgtcacactaaggccttttcaaacaaaaccacccctttacccatggaagggcaaaaggcagacccagtaaagtgtaattagagtggatttcaaatatttcatggaacacaagtcatgtcttaatgcatatattcaatgactatttggaaaaacagcaagtaagaaaataatgtgatgccaacttttcatgagtttctgttgtcaccatatataaactcaccaataccatatttttaattatcttccaggccaaaattatacatcagaagcaaagattaaacatgcttattctaagaggaaagagagtagttcttatttttgtagaaggagaaatgaaaggccatttaattttgccaactgatatggtttgggtctgtgttcccacccaaatctcacattgaattgtaatccccagtgttggaggtggggcttggtgggaggtgactggcttat

SEQ ID NO: 55620 - DNA, 3407 bp, Homo sapiens
gtggggacacagccaaaccatatgagatgtagagtaacgagagtccttgtgcactgttggtgggaacataaaaagttacagctgctgtggaaaagagtacggaagttcctcaaaaaaaaaaaaaatgagtgaagctgcccacagtgcgttaatatcacagaaagattgtagaaagatacgcataacatggttgcattttcatcgtgggaaaaacgatgcactgtatgtataaaaagaatgtgtttgatgatgtaaccatgagtaaaaaacaggaagcataccaaaccgttaatggttctgaatgggtaggcttgcaacattcctttgtggttatttacatgcctgtcttgtcccatctatctgtcaagctccattggcttgtcttactcatccttttttcccctcttaacgcagcactggttcttgggcatgtgagggtttggtaaagttttgcagaattgaattgctaatcattgcctccccacttgctcacctatactacaaaccagaacttgttcaacgtcatacggctacctttaaatattcttgttttaagtctaagttccaaaatattatattagtaaatatgctgacttccctatactgcactcctcaagacttaatgcacagaaatccttagtaagtgggaagaaacaaaagatttgaacagtaaaaatgctgcaggaatccagcactgtttgaaggttgcctttctccgaaggttactgttcagaaagagaggagagagagaccaacgtatctccctgtaccttgaaagccattctcctccaagacatctgtcaagagtttctgtccatgtgggttatggaaatggtgttaactcgtgcagaattttaattacctgtctcaggggccaaatgtatttatgtatgtatccatgtcatgattatttattcattcaatgaatgttcagaatcctacaatataccagctgtaatgcctcatcatgaaatgtaaaactgaagaaagcggggttctattctcaacgagggagcctctgccctcacttttctttttcatcacttgagcaccaataccgagcagcctcgtctgtttttttttgcttgtttgtttcccccctgacatagcataaacttaactctagacgattgtgtaggattgctgctggagtcctggatgctagtcttttattttattttttagtgacactcactcactttgtgtcctaaagcaagcccagttccgtctctgtgccttggtctcgcctcagacaaatggggtatccatttgccctgccaaactctaaggggtattgtgagggccagacagggcaacagatgctgaaagcatttgaaatgaacagagctgtgtagaagtgtcaggcagtactcttcctgtgccccgggtcaccgtaacttgaagagcatctggacatatgtcagagaaaataaaaactgtttttgtttctcagtgaaaatacctgccttttgagactttcatttaaaatgaaaacattccaaagtagtatgtgatcttgaacaagtcattttcctctctgagtctcagtttattctcctataaaataagccagtgagactagatggatacatttcaaattctgctctagaaaattcttcactgggaagagattcttttatccccacatctgcaaccagaaccaccatatatttttcaaattttaccctcattttacttatttggcttctatgtgaggtctttttggttttctttttcttttaaagtgaaagtaagtttattaacaaagtaagaaaataaaagaatggctactccatagtcagggcagtggcttctgttttgttttgttgtttttcctaaataaaaatcctaaggctaaaacaaaaaaagaaaaccagaacacggctagatcacctgtagggccattcttcccggccttcgtgtctgcacacggaagacccacgtgctttctgcttaacgtgtgtgcattcctcttgtatgtgtcaggcgtgcacgaggcctctcaggacagaattcctttgcagggggattgacaatgagtcataacctgcttgacttttaagtgtgcactcagagatgaccattttttatagcagaattcccgagtctaaacaacctttggcagctgaagactgagaatgaaattcaccaaccagtccagggaaaacctcttccaaaagctgtaatatttttgttggatgcaggtgtgacccgtggtcttgccgtgggggaagggaatggctgtgggaacagtgccaccttgtggccatttttatgagcagacactacccagtgctgagctgagggctggttcctggatggttacactcctgaagagggactttcattttgggattgggaaggggcccagagatacactgagaccagagccagtccccacctggcagcaagctcagctgcctgagtcagaagcccttctccaaagttaccacactcctgaggcccaggaaggctgccaggctgggcgtgtggttattgggagggtcatgtggctgtcactagcaggaacgtgtctggatatgggagtgggaggcagagtctgagaggagacagaacaaatttcacaatggccatggctgagccccagttgggaagacggtgacccaggaagtatgcaaagtggtggcaggagggtggtgtcctcttgtctagaaacccaggaggcctacaaagcagagaggactctacctgtcccctcacccctgaccgtagcctggggcctaaatgagccctcctactctccgccttgctgccacgccaccatccctggcacagggttcctgggaggacaaaacgagatggatgaggcttaacacagcatctggtgcgtgggaagccctcagacatccctgtgcctgtcccctccctctcctactctgtgcactagacattggagtgacaacaatgaacccagcacagctgctgtcagaactcacaggctggctgggcgtgatggtgcacacctgtaatcccaggactttgggaggctgagatgggaggatcgcttcggtctgggagttggagactagcttaggtaacatatggagattccgttgttacaaaagataaaaaacaatcagccaggtgtggtggcacgctcctataggttcagctactcaggaagctaaggtagtgatcacttgagcccaggaagatgaggctgcagtgagctgtgatcacacaactgcactccaacctgggtgacggagtgagaccctgtctcaaaaaaataaaaaataagaaggacaggtgtggtggctcatgcctgtaatcccagcactttgggaggctgaagtgggaagattatttggagtcaggagtccaagactagcctaggcaacttaacaagaccctgtctccacaaaaaaatataaaaattagccagg

SEQ ID NO: 55621 - DNA, 5094 bp, Homo sapiens
acagcagtgtgaaaatggagtaatacagtgggggaggctaacttggactgggaaggtaagaaaagtcctcttggaggaggtggtgtttaaacctggctggctggctgcatgagacttgaaagtgaagcgatggggaaaggctggagggtgggagaggggttggcctgtccatgcaccatccaggcaccttctgatagaatgagagtgagtgaactatagctctcaagccaaactctgcctgccacctgtgtctgtatgccctaagagctaagaatggttttcacattttcttttagacagggtcttgttccagtgcccaggtgggagtgtagtggcatgatctcggttcactgcagccttgatctctggggctcattcgatcctcctacctcagcctcctcacctcagcagcctcaccacctccctcatctccactcaacctctccactccagccacgctgaccgctttaatgccctggtgatcaccctccccttctcctccagggctttccctggctgccccctccactgcaaagtcctttcctatctcctctctccctgtggccaactcctccacttcagagaccagccttgacttcacatcctctcctgcttcccagttacctccaaaagggcctctgccaagccatcctctctggtttctctctgaaaatccagggttggcacagtgtgaagagtgcacaggggcctagaggcctgggctctggaatgctcccgtttccagactcagctgcctcccctgcctcttccccagggctgccagtaaagtgccttttccctgcaggaaaaagagctgccccagttgggcctggaaaaagggcaggcattccctcacttggctggccaggggggctggaagtctttgacagccctgcggtcagtcccagggccaagtccttgtcccctcctggcaaatttatgcgcacctgaactctgcaggatgcccaggagggggcgccaaagtgctgccaaaaaagaacagtttggggcatatgaatcagatggcctcgtgggagtgcttagtgagggctggctctgagttctttttaccccagcccctgcccagggccaggcactgtgtgtggaatggaggaaaggacaccatgcaagaactgacaaggtcctgcacatctcctatgctggcatttcttacgatcacaatgactttggtgttccaggcccagaggctgggagctggcaggaagcttgaccattgtgaagagctagtgtgcctaaagtggcctacagatttgttgagggaggctaggtggggtcaggaaggcaggaccccttgagccagttgcctctggcagcaaacagtctcattattgcgtaattagtattttctatgttgacttgacatggacgtggttgggaagcactatccaatatggaagccactagctacatgtgaccacagtacttacgttttaattaagattaaataagcaggctggggggtggtagctcatacctataatcccagcactttgggaggctgaggtgggcagatctcttgaccccaggagtctgagaccaggctgggcaacttgttgaaacctgtctctaccaaaatacttagccgggcatggtggtgcatacctatagtcctagctacttgggaggctgaggtgggagaatcacctgagcccaggaagttgaggctacgatgagccaagatcacgccactgcactccagcctgggtgacagagcaagaccctgtctcaaataaataaacaaattaagataaaataaaatttaaaatccagttctttacttcattagccacatttcaagtactcgatggccacatgtggccagtggctctcatgtcagcacagaaataaacatttccatcattgaaagttctgttggacagtgccaccctagaacttgctctgatctcttgtgggtagggtgtgctttagaatttcagagagttcactgttagcatgctgcctcccatggatatggttgttacaaggttatgagaaaggcagtcagacccacctaggattaacccctgattttgctggttacaagcaaagtgtcctctatgcaagggctctgcagggctgacacgggacttgagcatccgcagactttggtattcaaggggatcaggcaaccaaacccccacagttagcaagagacaactggactacttttgtggcttcagagaagtcacttaatctctttcaatctctgttttctcatctctaaactggggataatatcaccctgccgccacagttattattagatgagctaagacagataaatcacaaaacgcagtgcctaggacacagttttgcggccttaccgccccagccgagtgtgcctttctgcgtgcactcacccacaagccctcatcccctggctatactgtgtccagacctgtgtcgggttccacatctcgttcaaaggcagcaccgggcttgattcttgcaccgggcttgattcttgcctagaaggagattgcaatctaggtcagaaggcaagataaggcccatgaagcaacctgaaaacaattcttaggcaacacacagggcagtgtgtcatcccgtgagccagagtctgatgggaaagtagtgtggggtgggaggctcttctaagtcctcgtagagaaagtgggtgagattagaactggtcttgaaacagcgtagagtttggaccggcagagccaatgagagagaagtggcagcagggaatggtgtgagggcagaggaacagcgtgagcaaagaaatgctcagaggtgggtaagggaggggccagagctaacacagtatggggcagcttggccgaggtgctcaggaaggggacacacttcctgagaagagaatttgctaagaagatactcagatcttggaagccaggctgagttgcttaagtttaatgagacaggtggtcatcaggcaggcggggccttgagcatggaaactggcaaggcctggggaggattgcactgacagcagaagtcggaggtctgtgagggagatcctgcagtcagggtgacgtcagcgagaagtgacaccagcggccttccggggcagtgcatggtaccatttacagagcgctgttaacatagcctgggctcaaattgctgggtcctaacacagtaaccaaaaactggactccattggtctacacaacaagtcaacatcaaattgggaaggagcagtgggtaggcaccaagaagaaacagagcagaggaaatgcctgtcacagtgtgtcaagatctgagccccagccccttaatcagttaagaaaaagaacaggggccgggtgcggtggctcgcgcctataatcccagcactttgagaggccaaggcgggcagatcacgatgtcaggagttcaagaccagcctggccaacacagtgaaaccctgtctgtactaaaaatacaaaaaattagctgggcctgtaatcccagctacttgggaggctgagggaggagaatcacttgaacctgggaggcggaggttgcagtgagccaagatcgcgtcactgcactccagcctgggtgacagtgcgagactctgtgtcaaaaaaaaaaaaaaagaaaaaagaaaaagaacaggtacaaggaggagaagaagggggtgtctagaaagaggactgggtgtctgagaaacagggctgggtgtcacatcacacacatacacaggcacacacagtcacattcacatgcctgtacacataaacacatataaggacacacatataagccccccaacttactcttcatgctaatcatacccagagacccttaaggatacatgcaaatgcatatgtacgggcacacatcaatacgtatgtgtatatacacgtgttcttcctcagcccagcctctccttttaggcctggagctggggctgacattgggtttacatcaatcaaagccactaggaaacgtctatcctgcctgggcccagagtccatttctgacagaggcttctccaggctttacttgtaaacgctatttattttggaaagcaacttctctgttttcaaataaaacgttgggacatgcagtattggatttccctgatctgacattgacctagaaaaatgtgctggcaggaacagaaaatgcgatgccccactgtgctggcaggcacaagagtttccctcctcttggctttgattgcaaaggttaagatgcaagtgagagagcgcagttccccctccctgcctgagcagcactctccctgcagagctggagggaactgggggccatgtttaggggcttcctgcaggttttggtgcttgtggtcttaggggcatgcttctgggtggggagcttatcacagaggggcagcttgtcacagggctggtggccgaggccagcatgtagagagcaaacagctccaggatgtgcaaaatatgaatagggcccagctatgggggtccccacggttgtcatcagtgaaaagggcaaagcaacttgagctctgggtgaggtttgaagccagttcctgtcccttggggaagaggtttcctggaggcagacctgccaggtccagcttcaggtgaaggtcatggcctgctgccatctgcagcggcctgggcaccagttgcaacggttaggggcagaagctgggagcaagggctgaggcaggagccccacatcatggtgggaacccagacacctgtggtctgcttgcgggggtgggccctggtctaattagcaaaggaggctcaaaaagcaatacacaattcattgccccagctgagccacagaatctctcagagttcctcagctgctccagtgacttaattctgtgcctgttaattctgttcctattccacccacatcccttatggcctctctgaggatgaaatgagatcagaaatgtaacatgctcagccagggccggatgcataataggtaggctcggtaaacgtgagagcaaatcccagcttcaccactcactagctgtggcgccttgggcgagctcctccttggtgccttaatttcctcatctgtagaatgcagataataacaaaatgtacgtcatagaactgttggggattaaatgagtaaatatttgtaaagcactttgaacag

SEQ ID NO: 55622 - DNA, 520 bp, Homo sapiens
cctcacctggaggggctgtggggggtggggagggtggcactcagtgtgtgtgtgcatgctgctgccatgagtgggccgtggtgtgtgtggacacagccagggctgcttatactaacttgacctttcttatttaacctgaggaagggacaacctttcctaatttgcacaaaagtgctgcatgggccagccagcctttgcagctgccatctgcatggtgaagccccaccctgggtttccctagataaactttccattctctagtggcctgaaccttgttcccagggtcagcctgcatgtgacccttagtctctcctggctgggactggacacagacctgtgccacccctgggtgtcccctctgggtgtgccctgtgaactagctaccttcccctcaaccaggaacacaggcaagtggagaactcagctgggaaaacactctgacccaggcctagggaggcagtgggagaataagcagtttggcaatagaaatacacatccttcaacatagtgatttccctct

SEQ ID NO: 55623 - DNA, 3672 bp, Homo sapiens
taatggtatttctagaagagcaaaagattttcattttgataaagtccaatttaccttgtttttctttttagattgccctttttggtgacttgtctaagaaagttttgcctaacaaggtcataaacattttctcctatgttttcctttacaagtttttaaaatataattttaaaataatttttcattttgaacataatccatagtaacattaaaaacaaatagaaaatataaacagggcacagtagctcacacctggaatcctagcactttggaaggcagaggcaggtagagttcaagatcaacctgggcaacatagtgaaaccctgtctctactaaaaatacaaaaattagccaggcatggtggtgggcacctgcaatcccagctatgtgtgagtgtgtgaggctgagatgggagaatcacttgaatccgggaggcagaggttgcagtgagcggagatggtgccactgcactccagcctgggcaacagagtgagactccttctccgcctaaaaaaataaaaaaataaaattagccaggtatcttggggcatgcctgtagtcccagctacttgggaggctgaggtgggaggattgcttgagcctgggagatcaaggctgcagtgagctgtgagcatgttatggcactccagcctgagtgacagattgagaccctgtctcaaaaaaaaaaaaaaaaaaagaaagaaagaaaaagaaaatgttgatcagcaaaaggaagaagttacagatcactcataatccccctgccccaaaattcatgttttgttacacgtctttattggttacctattgctgcataacaaattattcccaaaatgtaacagcttaaaataacacatttattatctcaaaacttctgtggattgggaatctgggagcactcttcttggtgcctttggctcaggatcactcacaaggctgcagtcaaggtatcccctggggcagccatcgtctcaagcctccgctggaagagggtgcatgtccaagcttgcccatgtggctgtgggcaggcctcaagtcttcactggctgttggctgaaggcatcaatttcttgccatgtgggtctccccacagggcaattcacaacatggcgactggctttcctgagagcaagcaaacaagagcaggcaagaaggtgcccaaacaggccaccccctttttgtaacttattcatagaagtgacatccctttatcttgtgccctgctgaatgcttagaggtgagtcaccaggtccagctcactctccagggaaggggattgcacaagttctgaataccaggaggtgggggtcattggggaccgtattagaaggctgccacgatgtccttcttgttactcatcttttgttgttcttacgtattgggtggtaaatcttcacctgtggaactttttccacagatgcaggggcccctttctagattctagattctcctgaatcaggatctcctgagaaccgcagttctctgtatgcttatctctgaaaagctccacaggtcattctaatgggagccaagtaagagtcactcaaaagtgagtatttcccatatggattacaactgcatatatgtttagaagcatttttttttctttttatcccctcaaatagtgttgaacacaaatgtgttccaggtgcttggttctcagtgtggggccatcatttccatttctcctcaggaagctgtgttttacgatccctttgcaggcagagccccaccaaccaggcctggcgatcatgacatccaattccaggggctgcaggggagcccttccttccgagtgagccacgaggctgcctgccctggtgtttggcttcaggcagctctgacatcaatctgtcattccagaggacacttttagatgtaagtctgctggtgtggggactttatgagaacaggaatccctggctgtgaaattgctggcatttcatgatgtgagagaagatttacaagctccatgctgagctaggctcttaacacaagcccaagcagttacacaatccagcctgccaggcaggcagaatgtgcagggagcggcaggtgggaggaaggggaagctgccactttaccatgctcaggacgcctggccctatccaaacacccactgggggcttagtgcaaagttgccttaactgtattcactgcagcacgggtccctctgcagatcttagtaagcaaatgggcagtggtatgttgtgagactgtggattcagagaggaaggaatttcaaaggtcactctctcccgtcctctcctgatgctcccctcccaccttcctagctaaaagctaactcctactccccaatccaaaggaaacacaagcatgccctctcccataatcctgttcaattttttttttttttttttgcataaccctatctctactgtgtatgtatacattttagttttttcatggctttttttttgtgtgtatgtgtgtgttgtttatctctcctgcttgaatgtgagctttctaaaagcaacagctttgcctgtcttgtcagttttacttctggcattcaaatcattgctagacctcagtacatccagacattgctagacctcaggcgctggcctgtaaggtcctgaacgccctgcttccagtatccaaatattcattcattcattgaatgcacagttttaccactgtacctgctcaggtctcctaagcttagtggtggcctcatcacactgattttcaccttgataggttgattcaatgaatgaattaatgactgttgtgattctgccaggggcagagagctcaggaccttatggatcagcccagcctgggtctgatggctctcactcttggcccctcctcatttttccctgctgtctccctgtgtgtaccccccttcattgtcctcacttgaaaggccactctgaactagcctgctcctcttggagcgccccagagattcaaaaacagcagctgcatgcttttcaagatgaatgtccctgtttcttttagctgtctctcgcgtgtcattgtcatcctactcaccatcctcgggaggggtctagcgagccattgtccctcaataatttgggttaagtctttgagattcttagtaagtcttggcagtttgcagattttgagacacttcccactcaacacttagctcatttcttcatgctcagatttttcatgtagaaaaacagtcagtgggtttaattgaggattggtgcttttaaccaattctctctctgtttctttgcccaaattttctagtggacaacagccaaaagtaggggcccctggatcttcagggtcaaatggccctattgtttcccccctaccagaagtattttatggtcccaccctacagagaagaggggaccagccccctgtctctcactgaagggcagtctcacttgggaggggtggagtatgtggggcctgggacccctagggtacttttccagagtctgagatgaaggaggtgtgctgtttgaaaatggacacatgggctgggtgcagtggctcacacctgtaatcccaggactttgggaggctgaggcaggtggatcatgaggtcaggagttcgagagaagcctggccaagatggtgaaaccccgtctctactaaaaatacaaaaattagccgggtacggtggcgggcacctgtaatcccagctactcgggaggctgaggc

SEQ ID NO: 55624 - DNA, 1434 bp, Homo sapiens
ctcgtggcgtgtgcagcctgaagggagcagctggagcctctggcagctgtctgagcacatgggcgttggctccgggcagtgcgggctcgaatcccagctccgccatgaatggccatgtgctcttggggctgacttctctaatcttgctgaggctcaattctccatctctaaatcaggggttaaaagcacctaccacacacacagtgttgctgttcaaagtgaaatatgtgcaatgggcatagtgtgctgcttggcacaaaataggtgcttggttaatgggagtggccttcctccccaccagcttccttcgtggtgcagcagacactcggcaggtgtgagctgcccaggccagtctgggagaagtggtttctcctgcagtcctgggctccacagtggggccagttctcagacttgccttgcttggccattggcaggacttccagaaccttctactgtttctggcagtggatggaacaggggctcctcaggatggaacaggggctcctcagaactcgccttccacccagtccctgtaccaatgctgatccctgccttgaagtgactgctctggggtcccaggctctccccagcctctctttccacgtctgtatgtaccagcgctggggggggcccagactctgatgaacaactgtaggaatctcagctcttaactctagccagacacatgatcatctagttgtaaggccctttggtcatttgcttataaggaccattttggagaatatatgacatttccaagaacacagggaatgtttctgcccacccctccccaagcacccccgaccctacctctttctctccctctctcttgcatcttggcccacataatccctaactccaggtgcttgaccactgggctcatatcttgttgttcttgcttgccttgtttggtttcatttttcctgcaggtttttgggtaaatcatctttgatccttttgaaagtaaacaatgagtaaataaatctgagtggaagctctctcaaacattaactcctgttgcgcagttaactagtttctgtgttgacctcagaattgagcttttctaacaatctgtttattgaagagtttctggagcttacaagttaaaaaaatgcttgttaccatgtgcggttactaatgtatgttcatcagaactccttcaatactgtgtaagcagtcaatacaaaacacagagataaatcaggtgcagagggcggactacagctgagtagcagaatccctgatttcattttgttgttggtcaaggaaacttcttgttcacatagagtttatgtcatagaccaacttattgtgaaagtaagcaaatgctatatttacttacaaaatttagtaccatataacttttatgaagtatgtttatgcaaattcttttttttttttttttttagaaacagtcttgctctgttgccaggc

SEQ ID NO: 55625 - DNA, 1589 bp, Homo sapiens
gagatggtatttcaatgaggttttggtttgcatttctctaatgatcagtgatgttgtgcttttttttttaatgtttgttgaccgcatgaatgtcttcttttgcgaagtgtctgttcatgtcaataccattcaggacataggcacgggcaaaaatttcatgaccaaattgcgaaaagcaattgcaacaaaagcaaaaattgacaaatgggatctaattaaactaaagagcttctgaaagcaaaagaaactaccatcaaggtgaaaaggcaacctacagaatgggagaaatattttgcaatctatccatctaaaaaaggtctaatatctagaatctacaaggaaattaaacaaatttacaacaaaaaaataatcccattaaaaagtaggcaaaggacatgaacgcgtctatcttttaaggctcacataaaagtgttaaacgtctagggcagttcctggtaattggcaaattctcagtcactacatacgtgatgaataagtaaataaagaaataaataaataaaaattattcagtgccttgtccttttcttcaggtcccatgtcgtgtatgcccggtgtcatgtaaaggcatgtttatggatacagaactttatcctgaatgaaagtgattttgtactaatgtaaaccccaggcactatacggtcttctgccctaagttttgggggtgagtggcaaaggggaaatgaggcttctaagcacaaaccagcacaaagttatataaccttgatcaaagcttgggagggaaaaacgtcatcatccccatcaggctgtctctgatgattcctggatgaatcactgttggaaaaaataagagtaaatgttctcaagcagcagacatgtaatcagtgggaaaattcttccctttagggctttctcattcagtaaatattcctttgctgtgagtttccccaagaggcggtgccgtggtgagttgcgggggggcagcgggaggcagcccaagtccattagcaagattgcacttggagccagggcacggaggcatgcttgggagggggtcagagggcctggaatgttttgggtctgtccccattcaggtgggacctctaacagagcaattctccaatcctcctttgctctgggtctggtggctaaagaaataatcttctagaaagtaagaaactctgattagtgggtccctgtggaaagggaggctaaggaagaggatttagctttttctcattttacacctttctctataaataacatgcatgagatctttttttttttttttttttttaatgccaaggagtttgtctcatcagtgggactttgggccacttagtttttacttttcttttctttctttttttttaattatactttaagttctaggacacatgtgcacaacgtgcaggttagttacatatgtatacatgtgccatgttggtgtgctgcacccattaactcgtcatttaacattaggtatatctcctaatgctatccctccccactcctcccaccccacaacaggcccaggtgtgtgatgttccccttcctgtgtccatgtgttctcattgttcaattcccacctatgaataagaacatgcatt

SEQ ID NO: 55626 - DNA, 3711 bp, Homo sapiens
ctcctgacctcaggtgattcgcccacctcagcctcccaaggtgctgggattacaggcgtgagccaccatgcccagccaatgatttatgtcttgacatgagtagtgaggacatgggtgtttgctttatagttatttattagaatgtataattttctatgcacttttctgcatgtgcattcattttcataatctaaaaagtagaagtgggagacagccttgttttaagaggaggttggatgacagtgtcaccctccactttcttttcacttccaaatttaccactgtggtcccagaagagaagtccctgcttggtgctcatgtccccacccttctcctggatcccccataccctggggatcagtccggagacctccactctcagaagcaaactcatccttgactgcgcctgactcagccatccctgattgcatcttctgggctcttgtgctcccaaggatgtaattgagtgtgctatgtggggagacagtctcatgatttcctcggatggaaaccaagtggaaataaaaatagttgtgccagattgttggtgtgcatcacagctcaggagtggccctgggatgcctgggcctgggctggaacctggcatccatgttgtatgcccgatttcctccacctcctccgctcagggtgctggtgtgtatgccacctctctgagtgagacaggaagattgcgtttagctcaagcaccttctcatcaagactctttcggagggttcagagggcttgtttctgaagcactcagcaggcagcctggcataaagcaggtgctcagtgaccagtgggtatcagttggtcccttgctgctttgagttgggcaacactgaggttgggactacagaggtcattgccccttaagaagaacctagagcaagttatctctgaggccctcggaagctttgttcaagggacattaagtccctttgtttggggctggggagtactgagactacagtttgggaaaatgttggtctctgagatgtaggctgcctgatgactagctgtgcaaacaaaacctcggacttccctccgcatttctttcctttgacccttcagtgtcagcaagctcagggtcagaaaccctgcactcaactcctttgctagggatttgtggaggctgataaaagcccgcaaggtggccagggctgctgggcaatgttggcatcctgctgatacaaaaactcagcttggatctccagcaccttctcctcagataaagctggtaatttcctggagcaaccacacttggagagaaccaagcttgcagggagctcagagcagcctaggcaggtcacagtggacaggagggatgtgggactggcaggaggaagtcaggaaggagccttgatcactgactgcaaataaaagcttcatgtggtgcaatgaaatcaccctatatggcttgagaggaaattctctgcaaggagctgcatgcaaataggtcatcaagtaatggcaaaaatatgcagccaaatggaggtgcccctgcagtttccgtgtctccaaggactagataaactccaggaaggactcagggcttgataccacaaaggatggggaataagagatgctccctctgcccccatgagcccccttagccagcctcctgcctcctgcttcccatctctccaaggggatccaccctgagtctgaccagcatccccgtgttccctgtggccgggatcaggcagggacacagagattgcttgagacactttctggtgactaatgcagtatacttgaacaggaaacagactggaaaggacttagggggagctataaatagcccatgtcctaaaaaaatgaacttgggaagaaatggaattaacaaactgggaggagaacaaggagatcacaggctccaaacaagaccaagctttctcttgggaaatgagcttttctcccagatggagctccatctgcccttgcaggatcagctcccccaagtgtgccctgctccaccctggggttgaccagccagctcagcctgcctgccaatatgatgcctggaattgtctgtggttctgggggccaagccttgtcaggatcatcacgtaagggtgtgtatgtgcggaagggtggtggctgaggctcaggattcaaggactatggaccatggtgggaaagtagagaattggagcagtgacaggtcagggacatcccttctgatgttcctcagttctcttctgttctctgggcttcagcaatctgctgtctcttgaacccagtgaggggaggggtgagtcaggcagaagaatgagctcaggtaggatggcacgtcagcagcctggagtctgacaccggccaagacactcagtggcagagtaatgtagaatagaacactccatttcactaagactggttccttttctgtaagattgagaggttagactagttcactggatttgaaatatttttattttttaaagatgcataacctttctccaaaggaaatcacaaggaaagaagagtactgccctggttaaggtggggactcagggtttctcacacttacactcaaccatttcccttgtggtagccctgagaaactgccacagtgcaccagggcgtcgcccagctctgttgaaagccacaggactggagcacttggcaagtttggctggccacccaaacacagctcctcacggtttctttctgtctttcctttctccatagaggctggaaagctaaaacagtgaaaggtaatgctgagcaatggaggcctaactaatgatgtcagtgaaaacagaggaggaacttgtaatttacactccccagctaacttcttcctcctcttcttctttttttttttttttaaagacagcatcctcctgtcacttaggctggagtgcagtggcatgatcatggctcactgcagcctcaaactcctaggctcaagcaatcctcctgcctcagcctcccaagtagctgggatgacagaggcatgccactatacgcggctcctagcaaacttcttatatccttattagttattgtgatagactgattgcaaaaacagccacaatcgtctatcccttccagtccacaccctctgcatcctcaatccacaccctctgcaatgtgaccgtgtagctcctcccatcaagagacagaatccatttccccaccctttgaatatgggccggccttgaaatttgctttgaacagtgtttattgaaagtgacaatgtgccagctccacgcttaggtcttaagaagcctgtgtcttctactgtctctctcttaaacccctgctgctgccatgagaacaagctggggctagcctatgagaaatgaaatatcacacagagcagagccgagttgtcccagcagaggccaccccaggccagccatcctccagccaacctgccagcggacccgagatgcatgagcaactagactcatgagaaataatacatgttgttttaaggcatacgttttgggggtagtctatttctgttctagtatttattgtcgagtaacacaccaccccaaaacttagtgatttaaaacaatgtattatatactcatttattacaatctcccaaggttctacgcattgactagtcgccgtggggcaattcccacctgggggctttcagatgattagtcagatgtcggctagggctgcaggtatccgaaaggttcagcttgagtgggtgcctgggatggctcacccaggtggctggcactg

SEQ ID NO: 55627 - DNA, 3677 bp, Homo sapiens
ggaaacatagatgtcacatcttgatagggaaatggcaaggtcacatttcaaaagagaagataggatgggagatattgttgcggccatctttgggaaatacaatctgccacagttgcatagcattattgaagcaatgagtaacacagacagacatttttattttccaggtctccatcttccttgcagcactgctttctgtccagcctccctgcatacccacttcatcacacagggaatggcaaacactgagctgctgggggaaaggcctgcagggcccttctgagctttgtcgccagctctggggtcagcaggaaagaatgcagtgactgaccagtgatcactgcctcaaggaccacgagaagaggggaaagccctggtatgaatgagcttgtacccttcacctcgctgcgtcttggtttcctcttttacatttttctaaggattcttcagtatggatatgaggaaatataattgtctaatttcattagagagtggatccaggcaatgcaagccgagtgctttgccagtactaggtgcggtggaggaaaaaattagattattcacaggttcaaattgagattctcaccttattactcacacagagagactaaaggtatcaatttctgctctccccagccaggcctacccacaggagctagagatattcaactgccttatttagcttcacccaggcccaggagctgctgaaattagacctggcctggtagtgggaaccccatctgggcagtgggagagaaagggttaagatctgtgatcatcgcatgttcttactcataagtggaagccaaacaatgggaacacatggacacagggaggggaacaacacacactggggcctgtggcagggcagggggaaggagagcatcaggtcaaatagctaatgcatgctgggcttaatacctaggtgatgggttgataggtgtagcaaaccaccacggcacatgtttacctatgtagcaaacctgcacattctgcacatgtatcctggaacttaaagtaaaactaaaaaatgtttaaaataattaaaaagaaaaagatctgcgtttatgacccaaggttcctgagaaggctccctgccttgggcctccacctctgttctcagctccagcctttccccagcccaatctgggtaactgagcttctgccccaggttttccagtgagcaagaagtccccttaaccccattcagctgggattctatggtcttgccaacttcccctatcatttttccttttagaccacgccctattcctgaatccaaaaccacttcctgcttcaaagaggaagttccttcagaagccagatgctgttacccacctgaaaacaagtatctttggcaaaagccagagactcctcctgtcagagccctgcccacctgcctgagagcccctgccaggtcagcagccagtatgttaacccccctgagggccctaggcccccgctactcctgtcccggcaggtctcagagctgagcccagagggtcacgacaggaagaaggcagatgccttccatactgactaggtttttggcttgctttgcaccaacatcctgtctgccctgtttcctactgagggcaaactggactggtttttaattaaacccattcccccagagagcttgggggagagatagcctcatagaattccttcagtagttatcagaaggagaccccgtggaggcagaggttgcagtgagcagagatcgtgccactgcactccggcctaggcaacagagtaagactccgtctaaaaaaaaaaagaaaaaagaaggagccagggtggggggtgggaacaggagagagggaggggggaaagtgaagtcacaagtccagagtggttccttcctggctgagctaatgccctagcaatgcaccttatgtaatgggcaactcacctgagcgtctgagcccataggagtgccagcccctccctgtggtgcctcccctgcagggcccacagccacaccctcagtgcacacactctccttcctatccatccactgatacctggggatgacctttgaacgatgtccagcaaatcaagcaaattaaaggcaatcacatccactgtaatacatctgcttggtagaacatttgaacagagaaaacattccccagagctccacccctagagatagtttttcttttatttttttcacccaggttggagtgcagtggtgcaatcttggctcactacaacctctgcctcccaggctcaagcagttctcccacttcagcctctcgagtagctgtgacaacaggtgcataccaccacacccggctaattttttgtatttttggcagagacgaagttttgccatattgcccaggctggtctcaaattcctgagctcaggtcatccacctgccttagcctcccaaaatgctgggattacaggtgtgagccacaacacccggacttctagagatagtttctatattctagagatgtttttatttttatttatgtttaaccaaattaaactcttcagttcttctttctggtgcttcctttggtctttagctgagtccctctccaaaactagaggccatagggttgctgtggcttttccatccccatcataaagggtagtgctccctcagtgattggtttcaggattctccccaatacaaatcaggcctccaagaaccatgtccccttcagagaggattcctaagcttcctcctcttcctcctcttcttactgcaagggaaatacaagatcagtctggaatgggcttccagattcatacaacctcccccaggacacagattccgggagagagaagaggaaggcaggtttggagcctccaccaccaccagtttccctcacgccctcctctctcccttcccctctttctcaacttcctcctttccctctcttccttctatgatctgtccctgcccctctgtctcctcttcctttccttccttcctcccttttctcctcccttccttagcaggcagcaatgagcaggtggcactgaacttagattccaccatcacaggtgggtagatcttggctcacaagcctgtcattgactagctaagtagccctgattggaggagtcattttatttccctgagcctttgtttctcatctgcaacatggagattttactcaccaccgtggtgcagacaaagtaggacaaagtatcctttaacccagggcttgacacgtgacactcatcaaacattgctgagctctaatctgcatcaggatatggtaagtgtctactgggtgctgggacaaaaggtacagatgggagcaaggcagagatccctaaacagacctctgttgtgatctttgttgtaatacatggtaattatttgtttccaaaaagaggtggaaggagacatagatagcttctaccgccaggcattcaggcaccagctgtgaaggccttctgcacattgaaaaactcagagtagcctggtggctggaatgaaaagtcaacaccagttcccccagcaaaatatttctccattcagccttttcggctcattggtttgcctgaaatcagttgtttctccctggggaagcaatctttaaaatggtgaggagagtgtgcatctgatgtgcctgcacttgtgcctgtgaaacagggtaggctcagagctccgtgcaggcccatgaagtcccctcagagacaccagt

SEQ ID NO: 55628 - DNA, 552 bp, Homo sapiens
gaatgggcttcgggtttatgtggacaggaatctgcccaggctgcaggtgtggcccagcctgccatgagggtgctctgggttttgtggcatcagttgatctctagaggtcagaattatgttatgcccctggaattcacaattgtctgtgaatccccagtctatctggggctaaagctagactacttacatgaccctatgtttcttcccctctcttctgcacacccactccatcgctgtttgctctggttgctacatctggctgggatgtcacctcctgcctgcagccacagctctttgctctccagcactgactttctcaccattgctggcaacgtgcacacattcaccaaagtgctggggtgcctccgagggcattactgacttcagcaggtcccagacaggtgccatttttctctaaaccacctctggaaaagccacttaaagcgaggtaggcctgatgagtttttagtgaccttgaaaacttttagatgttttatccgtgaacaagcggtttgttctgaggactataaagatgatgaagagcttgaacaa

SEQ ID NO: 55629 - DNA, 2224 bp, Homo sapiens
aaattccagcagcctggagccacaatactgtttctcactgctcaagcctgcctgttttcctctgcctaggtagctcagttccaagaacacttattgatgcttacaccgggccaagccctgtgatgggccctgggttccagaggtgagtcagacatggttcctgcccatggagatccccatttcatgataactgctacaagagccgtttaaacacaaggtgttttacagtagttatagtctacagagtgcttctgattgctcactaggccccactccattcacactgtgttgtctgtgaatgttgctctctggagctgtggggggtaagggtaacccgggaaggtgggcagagcagagattaagatagggatatgacagccaaaggtagagggtgtttaggtgatctgaccaaggtaacacaggtagtctgcaccaccgcccccttcccactagctttagccaagcaaggccaggtgaggggaagatcctattagctagcaaggaggtttgcggaagctcagggtggtcaaggagccgagcaaagagggaggtccacaggacgtacacagtcggtactagaagtgccatgctgctcccccatgtccaaaaggggatgccgtgtcttgctttccagccgcctagaccaagaagcgtgaggcccaggccctcgccgctcccttgatacccgcttaccaacaccgggggtttcatctcgcagcgccaccacgccccactcccagcagccctcccctggtctccgccctgtgcgggtcagggtgggagcgcccggccactccctgcgttctgggccgggctacagcccacgtgcgccggcggcagcggcggtgacagccggccccacgggggcggggcgggctccgtgctgtcctgtcattggccgcgccgctgtcgggggcgttccccagcccggtccaccgcgcggcgcagaaccgcaggcgctcggctggctaagcctgcgccgggccgcctcgctcgctcccagctctgtcagtggcccgcggggcccgatcgctgcgcccgcggccagggccgaggcaggcctgacccggggccgggcagcccgcgcgactttcggtaaggcgggggcggcgctggcctcagggtggggagggcgggcgggcgcgggtggggaccgtgccagcctcggctggactctgcgccgtgtccaacgcccgggagggtcaggtgcggccgcagcatcccccgcctcaaacccacccggcggggcgcacagtgagcaggtggcgctgcgacgaagcccggggcggccctggccggcctctgaaccaattagaacgcaataaaagcctcccaccggcacgccgaactacctcttactccgctccgcaacacccaaaccctgcagttccaagcctagaaaatcgcaagcgccaaaacggggtgggagtgacgcgcctgcagtgctgcctgtcacctggcagaagaccatccccaaacttcccaggattggggctccgagccttgcacgccccgttccagctcttcactgggcgcccttttccccctcccctgtcccctccctctttagtaacaggaagttaagttgggccaaatgtcagtggcctggctggccgcgggctggagcccagtcgggatggggtcgtggcagtggtccgaggggccgcggcactgtccgctctgcatcgcgtctcccgcatccccagtagcccgctctcgctccaggcccaggagcacccccgcagggtgtccgcggcacccaccctgtaggtgcctggctggccccggggagaggtgggatcttgcccacagcgtctaagccgctgccgggccagacggggcaggtggggtaaattgtattcaccgccagcctcactggcagagctgggaacggcctttactggatggggatgaggggatgtggaaaccagagtagtgtgcctccttccacattgtttattctgaggcctgggttcttaaagcggaaagagcttttatttggaagcctgtagggccccgccaggcctacagcagtgtgccggctctcttgctgtgattgtcgcctgttaactacagtctacaatgattttggtgaaggatgaagtcaccagccaggccccttgtgggctggtcccacgggagaaaagccagaggcgaattggccctccagtgtttgtgccaggttccctgacacctgcacttactctgtcctgctccccctccc

SEQ ID NO: 55630 - DNA, 2152 bp, Homo sapiens
tgctataatcacaaaattttggactctggttatctttatatataaatctttaatgctagaaggaacttaagcagatgttatgtgcaatctctgcatttaacaggccacaaactgaggtccagaaagctgaagagagtggcattactgggatttggactctatttactggtttgctcttatattcttttgtttatttgctcattagcaggtgtttccagtgccctacaccttaccaggcatttgacagagaggatagtttggaagatgaataagatgtggttcttacttgagctttatgtgaagacagatatgtaattatttctgtattcactttaattaatcattcatcaggtgaatagttattgagcagctactatgtgtcaggcatttgtctagctatgtaatagctctgtagccttgggcaagttacttaatatctctggtcctcagtagcattctctgtaaaatgaggataataagagtagctacttcatggagttaccatgagagttaaataaggtaacctttgtaaagtgtagaaggctgtctagcattctgataagtgatcagtaaacatttagcccttattatcattaatatcttaagagctatgagagaggtatgtacactggtctgcaggaggatagaaaagcaaatgactgactgtgacaggggtagtctgggaacgcttcctggaagaggaggtttaatgtggggcttggcagatgagtaggagtttgccatgtagagctgagaaaacagctaaagggagtgcatatattctagggagagtgtgttgctctgtaatgggaaaggaggagtgtgtggggtgcggggaaagggtgaaagccggagagaacagagtggatggatggtaggaaaggctggaggaaaacgcctcctggtccaggctgtgaacagagggtctcgtactcaaacagaggacctgggaaaccattaacaatgagcccctgattcccaatcctgtccagggttctttccaccactccccacaggattgctcagtaatcacaggtaccattacagaccagggggtatttgtacattgttgccataaaaactcgcaggaaatgactcatggactcttgtcaccagcaggaatcaggccagcgtatgtaatgaaaactcttgcgttatctttttagaaggatgtgactgtattttatgagtatgcagcagggtcaccacacaccttttgctcctgggcccctcccctgtgtgtagcccaggccccggtttgtgctcgagggccagacggccctatggtccccagtttcctccgtagatcacacagggaggcagcgaggcagggtgcaaggatgttaggggtggaaggggtgacaccgggagcaaagactgctaccccttggcctggataaacctgtctgacattcccgacctctgaagtcatccatcatggctgcgctggctcagacacttcaagggccactttgcctgatacgggcagttccagtcataaccgataaagcagaagatggtccctggggtgtgaaactctgtgcgagttgaagaaaaagcttaaaagaactctggatttgtctgcttacctgacaatagactgccggccctgcaacattgaacatgtttctgagcctggattgccagtcgggttgtaccaatggttgcatttgttaccacagctgcacatggaatgtgtggggtttgcatgagtgtgtgtgttgggcattatatgtgagcttgagtaaatccaattcacagcaatgtcatatggagaagaaaaaactttcctttttagctgtcctcataggaagttgttaatccaggtttactgagttcactttataaatatatttctaaataaagacttttttgtctttttatgaaaaaactaggccaggtgggatggttcacgcctgtaaccccagcactttgggaggctaagctgggaggaatgctcagggccaggagttcgaaaccaaattgggcgacatagtgagacctggtctctacagcaaatacacacacacacacacacacacacttatgcacacatacaccatacatacacatacagttagtcacacatatacacacatacacacaccacacacacatacacacatagatacacaaatacatatacaccaca

SEQ ID NO: 55631 - DNA, 719 bp, Homo sapiens
ggcttgagaccaaatttccacatctgtaaaacagcaatattctaacacaccgtagcggctttagcacacacgacacgattcctagcgataggaaattgtcagaaacgtaaattcctctttcccttcctcccaactctgttctgttccctcttgtgtgatatgagagattttagtagatggcctctctaaggtcttttaaatgcactgtgattctacgtttttcctttaattaaggtcacaccacacagtccattgttcgagtcagaggtggtgtcgtaatgcctcaatggatggctagtcttcccttcctggagcagcagtgagacgttcagaccctttctgaccctcctcccactgtccaccttggctctccctggctcacctccagcctgagctcatgggttgggaatgtgtaggccgatcctctgctcactggagtgcttgcaagagggccttggggtaacatgttctgagacctattcctatactgcctgccccagctgatagcaggcctgggaaacccattaatcattgtcctcggtggccccgcagacctgcgtttactctcactgcttctctatctgctgttccaagccaactgttcttagatggaaaatgcagcctattgttgtcttggtggaaaggcgctaaaatgatggaatgctttctttgttcaggaagttaggagtatgtggggtgggggagatggcttaatgcct

SEQ ID NO: 55632 - DNA, 1409 bp, Homo sapiens
gacaccttggtgggggtccaggcatttgtaggtaccctcaggagcacaggcacccacaacctgtcactgggccatgcaccccagggcccaggcagagctgccacctcgctgtctccaagccgaccttgcctggcgctagctctggagcctgctgcagtccccatcctgtcctacctgcccagtgtgcgcccattccacatactgctcttgttggcagggtgggctgtggtcctgctgggagggacctgggagcttcaaggcaggctagggcaggctgaatctagaggagggaagggagggaggaagcaaggtataagaaaaaaactgcttctctctactctcacaccactcacctctggtcaccaaataaagtggggatgtttctccccaccaacaaaatctataaatggaaaggttttccctgagttctacgagcgatccttgcaaattagttaaacccgaggagggaaacacggttactggtttattatacaggatcttatcaaggatagggaggaacagccaggtgaggagaggcacagggcagggcatgtgggaaagggtgggcacctctctgccgtctctggggcactgcccttcaggggcctctgcatggtccaccctccagaagctccaaaccctaaccttttcggtttctatggaggcttcgttatgaagggcatgatcgattacatcactggctgttggtgattaactcaaccttcagcctctccgcccttgtaggtcagtgtgtgggactgaaagttccaaccctttaatcacagggttggttcccctggcaaccagccccatcctgaagctatccaggagctcaagagtcacctcgttccagcaaaggatgctcctatcacccaggaaatcccaggggctttaggatctctgcatcagatgctgctgtcactcagaaaggtacaaaggtcttaggagctctgcctcaggaaccagggggcagagtccaaatatgtatttccgaccatatcacaatatcacacaaggtagtcctggcccagagcctgccaagtgccaggcaataggacacacattctctcgtgcagtccttcccacaaactcgggagacaggtataactctccccattttactaaatgaggaactgagctcagaagttctgtgctttacgccaagtctcagcactggcccatggtggagctgggcccatacccttcccctggtcttcctggtccctgagcagctgcctgcagccctccggggacaaggggtctctggaagagggtggccgcagtctggcagtctacctttctgtctgagggggcttggttcctgattttcttctcctctttgcttggcttgtctaactcgcaggtttttggggcttttgggtaatgattgggtctgagtaccacgttta

SEQ ID NO: 55633 - DNA, 2196 bp, Homo sapiens
gaggtgggagtatcatttgagcccgagaggtcgagggggcagtgagccatgaccccaccactgcactccagcctggtgacaagcaaacaaaaacacaaaaatatttgatgtgtgaacaaatgaaaagtttggtagagtgtgttgtggggacagcagtatggtgtgagggaaggagagagttcagtctattataatcattagtctattgacttgtggtaattgagctataggagataaattcctacttactctacacatttaatggactcttcctcccaccccatcttccctgtccctttctttttccacagcagctctgcaacgggccaatagcttccagtctccaaccccaagcaaataccagaactggaggagagaattctggtggagtgagtcactagctctctgggggtgggaggctggggctgggcagaagatctctggttaattctcaggggcagccgttctcattccttacatggtatctctctggcatggcctcctggttgtcagaggcaagaaataaaatataagcttgactttatttccactgctgactagagggagccttttccaagggactcaagatcttcccatccccctccaccccacccctggctcaggaattatggagccttaggattctacagtttcacccagacagggccttagccatcattgcctctaagctttttgaaatacagatgagtaaactgaggttcaggaactctatgatttgattctgtacactggagtgagactgggccatcagattaacggcctcacacaaaacaggatgctacacacagacacccacacatccacacacacacacatgcacacgcacacacactcacacccctacacatacacacacatacacacctgctcctttttctgagtcacccttggtcccagtgtcctggggaagagcagggctgtggcaggtgctgaggcggcaggccctgccagggggcgcagtgaacacgcacagtctcacagcatctaggcaggccggggatccagggactgcagcactcactgagcagagttacctcctcaggccctgagcgaggggcagagactcttcatccagttccaggctcatcgctgccttccacctccccccacacccactccctctccagcctcaccctaggagaggaggacccagaaaggccttggcttagacaggggtttctaccaagaaacgttgttgcagttggaactgagccctggtcttccttccttctgagtcaaggctcccagccagtgagtcattcccccaccatccccagacgcaccaccgtcacaccaggtcaggctgggacaggggcaccttgggagcaggacccagggctgcactcttgggcaggccacttcatctgaggacagcctagagtcactcctgaatcctctgacagcccccagcggcgacagcagagggcagaggagctagcattgccacacatgggtcatcgcctttactgccctgctctggccctccccaagtccctggaagcctgctgcccaggcccggactatatgagtgtagggtccatcccaaggcttccagcccactctactgtgtgccaccagtgtgggggatcagtccctcctcaggaagctcccagcctggggtgagagcagggaggctggtgggagaccctcccaatagggctgggtcgctgggggaggtgcaggagcaagaggactgctgagcagccccatggtgtctgggatgggcctgggaaactcagcctttagttatcaaggagtattgcacagcgtttctcgagagtatacaaaagctgctttgagggcagggcttgagttttgatcatttcaatcagcctagtgtctagcatggtctggcccggaggaggaacccaatccttgtttgctgaatcaatgaatgaagtaaggaaccaaggagcgagctggctggactgcgtacaaagggaggacatggattcaggcctgctcaggctgccgcccctagagggcgctccaagactttgagggggatttgagccttgcaaaacctccaagttctgggaagctgcaccatggagtcccagtctcccgaaaatccccagagctgaaagccacgagagccatcttttttattgtctttactttgcccaaaagaaaacctcagggagcagggctggcattgccattgggagcagaatg

SEQ ID NO: 55634 - DNA, 2083 bp, Homo sapiens
ttatttaggcaggataaattttgcgggaagtcctgtaggagctcatggttgtgcttttcccattcatgtttccaccaccacgtgggatcttcctttgtataagctgctggaaacacggatgtcttacaagaataagaagcctcggctttacccttgtgcactccaagcttctcagtcttggatgggagtagagacgaggaggttgacggtcatggataggttcaggagtgattggttctgcccactttggtggggcctggacacattttggttcactgcaataatttcttccaggagctgcagtcttgtgggcgcaagacgtgggcctgataaccccacaggcagtagtgctggggcagagcgagctcaccagccgccggctggaagaccccgggagagtagcagggttgggttggttctcagatgtgttttgcgccaggctgtgtggtggggacagagcctgggtaaatgaagctttccggctcgaccgctcccaacctgggcacacacgtcctcctgtcctgcaaggggcagttttggggcatcctccctgcttggggcaacccaggggcgcaaggcgcggccccgggagcgcagctccttccagggcagagggcggcgcgagggagggagcgagggagggagcgagggaagggaaaggcgagcgtgagctgcctcaaatgcttggaataattccgcttccgtttggaaagccgcagcctcagtcccgccgccgcccgctgcgtccgcccagcgccagctccgcgtcccgaccggcccgcggcagcctgcgccgcgccatggccacctccccgcagaagtcgccttctgtccccaagtctcccactcccaagtcgcccccgtcccgcaagaaagatgattccttcttggggaaactcggagggaccctggcccggaggaagaaagccaaggagggtgagtgcggccaggccggccgggcgggcggtaggagccgggggtgccgtaggggccgaggggccggggcactgggaccgggcgggagcgcgccgcgggtgcccggcgcggtggggcgcgcggcgatgcgtgcgcgcgcttcccgggtacgtcgggcaggagcgacgcgcaccccacactgagcccggggctcgcgggccatcgaggccaccccgcccgctcgcggtcgcccgggcgctgccctcctgggccggggaccaggccaacgcccccgccgggccgtgggcgggcgccgcttggcggccggaggcggcgggaccggagcccaggcggggccccagcccgcagacagtgcgatccagtaggccctgccccgccctctgcgcccgaaggctggcatttcccaagtttccgctgcagctttcctgggcgccgtcgctcttactcgttgccttcattggtccttaaaatcaggtcgtttcctggacctgctgacgtcctctggcagcggcgtcgtggctttggcctcttcgggatcttttgtccatcccgagggctgagaagggctctgttaatggagtaggtggacatcgagtgtttgttgaatgaatgagcgaaaaactggcaaacctagcgtgccctcggtgtaatacacaataaactcccaccaaaggagaaaacctgcgtgagacacaaacttcgtcatgggcctgctgtgaactcaggcattcagggctttcgtaaaaacctttgttttttccccaccagagtgaattgaggcgaccttattcttttttttttttttttttttcagggtagtttgcatgtaaaatatttttttttcccatgcacagattttgcgtcctggtttttggtttgaaaacgaggtggcagttctcaagaagcactgtggtgactggtgtgtagatagaagttgctgagttaaacatttttgttttaaacattttttagttgatgcatgatgtacatagttctggggcacatgtgataatgtaatacattcatataatttgtaaagatcaaattgcacaggaaaggggtcccagtccagaccccaagagagggttcttggatctcacgcaagaaagaattcagggtgagtccacacagtaaagtgaaagcaagt

SEQ ID NO: 55635 - DNA, 3183 bp, Homo sapiens
tctcctcagttacccatatatagggatatagggattcctcgggcacaaaatatgttgttatttaatcctgaggcctcagctggaaaagagagccaagtgcctagaacgaatgaggtccactgtgcgggaactgctttgcagtttgttaaataattataacaatcacccgaaactttagacggttctgtccccagtgggtcgattttacccgttttctgatttaccgactgcgtctatgtcacttttgcgtcactacctccaatggcagggttaaaatgattcctttaataatgaaatgaagtttctcaataatgaaagggctaacttaaagtcgccggatgcagcatttcaaagtttaggaagttacttttgaaaagtacaaccggcagagatgagtgaacttagttttttaactgacttggagaagaccttgctagcagggcaggtttattacgaactctgtaattatccttctttgctaagctaaaggttttcctttcccaaccgtaagacagatttcgacttgagtgagagctgtgaacttttataaaagtgaaagggaagagaagaaatggcaggctgggaatctggcccggagacggcgtccaccgcgctcgagagcaacaatctgcatcaccagaaaggcaacttctctaccctacacttgcagacttccgcgagtccgggagcactcaacgcagtcacccgcgcttccgcgtcccggactagggaaactgaggcacggtaggcgcgtcgcgcgcaactcccgcctcggcgcctgccccctggaagaaacccaggcttccagagttcttcgcgcgagcgcagggacttccaagccgcgcagctcccgtccgccccgccccgccccgccccggctcgggacaaagcccggagcccgcgccgggagacggagggcggctcccgcgcgagccacgctcccccgtgggcgcgagactccgcccagctgccgaaagcccgcgccccaacggcgaagcagccgcgccggtccgccccgattccccatgacgtcaccggcggcggcaggccccgcctccagccccgggcggcaggccgcatgacgtcaccgaggccccacccctccggagcgagttcggtcctggcgttcatttcattcctgtcctcattccgaacattcttagcatcgctcgcgccgcgccgcgccgcctgagccgagccgagcctctgctgccgccgccgcggccccgccgcccgccgcgggcgcccaccaagcactttgcagactcgcttccaccctgcgggccattccgcgcggcggggcccgggcccggggcggccgcgtccaggcacaggccatgcagtgacgcccccccacccctccacctttgcccggagcgcgggcagcagcccagcgcgccagccggccccggggcaggagcggtgctaggcaggggtggggtggccgggcccagggaccgggagccggggagggagccgggcaccgagcagagggcgggggaagcggcgccgaagtttgcctcggactcgccgggcgctgcggtggctccctgggccgaggtaagttggcgcgcggggcggatgctggggtgcggggggcgcacggggcagcggggggccggcggcgcgtccctcgcgggccgctctttctttgcgggctctgctttgtgtgcgacggcgggcgggcacgcggagggccgcggccgggcccccacacccgcctccccgcgccccctccgaggtgagcggccgggcgccgccgcgcgacttgccaggacgccaagttgggccgcgcgctgggagcccgcgcggcaacaggcggcccccggccggccgcgccgcgccccccgcgcgccccctctcccgccgcctgcacgcgcacacacgcacacaccctcgggcgccttggacggggtgcgctggggagccagaagttcggagcgagcgcgggcgggcagagccgccgcctcggagcccggagccggcctgcacccccctgctttcgccgccgccccccggcgccgggtacccccgaggccggcccgggtctgcgcagacttgtgccgctggcggggggttcgctccttcttctcaaagatgaaaaagggcacggtcgtctttgccgcttctccaggactgttgctgccgctgccgccgccgcttcattgcacattcaagtggaaaattttcaggagtcagcagaaacattgtgtccaaaaaagactgagtcgcagttaccaccaaacccaggaggagactctccctggaaaacttcccttccctttcggtaggaaatactgggggatttgtttgttgattggaagagaaatgatccccgggggggagaaaatctgggtacacttctagtctttgttcgtaacagcaacacttgttttcaaaagtccagagtcccgctttaaagaaagtttaacttctgtgacttttcttctttttaaaaaaataacttttgtatttttaaaaaatcaaagcaatatttttaatgagtcgaaaacaatgaggactcacacctcccctctcatgaaaataaatgaaatccagatcagaattttctttgcttttaaattgccttttttaaaagatttatttaaagttggatagtgtcactatataaaaatatttatgaaacaatgaaataccagccaccagcgtttctcaggaggcttgttaacttcttagaagcaagtggcttcctgtgatttgcagaaatgaaaattgacctcagtgagccctggaaacttagagacagatgatgttccaggagcagggaatgtaaaaaggccatgtttaaaaacagtgcgttggaaggagcccaggtcttgggatagaaaggtctgttaagcctgccacatttcaaaatagtaaaaagaaatactaaaaacactacacgtattgcaaaggagcagaaccttatcagttcacaacaaccacagatttctttctccccgctttccaccttggttgtttttggaagttcaggtggtctgatggcttggggtgcgctggttgcctgcaatggttacctgagtagacatatccctcccttcagggagatgtgatccactgtgtagtcacagccgggagtgggctcctttctctgcaggctgcagtgaatcttgctggtcttctacggataggggcttctctgaggcacagattggggaa

SEQ ID NO: 55636 - DNA, 4678 bp, Homo sapiens
tctcatttgccactttcatgcttgtgcttgtcatcttgtcctttcctcccttaagaaaaagaccaaactgaagaattaccatggatggtttgtggtttgacttgcctcctgaaggccaaagctcatgttaatgtaggcttcacagaagtctttagtcattgccttcatcatgtctgcctgatagtttgttctattccttgtatacataaccaggacatgagagattccttatcttattaccaccgtgagccattcaggctgcaagctgtatttcgatggtattgttgggtacgtttgtactcatctgtttcaataaatattgattgaattaagctttgtacttcttctccaaagtgtttaaaatagaatgtatttaatgtcctagtcatttaaagaatttatcactagtctattatttttataagcttaaataagttaaagatttgtagttttagatagatttatgcattggatccctagttgtaacatagctattgttttagtgctgcgggcctatagtagtaggcctgcaagtctaagatgagtgttttttatttaacaagtctgctattaaacttatttttagtattataatttctgtctttgcttcttggaaattgttttatgcccatgttggtgcatcatagactatgcacttaggccaaccaccccccagtccccccagcaaagcagggctcattttaaagacacgctctaatgctttcttcagagtttccattcagacctacagttttagcttcagtaatacttttttgttttgttggtgaaacaaagctgtatgcgttcacagtgcagccaacacagtctcatgacggcacaagtgaatagtcctgaaattatcatcattctccacaccactgagaagttaaccagcatcctggcctgggaaattttggatacacatttaatgcccctcacccaccaccccggcttttttttctttttaaagccgcaagcttaatgtaatggttcctctgtattaaaggaaagtacagtattgtaggggtttatttcccccccgcccccgctttcctccgtgggcactgagagtagggggaagagccccgtaattcacaaggcaggcttctgtgccccgcggtaaactcagtttcacaaagggaattttcattatggtcctgtggctccctaacatagtggaggcttcaggaggcaagtggtaaaagctaccaaagaaaaagctggactggagccactgacgtcatgtcagtaaatctgctggaggagcccagccatgcagcgcctgccagccggcccctgcactttggccttgcctggtcaactgttcttactgcttcctccacccccaccccacagaacagcctgtgttttttgtgttcttttcccccttttccttctgtgcaactgggctgtgttgaaacccataaaggcttttgaaaaccacccctactggtcctgtgcttaatgtcttgtgtggggatagtggggagaacccaacaatccatgaatgagggaggctttaaaagttttttctagtggggacctctttgtgatgaataaatccacagggaacatcatggaaagcagccagaggtgcgagcccctggtgcttagtacttttaaagaacttcgcttttaagtcctgggctgtgtgcacatgtgtgtgtgcgtgtgtgcatgcgcacagtaaaggacagagaaggccagtcagcacatgggtggaaatacagaatttcagccttctagcagaggatgatttaagagaatgagttccaatgcgagtcctttattacccattaatcattggtctgctcactctgaactctggtttgcaactggaacagttaaatcttaagctacatgcttctgtacatcctggatatttagagtcacaaccccagatgggcctgaattaaaatattgctgtgctaaatctatttttacatctaggggaatgacatctaaaaataaaccttatcccacctgttatccacttttgggaagttgaaacgctgttaagtcgcagcccatggattaagctttgatgacggcttcccatgtgatgcctgcattccacttttcctgccactggcatgatgttttcattgtttcggtaaccgttgtcctcctgtttattttgctgtgaatattcatttgcaaataagagtgaagcataggttcagactggttttgattttcctgaatcttagggtcagaaacatattaaaagcagtatcttatccatgaatcatgagatgagtcagttcctgaaaccactacaagcctcatagttcttggctacaagcaaaggcaggaaatccaggcttcaataacttcctttcccagtcctggctatagccgcgttggtggttaggttctgctgcctgcctttgtaagcggtaggaagatgtatgtctgaggaacaaaggcacttgagtcaatttactgaaactgtttataatttgtggtcttgatctgaatgtcaggctgcgttggcacaccctgctctgctgtgcggcccggcacaactcagccaggaaaggcggcaggctgagtccggggaagtgccccagcaaacacatggcaaatgtttcaaggggctttagtgttccagtgaatcctaaaactaggggacatgcaagccgacactaggcagaaagctctggattccatatgtatagttgaagtatcgactctttgtttgttcttcacttgagagaaaggagagaaaaaagagagagaggggagagagacgagagaacaaactaacacactcgccagcctgccaagctctggcctgtctcttgcttttacttgcagtttacttccttatatacagggtcctctttttttttttttccttttgcagtgtttcacgccagtcttcctgacttcagaatcagttttataactgttttattaaatattttaaagagtaagggagaaacacgaagttgtctcccaatgttgggtctgctgtgactcgtatttatttttctcctttatgagcagtgcccactttgtgtacgtacccaagtcagagcagagttgggttggtgtttctgtgtgaagttgggactcactgttgctttgtgctttacttgtgaatttatgagctttttcaatcttgagaaaaattaaaattgagtgtgactcattttcatttaccaactcttaccttctttttctacgctaattggtgttagctagcgtgggatttgagaaaatgggactgaaatgagacccttctcccccctactgtaggtttatatggagtcattggaagttctgatagaagtctaaaaatagcatgggtagacaaaccctgtgaaaagacactgaggaagatggaaaaaaatttgagatgatgagcagttagatattgatgctaccttttaaattgagcttgtttccaattcatagctggcaatagctcagaaaggtcaaattctatttcagcctttgtaaagaataaaataaaagcaaatgcaaaagtttgcctggctttttaatcaagtgtggctaattcagcgcacagccaggctggcgagggccacttcgttcttacttgtcgtttgtattttgtgtttgggtaattttctgttcaacttcaggcctcactaaaaggctctgataagctgttgagaaagtcgggctcattttgattttagaggcttgactgagagtcataatttctggctgtggttctccagatttcaggctggtacaaaaactccttagtcttaggtgagtttctttggaaatcactgtgaaaatatattactctcattaacatgtaaatagtcactgtctaaacttggaggagatttttccttatgttaagagaggtacaaatccagttatttttatttgtccttcattgatctgacagttaacttctttttcatgtagatttcaggctgggattagagactgaatcttgaattgcttatcgtctctagaccaagttgttcggggccagggattgattaattaattaaaatcaatgtaaatggatttgtaagcctcctgtaacagattatcctattagcaaccacacagagcacagcccatgatctgtgaggaatgtttgttgccttaagtgaaatggacccagactgatggactctttggggttactttatgaaaaacccagtggcttttgtaaggaaggggcctcacttaacctttacactgaacagatatttcctatagatggcagattattttattttctgagcctgccccagaaggcttgagttctgtttgtgtgttgtgtgagtttctactgtgcctgtgtctccccaacccttgcattcatgccgtccaagaccttgccatattttagccaggttctgccccctttcaggtgagattcctgctaagaactcttctctgaagaaaaaaggaggaaccagaaatacattcctatttgatagcaacaaagtggttttttcctccaacccaggcaaccaacaagcaagcaagctacaaagaagacagttgcttgttatttgaggctctgactgtacagctgtgcctccttagagtggttaagaagacaagatgatactttaggaaaactttgtggatttaacaaaggtcggagttcattcagtggctgtcatgtacattgtgtgtgtttttttgttttgtttttgtttcgtaattgtgttgg

SEQ ID NO: 55637 - DNA, 604 bp, Homo sapiens
tgctgaccactcaaggaaaagttgaactacaaatatttcaaatgaggtgataaattactgttgggttcttaattgtctgacaaagaaactccattgttctaaacctttcaaatatagtgtgattaccctcgtttgtgtgtcttgctcaattttaaagtataaatagagggagttccattaagcaatacaggctgttttcttaccatgcttacaagggctgttagagtatcaatgatgaaattgaaacttagtttgaacttgatatgcaaaacaaaataaatttgactcgtttgaaatattgcgtaaatatgttccagagcctggcaccaagtatctggggatttttagagctgacctcactgaacattgaattataagatacattttaacagtgtttttgaactggttgaagaaacccctcttccattcccttcaagtcaagtatttcctgataagaaatattctacattaaaagagaagtttcctgttgcacttcttcaggtttctgggttagtttaattcaatggattcctgaagctgcaagtgaaaggttaaataggtaccatttgcaactacttatctgtgaatcagaattttttgaata

SEQ ID NO: 55638 - DNA, 1531 bp, Homo sapiens
ggtatcagaatgagagtgcacacaagtaagtgggagtatgtattgattagtcagtacagcaaagagactgaaacctgtggtcgctacactcctctggatgcagaggactggtcaaaaaattgcagaatcatccttttataagatagtatgttctcataacagctctttgaggatcagggaggtaggctttgtcagtggaggccccagagccctggtgtggaaatggccatagactcccagccctggagggtctccaggccttggcaaagtgttcttctcggagctccatatgaacatcatgtggcatctttgatttcctctttcggacctctgattcagggtgttatttcaagttaattggttagaagcgtgaaacaaacagctatgtggtagaacaggctagaagctcccaaagccgggaccccaccgatcacaggatgtatttcaaggcctggaatatagaaggtgtcagtaatgtttgctgaataaatgcttatgggagatgaattatggttcaaacagagaacgtaggtgattaagcctgtaagccctgagggcctctcctgtgggaggaagtggctagaaaaaaagaaggaaaaaaagaggaagatgtttatttaatgatcttagattgagaaagaagaagccctattttttatgttggcaaatgttagttgaagagatagaaaagatttctgcacaaaatatggacaatagcagagcaagggttaattctggaatgctcagaacagatgagtaatggggaatttttgaaatagtttggttcctgtgagaatagcagggccagcgtcatcagcattttgattgggaagcttaatgtgtggggggtatgcaaaagtgtatgcacaaggtgtgagctcatgtgcaatccgggtacaaagtagctaattaaagatggctcaagaattggtcataagggaggtagaaggaaaagaacatgaaagtattaccaagttatgctttccaacagcttttctgtggcagtggatgagccctgggattcaggaagatgtggattcataaatcatttattgagggcctgcactgtgctttgaatgtgatggggacaacagacataaaataacttaaaaagctgacctgtgtgagcagttaacataccaggcactttcccattgctataggatgtgcgatcttgattattcctcaaaaacaacccaataatataggtactgtaattatgcccattttgctgctgaggaaagtgaggtccagcaaggtcaagttatttgcttgaggtcacatagtaaataagctgtggagctgacatttacaaccaagccagtcaatacaaatgactccaatattgatatggaaggaagtatattctgtactagagatatacctggtttagtagtggagcagcacaaagtgtgatcatttatgattggggaattgacttgtatatgtttgagaatgaaagagagcatgagacagacagacttagctaactttgaactttgggaaaaagatcatgtagcggtttttaaac

SEQ ID NO: 55639 - DNA, 1098 bp, Homo sapiens
ttctttttgagaaaaatccagtcactttttttttaacccgaggaagttgaatcctgaagaaggggagatttatctctgccctttgaacttaaagcccataaagtaaaatatatagtttaaaacaattacatgttccccccatctcaccgccgcccgacccttcacagatagtgtttgacaaaacactatttaggaaagtgcctgactggtggtggaggggccttgcttcctgtgaatctgcattccctgtgccacttgcttccttccctgagaggttctggtggccaggtgttatgaatccaggtcaagatgaagaaaacacacttttgtcatttcttcaggcatgtggccgacccgaccgggtctcaggtattccagatatgagcgatgtgccgattgcgcaaggctggaagcattgctcactcggagataccgaggcctgcttgccccgagccctttgttctcctggttgaaagcagttaattagcaactgtctccatagcaacaccctcatagtccaaaaacattgtctagtttttcagtttagcttatcacactgtttacctgaagggcttttcactgctctgagtctcatttgagttggcggcatgcctgttggggaagtgaattgtcaagatagaaaaaaacaccatggtagcaagaagccgaggagacttctctctacccagcccaacccgggccctggattctgggaaaacagaagttgcgcctgcctaacattttcacctgtattttttttttttgttttgccataaaactgctgttctctccaccaagccctgaattgtgaggatttttcccccctttccccgagaggctttctaagctctttaatattccctgtttatagtacatttccatgattagtcatcttgaaaccccgagtgttctcagcccctgtacattcgaggaaattttgcttccctgagggtcttggcatttgcaaaggcccttggatgaaggattatgagtctgaatgtgaattagtcagagcagctttgtttttaggcataatgaggaaaggcttctctttcttggtttaagttcattgtttgtgggaagaaggcaacttcaggt

SEQ ID NO: 55640 - DNA, 3528 bp, Homo sapiens
agactgggcaacagagcaagactccatctccaaaaaaaggaaaaaaaaaaaactatttattgagcacgtacttaatagctaccagatctggggtcacagagaaccagacaggtgctttaccatggagcagtcactattctaggaggtggatgaatagtctgtagataagtaatggcagtgcagcagtagcaggggtgcatgctcagtacttgaggttacaaagcaggaaatgactaactcagtttggatggctcccacagacattggggaggaagtgttccaggtagggtatacaggaatgaataggactttgcaggtaaaagagaagagaaagaacatgtaaggataggtggttccacaaaggcatggaggtatctttggaaaagaatgacagtggtctggggaactctatgaagagccacattctagaatagaggagccctatacaggagtgggctcttagctttaggtaccagactaaggagtttgtgttttgcttgtagtggatgagaacctgttggtataggaaggcaacataactagatgtggaggtgaaagaaaagacaaatgcctgcaagatgagtggcaggacatggtgggcgcctgagagcctgtgggtagcagtctatttaggtcacagttgggggcagcaagttcaggctccattaaatctcatctttttttcctttttttttttttttcgagacagagtctcactctgttgcccaggctggagtgcagcggcgcgatcttggctcactgcaacctccgcccccttggttcaagcaattcccttgcctcagcctccctagtagctgggattacaggtgtgtgccaccacgtcaggctaatttttgtatttttagtagagacggggtttcaccatgttggccaggctggtctcaaactcctgacctcaagtgacccacccgccttggcctcccaaagtgctgggattacaggcatgagccaccatgcctggcctccattaaatctcatctacactttaagtgtatgggataccaagatgtgaaagacatggactgtaccttgaagaggcttgtagtctgttacacagggaactcagcagagtctgattgtgggcggttccctgacacatgaagtaaagaactatgagaccaggacagaatggtgaagctcatgctgcttgcctagttaagagtcaagccatcattcccctcatatactaagtgacttgtttttaattcatagtactttttgtttcactttataatattgtggtctttcccagttgctggtctggtgaagtgggctctgggcacctggctgtctggcttacccctcttcatacactccatgtctagcacatgtttcaggcacgtttcaggtgaggtttcttggaggggacatctgagctggacctggaaagattttccttggtggtcttaagggttattgcagctataataccttagcatggcagggtgggttcagggaactggaagcttggtaggtattttgatggtggtaaaatgaattgtggtggtggtcgtggtggtggtgtgtcatgaaaaatagttaggggccagatggtggggacaacactgaacaccatactaaagcagtttattcctttagatgtgggcagtaggagccttggaaggtcttataactgagaactgtgttttaggtagctgtgtagaggatggattagaaagaaaaatgatcagaggcatagttacagtggtaaggctagtcaaactactcattagaggattaagaaagtgattatgtggcgtatctttattgcctcatagagaatgagccactaagaaaacttcattcatatttctttttcatctagaaatagttagaacagaaataacttctatctaacatagcagtgttgtattcactatgcagccttaaacatttttacttgctcatctctttctgacccctgtaacccaaggcaaatgtgtagtttgtaagcggttcctctaagatgcgggagaacacagtgttctatggagttgtcacatgataatgttatcagctgccgttgactgatacaaactcctgagaaggtgggacttgagttatcgccagacactcactggcagggatatgagatagaagttctgagtaaccaggagttaacacagcctttctctgtatgttctttctctgaaagctgttttttttaataagcccctgggtgaatgcagacacatattatctccagggattgctattgtttacctcctgaaggccgtcagtcctttggtgaacttctagtttgggaacaagtagtaccagcccctgacaaccctgaatgggcggcctggctgtttctggtgattttccacattggtgctgatttctggtcaatgatttatattgaggattaactgagaacttcctcgttggatatgctgtgggactggttcagaggctgtttttcatgagcctgtccttacacctaatcttagcctgtgccccttctccctccctggctctccatccctctcactctgtcatttactccatcagtctgtagccactgaggacctgctgtgttctcagcactggatgcacagtgatgagcaaaacccagtttatgctctgggctcctgtggacttctctgtctggtagtagaggggtaggcacatgttcatcttatagtctcattcagataaatggaacacagtagctgtgctgtgtgctgtgaccgagaggcgtaggttcctgtgagagcacatgttagggtgatctgaccagttctcatgggttggagttcttccaaacaagacataagcacctccaaggcagagatggcgtgttttctttttctttctttttttagacagggtctcactctgttgtccaggctggagtacagtggtgtgatcttggctcactgcatgcttgaactcctgggttcaagcaatcctcctgcttcagcctcctgagtacctgggaccacaggcaggtgctaccaagcctggctgatttttttttttttttttttttaagagatagggtctcactctcagccaggctggtctcaaactcctgggctcaagttatcctcctgcctcagcctcccaaagtgcttggattacaggcgtgagccactgcacccagcttgagatggcatctttttacccccataattttagcatgtttcttgtgttccatccacacacagtccatgtgtgaccagtggatgactggccagcttccgtaggcctcctttcttttccactattgctgggacaagttgctatggcatccgtgtagaagaaatggttaattagtaactcctcacaggttagttaataaatgttctttactgcttcctctggcagtgtccacagatacatacctcctagatcttcaggaagatggatggggagataaaacacccccattctgtagacctctcccaagacagtgacatgtggtttcctcagtgtccccttcatctatactttttggttgttggcttgcttgctttctttttttttcttttttctttcttt

SEQ ID NO: 55641 - DNA, 600 bp, Homo sapiens
tcatgttttgaattgaagcttactccctcaaatccttagtaatggcctcttaggctattccattgaatcaggtttgaaaagccccctgttttaggcagaaggaaaaggaggtgtctacctcttatgctgtcccttccagcctttacagagagctcctgtgtcccatttaaagcccatgtttttaaattctgtagttttgaagttctgccatgttcctaggaagaaaacagactccaggagagagtggtcatttgatgtcacattgatagatgagtcatcctagctacaaaagttactctcctgaaaatccgttagaataaattctaaaggtcagctttatgcttctactaattggcagttgttctcaatgtgcttgtttgtggactagatcacccccaaattgtgtagacttaaattttagtaaagaaaaaaattgttctagtgaaagtctaagatttctacgtagatttgaacttgaaaagcataggaatgattactgaattcagtccagtggttttcattgagaacctaagtgtgttctaggtccttttgtagacgttgggcacatagaattgaatccagagtttctgttcttgagga

SEQ ID NO: 55642 - DNA, 624 bp, Homo sapiens
aactaagaggaaaggaagtcttcgccgtgccctccgctcggcaggaatacatcttaggcagtagatgtattcacgtcaggctctggatgtgtattgaagaaaaacctgtacttgctgacattgcatcatcccagtagagcagaaagagacctgagcccctctgattatgtccagtcgccggtgactaatttatgagctacatgtgctcccccggggccattttcttgttctcgccctggtggcctttatgatttgatttctgaacaggccattctttccaaactgctgttccttccaataggcagagagcttaaagttcaaattgttgatttaattcttttgagttcaagaacttcactggggcattgctaaagtccacactgctgaatcatgtttgtatcatcactgattccatccaggaatgggcctgtccacagggaaggtagacgtacttcacttcactctgtgttgctccgtgaagccccctgagccactctgctccttcaggacttggctgttagcagtgcaggaggcaaggaaagcctgagcaacaacctcctttgtctgtgtccacaccaagacacttggccttgtcacgggatttgggaaatgatataatctttc

SEQ ID NO: 55643 - DNA, 671 bp, Homo sapiens
tgctcttgattcctgactgcactacaatcccttctagaatgctgcttgtccctcccctccatctgctttccttttggcagactctaatggtcctttgggtcttgtctaacacacctcttctagggaaagccttccttgcccctccaagatgggttggatgccactccagggtcccccagaacctcatgctctcccttatcagaggacacaggacattgtgttgggaatgtttacttggctgtgccctcccactagactgtgaactctttgcaagccagaactggcgattagttcattgtcaaatccctagcgtaggacctggagcagagaggtactcaataaatatttgctgagtgaatcattgaatgaacaaaagtgctttagccaagaggcaatggggagccatctaaggtcttgaagaaagggagtgagcttattattacacctgtgctcacaaggacaagttcagggcaaaccttgcactcagtggaccatcctcatcagcagttaaggatgaaacaagttcatttgcattgtggccttgggtttcttgcactgtaaagcttggctgttatctcttctggaccacatctgaatattagaaaatgccagaagccttcacagtttccccttatggaggtggaaagcataaaaatagcttgtgacttggg

SEQ ID NO: 55644 - DNA, 1503 bp, Homo sapiens
aagagaaggagcttaataaaaatttcaaatgcaagggctttcctaacctttgtctttaaaactgcagctgcttctgcacccattatcaccaatattcaccttttccttcttgcttaatttgtctccatgaagttaacaactctctgcatgctatacagtgtgtctgtgtcctccctctagaacataagctctgcgagggcagaaacttcttatctgttttactcactgctgtttccctagtgcctggtgcaaggaagacactaaatacatatgtgttgaaggaaaaggaggcaaggagatttgtttggagtctctgacaatggtatggtgggggaggatgaggatctggaaagggcaggcattgtggtagcaagaaagaggaaacctggaactaaacacgcaaaagcctaggccatcccctgggaccatcctgcacagggccttttcatctttgtggttctttctgtgggcccctgtgcccgtgatctgccatgagtcagcgtctaaggatcccccaggcctcctgtctgtaaattattaacacctctcctgtcctctgtttaactgcttagccaaggtcaccatcatttcctgcccagcctgactccccaggtgctcataacttgcctatgaatgtttgatgaaggatggcatttgccacgtgagcaagggaaaggaaccaaagttcacatagttcattttcaagcactctttttttcagtccaagaggtttaagtgccttttctctgctactaaatagcccctttcagtggctctctgcccaggtctgctttgagggccctctctgtgagtcggcaggctcctcttccacaggcgcctgtttctcttcagctcttccatttttttatgtgacttgttctttctgtgtctcacccttacccccaaataaattgaacaagtgggttttgggatcctccctcaggataactcagccatggccaaccatgcccccaaccacaaatgactaagagtgtgaggccctccaagctgcccacgtctccctctaggccaactgtcaattctaagccatccttgcggtttcttctgggaaagctatgggctatccttcacatcaacaaaacccctggcgacctgcctgggcctgcctggtcgtgctggggactgtgctgtggtaacagacagggcttctctgtcccatccacattctacaccacgctggcactgggtggggacagaggagtgggctggggttgttgtgattagagtccaatgccccagatagtgccatctggaaagggcagcccctggagattacttggaaactagggacacctggggacaacagttagcaggtctgagatggggaatgcagggctgagggtggaatttcaggacatttcagttttcaggaatgagctagaagctaagagatgaatgtagaccctgtggtagagtctaacatgccgattctgcagaggacgaccgatggaacatagacgcacatttttcagagtgaggcca

SEQ ID NO: 55645 - DNA, 954 bp, Homo sapiens
attcaaatagaaaaatgagccaaagatataatcataaattcatttaaaaaataaaaatgttgaagtccacaggtaggaaatcttcagtaagcaaaaaattctagctaaagcaacttagacataccgttttttatctctaaattattgaaaatgtcaagcagtgataaataacacttaatgctgtggagattcagtgaggctggttcccccaaagactgcaggtggcagtgtaaactagaacaaatgtttacatttcaggacgtcttcagagttccacaaatatttattgaatgtccattcattctttcgtggtggaatggaattcacactcagcccaatccaccattaatttagaggtaacctgattgccagttagctgcaagttgattttctgtattccgtaatgcttctagtcatacacttcatactgttttcaaatgatgcaatttgaaatgatgtcaggaaaattcagcatctttcatttcctctacttatcagcaaatctatgacaggtatagaggtggtcagaaacctgccaaaaatgctccaccattatctgggggaccaggcatgtacatggtgatgaaagttgtcaattaaacattgcccaatatccttctctggaattcttgcctaacaggaaacccccagtttctgcaaagaaattaaaagtagcgacagaggcatctttcagccaaaacatttaagaaagtcatttatggaattctcactaccctcttggaagtcaaaatgaaagacgatgtattttatacataactttgtaaagtctgccctctatcattcctcatagtaaatgcagccagtatccacagatttattctgtttcagatgagatgagatcctaaatatttttatctacaatttactgagcaccttcaatatgccaggcaactagtagatgtataaatgtttgatcccaggttgacacttact

SEQ ID NO: 55646 - DNA, 1026 bp, Homo sapiens
aagaatgcaggggaggaggggccgggtaggagcagagacagcaaacctgaggagcaggaggaaagtagtgagcactgcaagaatgggagggagcagggggtgcttttagaaggagtgagttatgcagcacagggccaggcctgtgggtgcaggcgcttgctcctccagccttgtcccccacccagatctgaaggctccgtgctctctcccgcttccccaccattttctctgcccaagtgccttctgcctgctgattgcccttatctttttagacttagcccagctgataccagctctgtgaagtgtttcccgatattcctctctctcccgacttccctctctccccgagttaaggacttcctgctctagtgtccccgcaacgccatccacagacctcaccacagcagctatcgcattgctgtaattatttcaaattcctcttcccctactaaactgtgaactccctgggcaggggccatgttctattcatcttttcaccccttgcatggggcctgacaaataagaagtgttcaaaaagtcaactgaatgaattgaaaaaaaaaaaaacaaaacatttccttggattcagctgaaaaggcaattgcagtaatttgaattgtgcaatttccattgtgtcgcctttgaaaaacagtttcacttttcctcctactaccgatgactcattcctggggcagataacacacatttctgaggtgcagaacttcactacatcaaatcttttgaaaatctgtttttgagtgttcttgtctaaagagaaaaacatgatgagctttcgtaatccctcaactcagcactgagtgatggaatactaaagatgttttggaaaccctttgattactgcaaagcatacaaagaagaacgggtgggtgaatgataaaaataaaacgctagcattggctacatgcactgatcgcttaacaaatggtagttaatgtcaggcatttggctaagtgattagccccattttctcactcaatacacagaacaccttacgaggtcaccctg

SEQ ID NO: 55647 - DNA, 2454 bp, Homo sapiens
tctattcagggagtttaacatctggaagagccgggagttctttgtgctaaaggccctctacaaagtgcctgagatgcaaaaataagtcactttctctgtcctctcagcaaccgagtcgcatgtcgttatcaaatttttattttctgtaactgtttccttccgtcttgctccgtagacagctttttgcagcagagagcgctgccgcggggctggtgtctactcttcagtaagtggtcaaaacctggctactggaaggaaatgcaatggaatcgctccgcgctcgagtattctctttggaactacgggaatgacagctccagtgggacacttggaggtcatgatgaacgcaaagaacgtgagaacacttgcagtcctcggggtggaaatgccttctagaaatactaagtatccgttctctcgttgagactttggcaaaccagggattttaggaagggtctggcactcaacgttcctaaaattggtttcctagatggagccggagggagagagggagtcaggaactgctgcttttcgtcggaatgcccggaggggagaagaagaaggaggaggggtgagggcgggcggccaaacgccagccggcaggggacccagagaagagggacatcccgggcgaccccgaggagcgcggcttgggcaccgcagtggccgcggctagtgggagacctgaggggaaagggagagggcaggggcgaggaacccagggagcgcgcgcggattggtcctctcctcggggcgtgcgctcctgtgcgccaaatgattggtggcaggaaagtagcaggtaaaccggctcccgccgcctcgccattggtcagcggcctctctagccgccacacaactggccagcgggctgccgagccgcgcgcggattggctgggggcggccgccgggaccggctcccttcgggcgttcggattggctggcgggaagaggcaggtatccgggcgctgcggctcctccattggtgggcggggaaggggggttgggcacagcgattggtgggcggggggccgggcctgggccggcggggagcggattggtcggaaagtaggttagtggtgcgacatttagggaaggcagaaagtaggtcagggacggaggtgcctgtttacccgcgccggactcaccgccgccgccgccgcgggatccgagtgcgggcgcgggcgcgggcgctcccggcgagccacggtgagtgtcaggccggcggcggccagcgacgcgatcccgcgcaccccgtcgggggccgttagcaccctcgcgggcgctgcgcccctgccgccgccccgggggcaacccggccgccgaagaaccctgcccgacgtgcccgctgccggccttaaagggcccgtgaccgctccctgcccccacccgggccgtggggaggctgcgccccttaaaggcgccgcgcccgtccgcccccatcctcctcgcgggggctgccgctgcgggctagggcaggcagaggtgctgcaggagcccttaaaggggccgggaaagtgttcgctggagtacccaccgcccttccgcgggcatcgctacctggcggggggagggggcagctagctgcctcttaaagggatagctctgcccttgggggcagtgactcggccgaagaggactcctagatgtgtccccgggagcttcggggatccccgaggggaccatgcctggtggctgcccctcaagggcgttgggcgaacggtgccgcgtctgcccttcctccccgcttcacttccctttcgggagcccgcgaggctgggtgggggcggggagggcgtctccgtcgggcttggggagtccaagtccgcccgccccttcggccctgtagccagggctggcgctgcacccgggaatccccggccggcacggggccgaccccagcctgcgaactttcgtggggcctgtgccgtccaggtcctgggcggccctcaaggatgccccgtgggtctgcgggcaggtgcgcgtcggcctggggatgtcgcccggagcccgggtgcgggccggccttggagtcccagagctccgcggagggcgcagcgagcctggctccagctccgggtttgacagatgtcagggaagaaaaggttcccgctcggctattgccgggcgttgacatcccagagagcttcccgtttgcttggaagaagacgaggaaggtagaggtgaacgtcgaccttgtggggcgcatgttagcctccccgaggggtcgcgagagccggcagcggggtgagctcaggtgcccgccggcaggagctggggagggaaggggagtgctggacaccggcgcctgctgtcaagttctcgccggccggtgagagacccgctgccgccgcgcaccccgcacctcctgacccctctcccctctccgcctcggccccttcccggtcacctagcgttgttttggcgctttggcgcttgcggtctcttccttcttcc

SEQ ID NO: 55648 - DNA, 1126 bp, Homo sapiens
gctagcacaatgcacctagccaatagcatataaactctcctgttttcattcagtgccttaagcttgttgcttgttgtgtcttcttcacttcctatctctgccagagacctgagaagttgtgccaagagtgcagcttttatttggggcctcacagtaatctaggaaagcttttcagaagagagccattctcagcaccgaggtgtcctgcagaccaggacactccagcaggctcttggaactgctttcctgggatggaaatgcttgtgatgctgcctccccttgtagggactttccatatgctgttccctcagcctggaatgcatttttctcctggtttgcctagctcatgcctgttcaccctttggaactcagctgattggcctgcctcctcctcagaagcctccccaacctccctgataagaaggctaggtcttgtcctcaccattcccatgccagcatctagcgcttatggactgctcaccttgtgtcaagtactgttagaatgcttcatgcgtagctactttgtattaggggcttggtagatgttggctgaggtaagtgtcatcattgtcccaaagacactgtgtgaggaaactgaggcctcgacccattgagtaggtgacagagcaggagtttatcccagatgctggactgtgggtttacgctctgacccttctatacgccaccgttccctctgctccaagtccttgcagtctgtccttttccagcacttgtcatggaggtcatgacctcggtttgtgtggttatttgattaatgaatgtttgttccctcactgggcagcccttttgagccccaggatggcaggagtacctaggactctaggcaggtgcgcagcctggagttgaccgagagcatgtgggactgcccacttgcccacagctgcttcttgccttttgcatcacaggagggtgggctaggaccataaaagagccagcccaggcctccccctttctggagctcactgagtgcgtgcatggggtttggccgtcaccctcacttccatggttctgcatcagaaccagctgtgctgaggaaacatctgtgccttgttaaggtctgttccttctgcccactccctttgcccttttctctaccttacaaccc

SEQ ID NO: 55649 - DNA, 1221 bp, Homo sapiens
ggtgtgtatttgctttttttcagttaatatgaattgagtacctactaagagctggtcactgttctagttgatatggaaccagtcaagagcaagacagagagggtctccgctctcatggtgctcacattctaatcagaggaggcacaagaacacaagatcacttcagttattaagaaattagaacccaggggtagcatgagagtcacaggaaggacccctttacgtcggatggccagcagaaccctccctgaagagctcaatgctttgtgacccccccggtcccaagttttccaggactcctacttttaaaaacactgcccctccaagtatataggtctcaattttgagtttggaaaatctgaccacatattagttctcttgttcattaatgggcttcccatttagagagtgagttcctggggcaggagccatgtcacaggaccttttgaaggtctcagggccaatatggacgacacttctcttgaacactcacccagttgggctgacatgaaaacctcatggtgggaggtggggggtgattagtttccagccagagcccattttgctccattgctgctttgaacattctggtttctaaggagctggaagtagtttctctcagcgagaatgtggcacactgtcatctcctgattctctgcatgcagttcttcaatggcttgttgaggctgcgtggaagcccagaggtcggggcagttccaactcacacactggcatttgaacggcagagcagtaagccctacacctgacataactgcattgccttcttggggtacggtacggatttttaaatgaccatttcagcctgctgggctgggcaacggtgatccaaactgatgagtcaggaagccactgaacagaaaggcaggctgcatctgactcacctgtcatgtcgatagttgacctccttttgtttgaccttgatttgctcagtgcaattaaagatgctgttgtgagtgcacttctgctacctgatttaaataaagtctaacatgtgacagctcagggtcttaaatgcacacacgacttaggcagacggacagatgggtgagtggttagcctttcacttacctctgaattgtaattctatcacaaggaaagggcttaatttcaggaacacggagtaattatttgagactagatacaatgccaaagcagcaggccttgattccttgctacagggcagcttaatcaggaaatggc

SEQ ID NO: 55650 - DNA, 3270 bp, Homo sapiens
aaaggcagattctcctctttctctctcttatttcttgctcttgaacatttcactgtgttctagcaacttttcctgtgtgtgactcggccaggagactgacttgagtaagatccaggtcaaggggttgtgtgggtgggtcggtggtaaggaggtgctgaagaacactaaaacctttgcctgagaggagtctgggaagtagcctgcgaactggaatgaccccaggcttcctgtcacggtcatagcccatggagttggcagacttgatcactctatattgtgtgcccccaggtaatggcattagtcatcgatactgtcttttttttttttttttctttgagagagagagtctcagtctgtcgcccaggctggagtgcagtggcgtgatctcagctcattgcagcctctgcctgctgggttcaagtgattctcctgcctcagtctcccaagtagctgggattacaggtacatgccaccacacccagctaatttttggatttttagtagagacggggttttgccatgttggccaggctggtctcgaactcctgacctcgggtgatctgctcacctcggcctcccaaagtgctgggattacaggcgtgatccactgcgcccggccaatactgtctttaaatcgtccagagtaagaaaatgttgatagcttgttgtcacagccctgtcattttacacattccctgaattattgtctggcaccagcaggtgttccagaaacacttttggttctttgagccattactggtcattcctgtcaccactgccaccaccagatgtggttctgagagcattaagtaaaagttttgaaggttgtgtatgttaagactggtgcaaagtccatcctccttccttcgggctgatcagccacaccctggctatcagcacttatttactcattttcaaagtgacagaatggtccagtgggcaggggcataaggggtcacttcctctaaccacccgccagtgcaggaggatcccatctgcgcagtggctgcccatgacaggcagttccctagccccagtcggacatctccgcaccaggcatcctgctcctgctttatggacatctttggctcttaaaaatcctcctttattctgaccgcagatctgccttttggcagtgtttccttagtgacctagttctgctttttgtggcaacacagaacaaaggtcggtaggcatggcacaattccagcttagaagtttgaaggtagtgctcatggacccacatcctttccctctccacccactctatctccctccacaaggtttatgttctccagtgccttcagccattctttctatggcatggcagtcagtattaatcccagtaaaggtaacatgtatccagagagtgcttgccatgggccaggcactgttctaagctccgtacgtgaattgtcttatttatgactcaaaatcaccatatgaggtgagccctgtcatcatcctcattttaccaatgaggcaactaaggaacgagggctcacatcttgtcccgagccatgcagtcaagcagcagagcagagatttggggctaggcagtgtgactccagagcccgtgctcttagttgtggtgcaagactatcttacagcctttcctgcatagtgccaaaaataagcccatggtgcactagacttgggctggccctgctttaacttattttgcaagaaatcattagacaggagccttagttgaaccattttctgtgaaaccttcagagtttgttttgacagaacagactgcagggcagaggcatctgcactgtccccaacaaatgggttcatcctgtagctctgccaggccccacagggttcataaaatggtagctttagatcaaggtgacaaatacagggctcttgatgttttttttttttttcctgaacatggtgcctgagcaataggtttcttgtttaaagtgcttagtcatggttttatggccagaaagtagaaggagagaggtacctaagaattgcaaaactgggtcatctcttcaagtgcctaatccaatattcagtctcagagaacaactccagcagttacgggggtggaaggatgtgatgaccacctaccatccaaaactgggatgtaggtgccaaatacacattctcctgaaatgatccctggtgcctctagccaggctcttccaggagtctagagaaagatggcccatgacttcatccagagtctttgcttcctgtgctctgggatgcctgggcttttctggccacagccatacactgacagggccagaagggctgagatgctgggattgaaccatctttctctttgtgagttgctttccagatagcacgcattccggtcactattttccagagatttaagcagcaaagtgagggaccctcgggcatcgactcagagacctggaggggagcagcttgaagcaatgtaaaaagcactggataaaatctggttctaccaaaaatagggctatgagagttacctcacctccctgaaaggtaatatctttatctgaaaaatggggatgataatactactaacctggaagattgacaggaggattagatgagattctgcatggacataacagtccttggcatgatgtctagcagtgaagaaacataaatatgagaataataacttccttcttcctccgctgtctattccttctcttattctagtcctgtctgctgttgggttttgtctgttgttttgggtaaatagctaacctctctgcctctttttgtctgtagaaatgctactggttctgaatgggtacttcgcgccccctataggacatcgtgggaatgtgtgtgggtgatctggatgtcacagtgacccagacgaggcttttactgggggaagaggggaaggcaggggtgctagatataatgcttggggaacaaaagattgcccaacatctgcatagctgcctaatgctcagtgcattcttgtgggcaaaaccctgcttaaaattatctgggcctagagtctgactccaattaacacataaacacaaataatttttgcatgtttttaatatatactgaattttctgcgaacacagctaccaagtatataagatttacctatttgttatgaataggtgcaagcatttcatatatctttcatgatgttttctggtgtagcggtgccccaatacttacatattgatttacatgttgtcttatttttaactatatttcctttcttctttgtattacagttagggcattatattgattatttttggaattataagtgttgtaagg

SEQ ID NO: 55651 - DNA, 2873 bp, Homo sapiens
tcagttcactaatgaatactaattaaatgaaaatttattaaatgtatatctatttatatctattgatatattaacagatgccagtgcatatctattaaaagagtactatgtaagagatgatgttcttaaacataaaatttaatttaggcatgaaattactttgtcaaaagatatatcagtttatattcagatatacagtgtactgacctgcccatttaccacatcttcactaatactggtattatctttaaatagaatctttgctaatatgagcagtgaaagtggcatattatctattaaattttgacggttatgagattgagcatgtttttgtatacttactggtctttgtgtttcatcttttggggtttcctattcatagtctctgcttagttttccactgaggtatttgcctttttattgatttataagagattttgttttgttttaactcagaaaaggtagtattgcttcagttgtcacagagctttggagtcagacagagctgggtttgaaccctggctttcctacttgtgagctgagggatttcaggcaatttatctgacccctctcacaattaattagttcttctttgagaactaaacgaaacaacactgactagcatgaaaaaaaagcctggtgtgtggtttctgccaatagtttttgtgttgttatttttgttgtgattcctgcactgagtattttctcagaaaaatgaccttgagctgtacgactcatgcctgttcagacccacagacacatgatactcactatatccaaagctcagaaaaatgaaactgaaatcactgaagtttgtgggttttttttttaaattcttcttgccagaaggagacaaatgaaggaaaaaaaacaagccgatttcattttcattaagaggaatttgtagagttatttctggggtcaggcaggatacattcagacgaacattttagatctagggctgggaagatcccgagactcgttatagattacatcatcttcctccaagtgcacttgccaggcaaatggacaagtgcattttagaaaggttttcagttgttcacgtttaaacagaaaggatcacctggctaacttttagttaacccattgaacagatgtgccattcccccagcccattggttattcatgtccttgttactggtttttgatatccttgccccgtaggtgggaggagggatgggtatgagcctgccctgccctctttctcctacttgggacagagctgttgcttttatttgctgagtcactgaagcaatagagcatgtgcagagtcccagcctggaggtgggcatatctgggttccagtccctgctctagcccttctcagctgtgtgatcttggacaagttgccatacctctctgagcctcagtgtcatcttctatgtgatgtcgatgcctcccccaaaaggtcgttacgaggaccaaaggagacacgtcagggcaggaaccatcctaggcacgtgtttgatgctcagtaaacgggacgtggtcagtgttcagagttgtgggggtggcaggtgactgctctgtttcacctccactcacagcaacagggcctgtggtgtcacctagacatctcataggcatcccacactgaacatgtcccaaaccagcagctcctccctggatgggtggatggtgtacagggacctcttcctccagctgtcacatggggcatgtacctggcaagtggctttgcagccctagctgcccccttggctgggggcctttgtgcagttcatggactgggagtcacccccatgtctagaccgtcaggaaacccattggcttttcctttagagcataccaagaatcaacttctcagaacatagcaagagttgactttttgtcaccctgccgtggccactcagactgactcctcttacacctcacatcccattgatcagcacagcccctggaaatatgtctagaatccagctgcttctcatcacccccacacctaatacagagggctgagtcatagcatctcttccccggactgttgtagccgtctcctaactcagcttcctgccctgcttttacacacacacacacacacacacacacatggtatcttctcaccactgcagccagacttaaaacctaagagggatcatgtcactccccattttactcagagtcaaggccaagatccttactggggtctgcaggcccccacacctggccctctgactgcacccctaccttccttagctgtctcctctccctagcatgccccaggtcgctggtcccctagcactgggcagctccctgcggccctgttcactagctgtcctctgcctggaacacatctgtcacctctcacctcctcctgtccagcctccttggggcctttctaactgcctccctcctgtggtctgcctcctccccatctctgactttcctcccgagcacttactgccatccagcacccgacataacttacttgtttcgtttgcttgccttcctcaccaggaggtgtgccagatgaggacaaggatttttatatccctacccccatctgcagcactgccatggagaacagtgcctggcacttggatgccctcagtaaatatttgttgagagactaataagtgatcgtgggccagcatgccaacagtgtcttcgttattacaaaattgtcccgaattgaaatttggctactacaagcagtttgtggtggaaatttactcaaattaccaattctttcactgaagaaattacctggcatatgtgggttctcaataaactgtgttggattgcctcaaggctttggggcagtggtagccgtctgaggcctccttgccagtcaaccaaaccctgtgctgggtgggacataagagatgccccca

SEQ ID NO: 55652 - DNA, 624 bp, Homo sapiens
gctcaaagtggcagagaaaacctcagagctgaaatttcaggtagatgtagtggaagtgaaagaaacaaagaaaagtgcaggcccaaaatctgagcataaactctgctcaaatccctggctgatagctaaaatacacatgtacgggaggtaggggagggacatcaggtagcctggcagaaaaagcaggcagagaccatagagaactctgcccttgaaagctgcatggcatgagacatgattttgatgctttctaagctgaatgtattccccaactgtatacacctccagcagcagaaagctgaatcccttactggttagggtatcagaggacaaagaccaccactagcaggtaaagattaagagggaattcccagaagtaaagaacccacagagagggtgaattccaaaatgtgagtacaatctctgcccaaattcttggctgaccaccaaattacaggtgcagaaaagccttccctttgccctgacccccaggaaaacaagctaaaaaagtaagtagttggaagaagtaagaaataagcacagatggcagctgctatacacttcaggggaaacaagtttgcagtttgaatccaagcaagttaacattctctaaaacaataacaa

SEQ ID NO: 55653 - DNA, 3046 bp, Homo sapiens
tgaagatggggtccatattcttatatagcactgattagggggacctgagacttggatgtctctctgataaggcatagtgcatttccctcattttcattatctaactagtacccgaaggcatgtgagtttgttgctcatgctatggctttgaaaggtgcacaatattttccatatcacttccatacttccctaagtcacctattataaaaagccaaaagcagaccacagtggtttgcaactccatagttaataatttaaaaaattcacatggcttagagggagtgagaaagaagaaaattcagactggtggaagggtaacataattacatagggttagaagtctatctgaaagcttttctgggagtgagaaaaaaggtgaacgaacacaaaaacattgttgaaacactaaaagctttcctgattgaacactgttactctctggtggttccttaccacattccatgcttcagaaacttccttcctactttgtatgtattaatataatagctgttaggtcatacacgctgagaaatattgggaaaatttataaaacacatttacatcatcagaaataattcttctcacactttttttttttttttttttaccagtcttggtccactttcaaatcccttcccaagtattttctactgctttccgctttatattcaaatgacaactgcagtcctgggtttcaggactgaacttcaatcctggacaggctctctaatacagaaactcttttggccgttatggctgcattctttattatatctcttattccgatttccacagtctctttcattgaaaatttatccctaaccccctctctaaaagattttgatcaaatttgtgtagttggggggttgggaggataggggcgggaaggaactcagttgtccaaatacaattaatatcctgtgctgtttcatttagattgctaatttaaataaaaagcatgaaaactctgcaagataataaatcttcgtaaaataatcttgtttactaagtgcacaaagccacaagcaagtgaagctctatctttcagcatgtctggactagtgacttttcatcatggactcagaatactgagaaaggagaagcaggaaatctgtgaggcccagggacagtcacactggcccacactaacaaattactaaccgatgtctcaccttcccccgccccattcccaaagataagggtgtcagggcacctgcatctgaagaagaaagacatcagaaccttttccgtgcaagttttaagaaaacaaagctttaccacacgtaaaatggttacaacataaaaccacgcagcacgttagtggggtctcactcctcttcacccagagggaggctgcccaccaccttatcccctattgtgatgcgccttcctcaggatgtcgctgcgttcgtctgagatgacaggaaaggggcggggcacggggttcctctgccctggaaagggatgagggtatcgccttcatccccggagaaaggcccccggactcccaacccaaaagcagcagccgcaaaactcaagtcttatcccggcctctcctaattgggtgctcgtggccggagcccaaaacgccacccacggtacccgagcagggtccggccgcccagaccaccgccgcagcagcctggctctcacgcccagattcgccctccgcccctttcctctttcgccccggccaagcccagcctcccgcgccgcccccgccgagttccccagctgagtccactcactctcgaacctgtagtcccccttcagtgcccacacaagattggggcaaaggccggggccagtgacacctccacttcctcctcagccagatccctccggaggtggctgtggaggaagccactgaggcggctgcgcgtagcggagccgccccggcaggttgcaggccggctcctcagcctcttaccgcgagagctcacaatgcgaagaggcgaggccagcagcgttctcgcgagaacggtgctctccgcccaggggtgggcggggcaccgaaggagaaggcagttgagggcgcggcggccacgggtgggatctcaggcgcgtggagaggaaggcgccgcgcgacctctcctcacagacatcagctcgggtcaaccgcgggcctcgagcccgagtggctgagggctgttaccttcaaacctttgaatcccacgttttccccttgacttcctgtcaccgttagagaaaagtggacagcgtctcggtcacagagttggagaaatagtgcagggactcttcagggagagcgttttcctcatcaaagcaaactgcaaaatcgcttctgccggcgtggacctgatgagagtcggtcgtcgtgagggacaccctctgttccctaacgtcccccgctgcttatttttaaacgctcggttggcgggaacccctgtgccagctgaaactccttcagtttggccgcctaggaaacaccgagagtcacctacatgggctggctgggcaataaaaacgggaaaaaatgtaaaagacacagtctccgccttcgaagcttacacccccggggcaagacctacaggaaaatagataatcccattattctctgataaaagccgagctgcttgccatgagctctgggagcagacggggaggccttgttgagaaagccttcacctgggagtgacaattgcgctgaatcttaagcataagtaagttctccagtttagggaagagagggaagggcattgcaaggagaggaagcaaagaggaagaggacctggtttgagtaattgggtatgaaaacagatattgcagcaagaactttgttgaaaaacctttaaccactgtttagttcggatgagaacattcccaggctcctacgtgtgatacgcaaagtattttccaaatcagtgtttatgctaagaagatgagcagttgagctggacaattataagataacttcatctttctcctgtaaggacacttaaatatcagaaacctaagagaaacgggttattgtcgtaattcactaagttattatagccaacattttgctaaattggaaattgcc

SEQ ID NO: 55654 - DNA, 1008 bp, Homo sapiens
cccgtctctattaaaaatacaaaaaaattagccgagcgtgtcagcaggcacctgtagtcccagctactgaggaggctgaggcacgagaatcacttgaacccaggaggtggaggttgcagtgagtggaattcacaccactgcactccagcatgagtaacagagatagactgtctctaaaaaaaaaagaaaaagaaaaaaaaatcaagtgtggttacgtgactatattatagttcatggaatgttaagagataatgtcaccttttccaggcctggcccataacaccttcacacaagtattcttacatttttcaattccagctaactggactggaaacaaccccagtgttacatggtagaaatagaattcctggtcatcctgttgacctgtttgcctgcctgggaatataacattccagtaatttttgtttgtttgttttttgagacagagtctcactcactctgtcccccaggctggagtgcagtggcatgatctcagctcactacaatctccacctcccaggttctcctgcctcctgagtagctgggattacagacgcataccaccatgcccagctaatttttgtatttttagtagagatgtggttcaccatgttggccaggctggtctcaaactcctgacctcaagtgatccacccacatcagcctcccaaagtgttgggattataggcgtgagccactgcgcctggctccagtaatgttatatgaacaagaaataaacttctattcaatttaagtgaatatacatttgggatgtatttgttatagcaatttgttcaccctaatgaactcagaaatgaatacctttaaatgggattctgactagcaaaaatttaaaaatagagagatggggcttagccagatggatggtaatatcacaaggtgaaaagacagcctacgtttttcgaaggcaaacatttgaaaagctagtatcagaccattcaatctaatcatatacccgttaattagactgaatagtctaatactagc

SEQ ID NO: 55655 - DNA, 927 bp, Homo sapiens
tactaatggaggtaggttcttgatcagatttttgtttttgaagagtgttgtgcgtttgaaagcaggtttcctcagctctcctccagtcccattcatctaccagtggttatttgggtcctcatgaattaattgaatgaatgaatgaggtattttttcatatcaggagccttgcctaagactgttgctaatgcaagcccaggaagattttttcagtgacttagactagtctgaggttcaggccaagtgtacccagcgtctcttttcacactaatcctccgtgttttagttgagcattggcagctggtggccctagcactgggaaggagatacagctggtattcacggggccaaagaggtttcagaactacctaaacgtccagggccagcaggtggggaactgggactggatagggagtgtcctggactttcaccctacaggctactcctgcctaaacagccatctggactttgacaccccaactcaggctatagattgggcaatcatcttttctcccttcttatggctaaaagaccttggaagagatcttgcaggaaccatgctgaggttttccaagtaaatatcctgcaattagcaaacctgattctgccactcaaagtccgaaagaaaaggtactggcctagtttgtgacattttctgttggctccttctttcttagaataattatgttaaaagtaactcaaacacattctgctcattgtcctgacttaaggctgtgaagctggcattcccctggtgttctatttgctttttaattttttcatgaattaggattcctcacaatccttggaatcaatgacttgttttcctgcctcaaatctttgtccacagtattccagttcatccccaagcagcttctgttctttgtgcctgctgtctaagtacagtctttaggtactctagaccgg

SEQ ID NO: 55656 - DNA, 558 bp, Homo sapiens
catgcttaaggtttctgataatttctgaattgatatgtcaaagatgtggttgattgacacttgttaactatgggtaaatttaaactcagtaacaaagcttttgtgtttccattaccaaagaacaagaaactattggaggtaagtcattgtatatttatgttggctgtttggcgatgtccttgttaggaatggagtgagtcatgctgcctgaatgcagtgtgtcagaggctcagggtctcagggacaatatccaggctctaggtcacctttgactttacctgccttatctgaccggctcatagcaggctggggtaagttcatgttgccacggattctaggagggatctctgaagtgtcaagtactgccttttcttctcatggttcagtgcagatggccgcagagggcaggatagttgatgacttattctctggagtcatccaatcttgggattaattcttttatattcatttgctgggaagggaaaggaagaaaaggggaagaagctctgatggcagttccctcttcctagattccctgctggtggtgcctcaggaact

SEQ ID NO: 55657 - DNA, 589 bp, Homo sapiens
gtttaaatatggagttttgctggggacccttggctgcctcctgtctccactggttttgtgccagaagcttctctaacaactttgtatatgaattcatataaacacttctggcccattgaggtagatgctattatcagtccccattttacagataaggagaatcagtccagaaaagttaaggaacttgccagagtcacaccagtaataaataggctgctggactctcctaggactttgtattgtctcctggtagggggaaaacccccaagagcacttaagtgacaagagctggtatctcagtgaccttccaggcctcttagttgctgggtgaggtatgcaagtttagggcagcagttgaactactcaggttaatagagtgagcagtgctgagctggcagtctgcctgccctcctcccacgcagcactcagcctatcctccaaatgaatgttgggcaaatatttagagaatatcgttttgaaagggggccaggttattagcctgcccagggcgcctacgcatcttggcccagccttgctcccaagcctggcctgctgtctgtgctcctaatatgtgaaacaactcacatag

SEQ ID NO: 55658 - DNA, 761 bp, Homo sapiens
ttacactttttaagttattaaatatttttaaatatacaattattgaccatagtcaccctattgtgctattaaatactaggtcttattcattctttctaatttttttgtacccactaaccatccccacttcccttctgtccccctactagccttcccagcctctggtaaccatccttcaactctatgtctatgagttcaagtgttttgatttttagtccttttgtactttaaaaaatattggagggaagctaataatcaaggcaaaacaaataaagttctgatgctgccaaagcagaagggactttcccaaggtcacagagttcaaaaggagcagatccaggatttaattacatcaccctgtgtaatacagattgtttgacacatctcactcagttcactggaacttggcctgttccagcttaatctcatgccctctgcaaatcatactcttggctccacatccgtccaggttcctagagagcagcctctcattctgatctccaggcctttgcacaggctgtttcctgtgattgccaccctccatccagcctctatttcttcacttgactgtttgcttgccaccctttcattctctgcattaaccccactgcctcagaaagccgtttccaattccccagtctgtattggcggccctcctcttttctgctctgtggctatcctatcacggcactttccacactgcactgtaattgcctgtcctcacgtttaatcccctaatatgctgagagaccctcaagggc

SEQ ID NO: 55659 - DNA, 653 bp, Homo sapiens
agactaaaatgttattaaactacatcatttcaaagctggaattcatgaagttagaaacacagacagttagctggtcaaaaataaaaataaaaatcacataaagtcatgtggtgctacctgtattttgtaagcgggcacttcctcttttggtaactccttgaatgaagagcatttggtttctcttgagtttgtataattatatgcattgtgcaatttcttagctttggcaggcgctgggtagcatttggcttcagcactttcaactctaaggacaatttcacaattgggcttttcctgtcagctccaacatctggacccaggggagactgggtccaccatgcgatgaaaccctatgtgaacttcctcagccaagcaagaacaagctgtacaagggcaggtccttccctcactccaggagcctgaaagcaggtctttcactgtggctgccaggttatggccattttttaaaagaaaataagctgatcattttttaaaatgctgctttactggttgaacaataatcactatttcaaatcaatatttattcagcacctactgcatgccatgagttccaccctgtgtgctggaatacagagacagctcctgctaatccatcctgcctcttctatcttccttcttctttcctccttctt

SEQ ID NO: 55660 - DNA, 1668 bp, Homo sapiens
cgttcatgtgttgagaggaagggataataagaatcattctgcttatttagattagatatttattagcaagatgttaaactattatctttaaagggaagtggatggctgcttccatcccaggagcacccaggctcactgaagtcagtctggcagcatggcttttcttgtccccagataagctggtatggggagagggccagtggcagctcccataggttcccagggaaaacatgtcaaacactctttccagatgacacccctgaaacctgcatctactccaactggtccccatggtccgcctgcagctcctccacctgtgacaaaggcaagaggatgcgacagcgcatgctgaaagcacagctggacctcagcgtcccctgccctgacacccaggacttccagccctgcatgggccctggctgcagtgacgaaggtgaggagacaacccagaccagccaggggctggcaggagttcaggaagggagggtctgcctagcagtcagacagtgtccctggtgagggcacaaggaccctgacagtagatgtcagtggggtccaccttgggcaaactcctatctgcaacagtgtcttgagggctctgaacacagaatctctcttatatcaaaggaattcttgagattgaccaccccctccttcttttactgaagagctaacaaacatagatacaacttatgacaagttacagataacacatagcctgcttctgggccttaactccaatctcttcttaaggagcctgttaacagtcagcccagattgaatctagatccattgccctaattctgtcatttacagcccctcatctgtgttccacctcagcgtgagtcagagcactctcacttctttgtgtcaggacctttgggctgattgcagaaattctcagtctatttgcaacagtgcaaaggtcagcctttaagtataatcttgcaacacctatatcatgatggctcaagcttcaagattgcactaagctgattgctgtgcaaaggtcagctatctgcttcccaagccatgacccctttctctgcctgatagatctacgctattctgccctgatcttataggatgccataaggcaatgggaaggcactgtataggctggactggtgtatggcagggaaaaaaaccacttccaagccgaggataaagaaagcaagcttatcccatgcaggtcattaattccttggctctgcctagagggaggctcttaaacacctctcccagtgttgcactttcacgatggtttattgctagctcattttgcccacaataagcactttggaggggagtaaaccctccccgtagactaagtcattcctacaaacaggcgggaggaaagctgggactggcctgtcaacattgaagcctctttcttggggctgggactggggagctaagctgaggagctgaggtccttaacctccccttccacagggaaggattgttcctcatacaaatggattatgatttatcttaaattatatgtagattaaattatatcttatcttagatatatgcgtgtacattttttaaacaccatcctttccatacaagcatctttcgaatgtattttcatgagataaagagtaattctgagtgtcccatgcacctggaaaagaggcatttcctcttagagaactttgccag

SEQ ID NO: 55661 - DNA, 1264 bp, Homo sapiens
ttatgtgcttcacttgtttttgttttgtttagtttggttttgggacagggtctcactctgtcacccaggttggagtgcagtggcatggccacagctcactgaagactcaacctcccagtctcaggtgaccttcccacatcagcctcttgagtagttgggactacaggcacgtgccaccatgcctaatttttttttatttttagtagaggcagggtcctgccacgttgtccaggctggtcttgaacttctgggctcaagggatctgcctgccttggcctcccaaagtgctgggatcacaggtgtttgccaccatgcccagccatttatttgtttttaaagcatggtttcacatcactgtcttccaggaaacaaagccaacaaatttatacatacatttctggtgaagaaatctctaaccacatgcttgtgagctgacacagcatacttttaactaagtagaaatagcattgccatcaccaaagcaaacaataaaagacaaaaaggacaacataccggaacagagccatagcactgtggaagttagaaatcaaaagaaaactgaaagttacaaaagtaagtacttcctagaggttcctcaacccagataatttcataaagataccaaataatattaagcctcatctcctggatattctgatttggtagattttagcacttcccagacatgttttgttttaaataaccagggcaaatctgatgcaacaaattcacagaactacatttggaagcttccagtaagactcagttcaaaaacacaggtagcagcagcagttcacaataacatgtatgagctcatctagtactacatatttccaaatagaataaactacatttcagtgctcagagttatgtcaagttaatgaagtttacagaagcaaaacttgttttcacaaacatctattatgtaaaaagaatcatcacattaatacaacgtcttaactcactggcacccagattcatccacccaacaaatacttatttagtgcatacctctgttctatatgctaacgataaagcctgaacaaaattgacctgtcaaaaccgagaaaccctcatagtacctacacctacattcaccatctaaacccttttagacgcacataaggcacagataacgccacatgtggtaagatcctctactatttgaggaggggttctttttcctaggaggctgtagggggcacactggtcaaaagtactgacagatgggagtctggattgatatacttagctatctattatt

SEQ ID NO: 55662 - DNA, 2537 bp, Homo sapiens
ttctcctgctaaaaactaaaaatccttgacaaacataagactctgaaagtttgagggaaggcatatagaccaacactttggaatccaagaaaccaacactgtggtgagtttcctgggttttctttttacaacatatatcccagagttggagttgaaaaagccagcaacatggaaatgccaacagacacagacaaaaaaagtactaacaaaagaatgctctctctagctaaaggaccagaacaggacgtcccagcaagacagaaaacttttagatgacagctgctctactcccaacagacaccaaagaaaaaacctctgcccacaccagggaaggtcaagtggggatcctagaatcccacactcaaaaggctgtaaaggggcaccccaacaccccactgcagtggtgtcagggaagaccaagtggggagctaagactttcatcccaactggccagcatgaacctccttctcccagcagtgtcaatggacttccatccccaccaggcagtaataaagagcgtccccacattttggacttaatgtaagctgagtagggaatctagacacctgcctcacctcacagtaacaaggcagcacttccctttctcctgccagagtggtatccaaaaaagccagctaacccagtctaaaaaaatacagagccacacaacaaaatatgaaaatgtgcagatttcaaaagaaaaacccaaggaacaggaagatcccaaaccaaatgacaaaaagacaatcgacagacaccaacatcgagataacaaagatgtcagaattatctggcaaacatattaaggcagtctccataaaaatgtttcaacagcttgaaacaaatgaaaaaaaagtctcagcaaagaaatgaaagtctcagtaaagacacagaagtacaaagaaacaaatgggagcttaaaactaaaaaatacaataatcaaaataaagagctcagtggatggtcttaacagtaaaatggaagggacagaagaatcaacaaactagaatgcacaacagtagaaactaccaaatctgaaaaacagaaaacacactgaagaaaagaaagcaatgaacagagcctcaatagcctttgggaatgttacaaaagatctaacttccatgttatcagaggatcacaatgagaagacaaggagaatagagctgaaaaagtacatgaaataacagctgaaaacttcccaaatgtggtaagacataaacctacacattcaagaagttgaataaaccccaaagaggaaaaacccaatgaaatctacaccaagacacatcataattaaacttctaaaaacaaaagacaaaaaaatattgaaagcagcctaggaaaaacatcttacctacaggagaaaaacagcagatttctcatcagaaaccatggggatcagaagaagtggcacagtatctttcaggtgctgatcaaagaaaactacagtaccttgcttatccccagtttcactttccttggtttcagttacccacagtcaaccacagttcaaaaatattaaatggaaaatttcagaaataaagtttcaaattgtttaccattctgagtagcctgatgaaatctcacaccatctcacccaggacaatgaatcatccctttgtccagagtatccacactgtatatgctactcaaccgttagtcatcaacactgacactgtctgctctgaacattcaactgttgacattatcatgcctcaacaagccatatcatcatgcctcaacgatccaggatcatccaaagcagatgattctgaccatacatcagaaggtcaatagtaacaatgcaacatcacaatgcctacatcatttacctcactgcttctcatcaagtaggcattatctcatatcatcataagaatatagaacaaaaagatattttgagaaagaccgcattcagataacttctattgtagtatatggttgtaatttttctattttattaataatctaatctcctactgtgcctaatttataaattaaactttatcgtaggtatctatctccttattggaaaaacaggatatgtagggttcaatactatccacagtttcaggcatctgcgggggttgaaatatatagcccttgcaggtaaggggggactactgtattaactcagaatcttatgtacagtaaattttttaaaaattgttctgggatgaaggagaaatcaagaccttctcagataaggaaaaccaaagagaatgtattgccagaagggccaccctaaaagaatggctaaagaaagttccttaaacaataaaaggaaccttgaaacatcagaaaggaaaaaacatggttagcaaaaatatggacaaactccatagctttccttctcgagttttctatagtatgcttgacagttcaaaaaaaaagttaatactgtaaaatgtatatagtgagaatatttaaaagttatattataaacaggaaaataaagggacataaaggtttccatactttattcaaactggcaaaatgacagtatcagtaggttgcaataaattatacataaataa

SEQ ID NO: 55663 - DNA, 2784 bp, Homo sapiens
actcctgacctcgtgattcacccgcctcggcctcccaaagtgctgggattacaggtgtgagccacgacgccaggcccaattaccgctttcttaatggtttaataccattacttccccaaaacaaaaaggcccaacaccttaattaattaacatgggctcaaataattcagatggccccttcctcaaaaaaacgtaaatatttgtggttcaaatcttttaaataacactaccaatattgtaacccaagattattctcccactcctagacttctcctccacttatcccctcacccccaccctccctcagccatcagactagtccccaaagggttagctataaattgttttgctttgccattagatacgtacaatctctctgcgccctagggaaatagcaacctgacagcatccctgattctgtagcctgctaaacttaaaccaatctcaccccttactcagtgatttttttaacccactaataagcatactgtaaatgctcattacataaaacatcctttcttcctggattcaaaggttttagcagcagtaatccagggaatattatagcagcaattattgctcatttactcaatgtgaaaggtgacaatcacatttgttacagtactcaatattttaatgtcactataaacactaagtgaaataagctattcaggtatcccaattaatgacaaatgggtgaaaaggaaaccagacaaaaatatttcaccgttcatactctagatactgtgaaaaatatccttgtttcctgttataacagggtaccttcgttctctcccagcatatgccacaccttttaggttgacaaaagcagaaagacatcggggctttgtgttttaaaaatcccaaaaaagactactcaaacctctccccaagagcaaattctaagaaggaagaataccacctcccttttctttaccacaaacccctgacttaccgtctctagcaaccagagagggctgggggtaggggagagggtggttagaaaacagaacgcacgactcggtcatatcctagcccggcccatcccaaacttcacctaggcacggcgagaagcaggacggcatcaggaattcctaggaaatggtctcaccccatcagagaacatttttaacttcctagaagccaccatttccccggggcattatcacacactcccacccggacatattacctaagagagtacttataaaaagagcgtaacacacacacaaagaaatacacagtacttgaagcgggcagctccggctcaggcggcgcggggaagcccggagaccacgcggagccgcggccaagttgccaccgctatcgccccgacggtgaaggcgcggccgcaggcggctggaaaagcagcgcgcggggctccagctccagccccacgcccggaccctcggagcagtaaagcccggctcggtggcccagcctctcccggaggtctctggcctcggccagagcaataaggtggatcggtgcttcccacccttccagctccgccctcccgaccacattcctgagaagccctactcccgcgacgccgcgcccgggaggaggcaggagcgcgacgctgcggccgcagggcaggagcgtagtcggccccgcgccctcccgccccctggccccggcccgggcccgcgaggcgcctctggggcgaggtcgcggcggccgccccgccacaggtagcgccagcccccgcccgccgccgctccggcgccccgggcaggcccgctccaggtacctggatgaactggatggtgagcgccgacttgcccacgccgcccccgccgaccaccacgagccggtacttctcctggccggagccgtcccgccagccggccgcggccatggggacgctacagagcccagcctgactgcgccgagccgccgctgccgcccgccctaggcccggctccggggacgtgtgcggccggcgggctgcgggcgagcggccgggctggggtcccgggtaccgggaggcgtctggagggccggtcagcgcggtagcgcggcgctggggactggctgggtaccgcccgaggcgcggagaagcggggtgacggcacgggccaggggcggcagcggccggggggcgcgctcctctacgcgtctccgcagcgcctgccgaacgcagcctccagcgccgccacaaatggccgtctgggggccgggctgccaggctgaggtgctgcatatgcatgagggggcggggaggggcggggccgcgccgcttggggctgaggttcgggaggtaacccgggcttcagacccccacggacacaccgctctaatccctagccagtgagcgagtgcgtgagagtgtgggagtgggtgtcagttgggagtgggacgaaggcagaaagagtgtgtcaccctaattgtctatgtaagggattgtgtggatgaaaaatacaatatgtgacggcgtgtgcgaaaaatagggctgttggcatattaactcaattttataggagagtacataccctgctttaagagtacagatggtgaccatatttgtgtgaaaaacagtatgtgacagtgattgaggattagagctgtgtcacagtaattgagtgtgtgatgggctggtggttgtgacagtgtgaagaatgggacagtggctgagcatggagaataagtcagtgattgagcttgcatgggcaagacggaatgtgacagattttgtatgtgtcagtacagtgtcatagtggctatgtttatgtgtgacaaatgtgcagtaattggatatgaggagtgtgagtgcgaggggtt

SEQ ID NO: 55664 - DNA, 2725 bp, Homo sapiens
tccgcctcccgggttcatgccattctcctgcctcagcctcccgagtagctgggactacaggcatgtgccaccacgcccagctaattttttatatttttagtagagacggggtttcaccgtgttagccaggatggtctcgatctcctgaccttgtgatccacccgcctcggactcccaaagtgctgggaatacaggcgtgagccactgtgcctggccaggaaacttttcttatataaaccctttggtgccttttgaattgtgagctatgtgagtgaattacctattcagaaaaaaatgacttaattgaaacctttaaaaaatgaatgtggaaaaagattttatattcagaaagttattttgagtcatttcagaaacacatttatttgtgtaaagttagatgtaactacaaaccacaaaactacaaattgcaatatgtccaacaaatgtgtaccaacagccacctagagctttaaaggtttagataatgtgttaattaatcagagaggtagaaagaataaaagacaggttaagttgttgaagatcccaaagtcacagttgggggacttggaagctctcattataaataacatctcacctatcctgtgaacctgctatgagattagaatgtacatgttataggtgaggagactaaggctagagagctgaagggactggctgaaggtcacttaagcagaacttgaattccaggtctatctgaccccaaggcaagatatgtgccaacatcccctcagtgctatctattaaagattcagaccttgataagaggtgataagagcattgaataaggggtcatcgcccaaggtccaggcctgaaagtactctagtaagcaggaaggatagccatttggtctttggcccctttgtacagattttcatgccagagccagagcatagagtccacatctttctgtgactacagcatgacaatgccatactacagggagggaatctatcaaaactggtttggaaaatatttttgacaaacatctagtaaacacattttttgtgcactaagctgaaagttcttgaaagtacagatcattttgcctttgtagcccctggctcagtgcctggcacatagaggtttctcagaaaatatttggtgagtgaatgaatgagccaacagttggcagcacagtgtgaggcaatgcaggaagtccaaagaagtaaaatacacagtgctaggttataactcagttgaggagacaagacaaaaatatcacaatacttaggtaagcataggagacaggctataaataaggcccccgtgtcaaatgaagcctgagctacatgcaatcagaagtagaagaatagccctgtacagtacagtgatgggaatatgtcatctagataggcagagatcaagaggaaggcattctagggaagacaatttctagtggagatgttttataagcccaaaagcttgacacaggggaaaaaaactataagatttggaattaggcccaaggtttgaatcccagatctaccctttattgatgggcacaattacttaacccctctgataaggatactatctcacaagaccattgtgagaattaagctaattatattgagaacctagtccagtgactcactcatggtaggtgttcgataaatgatttttcaccttcgtacatggaacccaaaagtcttcagccaatggctacaggtaacagtgaagaaagggtgctggctggaacactgggagagatttagggggctaagctccaggaaacagactgggatggaagtaatgtggggtgggagaatgggacttcagagccagactgagatagttggactctacagccccacctgtggccattttagatggctggtattaaggatcttgtccttcctagaatgctaggctgaagacaaactggcaagaaggaggactaaggagagggcagaggaaagatacttttctccaagccctgagatcctccagaccttgagccagctggagaataatggggaactgaagtcccccaatagtatgtggggcctccccagatccagggacagtctaaaactggattcgggtagtggggccaagggagatcctccactgctgcccctgaacatcaccttagccccacagcctcagtgagcaatccaagctccaagcctagacacaaagccctctcctcctctagatcttagtctccctcccttggcttgttgctctttgctccttcacttatctttgtttctgttttagtctctatctcagcttttctgtctctgttccaattgttctctccttctgtctttgtttctatctaaaagtttctttttccattttactcacatttctctgaataacaaggcatggctccctgggaaattttctttgcgttacaaaaacccaaaacaaagcaaaacaaagacacccaataagcccgggtgttttggtattcacaaaagcatatgaatctaaaagccagtaataatttagattcatacctctataccataaacaaaaatatatcttagactattaaagagttaaacatagaaaagccaaatcacggaaaaactgcaggaaattgaatttactatttatcagatctttgaaggaatggtaactttcaaagcattaaagcaaagaagaaatcatgaaggaaaagatttttattacagtggtacatgcttgtaatcccaactactgggtggcaggtacaggaggttagtggggggc

SEQ ID NO: 55665 - DNA, 1330 bp, Homo sapiens
gctggtctcgaactcttgaccttaggtgatccgcccaccttggcctcccaaagtgctgggattacaggtgtgagccaccgcgcccaacctggtcttaaaaaaaaaaagtgaagcttctgaacaaagaaaagtaacaagataaaaataaaaagttttcagtaaagcaaataataaatatttaaattatataaagttcatatcataaaaagaacaattaaagcctgagtaaacatattatccataagttgaaaaatgtcaacataagtaaaaatgcttagcttcttattttcaggcatatgcaattaaaacattaatgagaaccttttccctgccattattctagcaaaaagcaaaacaatgataatacacaatgcttgtggttaggtaaatttgtacaacacttttggactggtatttggcaataattatcaagaaactttaaactatttgtacctttgttccttaattccattccaagagatttatcccaaggcagcagattttaaactatgcttctggcaagccaagaagtgctacagaattgtctgtggaactgatagtagggatatacattaaccaaggtttggggctataagcaagaaaaactaaccctgattaccttaagcaaaagggcaatccacagggaaaacttggacacaacagaatcaatgagaagctacaaaaccatgttctgaaaataggcaggaaacaagagaattccagagggctaggcagctggaactacactacaggtcacggagcaagaacagttaggtgcatgtggcactgctgctgagaggaaaatgacctctaattacccccaaactgtcatatgcccgtgattcataagaaaggatgtctgattgactgaacctaaatcacatgcctcaggcttttcaaggaagcaggaggtgagggtgaagactctaggtctctggtttcctaatgggtgatgggaactacctctcaaatctacacacatatggggaaccctcaagcagaagacttgggtactaattgcaggatgatatggatgctggacagctgaaaagcaggaaatatttatcaactactgggtgatattcagagatgccgaccacataaagctctcagcttcctacccccacttcaaccagagcaactccactttcatcaccttttccaaataggcttccaggcaagattttgtctgctgaaaggtttctgcagcttcaacacatttaagaagcccttgtggatcgccaagaaggctggcttaatataccttaccaactgttttctcctttgctgtcttccagtgacaagactggaacaatgcttatttttctag

SEQ ID NO: 55666 - DNA, 1873 bp, Homo sapiens
aattagctgggcttcatggcacgcacctgtaatcccagcaactcaggaggctgaggcaggagagtcgcttgaacctgggaggcagaggttgcagtgagccgagatcacaccagtgcactccagcctgggcgacagagcaaggctccgtctcaaacaaacaaacaaaaaaaatcgtattgtaaaagaatattggttggtacagaaaatgttcatgatttactgctaagcaaaatacaacaacaacaaaaaaaaacttacaaaataataactacaacgtgacaccctttcttttgtacagagaataaagcatgctatcacaggcataaaatactgaagggacagatactaacatgttaacaacagttgctcttgggttgcgaggcaggggtagttagaagaaatgtttgtatttttcctttatactattttgcttttttcgtgttttcctaccttgagtaccttgtttgcctaattaaagaggtggggagaggaggagatttcctctcccgcttttaatttttttttttttttaaagaaaatcacgctgactgtgtgcctaggaaactattgccagaatttccaacatctcccacagcccggtgcttggggaaaccagaactaagtgaaagactttctctctgagagcaaagtgcgcaggtgacaggagagaagggcagaggaaagaaatgggttggaccgatccgagaacgggcaggctggcgtgccgacggtcgccagcagacagccctctccctagcggagcgctcgccccagcctctgcccagaaggcccggggcgacgcgctcggatgcgtggctccggaagggcactgagctagaacatgctggggcaccgcgcgggcacccaggtgccgctggcgccgctgacgaggggtgctagcaggctgtgctcgaggagctaggaagctgtaagcctgtgaaaagccaagccaaccaggcagagcggctccgcaacagctagccccggccggggcctgcccagcgctgcgttgaccgccggagcccgcgtgccgctgcagcggagccatcatgaagcggctccctggccaggccgtcctggcagcccgcccgccccgcccgctgcggagcagtgcccggggaacgaaggcaggcggggatcatgtgctgcgcgctcaggagcccttggcattcctcgcggggcggcagctctcccctccatttccacccaggggggctatcggtcttactttaaaaagacaaaaacacaaattacggtgacgcaaaagaaatataaaaacaggagtcagaggacctagatttgattgtcaacccatgtgaccatgagcaggtcacattcatgcctctgcttccctatctgtgacatggatataatgatcctatttgtcccaagaggtagccgtgagtcttattaatgaagatacaaatgatataagagtaatgaaaactgctttgcaaattatgaaggataagctgatgccagtccctgttcgctagatgtatacatttcaggacttcgtagttctttaattttgaatgttatttgtgtgtattggtaaatcatcactttccactttccacagtttaaaatggaagactatagtgcagtgatagcttagaactgggaaggaaatcaggtccaaagcaaaggagagcacacacctgccaatataaagatcaataacatttctgacactgggtttggagttgagttctgagtttcacagcagtcaaagtgtaaaaggaaccacgatcagatgttgtactcattatcagaaaagattagtacagaggagaaggttaagcaagacaagtgccctcaggaaaaaatgggatgttctctaaatccgcattccccaagtatcagtcgttta

SEQ ID NO: 55667 - DNA, 2234 bp, Homo sapiens
ttagggtactttcagctccaagtaacacgaaacctaactaaagcagcttaaataattaggacagtgaatatctcatgctccagaaaatctggaggtgagccattctggggcttgctaattcagtggcttagggatagcagcaggacccaaacattttctatctttctgctcttctgtccttgttatgtctgcagtgtctttcctcatgattaagagatggtcaaagcatttccaggtgttacaagcagacatttcatctccaaagaagaaaggcatctgctcctgtgcattgctttttagtagtgaggaaaacctctcccaactacccacctgcagactttctatcaggtcccactgatcacagtgagggcccagggtaatgccttcatagtggattcaggatcaagcatttgtgttttcttctaagggaaatggagagtcattagaggattttcaaccaggtgatagagtcagacttttctagtggttgtttgtctgttttatagagacaatgtctcactaggttgccctggctggtctcaaactcctgggttcaaacaattctgttcttggcctcccaaagttctgggatttacaggtgtgagccaccttacccaacttagatttctgtttttgatagatcacttagagagtaatatggaagatggactagagggaggcaaagatgagaagcaggaaaacctgttagcaaactgttgcaaaatccatgtgagaaattatgagacctgaaccaaagtaatgatgatgggaatttggggtaggaattagaaaagacagagctaatcggagatggtaaattttcattggcagtagatgcagagattgtctacaagtcttgccaccaactgaactgaagaacatcacaggatcgaatttgaaggagctgatgattagctcaattgtgtaaatattgaatttggagaccatggtgtttccaggtggtaggacaagataaaggctggaatcttgggaaagggatatggagctgggagttttctgcacggcagggattggttaaagccaaaggaatggatgaggtcacccaaagcaagaagggaagagtgccaagaagagaaccctgggtgcacagcatttaaggaatgggctgtggatgagaattccgtgaaaaagatgaactcagacgaatcagaaagatagaaagagaaccaggagtgggtggtattacagaagctaaaggacaaagatttccaaagagtgttaaataccacagaagggcaagggaggcagggattgacttcagctttaatgactttgatgagaaccattgaagtgagcagtaaaggcagcagatgtagacaactctttctagaagtctgactgtgatggggagtagagagatgatatgataaccggggcgggtgagggagaattttataatgtagaatgaagcttggacatgtttgcaggctgaaggaaggagcccagggcctgggagatgtcatagtcctgcctgacttatagacataggccagttttgaagcaaaaccccagaagttgagttctctcctccctgtgcgctactccagaggatcccttgagctggctcctcaacagggggtcaccaggtgtccctcagcctctgctgctatgatgacacattcacccacatgcccttattattcttagaaaatataagggaatcaatcctagtctccatttagtactggctttctggaaattatgcaaaatactggctgtctcccagatcacttattagtgccttggggtggtaatttcatggaaatgactttgaggcacagttaagctgtctagcagacagccatttacattccaggggtctgtcttctataacttccctatcccctttggggctggtcccactgtccccaggccaggctctcagggagctgtaccctcaccttctctacttccttcagactcagagcttcctttgcccagccagtcactcactgtccatctcttggtggcataattgtaaccagaagcaaatagtagagtatggacctcggtaagatcagggatgtgtaactcgaaggagatccaggaaaagctgtcaacacggcacagataccaacatgcagccctgggacaggcagcccttacccacagagccctggtaggacacatattgagatatatatatatatatatctatatatatctatatatagatatatagatatatatatatgtgtgtgtgtgtatttttt

SEQ ID NO: 55668 - DNA, 1220 bp, Homo sapiens
ccaattctgaacatgtttcttctttcaatcccacctcccacatctatccccaacacacacacacacacacacatgcgtgcgctcacacacatatgctctcacacactcacacacacactcacatgcacacattactctagggctctcatggttccctgctatctccctttccatacccaataggaggaaaggacatgaaactcagtcctctctaaagcccataggactgatgctaactccaaggacagtcttgggcagtatagggagttgcttttcattggaaacaaagcctccaggtaaggtaagggtccactggcttatttttaggcattcggagcagttagggaaggtgtactggaaatggaaaatttccaggcctccctcccctgccacatggctaagtaaaacccattctgcctgcctaggagattcacaggacctgtgcagccaccacccacccccatccctgccaaatttgggaggcagcagatttaattatttaactcagctctgagtcagagatggcccaagcatcagagcccaagccaatgctgtcaggggtgaaattacaaaatgatccccttaggccctgaccacatcatccctgagttattaagacccaaagcagaaaatcagaaattctccagcagcctctgcagcaggcttcctcccaagggactgcactattctttgtggctctgagacccacatgtgggaggctttgtccttccctcccttgctgaagtgtctctaaatgggggaaggaatagaggaggtctggttgggggcatggagggaaaagaatgtgtttgccccaaccaagcaatcataaccatctgggaacttctggctatagagggagttaatttaggtcacagatccaggccccccaagagccaaagcctcagggagaatcatagcatcacagattcgggcacctagctaatgcagacattacaggatggtagttaacacatcaactaactccactgttacacccacagcccttcctaagggtaaatactccgctccttgtctctgcaaaaggcagctaagggaagccctgtttttaccatgtgaccctatcaccctttggccaaaactgactggagaagtggaagtgggaagctaaacccaagtgcgacaaatccaatagttacatgtggttggtggttaccataatgaacagcacagatacaggacactgccatcatttcaga

SEQ ID NO: 55669 - DNA, 4211 bp, Homo sapiens
ggctctgtctcaaaaaaaaaaaaaaaaaaaaaaggaagttagcacaatgtctgttacatagggtgtgcaataagtgggatattgagggcattacagtgtggtacagacccttgagtcagattgacttcccaaggtcaaatcctggtcccattttaattgttctataatgtactttccacacctccccccccgttcccccacattttaaacatctctgaaatcagaatgcacctcagcattgtaacatggtttaattgtcagttattatctcttagaatatatgagataatagcctgtctttacacttgatctcttatgttgggcaaattacttaatctcttggtacctcagtttcttcagttgtaaaatagggataataatagtgtctacttataaagttgtgaagactaaattagacttgctttggaaatttctggcacacaataagggcttaataaattccatgtattggtattgtttttattattatcatttcaaaccaggtaatgggtgtggtgggacctgcatgagctgagcagctagaagcagaagaggggaaggctggtatgggaggggcaatgctggttctcaggtcaaaaggggagtgtgatgaacagtagccaggaagccagacaagtgtccaatgcagcacaaggttgatgagggcatatggttttcaggtgaagactgggaaccatgttagggtaccaagcctggttgcccagcggggatgggttggtgggttaaaagggatagccaggttgggctagttggtctatatgttctctttgaaattgcatgttctctgactgtaataactactgtctattaagtctttactacatgccagggcactgtactaattgataagtactgtctcacagaaatctgttatcaatcatatgagttaggtgattttattagatcaattttataaaagcaaccaagaaggttcaggccgggcgtggtggctcacacctgtaatcccagcaccttgggaagctgaggcaggtggatcacctgaggtcaggagttcaagaccagcctgaccaacatggcgaaaccctgtctctactaaaatacaaaaattagctaggcgtggtggtgcatgcctgtaatcgcagctactggggaggctgaggcagggagaattgcttgaactcaggaggtggaggttgcagtgagccaagactgtgccattgtacttcagcctgggcaacagagcgagactcagtctcaaaaaaacaaaaacaaacaaaagaaaccgaggctcaaagaggtaaattaacatgttcaaagtcacgtggctattaagtggtagagctggaacttgaatagggtttttttgactttacatctggcacctaagctcctctgccacattcttgaactcagttctccagcatatctcagtgtatccagaagcaatttttctccctttttcctttcccccctcctcccccaccccacaggtctccacctcccaagtccacaaatgccaaactcacaagtcatctgttttgccaaaattctgttccgatttgataaaccctagctgggccagctcactcagcatgattcagccggagagaatagcaaggctgcatgcccggcatgccgaccagctgagctcaggcaggatgggaggcgctcaggaacctcagcctgacagatggctccactcggctgtctccacgggcctgatgccaggggcagcactcgttctcagcaggagggaggtcgtacgagtttcacatgcatggatgtgtgtgtgtgtgtgtgtgtgtgtgtttcacatggaccatgcaggagtgaagctgtgtattatccagagtgcccatgtgtatgtggccggtttgcacatgtttgtctgtatgcgtgtggatgaatgcatgtgtgcatgtctagctgtgtgtttgtgtgtgtatttgtgtgcatgcagaagtgtatgtgtgtgtgtttgagtttcaaatttgcattcatgtaggatgtgtgctcatgagcatgaaagagaaagctgggggtgggaagtagggggagaacggtcgtgggctttgagagttgagaatgttgaatgttcccacctgcagtggagagttgctgtatgcccctccctccagctctctctcctcttcacaggactgactgacatcagcagcagcaaaaggtcatatcaagcccaatgtgaagtttaggctctggctatgatttaggtttcccaaaccaactccttggctacagttttctcctaaggtaggggtacttaactgtttgttaatctagggtccccctgaaaaatctggtgaccagaatgaatcttccaggaaaatgccctcaaaacacataattttatatgcaatattatggagttctaggggccctccaaagcctatccatggacctcaggttaggaaaccaagtattatataaacacttattgaatggctatgatactgagcccttgttagagagataagtacatagaggaagaagatggccactgtttaaagagtacacagtctagcaggaggaatagatgtaaatgcataactacagggcactgtaacaagtgcagtagtggctggaggaaagaactggcagagcatgagaggaatgaggggaagcacttcttgacgggttcagggaggaactcactgaagaaggggacacttaagatatatattgaaagatgagaaggaatttatcaaacagagaagatgcagaaagacttgccaggcagaaagaacagcacaaaggcagaggggatgctgtatttggggaatgatacacatgagatcagccgggagcaaggctgaaagagagtttagaggtggactgtgaagggccttgttcacactaagctaaaggttttggcttttatcctataagtaaaggggaactattggagctctttaaacaagagagtgacatgatttaactgatgttttgcaaagaccacaatgcatccggcacttatccagaggtcaaataagtggctgttgcaacagttcaattgacagaaaaaaatgtgaacaacaggaatgtatgggaaactagtatataggcttaaagaaaagagatatttaggagataaactagtaaaaaattagatgccctcattaaatgtgtgggggttaaaaagaagaaagaaggaagagttgagcatagtttctgtgattctagcttgagaagtaaggtagatgatagtgccatgcactgagatggaaccatgatgcagtttaggttcttggaggaagatgagttgtgtttgagacacaatgtgagatgtccaagtagaaatatacatcaagcaattgactatataggtctggagcactggggagagagatttagaaatgtcaatttgtgagtcacaagcagacaactgaagtcatgggtaacagatgagatcactaagggagaatttagatatccagtgagaagagaagcaagaaagaagtcaatatttaaggggacatggaggaagaggaatttttgtaaagaagactgtgagagggaattcttaggggttgaaaggattgaaataaaatcaggagaggtatctcctagaagctaatagtacacaatgttttgttttgttttgttttgtcttgaaatggagtttcactcttgttgcccaggctggagtgcaatggcacgatcttggctcacggcaacctctgcctcctgggttcaagcaattctcctgcctcagcctcctgagtagctgggattacaggcatgcaccaccacacacgggtaattttgtatttttagtagagatggggtttctccatgttggtcaggctggtctcaaactcctgacctcaggtgatccgcccagctcgccctcccgaagtgctgggatttgaggcatgagccaccgtgcccggcctagtgtacaaaattttaagaatgagggagtaatcattagtgtcaaaggctaaaaagaggccaagtaagcagaggactgatgtaaaaaccatacataatcaaaagacagaaagaagactggaaggaaatataaaatacacaaaacattaatcagagttatcagcatgaggaattataggagtttttacatttatcagagttattactattggagattataagtgcttttatattctattttacagttgtttatctcaatgttcccagtccactccagtgcatgtggaccaaatttgaacaatgagaaagaatacctg

SEQ ID NO: 55670 - DNA, 6499 bp, Homo sapiens
attcctgacttagtttggaatagtactgggaggaacgcaggccaaatactaactccattttagaggtggggcaaagtaccatgctaaattgtgctatgtggtataatggtggaatagagaatgctgtgtgagcacagaaaaaggaacaattcagagcttaagtgaactttatagtggaaatgccatgtgaactggccattgaagattaagtctgagaaagggaaagctattccactctccttagttactggtagatatctaagtagaagccagggccacaaacatgcagttaggtactgcttcccagtgctcttgacccccgcccccaacaccttccagagcatattctctttgcttttgctaagggcctagctgccatgggagcaccaccattcttgcttagtctctttgcaatttgctgtcaacaacttactgtcagtgtgcaaacgtacagttcacatcctccagatatgcagcatcacacttcagtttctgcctccaagcctcttccaagttctctgatgatgcctgctgttggctgactgccatgccttatctgggaatcaatgagaccagtaggtcaactgtgagcagctctcccaggaaaccagcagggttaattttaaaggaattgtgacttgtcacacacactgtgattgttctacacctgaatgaggttgctggaggtccctctgtcctatcccctcctcccctatttccttcagtgactttggagaaaaaacagatcctatttgatttccttcttcctcaatctcttaggttcccaaagtctgactgctccgttcacactttttcaaagggcattggtggggacccagtaacccacctcattcctaaaaacttggttacccagtggtgggccatatttctatttaatatcctgtgataataataaccatggtatatccattttacagatgaagaagctaaacctcagagagggtaagaggtgagaggctcagggtggggagaaaccagaacatgagacgggaatacagcctaaggcaaggcaataatgactatctgtcaatgtttggctgcccagcatccatttccccgcttcctgatagtaccctgatttctgtacacattatgtgcagtcttggtgggagcagacatgcagagaggcctgtctcccactacagttagggaagggctacagaattctaacctttgagatttaagggaaatagcaaaagttacctccctgctgagactagtatgcagcctagcccacactccatgtttagcaaaggtcatttctgctcagcactcttttcttacaatctgagtggttttaggcaagtcacttaacattctttgcctcagaaatgatgtgtgtaggtcgggtgtggtggctcatgcctgggtggatcacttgaggtgaggagtttgagatcagcctgaccaacatggtgaaaccctgtctctactaaaatacaaaaattagccaggtgtggtggtgtgtgcctgtaatcctagctactcgggaggctaaggcaggagaatcacttgaaccaggaaggcagaggttgcagtgagccaagatctgggcagcctgggcgagagagcgagactccatctcagaaaaaaaaaaaatgttgtatgtaacatcaccatcattcctaacgtgtgttaagtgctcagtggttagttactgctctgatcgtcataattatgcttttgtccccagtgaatgggttgaatcaattgtggtatatatcatcagcatgacagaaactatttaaagtaatgtggaagcagatattgacttattgaaacagaaactgatttatatggttgaataaaaaggtcaaattatgatcatactttgattaaaatatgtatatacgccaggcgtggtggctctgcctttaatcccagcactctgagaggccgaggtggatggatcagttgaggccaggagttcaagaccagccggccaacatggtgaaacctcatctctactaaaaatacaaaaattcgctggatgtggtggcatatgactataatcccagctacttgggaggccgaggcaggagaatcactcaaacctgggagctgggggttgcagtgagctgagatcacgccactgcattccagccttagcaacacagcgagattccgtctcaaaaaagaataaaaatacctgaaatagtacatcccaaaatgttaatcagtatttatctctgatgttttattttcgcctttcttcattttctattttcagtgaacagacattaattaatagttactaatttttaagtttaaaaaggccatcacttagtggagaatcaaggcttgatttcagccaggggcaaattcaagcagatagcacaaggcagccaggttccacaaaatagggatgaagtcagaatagcagtcacatcagacatgtggttggcatacttccgatttaaagggcagtcctaggcagtggctagatacacaatccaaccctctaggggagctgggggccagagcaactcaggtccttgtaactactttaattcctgaaaacctttcttaattaccctccccatctaccagccactgtctactccattcacctaatttatttccttcccaggacttactctgaaaacaccttatttggttgttgtcacaggaatgtaagctcatgtgtgcaaagattttgtctatcttattcatcatatacatgctgtgacatgaagagcgcctgcacaaaataggagctcaattaaaaagagaattaatgcaaaatcaaaacccaccagggaataaaaatgaggcagaaatccagctgtgcctttgggatctacaagtgtgaggggtcagcaattatgagttcaccttgtggggttggattcaaagtaaggaatataagcaaataaatacaatttcaatggtcttttttcttttcaaaaagcagttatcacattttttaaaaatggtgatgacacttccagaagaatatgacacagtctctatgtatgaacttattggaagtctgggctaaatgagtaacttcctgaatgacatgaaaagtgatgaggctctggcattctggaaaaacttgatacaaattgtacactaaagtaattccatggaatgatatttaaaagtttaaatggctacttagtctaaaagattttggcttaaagttaaatgaatatttcttatacacatcaaaatccctggcataactcagtttttatgggacacaaggaagcagagaattctgagttttatgtcaaactttttgtgaacgagcaagtaggaaaaatgaaagtgagaggggacagctgagactttcattcatcttttatatgccacacactaacaagccatgaattttctcatttaataaccctacaaggcaggcactatttatttccattttccacaacaaaaaaataaggctgaaatagattgacttgcccaagatcacagttaataaattacagaggaaaatctaaattccaggtttatttgattctagagcctgcatactttttatttaccacacttgcctctccagcattcctggaaatccccttgatgaaatatattgctcatcttaaaaagaaaaaaaaaggcaataatatggcttaaaaggaagcaggaagtaataggaaaaactaagtaattcacaaactattaggttgaatcacataaaattgctgatacttgactttttttaacccataaaagaagcagtttcatatacttcaacctcatggtatggtattatttctgtggataaagatcaccatgacaaccctattaataactactccatcactcatctgtacacacctttactgattaaatttcatgtcatttcagtaatggcttaagacaggaagtgttttacatatgaggaagagcagatttgataaccctacccatttttcagagtagcatttgcccttaggaaaacatgtttaagtttttttaaaagctcctacctgtcccttactccctgccccttccatgtcccactttccacatcatgttctgtcaaaataactttttttttttttttctaaaaagagacagggtctcgctctgttacccaggttggagtgcagtggcacaatcataggtcaatgcagccttgaactcctgggctcaagcaatcctcccactttagcctcccaagtagctgggtcaccatgctgggctattttagtttttgtagagacaggggtctcactatgttgcccaggccagtctcaaactcctgggctcaagcaatcctcccaccttggcttcctaaagttctggaattacaggtgtgagccactgcacccagcttaaaattactcttgaattttgcttctacagttggcttctaactggtctcccacacttccaatctattctccaaaggttttttcctaaatgcaaatctgggctgggctcagtggctcacacctgtaatcccagcactctgggagtctgcagcaggagaatcagttgaggtcagatgtttaagaccagcctggacaacacagcaagaccctatctcacaaaaaagaaagaattttaaaaattagctcagtgtggtggcatacactttagtcctaactacttgggaggctgaggtgggaggattgcttgagcccaggagttcaagcttacggtgaactatggttacgccactcactgcactccagcctaggtgacagagcaagaccctgtctcttaaaaaacaaacaaaaagcaaatttgtcactatctgcttacaatttgccatctccagcctaatcgtattgcctcccaaagatgctatgttgaatagaacccaattctctgtgtcatgtacctctgtgactttctcccacctgttttgtggctggaatggttttttcaccccttttcccccatcccttatttgacattaagcagccaaatttatgcttttcaaggcttaattcaaatgtcacctctttatgaaactatacctgactctcctctgatagccaccagttttctgtgctctcacagcaattgatacatttttctattttaagactttcaagcagtgctctgattaggtgtttctgtgcccttaaaatattcaccagactttatcttactcttagtaacaccaggatgttgcataacactagatgtacagcaggtattaccagtcagaacccaagggtccttagcactgagtccctgtgttttatcttagtttggggaatgagggaaaaagcatacaggttgagtgccaaaaacaagggtgcactcttccagggcgtttccagagttcttttacattgaaggcataagctggggactacctgaactgggatttacatttccattaccaaggcttatttcattagggtaaacggtgtttatgagcactatatatggattacataagagcatttgggttttatgttttatacaaacatctaggatggtagtggggcacctagaaaccaaattgtcctttgctacaaccatgaaatacaaattcaatttgataaacaagaaacaatttgctagctgaaaatatatgtatgcaatataaaaccaccaggagcacatatggccacaaagacaagctgttagatcaagaacattcatcccaccaaatattaatatttccataatgcttcctcagtacttttaaagtttggtagcaggcattaaagtgttaaaaatctttatagagaataaacataaaattgacaaaatgtgttctaccaacttgggaaaaagatcatcactatctgattttagctgtgggaacacatttgtccagtttgtggaatactagtgttctagcagggaaagtttgaaaaacatgctcttagcctaacagaaagcagtcatacttttactcaaagcaagggatcacttaaaaaaaaaaaagtgtgacttactttgtagaaagagaaaattttgattataattcattaaattcactttttaaatgttgttgggctttcagaaatggtttgcatagctcagtagaagtcagtaattttcccagactccttgagccagatgggcattttccctacaccctggctggtgaagtcctgtgtggtaggaatctgttcccaccctcttataagggaatacattgttaactcacaagaggatgcccagaaaaggctgaggtttcagccactttgaatcccaagagatcaagatcacagatataaaaatcacaaaagctggaatcagggactgtagccaataaaatatcttagctacacccagtaacagggtgggtggggtagacaacatttattttcaagatgtactggagataagactgatgtgatatttcaatttcctattcacttggagagataggccatgtatctgcaacatatcctgactcatctttttttttttttgagacagagtcttgccccgttgcccaggctggagtgcaatggcacaatctgggctcactgcaacccccgcctctcaggttcaagctattctgctgcctcagcctccc

SEQ ID NO: 55671 - DNA, 1934 bp, Homo sapiens
ttgacacaagatttaaggatgccagaaaatctagaaaaataaacacagacatatcattacaaattaaaaaaaaaaaacccacaaacaagtacctatagtgaccttttaaagtattagaaagggcaggtcaatctatatcgtgttcccataaaaataaattctagtaaaaaccacattatcagctctggcataaggtatattatctatcactccctcatcgcatcccggtccagtgtttgagaatgctgtatagccgaatgaaggcccacagaacagtgacagtccccccagccacaccccacaatgttatggaccgtatggtttttacacaacacacaatctgcatgctcaagttaagagaccttgtgcctgaatactctgccaaaaccctaaagcgctttatcgcggtccttggtgggttccgactctatgtccgcgggtcccttaatcaacgcgctgcacccccacctcgccccacccgcttcctcctccccttcctccagcaaagcagccctaggcctgaaagggtacgcctaggggtcttgggagggaaaagacccccggccaatacaaaggacgggatggagcgtccgacccggagcttcctagccctccgcccccaccccgacccgcacccccacccgtacccccacccggtcccttctgccaggcccagacgcaagcggcctagtcgctccccttccgcatcttccagctagaaagccagttcttccgactctgcccgacccaccacgcctctgggactgggggcttgtggcccactaccaggctccgaggggcagtggtttggtgcagccgcggatccgtctactgcggctccgtctactccggctatgaaccgcagcagcggcggcggcggctccagagtccttggctgacgtggaagggggtggggtaacgaccgaagccacagccacctagcacctacggcgactcagagaggacatgctttctttgtgcagcgcttgcgcgctgcaagtatatcctattttcttcctcttctcttgtccagggtttgattaggccgcagagcaatgaaaccacgtattttctagttttccctgcaagccaagctctgagttaagcactatgctaatttaaacgctaactggaaatcgttccttcttcaggaacagtcaaggggagaaagtgcttggagagagggaaacttttacagggctctgttcccgtgaaaaagagctctggactagaaagtggaaacccagtaatcctttttcttgtccacaccctaataaactgggaaagtaactaatactattgggaaggtaattcagttattttattaattatcactagattaaaatccatttcagttcttaacatcgctagtagtttgaatctgcctctctgcaggtagggctggagttatttgaaaatccaaagtcacattggtataatttctgctttttatttaataatggcctctttccgtgatcctttctgagcacccagtagattagaaaaaatttttatgcataaagggagacagtcactgttttaaaggattttacgtatctccaaagacctgttacagctgcaatcagccatagtactttcggttttgcccatttgaagttccatagcacgccccgcccctacacctccctctgcccacaaaagggttttatggccaattattaataacaaaatatcttaaagcttaagcaaaatactgcgaataaaaacagatctgacggcaactgccctagttaacaggttcatctcaggaagatggaacaccaatagtacctcatttatgtaggatctagctcttttgagctttctctttttagaaccatcaagcaatctacaaattctttgagcacccaaaattgtattcaaaggccatgtgttgacagcactttaagagtgcctctctgattctgtgcatt

SEQ ID NO: 55672 - DNA, 2517 bp, Homo sapiens
caaaaatcttgaatacaaaacactacctgcattattaactgtagtcttcatgttgtacattagatctttccacttgctcaacctacatatttgctactttgtatctcctcttttttcctccccactgccaccccctaccctggtaaccactgttttactctctctatatatatatttgcccttttaaacaaaagattccacatataagtgagagcatgaaacatttttctttctgtttctggcttatttcacttaacataatgtcctctaggtccatcaggaaacctattttaattataaatgcaacttccaagaacgtctaaaataattatattccattttccccaagcctacgctctcacaagtttctaaatatattgcagccacaaaaagccacttcacagaaaaggtttaaaaacattattttacctgggggctccaaacagtgacatcattgtcatactgatttcgaaactaaaagtaaaagaaaaaaatacctgttaatagaagaacatttcaaatcccaactcttaacattcattaagaaatatgcttgtatttccattcaatgttaaggcactctgttcatgcagtcttactggaagattactactgtactcagatgtaagccaattctacatttaccataaactcgtgggagagggagaagcagatctaaatgggtcctatttttccaaactcttattctaacaccctccatatcaacccctttaggctcaattactaaagttcacaatcaactttcttgcctatttttgcttatgctgctcccttttattgggccctaataaatggttaaaagtcttccttttctttaaggtagcttaaatgtcgatttcttgaagtcttctccttttcttcccaaatccccctaacatatactcccacagctctttatctaaacgtccctttctgtttttatgattagggacatgtatgacttattttttaatgttcactgtagttatgcctgtacaagtgctgtctgtatattcacattgaatgaacaaaaatgtcctcacaaagttagaggtggacacaaatagctgcagcgatagaaccattacggctattacgactattataataatagtcatgggagtgagattgagtgctagaatggcagacagaactggaaacccagaaccctatattgtaaccctgattccatcacttcccctctcagcctcggcttactcatccgcaactaggtgactggacaaaatgattgaaaagggcctcttctaatcgaagtctaggcgagagataaatagacggacccaccaggaaaacggacgctgtccaggaacacaaacctgggggtcaagtccgcactggtggtacaggtaggcctccaagtcaagtctctgtcttctcctctcccatacacagcactaggagctattctggaccgctcagaatctactccactgaaggaacctgaggggcgaactcatctagctgaccgaggaggaagtgtcggaggctccccgggaagcgaaagcggtggaaaggccgcactggctaccgataacccctagcccggccaggccggagatgctgaatcactgccggagcccggccgtctgccgaggctctcatacctcgtggcaccgggcgacgctaaggatgacaggagaggtggctcgtcatcccccagtcaccagagctctgccctaaaccttccagagatcgggattcaacgtaccatggtggcggcgcgggcctggttgcggcctccagcaaaactgagaatcaaggaggtgctgccgaaagtatcgctcagcgatctacagagaagtctgcgggagtttgacggcggcggcgcagggtagcgcagtctattccagagatatcgataggcttgcaacacttccccctccttaaaactttccgaccgctcggcggcgggcggagcctcggaagatctaggaactgagactggcgggaaaacctggctgggagtgccggcggctgagagctgcggggcagcccctgtcacgtagcccttctaggttcctgtgtatggcggattccctccagtttctcccgctggcgggctgcatctaaagtcgtccgagtcaacagccgtgactctgggtgatactagctctcattaaccgtccacagatttggggtgttatgtgactgaaaggaacgaggctgcaggaaagccacaagataacgatccgtttctgtgtgtcagctgtattcttcctcgagtatcttgtttgtgtacatgcttttatttgcattaaggttggtgcaaaagtaactgcggtttttgccatttggcaaaatactttggaatgctcttccttattccctggagatgttatctttcaagggtctgttgtcgttaacccctcattgttattatgattgatttcttccaccagactttgaactccatgagggcgctaatgtctttctatgcccccaaaaccaagcatggtacctgacagattaggccactgagaaaaaatggacactttc

SEQ ID NO: 55673 - DNA, 699 bp, Homo sapiens
ttttaaaaaaagaaaaatgttctaaagttatatataacaatagttttctcccctaattaaaatgttgtatttttctacttttccacattaacatgagaatatataaaaggcatccttgcataaaaccctttgaccagatttcacaactctagtcctatgctaataagaagtctttatttagtttcagtctttccaaataagcctgtatgcttctgacgcagcaaacaccagtttggtcctctctgtcctctgtcccttgacccccaggctcagtctattcacctaaggtaaaactagaccctatttgtacagaacatattcgtctttgtgcaggcgcacacagaactgggggagctctgctctggcccaggaaagagatagagattggctgccatccagttgagttggctcaagagaagttcagctttcttgtcctctcacagacagtcccttccgtgctgacctttaactaattggcagggctctggagccttgactctgcttccccactgcccacactcttttcccccacattcttgataccttttggaaggcagaaaagctggagaaagaggcactagggagagaaaagtgcaagtctgagcctcttaggagttcccctccttcttgataagggagtaggactgttaatttcaaaggataccaacacatggcatggaaaatttgcaaacacatgga

SEQ ID NO: 55674 - DNA, 2437 bp, Homo sapiens
gtaactctgctcagtccaccacatctggagaaccctgggtcttggcagtacaaatgatcatcattttgtactttgtggcgacggccaaacccagctggatttttgctacactgattttaacagctctgcgctcacgtaattcggtgctttaaaaggccatgttttatttggcactgatgctttcaacaaacttacagggaccattggccccaggagccaaaagctgaacctgtgctgctacagctcctggccctgtcctaatttcctcttcttcttctctgctgtttcttctacctttcacttctcttcttcctctttgttttcctccaccttttcttcttccttctcctcttcttccctgattgttttgacagatcattgagttcagacagtacatcacacatgaggcctaaattatgaataaattccattgacgtcaggccgtttgtacatccagtgaacttggctcaatttttggcatctctaagccgtgtacactggagatgcagacgagtgccttcagggcaacagaggcattccagatggtggcgttcagatagactccccaacacactgcctcccatctgggccagcgctcagaatgccataagccactctcagcacatccccaaagctgctgttgactcttggaaggagtgcagcaaacatactgtgacttatcagggcaaacctgcagatgattaactttgggctcattatatgctgcatttccacccaagtggactccaggctgggggtaaaagcagggtaggagagagggcagacagagtgaaacaacaggagttaggcagcaattataaaagttttccccagcaaaggagacacaacattaggagaaaagtagacgtttaaaaataggcaaacataagttaaagtccctgctatttcactcattacttgtgtgcacctgttaggttgtggtagatatctgctcagtatttttcccacacccctgcttctgaaaacggcagcctcttttcacttgggggactcctttactactccacatggcttcagggctcataccctcctaccctaacctcatctgtctcctagggagtgattatccccagcagagccaattacagtgtcacagccccctggacacagcaaataagcacgtggctaatgccagtccataaagtccttctttgaaagttttttaaaaaaattctatattggatcaaagctatgtaagaatgttaatataccttacaactccaaaataagggagaaaggaaaatcactgtcataccagctgggagaaatggagacattcaaagtcaaaaagcgatgccttcacttttctgaatcactgccatagctacctagatttatggaggcaatgtgggattatacatatgtgaattttcctggcagctaaaagttatcccttcagaggtaaaaggacctctctttttgtttttaaaccacgctattcgcaggcttttctaaaatatttcacatatttcccttactttttaagtggaagataccacatttagcctcttccggatggctcagaggcatcaaaataagtgtcagttaataggctatgtgataatatggtttggagtgttttttttgttttttgttttttttttttttttttttaaagactgtcccaacctgcactgcctaactctttcctgcttacccaagcaccacagggcaagctctcaacaagaatgagcttgaggtaccctggcctcattcatggccaaagccctgattctattcctgtctcatatcccccttcctgatatgttcttgcattcctctggctcctgaacttctgtttgcttcctgcttttagtcccgcagttttcctttagatctcacctgtgacacagctgttctgtgactgacctttggttctcttcctcatatgccattctgcctttgcccttaggccctgttctgtctccagctggcaattgtagtaagacaggctggggtcccatgacgaggatcagatgctagtgttcctgtctcctttcacatggttaaagggactggaatcatttactgtagagacaaacaaccttatacactacagtaaccctcagagtaagattttaaaataactggagataggggaagggttatagaagatattcatgttactgcagattaggcagtatagaaatccattttctgggaagcatcaattactctctttactgattaattgggttatacatgcttctttggaattgtcaaatttccaagcctgacactaggctcgattgcttgttcctatactatccaggcctagctttctcttgttccttttctgctgacccaggagtccaaggctgccaaaggtataacattttctttctgcttcccttctttctgaacaggtctctttcttcatctccataaaaatgaattaaaaaaataaaacatagaa

SEQ ID NO: 55675 - DNA, 1033 bp, Homo sapiens
gttagctgcttcagaaaatcagctacttggtttgagttcatcttcagcctctttattgtcctttttttttgaaatatatatatacatatatatacgtatatatatatatgtgtgtgtgtgtgtgtgtgtgtgtatatggggttaacaagtgagctggacaagctgaaagcttcttactgttaccgctgctgtgactcatggctttactgaaactggaatcaggagaggtgtaaggaacaacacagcctgggagcttggcacataccttgattattccttgcctaggagagagaagtacagtgtggaggacatgggctttggtgtcaacctggttttgaaaatctattttgcaacttactagctgatgactttggccagattatgtttgtagcatagaaactatgttctagtagtttttaggcaatttccttctgtgaggacatcatttgcttttcagaaagattcccatttgaccgcttttatggaattactcatgctctagcctatggcctccttttccatttttgaaatatgcctgctttatcttccagacatcagattctgctgtctgatagcatgtaattatcgagaaatgtgattattcctcttacttctttaatttatcctgcttttctagcttgtgattgtatctcaattaactatttccttagttactgattgacttaatggaatccagcttcattgacataatttgtgaactttggctaccactaacatctgtttgaaccacagtagcctgtcaaattgccctgatatgtttattgcctcttctagaactgctgaagtttactatcaatggtcacttcaaaaatgaatcagttattttagcctctcagtagagttatccaaatgtaatacatgtttccttgaacaatcaagcctgtatgttttgtacctggtaacacatatttctgggaatactatatggaattatccaaatcctaagcatctaaaggaattgtcatttataaaccaggacacaaaaattagtattttaaagatgtcaccaagg

SEQ ID NO: 55676 - DNA, 1360 bp, Homo sapiens
gagagagatcctgtctcaaaaaaaaaatctgtaatatagatttataccacataaagagctaaaagaatacacgaagaggagaggttaattctggcttaaacctagggtgactcagcttcaaagaagaggtaattataaagaaaaacaagtaaaagcctgaagaaattaagattaatttaaattcatttaagtgttttttatatcatataatagattgctttccttgagtgtgtggagacagtataacaggagcaagagttgtgatgtctaacgggcaaaatagggtgtcataatttcaaagaggttagaaatcactctcttagtaccctcaaagtttaaacactggattactcagaccttgttatgtgtaatttctaggtgatgagtactgggaaaaatttgtgccaaatcagcataactaaagggctttaatagcaatcacttacttatctttattgtaataatcatgataaggtgactatatggcatcagaacctagataagtatttcccatttcataagttagggcattttaagttgtattttttaaggatattgagcaaacacttttaattctcgtgtacctaacagtaaggacaacagtgatttgctttcttcttggttataaacactcgtgtgtgtgtgcgtgtgtgtgtgtgtgtatgtgtatgtgtatgtttaaaggatgttttgagcattataacataccccaaagctctacctgagttctttttaaaaagacaattacaacagaagaagaacaaacaggatttcctctataactaatattgacttaactttatagggtcctaagcctgaactcctctgtttattcatgaaacagatccaggctattggtccatttgaatttatttccaaacttcacagttcagactgtacagccagtttaactcttggcttttcaggtgacttcacttgcaagggttatagaaaaggccacagcagtgttgggatgttgcaaaagaaacccatgccctggcccatagcccagtagactagagtccctcagcaaaagagagtttccactgtttatacttgggaattatccctggtttagcctttgtctcaaaccatctggatgttaaaagtgctaataagcaactgacttactggaggaataaattcaatctagtgattctattctggaaggctctgtaaagacagagatactggcaataaagcagcaaagcaatttcccaagttttgaggtcgtctagacctagttgtgagatattgataacagagtggccactggaaattcttcatagtggctcaactttttttgtagatgaaagaattcatgtttagatcttgtccaacaacccacttcctagctttc

SEQ ID NO: 55677 - DNA, 2785 bp, Homo sapiens
gtttgtgggatttaccacacagtaaggtttctcatctgcctggaaaaatgtggaattagctctttgagaaatgcagtccggtcatgaggttgaagcgagagcttagggagggaaacacagttcactctctaaggcagttatgattggttagattccagagcagtccctttggtgtagtaaagttcttttcttctcgctttcaggtctgtgtttcctaatgttgctagtttcaccagtacttcacagatagcatcttattcggcttccttcaaggcctgctgatccaaactggggagtggtcttggagaggattcctagttctctccgctcccccatctagaaagtgctgttacagtgaaaaagccttcaatttgcaaagaccaattgcgacagcaaatctgtgctgtgtggaaggggatacaagttgtgaaccggcggatatgtatgacaagggtacaaaatggaaggcgagacgttagttcttcgcctgtgaagatggttcttgagcaacactcaagaacgtgcacgtggagtgctactagagtgcactccacgtgcacgttcctccctaagagccactgcaaggatcctgggcctgctgcgtggcccaagaatccacgttgcttctgaggctagatctagccacagcgattagggtttcttcgccatggccttggtggtggctggccctaaactggtcacagtctgaagacccaccctgaaagggactaaggttagagacagcgcccctcccctcccacccttagctcagcatccccactaagcacaccccttggggaccacaaacgccctctttcccgaagaccccagtagtgacctgtgggattctggctgggtgtccgtgacttaccctcaaagagaacctgcacgcctggggtcccaggatggctggcttgcccctcccgtccgaagatgacctcgtccttctctttcagtcccggtgggtcttcggactgccgccgccgcgctttcctcggcctgggcacgctgggtcggcgtggtcccggctcgcgtccctgttgggcggccgcggcgcgggtggcggcgggacaagtcgtgagcgcgcgctgggcgcgcgcccggccggggcagtcgcgggggaggagcgcccgcccgccgctcgcgcgcccaacggaccaggctggggccgtgaggtaactgttgcagccagcggaggtgggaggcgacactgagtctccagtcccgagaggtgcccgagggaaaaggaggcggcagctaaactggtcctggagagaagccccttccgcccctctcctcagccagcatgtcccggactccgccgctcctcagtccgcgcggtggggaccccgggccgtggcggccggcgcagccctgacgggttgcgaaccagggggcgccccgaacgcgggggttggggtctgggagcgcgagcggccgctacggtacgagcggggtgtgctgagtcccgtggccacccccggccccagccatgaggagggacgagcgagacgccaaagccatgcggtccctgcagccgccggatggggccggctcgccccccgagagtctgaggaacggctacgtgaagagctgcgtgagccccttgcggcaggaccctccgcgcggcttcttcttccacctctgccgcttctgcaacgtggagctgcggccgccgccggcctctccccagcagccgcggcgctgctcccccttctgccgggcgcgcctctcgctgggcgccctggctgcctttgtcctcgccctgctgctgggcgcggaacccgagagctgggctgccggggccgcctggctgcggacgctgctgagcgtgtgttcgcacagcttgagccccctcttcagcatcgcctgtgccttcttcttcctcacctgcttcctcacccggaccaagcggggacccggcccgggccggagctgcggctcctggtggctgctggcgctgcccgcctgctgttacctgggggacttcttggtgtggcagtggtggtcttggccttggggggatggcgacgcagggtccgcggccccgcacacgcccccggaggcggcagcgggcaggttgctgctggtgctgagctgcgtagggctgctgctgacgctcgcgcacccgctgcggctccggcactgcgttctggtgctgctcctggccagcttcgtctggtgggtctccttcaccagcctcgggtcgctgccctccgccctcaggccgctgctctccggcctggtggggggcgctggctgcctgctggccctggggttggatcacttctttcaaatcagggaagcgcctcttcatcctcgactgtccagtgccgccgaagaaaaagtgcctgtgatccgaccccggaggaggtccagctgcgtgtcgttaggagaaactgcagccagttactatggcagttgcaaaatattcaggagaccgtcgttgccttgtatttccagagaacaggtatgttagctggaaggcgaggtctgggacgcgagcgggttcgggtttaccgctgcagtttccgagttgaattcgcttatttcaaagcatgttaactttcagaatggaaaaagggtgtgttgcggggggggggggggaggaaataatgttttattctggaaaggattcttaaaatacaggaagccttttaaaaatgcagaagcaagtagcttttgtcattgaatagaaatcaaatagcccgctaatcacatggcactttttaaggactgtatatgcaatagatgagttcgcagaagaatgaggtgaatcatttgt

SEQ ID NO: 55678 - DNA, 2034 bp, Homo sapiens
cctcagcctcccgaatagctgggactacaggtgcccgccaccacgcccggctaattttttgtattcttttagtagagatggggtttcaccgtgttagccacgacggtctcgatctcctgatttcgtgatccgcccgcctcggcctcctaaagtgctgggattataggcgtgagccaccgcgcccgggcacctagaccaatccttgtaaaaattggtttaagtaaggatttaaggtcaaacctgaaataccacagttgccaaacatccctgtacttttccttcaaaacactgaccacagcctgtggccgataatgagattagttttctctctcccactcatctgccaactccttaaaaggctgtatctgccttcttcaccgctagcgtcaggcctgtagttgcatataaataagtgtaattcaaaacaaaacaggtgagctctgtcccaggacccgtggaaactcctgccccctccggacgtcgggacacccacacacaagcggtggtcgccttttccgctgccagtcacagggcatttccgtgctgctttcccctccgcagaatgaggaggagcgaagtaccgacctcaccggctggttatgagttttaaatgagtcaccaagttggcagtgacagtggcacacagaaggcgccttttaagtatctgctaaggtgccgttcccagccagtcagaacggcattaccatctgcgctgtaggacccccgcagcggattttagtcatcaattcattcacgcgttcacaatcgtttcccagggcccgcttctcagtcaggggcgttcccctgcattctccattctcacagcaaacgcctacaccagtcgttcgtcgactgcagacaccgaagaacctgctattaaccatctagaactcagaacgccttgattttccgacaagccgcgtgcagcttccacagagctgcgaggccgactcgcaagacgcccgcacctgagggcatgcgtccaccctggacctgaagtggcggcgcggctggcgagccaaacggcgcaggcgcaggagcaagagctcgagcggtagcgggaaaatcaggactggatcgcctcggagcctcggcccggagtgggtcaccggcaggggcggggctccccctgcaagggggcacggcgtcgaggacttctcccttccagacccgggaagcgggtgtccctcaaagggcagccggcacacggagaggtcccgactagtcggcccaggggcggccataagtccaaccaggaaggccctggccagcccgggccagcctggcggccctccctgcccggggcccgtcggggctgtacctctccgtacacctggctctgctttctcatgtagacatggggaagctcggatgaggctgccagggaatagatgttgccgataaatggcagccccggcggccccggggggaagcccatcggccgcctctgcttcagcagctggcggacccctagcgcgaagagcagcaggaagagcgcgccgccgagcgccgccgcgccctcttcagctctccaaagcttccacatcggcccgagctggaggtgcgaactccacagcagccctgagacccaggcactccctccagccctgccatactcccattggcaggataccctcaggtcccgccctagctccgtggccattggctgactgagtgagcgctcaggccccttcgggacaactaccttctagttttgcgcggctgagagtggactttgcggagcgggtggccggtgctaccctttggaggtggcgcggctctaggcggagcaatgagccaggagtccgttttctagaatgttgacacaagggcattgacgaggtgtcaggacggcctcactcactgggctaggcggatcctgcctctctggggccagacctttcttaaagtgtctttttaagtaccaggtctgcttatttcatttcacactaggaaaactggagagatgatcaacactgcagtctttagctgaacctgatacttttcagaatttccagtagaaaattgacccat

SEQ ID NO: 55679 - DNA, 1605 bp, Homo sapiens
tgtaaaagctggtaagcaggactggatttgagcaaatgcgtgtgtgggcatcatccaattggttgagagattgatagaacaaaaagattgggaaaggttggattcctagccctgtcagatcctatttcaagtttagatatgttctttgtcctggatgtttttgcactcgtttttatcattaaagacattacgttaaaatattactctggattcctgagatttttggcacccctttacattttgcaatggaaacaagtgcctcactcatctcaccccagttcgggccttccagggcacctttatagagaaactgattttgttcaccaaataaaacgaagctagtctttgccccagcagtttgctttcctaggtaaggagagatcagatataaaatgtagatgtgctctggatttattcttgattgaggattgcaccaggcagcagcaacaaaacgattttgatttgctgagtctgaatctaattgatccacacaggtttccctttgctcgctatgcttaggtctggcctggcccactggcttctgacagggtggcttttattttggaagtgtgaggacgcactggacggtcgccacatggggatttctggttgaacagttttcagagaatgaaatcagttccttcgtggttttcctgggagcatttcctgagcgctagaaaagttcgcctttctaggcccagatcgcacaaggggcaagcaaagcgtcaaaacagcgccccctgtcggccgcgaaggcgtggcggcccgcggaccggcggaccccgggtcataccagctgtccgggtgcacaggcccaggggccccacgaccgcgggtgtcgggaccgtgggctccactgaggagcccaccgaatccttcggcctggccaggcggggggtcttcttcccagtccgcggaagccaggtccgggagacggcggggctcactgtgccttcggacctacactctgctcgggggccggatttctgcaaagcgtccacttggaaagaagtttcacttgcagggaaggcgggtgtacgcaatgatggtccgtgtgtccgggatgtgaatgccaaccaagactgcgtccgttggtggagtgtgcgcgggtcctccgtgagggtgcttctggcagtcacagttcacgagttagcgagaagatggctgggaggcggcgagcccccgctcccggggcgcgcatttcgaactccataggtatgggtgagttggttagcattggattcgagtgcttgttcttatctgagtacagacacctggtaaccttcgggcctgcagaggcccctgtgctcctttggagggcgctgcaggacgggctgggttgcatccgggcctttaccccaggtagccggcagcaagtgaactggcctggattggccggcccagggcacctccacacacagagccccgcggcacaaggcagctgtgcaaaacggtctctagaggggctgccctcgccctggtgaatgggcaggaaggcgtgtgcatatgtgtgtgtgtgtatgtgtgttcgggcgcgcgttggggtgcagccggccggtcgtaggctgcggtgaaaggtggcttgttattctgggcaccgcaaag

SEQ ID NO: 55680 - DNA, 1831 bp, Homo sapiens
ataagaacctcctgaaaccgtttgtaagtgtgtgtgtctgtgatgtgtgttttcctaaagagagagttcatagctttcgcccgtgccacggtgaccgcaaaatgaaagccagtagacgcagattttgtggccatgtcactttgaggggtcggaattctactcctgactgtggtgtgtgtcttcagccttcagaatagacacgtactccccactatcaaatctttggcagctacaaatcaaaggctggtgccgtggggcgctaaccagagtctgcgtccagagggcgctagtgtagccccgagcagtttcaagactgactgtaaaagtctgtctctttaggacaggagggacggtcattaactcacctctcaagcactccttgagtttgtaggaattgcctggctccttgctgggggccgaaagtttttttcgtttttgtttgaaaatcattttctccagcaattagcaccatgccaggcaccctagtagacgatccgccaaagttaaatgaatgaaaattcattctggcaaattcaccagtttcacaaggtagcttgcagaaaattcggacctagttagagcggcatttcgctttgctttccgaaatccacaaactattcagccagactcctcccattttatttgtcacagcaagtcggttcccaggtagaagttttcaggaatgaggcagggaagtaaggatttcgtctagggttctctctaaagactgagatcttctggtgcaaaatgcgaagtcattctctgagcccatcccggatttactgagcgagcgaaggaagggtagagcttcccgtgagcggatcacttagatttcatcccgctattcctggaacttctctgagtttcagtactaaacagagcatggtctaacggaagtcgccaaggaaaatgctgattttaaaaaaatagtcgcttgactatttgacccttgatttttactgtcttacttcctaacttaaaaatctggaaaccagggtcagttttgaaacaatctgattttggaaaaaaacatttttacaacactccaataaagtctaactgtaatgtttgttcccattcgtttagaccagattcctgtaccctttgcttaagaaataaaaataaacatgaagtctggttgaaaattcttacgtgaatttccacgtgattaaaaaagtcacacctgaaggcttgagttcagagctcaagttaaatttattactgctctacaattcctttataatatggactcaaccacaaaatctcagcagtagcaacagcaccaccagcaacagtaatacaacagcccacaacacatacattttcttcagcctggtagaaacgtggagctatcaaattaactggaaaaaatcccaactgaaaatcgattgcactgtttaaagaagggcagaaatcaaagctttccatcatcgtgtttactgaagaacatgccaagagaagtagttgcttctgaatcattttcctaagacacttttagactgcagtaaagctgcttctggggaagggagtacagaaatggctgccaaagagacagcgagattcacaataaccaagatacagaaacagcctaagtgtccattgatgaatgaattattaaagaaaatgtggtgtgtgtttatcacacacacacaatggaatattagtcagcagtattattcagaagaaggaaatattgtcatttgtgccaacatggctgaacctggggaatattatgacacacaaaataagtgaggcacagaaagacacgtaatacatgatctcacttatatgtagaatctcaaaaaacaagtcgaactcagtaacaaaggtt

SEQ ID NO: 55681 - DNA, 872 bp, Homo sapiens
tttccgctctatcaagccattcactcactgcaatgtgtctcttgagattcacagcagcccttcctgcaaatgaagggaacagaggctcaggcagctgaagtaacgtgcctaaggtcacatggcagttgtggcagaggcaggactggaacctagatctgtgctggtgcagtagtaacgtcatccttcctttacagagaggcggcatgggtttccggaagttctcccccttcctggctctcagtatcttggtcctgtaccaggcgggcagcctccaggcggcgccattcaggtgagacagcctggagccagaggcgccttctgctcccactgcccctaggaccagacagctctgtgcctctgaagtcacgcgtggctcctggtgaatcagtgcccacaggtggaccctggcctcatgcccgtcccctgggagtcgcggtggccacatccccaggggaagaagcagagaccaggaagcctggctgcctatcctggggagggtcagtcaggggctcacagcctgcaaggagtttgcttcccttccacaggtctgccctggagagcagcccagacccggccacactcagtaaagaggacgcgcgcctcctgctggctgcactggtgcaggactatgtgcagatgaaggccagtgagctgaagcaggagcaggagacacagggctccaggtgaggttccccaagcgcccagcacagggactcctctccccgcagcatacacaggaaggtggatcccaagaggcaggagagaacacactggcaaggggtccagcaagctgatttgtccagcaggctccctttctcaagttccaagggagacagaggtcccagtgcacctggagggactgtgtgtggtta

SEQ ID NO: 55682 - DNA, 749 bp, Homo sapiens
ctcacttcttttgatggagggtcagaggtgggcggtacatactggcaatgtgcggaaaagagtgcacgggctttgcagccagacagatctgacttggagcctcagtttcctcatctgtaaaatggggttcctcataaggcaatgtggtgcttgaactggaaagtttatttgaaattcagtgtctggcatagaataggcaaaccataaaatgcaatatccttctttcttatgccacccactttctgtgaaagaacaccggcctaattggcacaagatctggattccagctctgactcatccttgggcacactgtgttatcttgggttaagtcacttaccttctctgagcctccctttcctggtgcataaaatgagagaactcatttctctcacttctctgcattttctgaggatgatgaaagagactaaagttaagggttctcttggaagatccagaaagtacaaccaaaactgattcatttattcatgcctcagtattaattgagatcatttgctgtgccagggtctgtgcaaggcgctgggggtagaggtaagtaggaatatcccgggcttcaagtagcaatcagaccttatggcaaggcagacttgtaaacaaataaaggcctgtctgtggggcatgatcaaatcaggtactagaggcactaatgtagcagcaaggaagtgttgtctccaactggggcagtcagaaaggccttcccgaaagtgtaagtacttggtgtggatcttgaa

SEQ ID NO: 55683 - DNA, 2367 bp, Homo sapiens
tagttcatggtaccatcttcacatttctggggtaccacaagagccccctggtacccttatatccacactggctcccctccaatttgttctccacacagcagccagagcgcatttcaaaacacaactctgttcatatcattttcttccttaaaagtacattagttgcctcctattgatcttaagataaagaccacactccttaataagtcctacaaggtcttgcttgcctggccctgctgccctctcctacatctccctacccagcactccctccctggctctccctgccacactggcctcagctgagtctcagtctctagggcttgttaggctccctcccaccataaatctttgtatttgctgttcctctgcttagaatgctcgttcttcctgactccacctaccgaattcctgctttactctcagttctcagctgagttgtcactttcataatcttcaggaccaggtccaaccccattttataaagttttaaaacatgtgcctccttcaagcctttatcatagtttcaattttacatttatttatgtaatcattaatgcttactttctctatatgatgatgagctctgtgagtgttggaaccatgtctggttttgctcgttactttatcctagcaggtatcatggtaccatgttactgacacatgccacaaatatatgttgaacaaatgaatgaatgaagatttatcatctgagtaaccagatagatgatggaaccattcagtggaataaaaatgagaagagaagtagatttgaggaggaaaatgatcattcattttgggacacctggcatttggggtgcctgccaaccatgtctgtccctcagagaccttaccatcttctgtacaaattaagatgtcactaaggagcttttgggaggctggtgacaggtacatctaattcccggatgattctaagaaggtccctggaggagatggctaagtcacaagtggcatccctgagctgtggcttctctatctatccttatctctggtttgtagaccatacaggagatagaaggggttcccaggtggtcctgacttggctccttggggacttgtataaaatatctttacaattctatggaagactccttggaacaaatgattcacatttgtcaggagctgtcaacctccttcctacctctaacactgcactagacatatgcttaaaggagaatacagaaagtgggtcttactaagtccagtgagccatcctttcaaagatgtcatcagcactaggacagaacagcccattccatccctctgactcacttactcttacattcctcactcactcattcaactttctatctcctcttgttcattcacccacacacccatctgtcacccagctatccatccgtgaacaagagtttatgttggatttatagcaggactcaaggctaatgcattatcttcagccccactcctgtatccctcttttctatggtcctcacagctcagaatcccaggtgaggagactgtcaggggttggggagatgtcactgtgctggtctagggctgggctgggtatgattgcagggtgtcagcaggaagaatgggagaccagaagtggccacactgattactcctcttggctcactatctgcttttctggcttcccctctttcattggtgatgagaaattagagattaggctccttattcaggtagatataagatagactgggctttgcagaggtgttagggggctctggccttaaggggaaataggaacacagctccccatgagccctatggtggaaaaggtgatgcttttgttttcttcttcattttagactatgattgcactttggccctgtggaatttgcagagaggctgggggagggtgggagagtaggattttaaaatgtggcatttagaaaccaggcagtagactaatcctggccccatccccatagaagctgttctttcagttctcttaggcttgtcatttacaaagagctccctagaatgtgtgctgtccatctgctttggcggctgacagggctggaattgagcaggcataggacaatgacagccacattagataacagcatcttggaaaaatgcctgaaggttgcaagggtctaagttacagactcatttgctcattccctccctcacgaattcattcatttatctacttagcacctacctagtaggtgccatgtttaagtctcagccctggagatgtgacggtgagcaaagcacatatttcatgcccttagaggatttggtttgggaagatggactgtaaacagggtactatacaccataaaaagtgtgaataccatggagaaatacggagaataataagggagctccaggggtgggaggtggttt

SEQ ID NO: 55684 - DNA, 3088 bp, Homo sapiens
aatgggagttgtaattaattagcttcatggttaatttgcccctgaatttggattcaagacacttagagcaaatataggcaactaatagccctaggacctcagtaaggtcttttgtttcttgtttttagtctcctttttcacttgaaatatgacatcaccattggagacagaaccagggatctaattggtagcaaagttatgtccttcggtagacttaagatgctagtcacaggaagatgccctggcaacagtggttcccagtgcccactcggtatcgcagtccctcagagagtttgtggaaaacccagatacttgtgccctacccaagattccatggggtctttgggtaagacctgagaatcttcattttaacaagccctacaagtagttctgaagcatggccagactctcagaatcactcatctaagcccttaaagcaatcttaatattagagcacggtaaatgcttgtcaactcttgtgagtggagaagtgaattttatgtaatagcaatagctaacatttgagtgttgctgtgttctgtctttaatgcattatataattcctttcttttaattcacaaaaccatcctatgaagaaagtaccatgttgttaccatcaacagttgaggaaatggtttaaggagcttattcaggatcatgcagctgacaaggagttgagacagaattgaaccccagcctctttaagtttaattcagagttcatggtcctaaaccccacagtggtgacttctggttcaatctttggcccttcaggtccttgagccaaagtgtgactcaggagttctcaatcctggatacacaatcgaactactagggagctttaaaatttttaggattctgacttaattggtctggagtaggtcctgggatgaatattttagctttccaagtgattctactgtgctgcgtgggttgaggacctctactctcttttgggagtcatttaaatgtatttaacctgaagagcttgtagtggtgttggagcaaaggggatggaggagatagcattggatctgttttctccaaggattctgtgactcaaacatttaacttggtcaagagggctgactggagatttttgtcttggtgctgtgggggaacagccaacagctccaacctctgagctgaaactgacttaacatttgtttaatgattaattccaaacagtaagtagctgaacttcttttggaacaattaccatttttccctttcaaaatgagttgcaaacacatgctggatttgggctctctgtgtggatctgaggtctgggtgggataaggacttctgaatggcacatgggttctgaagatattttatgttttgtaaagaatgggccttagaaatttcctgggaaggaaactttgcttggcaagagctctgaagctctgggtgttctgtttcaggacctgagcactcaaggtctgtttccatgtgccgcttgatatagacagctcctaccacctgcctgcatttgtgcttcacattcaggaaagcagagaggagacatgcatttggttgtaagccaagatgatgtttgacctcctgcagatttagtctcctgtcaggaccaggccttaactccagttaaacattaatcccaaacatttccagtggtagaaagcagggggaaaggcctgggttgggacaagagggcagctctcatcccagctctgccactagctcactggaggaggttggccagaccactggggattaactcctcctttgtggcctgaggatgctgggctgtatatttaagacaccttccaaatctaccatgctgcctgactttcccagtgttttcatgggaaaagtaagggtgcaattttactttcatcctattccattttaaaacaaaaggctaaggtgaactatttgccacgtttagtcatcacttcctacatttctgtccacaggcttctcagctgttccatcacttcctcagctactcagggatctcccatgcccctaacactcccctgggctctcaagagccatgaccaggagttgtttaaagatttcaaataatcctttgattatttacatgggccacaccctccagagcctgccaggagaatacttgagtctcactgaatattaacaacaacgataataattactatttattggtggcttcctatgtgtgcaggccctgtgcagggactttcacactgttgtatcttgtccacatgacccctctgagaagtatatcagtgaccctgttttacaggttagaacgccaggactcacagtggttgaataccttgagcagttgacacttgaaaccaaatttgtccagctctggagtaggtgctatttccatttcaccagctagttggttaaaatctagagtctttccctttccaggcaaaactctgctaacaacaaatctgtctccctcctaatcagtatttcctctttttctgctcctggtccactgcacagtaatcagcttgcttgctctgggtatgaggctggtggaggtcaaaactgggaggcattggcaggagatgggggcaaatgggagaatatgagctttctgaagtgatcaactctgatgatcatggttgtgatgacagctgcagtaaagtagtaataataaatttatttttatagcactcactttgtgccagataatgttctaagggctttatacaaataacatattttaacctctcaatgatcctctgtggtaggcaggatctacccccattttccaggtgagggagctaagacagtgagaaagtccaaagctagtaagggactgaactggaatttgaacctggctgtttggcagcaaaggctacgtgcctggttactgttctgaactgcttctcagcagcccctcctcttcctcttcctcccaccttacttcccattctcttcctttctctcaccaaccttccatgcccattgtttactcaggcatggtgctatgctttctaatcaccatctcatctgattctctgatagtcttttgatatgtcataattataattcccattttgaagatgaagagacagagtttcagaaagaatataaataatttattcaaggtcacacacatg

SEQ ID NO: 55685 - DNA, 796 bp, Homo sapiens
ggcttcttcttccaattgcccattcgttgttttatcgtcattcactgctgcattctcagcacacatggaactgagcctggcacataataggtgcttttgttgtcagagttctcaaaaacctgacagaggatggtcttttgctgaacttgccttcttcctataacattttgcttagttttgggaaccggtacaatgaggttagttagacccaggagtgatgaggttaaaggcgagtgccctgagggacccagttcagatcagttgctcatgcattctttactgctgccaaccctaggcaccctgccagctttcagggaaggaaagagggaaagatctgggcaaagcgagatgtgggatatccaattcctgccactctaaatgccccagttagtgctgccactggtttgcttggcaccttggttagtcattccagtgatctcttggctcactttgctcccagagctaaggttggctccagcgattattatgagtaagtctgactagttagcagggcacctggacaatgagctctgcactcccagattcttgcctgatggtaaacactttactggaaagaagtttccataaacagctctcacaaaaggaaaagtacatgctcaccacactcaagagctgcgatgattgtttttaaaagggttatatcacacacacacacacacacacacacacacacacacacaaacaggagtaaacgagtgaaaatgatgatgtgaatttaggctgaattattttacccatccggacttcagtttttttgatcaaaaaatgggaggaa

SEQ ID NO: 55686 - DNA, 862 bp, Homo sapiens
tgatggcttcacaaataaaatgcaatttcacagtcttgcacacaaaactcttcaagatctgattccagctgacacacttcttccatataacttatttttcattgtgtgcaccatgcttcttcctgtctctgctttgtgcctgccgtttactgtgggtgaaaagccaatccctccccttctccatttggaaaatatctttttttaaattattttattccccccccatcagatagaaaaagattcagtgcactttaattatggtagtgtaacaattccagagagtgtcatcacttgactggaacattcttcacctctccgttcaaatgtcacttcctctgggaactctccatgacttctgcaggtggcattaaaagctcccttttctaacccccgtagtgttcagcatagacttctgtgttagaactcaacacacctgtagcatgtggtgactttttttctatttgactttgagctctccaagggcaaagtctgtgttttgctcatatttgttcccatcctgctgtcatcttgccagttttatttttgactactagagatcagaagatttacttaatagattgggaaattgagaccaagcagccaaatgaagattttacttatagataatctgtcctagtagacactgtatttgatgctttaggttcacatcctcgtttaatttccccaagcctctgtggtaggtatcttacgcagaaccactttacctaataagccaggggctgggtggtgacaaggggacctgctaaatgtcacagagtgagtcggtggaaaatcttgttcttcaaccctggagtcctgaatctcctgccctgggtagcccatgggttccttccttctttct

SEQ ID NO: 55687 - DNA, 1114 bp, Homo sapiens
gaattcaatagcccctcttttctcctgtgcctctcattccagtcttctacaaattacttggtctcatcctactatgctatgcaatctggaggtcttgggatctgaaatcagaacatgtgtttgcaccagggcttgttacagcctatgggaccttgagcaagtcactttcctactcagagcttttgctgctctttttggagccctcagctgcattaggatttcagtaccagagcagctagtgaccctgcattaacaggaaattaagggaagctggacatgtgtgtttacagtgtgactttcatgagatacttcatttacctggcagatagccaaatgcccagttgtctgaaccacaaccaggaggttcctctcacaggcatcttgtttattttggcagaacactcttgtggcttttctatgacctatgtccagtttatgccagcctgaccattgctctgctgctgggaacttatattccctctggtgtcctggggaaaatccagcctgaaacagcccctagttctttagatgaaaggtacagattcaatacaccaccacaataggaaacaagttcaaagattttttacttatagatcccgaacaaggaggatgcaatgagtcaggagggcagtcttttgtccccaggtcatgtgaggcaaaaaaaagaagagtcaggcagagagagacaaaagcatgtggcaactagcaggatatataaggaactaggatatgggtcactttaagttcataagcaaatgcttgaatagcctgcttaaaggaaatggagggaaagtgggagctccatctgctaggcaggaaaaatgcatctaagttcttatctctgacccctaacttgagccatttgaaagtggtgtagaactagaactagaaactgtgtcaagggtggctgaacgctgctacaggtgtgagaatgttaaacttcttttcaaaaggaatgctaagacaacataaaattataataattcactccagctgccttgctttatagtatggataactaagaccacctccctggactgtggtgaggattaacttagataagatgcaattaaagtatcacggttagctaccaagtgtcctctaaactacaaag

SEQ ID NO: 55688 - DNA, 808 bp, Homo sapiens
gatgtgaggttaatggttatgtgatctctctttatcctctgtatgaattacatagtattatcaccagcgtcatgttatagacaggcaattcaatgttaagagtatttcaaatactctgaactttactttttcatgactgcacaaaccagatcctgtgacctttatcccttgccccttcctttgcctctctcagccttttccctggtacctggatccacctggccacttgggaaagccagagtcaggctgctcccccgctgccagagctgacctacagccagttccctacgcctaccctgacatgacagttcatgggctgtcagcttggctctggacttggagcacacagctggcctctgccagccctagttcctgccgggccaatcagtgtattttctccacatgcagggaggaacggggaattccccacgacaagaaactgaggtgttttatcctgtaaaaaaatcacacaaggccctaatttaaattcctcacacctcacaagagggtggaggtgctggaatcattctcatttatctggttttagtgcaggacagccagtgacaggaatagtgcttggtcttgaacttgggagctggagaggtatgacctggtccacggtgaaaaaaacaccttggtcagggtggtggcaaatgggaagttgtgacaatctagatagggaccgaatggaagtctatttgctctgactgtgaagaaagtgtttatgaagttaacgagaaatataaacaagaactggaggggaatgctactgcttctaagtgtgcttgatatgctaattacaaattat

SEQ ID NO: 55689 - DNA, 1453 bp, Homo sapiens
aaagctgaaggcaggcccagctcagactcaggtcagacttgcagggcaggcgaagttctaactctggaaactggaaaccgggacaattgtctctggaagccctacatcaggtccagttcaagcagccagagacagccctccaaacccaggggcaggattttcaggcctctaaaggagactatagccggatggggagggagtggcttgccctcgtgcccctgtgtccccaggggtccagttaccccagtgacagtgcaagccagagcatcagggcttcaggtggccagctgagttgttcccacaaggctgcaacacgtatccggaacacattgggaactggggctccaggccgagaggcctgagcgccgcctggggatctggtccatctgggtggcagcttcccagaggcctgccgcgctcggcctgcagttctccgctgcggacggtaggtggcagcgggtcgtgagaaatggccctcgcctggccctggctgcggagacccagcctggagaaaaacgtggctgggcttcggccgccgagcgagggagaaccgcgcccccggggtggggcttgggggccgccctgggactcggtggcttctgcccgagcggaggtcagcgaggacccgggaggcagcgcctggatggagctggacggggagggctctgctggggctcctggtccccatgcggctgtgctgtcatggggagccctggggaccctggcaccctcgtgagggcccagcccgccgactccttagccagaacttgtgcccagcgtgggaattttcttcctgagcaaacaacttttttttttttttttttaactgaggaagaaactgcccttcagagaggttaagggactggctgtggccacatggctcttgcgtggctgtgcagttattaaaacctggtcctgtctgacgagaatcgtgcttttttccactgtgccaatacccagtgggggattccctggtgtgagcgcctggggataacgggggtgtcttctagtctgcatttacagtgaggaactcggctacgccagggtgtggccatgggcccccgctcccaggcactgtgcagtgagggggtggctgagacgaccgctggatggccttggagagccctaattccctcccaagccctaactctccaggccccctgccctggcagcctctgagcattaaatctgaccagacctgcccctgcagggtctgaactccggacgccccccacctctgtctacctactcttattgtactggatttcaacccgtctccccacctctgacatttgaaagcacttttactctcgggaattcgttagctctttacaaccaccccgtaaggcaaaaaaaaaagaagggatgtttacatttacagaagaggaaaccgaggcctcagagaagtgatttgccaaagggtaccaagcaagttcgcggctgagccgggtct

SEQ ID NO: 55690 - DNA, 6329 bp, Homo sapiens
cctctctatcccttaactttctcatctgtgcaatgagggaatgagatttgttgatgtctgagggtcctcccacctctagtactctggtgtcttataaggaggttctctttgatctgcaccatgaggtattgacaccactgaggaatactctaactttcccccaggactgaaaagacaggaaggaacttgtctccttggcctctggctctggtgggcatctgagtgacagagacaggcacaagcctggtctagaaggaatgagggacagccaagttcatgggtagctgaaaggttctgtggaccaggagccacccaagtcatggggtgtggacagttagaaggatccaagaaggtagattctgaaaggggaactagaatagcaccggattcatgtccaaaccattgctgcagcctcttattttatgtgtgcacttcctggccctcactcaccccaactgtttcctataactcaggggttcttaatctggaattcctgccctttgaagttgcttgcaaaacaatatgtataggcgagtatgagcattttcctgggtgcagaagcttccattttattctcaaaaaccttagacacacacatatacacacaaagctaagagccactcttccaatttaaacacatccttgctccatccccacactgatctaggcccttgtcatgagtgttttgggctattgcaatcacttcctaactggtgtctgtgcccccaacctcatattcctccaatccagcttccacagagccctcaacatcgctttcttcaaactttgtttttatcagctgtagataaagttctaagtgtttagcccagttgtgaggtcctttgaaatgtggcctctaattccttctccagtctcacctcctgacaacccacttccttgtgcaactttaactgtagcttcaccccaggacatcatggttctatgacttgcatgttctattctctctgagaggaatggccttccctcccttcatttgctaaacttttaggatataaacaccatgagaaaaagactttgttttgtttattgtactatccggatacacaaagtgtgtctggtatgtgtaggtactcagtaaatatttgctgtgaatgagtaattggataaatgactcctttgggatttataccaagagtctccaccacttgaagaattctctgatgtccccagtggaggtggtcattctattggatccatgtctcactgtattgcaactattttttatattccatgtgaaattattaggtaacattatatgtgtcattattattaatatatatcactgaactgtaaactctaacttcacagacccagggttttttgaattaaaagataaatccccagcatctagatcaggctgactagcatctagaccaggctggctggcacctaccagttgcaccaaataaatgtatcttaaatggatgaaaaagcaaatgaatgcctgctcaaaactcaaatgccaaggccatctttgccccatcaaaatcctatccattcttcaagctctgactcaaatttgacttcctttcatgaatcactcccttcccttgtccccaatttagtgtggtttctagcttctccaagccacccctagcattttggtgaactcttttttgtggactaatttcactcttccctgagctaagaacttagcacgatgctctctcctattagtcttgcatactcctggaaccctggagacacatctattctgttctgtggccactcctacccttgcctgctgacccagccctagcacagtgctcaaaactgtgatacatgacatgagatttttgttcaattgaatgacttccctacctgccaatttttggctagatctacaactttctttcattagacatgtttcagcttcagttcttcttaaaatcttcctttacaaagaagaaaaagacccactggccagtatgggagcttctgtggaagcattcagctacttgcattctttctgtgcatgtacctcaaaccaagactgctcagaggagggccagccaacccccgcaggaaacccagcacactcaggcattcacacttcagaaaaaataaagatgcagaacaggaaaaaaaaatcattatgggctacatccatcgcacagtaagaagcactaattattctgtgtagcctgagtttttcttggtaggcaaactcttttgaatattaacaaatatttatttaggaattaataattgacatctatgaaagcataatttatggagagtgaattcctcttggtttgggttcccactgctctgctacatctggctgctccagaagtgactctttcttttgttagaagcaagacacaggggcagagcacaagccagggccagggacgcgcttcagtgactgcacacaacaaagcacagtgggagggcgtcgggttaggattcgattggaaaactggctgtaggcctgactctgccactcctgttcctgtggccttgggagagtttcttacccttcagagcctcctttccaaggctaagaaacagacgtcttcgtgtctaccagtatttagttggacatgcctggttgcaagtaaataaactattttgagttggcttgagcaataaaggggaatttggggaaggaggccaggtcatcttctggagcactgacagggacagggctaggcctcagacacccctgggagccagggctgctgagccagggctactaagccctctgcaccctctctgcttctcatctccactcctctctatgcacctgctgttcttttcctgttttcagatttcccctacttctttggtcccctggcaaaagcacagcctcctcatagctcctgagcttttctgacacaggttcaaccatagaaggcagtgggaatatcttttgtctccatttccatcttgctgctgtgtgatgctgactgtttagtggagtgataccaaacaaccatggacagggtttcagggtcacagttaataaaatgccttctaggcaccaccatcaatttatgtactgattcattcattcactgaaggaccactgactgagagctcattgtgtgtcaggcaaggttctgggtgctggatatatggcagtgagtgagggagaaatgtgtgtggatcacagaggccactcttaggacaggttgttccaagagaagcagcaatgccagagaatcaacagaaaaccactgcaaggctgtgtgaaaagcacaagtaaagttcaaagcctttgcaaagtgcacgaggttattatgatattagacatttttagggaaaactataagaagtttaaaatggaagaaaaggagggaggaagagaagaaggaagagaagcagataagtccacagaaacagaaacaaatggaaacaacagggaggtcaatgctgaaccaatgtaagaattatttttgctcttggaggctttgaaaaataaaatgaacagtggtgagccttctgtcattagagagtattcaagccaaagctagatgacctccactcggggctgatgtacccataaaccaggcaaaagatagatgtgccttcccatttcacagttctgaaaatctatttatatagtcaaattcaaaggtttcagttgattccacacatttggccttcaaggggagaggcagcttgtcacctttcctggcctcccaagacaagagcttatacctcattttaacattaaataaagaacagcatttcaactcctctggaatgcaaaactgtgaatttgagtgaaatatgcagttttcattatgttaaaagatctactcattacaatcaggataagaggatatgaataagacaaattgatcaccactttaaatgtattaatcagcttgcaactcttgtcaccagtcaaaacagagcagtcagacatttattctgtctcagttgtactgtagagcccatcgaggaggtcacagagtcagagtgcctccctgtgccgtttacaggaaaacaatcacaacacattgcaaaagtttttgcctgcttagaattggactaagcagacacaattaaatattgttactcatgccacaaatatttattgagcatgtactatgtgccaggcattgtgtaaggcactggagataacaaagataagtcaaagctggcctttgctcttcacattcccatatggtttagtcaggaagcagatgtacaaacaaatagtgacaataaagtataactggagataagtcagtggttttcatgcagtgctataggactagggaccaatctggagactgtggttgcagttggatggccgggcacggaggatacttcatccagatgctatctaagcttaaagtctgggagagaacaaagagtcttgtgagaagagagacctgcccatctccacagtcaggacagtgggtacagagggcacaaacactatgcttgggaagaatgtgtcttcctctagcctggtgggggaacttggtctgacatctatgttggctgaactaccacactcagctcaaaggaaagccatgaaactacacccaaaaccctccttcctcactgtctctgtcataataggggctcagagttttgtagggtgaggggcaccaaactagttcgggtcagggcttaggataagtatagagaggatgattgatggaaggatttattcaaacatcaggaatagaccgggagtggtggctcacgcctgtaatcccagcaatttgggaggctgaggcaggtggatcacctgaggccaggggtttgaggacaacatggcaaaactctgtctccactaaaaatacaagaattagccaggtgttgtggtgtgtgcctgtggtcccagctactcgggaggctgaggcacaagaatcacttgaacccaggaggtggaggctgcagtgagccgagatcatgtcaccacactccagcctgggtgacagggtaagactctgtctcaaaaacaaacaaacaaacaaacaaacaaacaaacaaacatcagggataagcaactgtcttctggaaagtgagctttcacaggaaaggagggcttgggtggaagtccctgtagttgggctggttaagcccaggcaggattcccatccccaggacagtctccattctcagagggcacagttttaattcaaagacttgggtgcagctggagcagagccacttgtcaagcttggggcacagaaataatgaggctcattgttcaaaaccagcaccttcaatcctccctgagaacagaaggggaacataatgcatgttttataggcccattctcatttttaatctgctttgataagatcactatgctggaaggatatagaaactcatcaccaggcccagcccaagacagagacaatgatactgggttggaaaggttttgctcctttaggtgatgcccctggacagtttcctggatgtgggctccttaggatctggctcattcagggaacggtcttgccccaatctctcagacatcctttccttacggatcgtgggtggcaaaagtcactggagagcacagacctcagactgtgacagtaaattactttaacttcccctttattttccagtattttccaatgagaatgctgagagagacaaacatagagaataggagaaaacacattttttatgcttagaaacggactaagttccaggcacagatttctgatcctagctcttagagtcaaagatctgactagggtctagggtctagggtctagggtccctgctccaactccatcgtcctcagccttgaccacctcatctcccacttggatcttccagtcctcttccttgcttcatcctttcaccagaagaaggagacagcacgagcatttgctgagtaagcacagaaaatgaagcctcacagaatctctacatgctcccctagcccttgcctggcctcctttgcagctatattgggatgcttgccagatcaacaggctgagagtagaagtcatttgtgttgccccagttggaagctggtaagaacaggtgtgaattccccagtttcttaccagtgggagaagtgaagacagttgacataaccagagttgaaagatgaaaatagccctgatccctgagtcactgttggaaaaatgccttcaggaacactgtctgattcatatggactctgttaagtcactgagattttgggattgtttgttcttgcgatctagtgcagcccagcctgacaactgagcatcttctatgtgctcagcactgtattaggttctttccaataaattgtctcaaaacaatcttatgaatgtctactctaggagagttttggcccagtaaagtttgagggtgtgaagggtcactacatc

SEQ ID NO: 55691 - DNA, 630 bp, Homo sapiens
cagcctcaagtagaacatgcacatcagagaacagcccctgttcctaaatgttgccacatcttttatctcagcttatgttatctatatattttcagcaagtcactcagtaatttacgacatatatattgagaactatgtattaggcactggaaatcatagtgggaggaaaggccctttggattaagaaattcctccttagctactccaatgcaagaaaggcctatcaccagggtcacatctgtctgtattggggcccaggctccaggacaagtttggcacatgctggcctgacatccatggctcagcctctccttagtacaggctcactgtagggctgagataggcacaggagtctgatgcctaaggtgccaaataaagggcccagctgaagaggcacttaagatgtggagtgactaaactctgtgaattccctcctgctgaccctgagaggattcctggctctccacatggctgacagggacagacatgcagattgccaggatactgtcaggagtttcagcttctaattggcaggcatccagatactgggacagcctagtgataggaagaatgtagagcagttgtgggtgttaatgagggctggggaatcagccaagaagcaacatggtg

SEQ ID NO: 55692 - DNA, 1742 bp, Homo sapiens
agaaagattaggaaccctttaccattctaacaatacccacagaaaagcaggggaaattcattggagcaattcagcactagtttttaattctgcctactgacataccagctctccttcactaggtcagatgaattctcaacagtaactgagatcttccaatgtgtcagacactagactaggcactttacatcatgtatcccatttaatatgttccacatgcctgttagataaataatacctgcattttcaaagtgcaaaagctgaggagggagtctgaattagacagctaagaaaaagtaaacttggaatcagtaccacattagccaggtcccaccatgccacctgggcaataccactgtagactcacaaatggtttaccattttccagtgcagaacatacaggcatcctccacagtcatcctggaagtggactccatcaatcaaaattctccttgaggcagttcatctgaccctaaacagaataccaaagactttaagaactgaactataggatagcccaccatccagatccaggtaggctactgggtggtgctgcacacacaggacagatccaaatatcattgcaaggtctttaaaaaaagaactcatattaacacaaaaactcataaaatcctgtttggaacttgtggcctgaacccaaccaagctgattggtaaacctaaaataaacactttctccatagtcttattcaagacctagagtctcataacataatgttcaaaatgagcaggatacaatccaaaatgttcagtgtatgaataactaggaaaatctaaagtcacaggggaatagacaaacaatcccttgctgagataacatggatgttgaaataatcaaagtctataaagcagcgattacaaaaatattccaagaattaagggtgagtactcttgaaccaagtagaaagacaaaagttctcagagaagaaatagaagtcacaaagaactggaagtttcagaactgaaaaatatactaaacaaaatttaaaaactcactagatggcatcaaaagcttgaagaaaaaagtcagtgagcttgaagatagatagattaaaaattacccaacttgaaaaacagaactaaaaaagaatgaattaattaaaataaatagatccctagggacatgtaagattaaaaacaaaggttctgacatttgtatcatagcagaaggaagtagtacaacacttataaattgctgagagaaaggaactataaacatagagttctatatctagtgagaatgtccattaggaataaaggaggaatagtgatatctttagatgaaaggaaactgagagaatttgttgccacctgacttggcctaaaataattgatataaatagttctttggacagaggataatgataccagaaggaaacctggaacatcccaaacaaaggaagaacaacagtaatggtaagtagattgtcctcctcttgaattatttaaaatatatgatggttgaaaacaaaaatcataaaattgtccgatggggctttcaatgcatgtagatataacacataacaactataacataagtgaaaagggtaacgaacttatatggtgtcaaagtttctacatttcgtttgaagtggaaaacattcaaagtagtctatggaaaggtatgtgtgcatatttaaattccttataactactgaataaaaatagacaaatgtatgtagtcaaaaacacaataaatgagttaaattggaataatgaaaa

SEQ ID NO: 55693 - DNA, 743 bp, Homo sapiens
ggaaatcatggcatagtgatgcttctgcctctaaatccattatgaaaaggggtcaggccagtttcacatgaaggggcaaggccaaagagaacctctttgagcaacaacactgccaagtctgattcccaaagaagattctaactccatctttgagctctttcccacctcccgcatgttgggaaggatgcacaccccagtgaaaatgtggattggcagaggcagccttgggagaatgtgtcatgcactgcttcctccttggacctttcagccaagcccacccacgctacagcaacacaaaggcttctttgtggtcagcgtccagcattgaccagcttctctttgctgccaaccatattcccctttcagtttgtcctgttcttgacccttggtttttagttgttgttttttttttgtttttttccttcttggccttgatcctgccttttggatttagtggctaaacatagtttccctgtttgacctttggttctctctagggactttggctcacactcaccactctattttcactcctggatgcgtatacagaatgcattgacccaacagcatctggccacttacacagtaccctgggatatgagtgcgcatgtgagtgcatgtgtttaaatgtgtgtatatatgaatgcacatatgtgagtgcacatggcaggaaaatatcaaactgcctgagtctcaatcttggctccaccacttactagatgcatggtctagggcaagttaca

SEQ ID NO: 55694 - DNA, 419 bp, Homo sapiens
caaaagaaagctcttcttaaaggccatgggtaagggaggggtcaggggtcaggttgaggaagaagtgagcttgcagtcttgccctcctatgagagtcctccagcctgagccatgggcctaaggcagactggatcccagcaggctgggacacagggtttccaggtcaacttttatcttcccacatggtatttgttcctttgatccttgagcagttcaaacaaagctcactaatcaatggcttccctccctgcctttcagagcagatcctcaaacacagcctgcatctctccctgctcccctcccaccctccagttttccagccagaggcatttgctctaaggcccaggctgtggcccacctatcaccgctacccaagtagtacaggtatgattgtctgtttactttctttaattcaaatc

SEQ ID NO: 55695 - DNA, 1183 bp, Homo sapiens
agagtgtttctgtgccaggcatcgattagctgccaggatacagatgtggacaagatccatctctgctggagttgctcacaggccacaggggagatgggcaggtgaaagtagcagttgagcagtgccagcaataaaggcacagggcatgtagtgaggacccagaggatggtcaccaggagatgatgacacttgactttcaaggctgagtgggaagcaacaaagaacagaagaaagaaggccctaacaagcaggagaaacagagtgtgagcaggtcaggagatgtgagaggcagcatgatcctggagctgcttgaattcccctgaacttggagcatgggtgaaggtttaagggtgtgattattgggcctatgaaagcctgcttagatatgaggggagcccctgtcggattttgagccaggaaatgaccagatcagagctgtgctgtaaatctgtatcatgcacctttcactttgtactaaaatgacctcttcccttgtttctgttcccagaccctgtcttggagctccttagggaaacgtattcacgttattgccccagtgccttgcgtagtgcctggtattcatttgctaaatgagtgagtgaataaattaatgaatgagtgaacaaactctgctacctagttgtattctgctattttggcttccttcttttttcctgcgctgttcctgattttagttgaggattaaacatgggctctgcaaacaggccctaaggctgtgagtctgtgtgtgtatgttttacatcagccaaaccaaataaacaaacacatggcagaaccccaggcatgtggctccctcacttggcacagccagctggcacgtggctgcccctccccagcttcccagcacctccccctggagtcaggatgctgcctagaggcttggctgtggatttgacaacccctccttacttcctctgcagcagcagcaggacttcaggcacatgctgatagcctccattttaattagtgagaatttgaaatcacttctgtcttcaaactcttctgagaaacagggcaatgaccacagtaccagggagaagacaggaagatgaccctactctcaccctccaactgtgtttcctgctccactatactcattccaactggactaactgtccattcttactgactgatccaagtaacccctagagttttcttctgg

SEQ ID NO: 55696 - DNA, 1783 bp, Homo sapiens
aattttctttgtaggaatgcttttaattacaaaatcaacttattaaaaatatataaaactatttatattttctatccttattgagtcagtttggtaatttttttaattaaaactttgtcctcttcatctaagttttcaaatttattgatcaaaagtcaaagagacttatagtatttatttattctctttcccttccttcactcttgatatttgcaacttttgcattatcttctcctttttttgttcaatcttgttataggtttcttaattttattgatcttttcaaagagccagtttttggtttcatggatttttctctattgcttgtccattttctatttcattgatttccactttttattatttcctccgttctacttactttgggttaaaagagcttttcaatcgcttagctctaccctccaagcatggcaactatgtttgtataaagtaattttaccccacctttacagtaacaaagtgtctatccgttgttagtttccctagtgccagttttaaaatcaagtcaacctgtcctgctacatttcccatgccaagtcataaaagtttactgaaaacattttccctagtcacagatggcaaatatacaacagtcacattgcagctactccctcccacaccattggcagacagttctaaccaatcaagcatccttcccttctgaacccagatataagccttttcaatagcagtctacactgggctaccaatgactggagtattcatatggcacaaaaccagtagaactttgatctattagtagagaatcactacacattttcgtatttcaaatactgtatgcttctcatagttaatgtgtacattcattgttattttatttttatttttactctccttccgcaaaagccgctattacaatcaatggcctattggagtcgatattcatccaccttgtttactcaggactcctgccatcaccagctcaccccacacgcatgcctattgcttgccttggctcactcatgcttgcttcccagatccctgactccaggctctactgaccttcagtcccaccctcccccacctaggcctccgtcagtttactttctgattcatcagcctttactggctgctcaacccccagcttacctgtccaccttcccactttgcccaacctcttggcctttaggtgagccgcatctgggaacccagtccagacagatcaggctctccccatggacgatgggggcactcagacactggccactgcctatacatatggcagggaggccttggtgggaaaagttcttcccaaaggtttctttttgctttctctattcacctgttttagaaagttccagcaagagattcaggctgggcagtttcttatgcactcatccccccagaagcctggtgttcccttcatatctcactgagctcctgatatacctgctcctgtggactcccgtgttccgacagagcctgtacaagaggaataccatccaagaaaaatattttggagcctttgtaattcatgggccccactgaattttcatagaatgggggaacagattcttaaaggaaaggttagaaatatgaacatctccttgtttaattcatcgtattccaatccagccccatagcatgtctttgggattaatgagtagaaaccagctttcaaagagctgttggcacctgctccatctgccttgatattgaaaattgggccatcacagggatacaaggatagaattagggggcaggtagcattgagcgtgctctggaggttgtagcaagggtt

SEQ ID NO: 55697 - DNA, 2172 bp, Homo sapiens
catgtcagggagcagatgacttaaggaaatgatgcaagtgcttttgtgaaaggacaaatgaggtcatacaatattattatactttgagaagtgagcttaagtgccaactcaattcttagacaaacgtgtacaaaatcaggcagggctacagcaaccatttttgtcattttctcattaaaaaggaagacccagtagtaatttcaatacattcctctagctgcatttctttgcagttgttggcacttggtacaggacttctcatatgatttaaaattactaagtgattctttttcctctccctaatgagttggtagaggtcaattctttgcaaaatgagtaaattgagagaagcagcctcagctgtgctgttcaagtgaccaggctgccttcctactgagggtaaatgggctttcctgaaacaatccctgctttctgctagtgcttgtgctcctggctcaggagggtgtactccgaagaagcagcctggcttcagaaggaaaagaaagcagcctttaatttcagccctagagtgatcacgcccttttcaaacaccctcaggctcccgtggggctaatgttcaggggaggccagaattcgacaagctcaatagcactgtgagcccacacctgaatttagaacttggcctgggctttggtgtcaggaccctggcaaatcaaatcaggcctgaggacaaggctggagagtatcaaatacctaatgaagcaaaccgaggtgcttctaaaaggctgagctgggtacacatgaaaacaacaaagcttccgtaccttactggaaaagacactgcttcatatctgccaatgaaatagaaaagttgtcagcctagcggctcgtatccgcaaagcgaccttttttttctctctcccttcctacttttttcctttcttccttcttttctccttttccttccattccatatggctatttttttttttttttttttttgggagaggattgcctggcagtgtcccaattctaagtgacaaggagaaccctgaccctgtaagttctttaacaaaatggagataatttttatttttgatttgaagatactatgaaatagggagcaccgcaaaaacaaagttgcttaacattcttgaatctaaactgacatgacgggacgtttattaacggccgatctcagaggtggatttttgcctttgtagtggcattcatgcttcttgctattaaatggtcacagaactatcttagaagatttatgtagactcccaaagcaaactgactgtctcctaactgtagtggaaatttagtatgtccaatcatcaactttctgtaagaaaaaagggaaatgtctggatctgtggacagtgggttctgaactgcatgagaaccctggtgaaacgttttgctgtcccagctgcaggccaaacactgctctctcactgtagctgataactcactaccccgagaggcacagtgactcatcaactttcagtttggaccaacatctatggatagagaacaaaaaggaaatacataacttatatctcactaagtattcatgaaccaaaaataaattctatttctatgttatatttacacaattagaaaaatctaaaatgagatggtaaagtcatataaactttgtttaagccccactgaaaataaaatgaattgatccctatgattgtcattcttaatttccatggatatttagagccaaacttggctaataaataaactgcttatacacaaaatttagattcaaatacagcattactgtttgatccaatgaaaaagacgtttacaatcagatcattcctgaatagcctttcatttttaagaacatggctaaaagtaaatgaaccccagtactgaggcagagctggagctaaaacaaagtgttcatacacacatgtattttgcataaataaatgaaataacaagacataaaaatgactcaaatccggcaactgtgaggcaagcccacacgagtcgaaacagatgacttttgttcatgtagttttcgtacaacagtttcacattagtcagaagtgataaaaaataccatttatatccagtgcttataacacttacgaaacaacatctgtgagtgtgtgtgttttttgtttttttttacttactatgagcaaaatcaagtttcagtcctaaagaacagtcctttgttctcca

SEQ ID NO: 55698 - DNA, 1617 bp, Homo sapiens
cataactgtgacattttagcttatcaaaggaggggagaagaccctagctagaaaagaaagcagatttaaataacaataaaccaagatattattaaaatatccctctaccctcgctcaagatttaaaacgttactatctagcaccttagatatgggtgtctactatgctattcacagatgtcccaataaacatgctatactcatactaggaaagtttgggaaacccatcttttaaacaaggtcgatcttttctaaccagagtccacatgagcaaacagatcaaaggtttcctgacatgcaggaaaaaggtgcaaaaataggaggtaatagaacagagcaagagtaaataaaaactgaggaaactatcaaagcatccagatttaaactgcaaagctatgaaggctcttgcattaatggtttacctgtttagcctaattaaagtgacagacacgtgacatatgctgtgcttctagatcagcatcactacagcactacagagctctgacactcatatgcatgacatcatggtttccagaaacccaacagaagccagatttgacacatcagggatcagtgatggtgtgggggttgggagtggggggtgggagagaagccgatctgagtgaaaaattaggcaaaagaagagactgggtagaaacctggctaagggaagattgatgggatagaacacaacacttcaacagaaaatccaaaagaaaagtccaacaggaaagtccaacaggagagaaagaaaagtcccaccaggagaggaaacagaaaagtccagcaggagaggaagtcttgagtttgagccaaggctacctaatttctcattcttccaggcatttaaaagctctcaagctgactgtcctgagtagataagcttgctagttgtcatcacacatataaacttgttcctaatgtccagtcatttctttctagctctcctaggcatagattttcagaatgcccagaaatgtggtactcactctacagccaaaagaaagccttagaaatttcttctgtctgtatagaaggcaggagatattctgaaagtatgtgtctaatcatgtctgagtggaaaccccctctctacctcttatgtcaaagcaaaagaaaagagggaggcagttaacaagctctggaattctaccttaggctacttccaagggggtctttggtcttgtctcttccttttcttaggagtgatcattccctatcattttccaaaaaggtagattcacaagcagcagaaaaggtaacgtcaaagggacctttcattgactacatagtgtttgagctatacagaccagcagagccatcagaagttaaatgtacatcttgctagatgcaattattttcatttttgggttgagtttcccatcctaggttggactataaaatctgctattatatctaacccagagaattaaagtgtgtttcagtttgaggtaaactgtatccactttttaaaaaattcaacagatagctggaaattctccaatatgagagtcccagtgagggaccccggtgaggcagaaaaggaattaagcatgaaattggagagagaaggactgggttcttatagaagaaaaggtcttggttttcataagccatc

SEQ ID NO: 55699 - DNA, 1827 bp, Homo sapiens
taggtgcctctaaaggccttgttggcaaaaagtctgaactcaaatctatatgctgctattttcttgactgtgtaatcttgaacagttacttaattgttctgagtctatttcttcatgtaaaaactgaagctaattataataccttacacaattattgtgaggaccaaatagacaataaaagtatctcttgtggcacagtacctgacataaaagtaatgcaatgtcacagtaaatccttgttagatccgtgttcctttcttatatggtttgcatattcaggactagaaattatcaaattactgataaaacaagcaataaaacaagcaatagttgatcttactcataactctactttaagaaagaaaacatgagccaactaaataattcagtttggcaggcagaggcttgtcatgcttagcagacaacatgcctcacagagcattatcccatcccaagtatctagaaaaccatgagaaagaagaggtgggaatacatgctcatttgaacatgtatttggggctctttggtgttatttatttagcagcatcttagaatgaaaacattatttttatattggtcgcccaagctcttcagatcatgagacaacagaaaaaggtcaatagcaattagaaaccagaattaattcttgaatctcagtgccttaaattacttcttttgtaactttccatcttcatgagataactaaccaaactctcgggttcatttttaatgccaaagagctgtaggtgtttcatattaagataagctgtaagaatttaggtaaattcatttctgttcatcacactctgcaaagaaagctatgttagaaacttcaaatactaaatattagcccagaggctattcaataacttgagagaaaaagtaaataaggaggaggtcaaaggacattgtgaaagcaagagtaatgacagaaacatagagttggaatagaacttggaaatgacctaacctagtagttctcaaagtgtggtaccagaccagcagcatcagcaatatctgggaaccttttaaaaaagcaaattcttaaactctaccccatacctactgaatcagaaaactctggaattcagtccaactaattaaattttaggctaaaatttaatttaggacagtgatctcaaactttagtgtggatcacagtcattcacagggcttgttaaaacacagattgcttccttctctccccctgctccccgtcaagagtctttgaatcagtagatctgaggtaggggtctgacagtgtacatttctaaaaagttcccaggtgaagctggggctgctggtccaggggtcattctttgagaatcactaatctaatccaaagctcacaatttacacataggaaaacaggtggctagagaaggtaaaagatatgagcctaaggttacagtgtcatgacagtgctggatccagagtccagaacagctaatcaccctgtccagggctttttccattacatcagagggacttcagtgatagaaaagggagaaatcactggttgcactgttttggcaaagaaaacctggaagtctccagctgaaaataattttgtgtttcaaaagcatattgctggagtttggatactatgaatgctgttcaattttcaataaattccttccttcctttctatttttattttattttatacagaacacactgatctcagtatctaccatcattaattgtgtagtttgttacaatacattgattagcaatgatcattttgttccaagggttaaaattgacttaaacttattttaagtaaaacaataaacttattttaagtaaaatgatgtaaaaactcca

SEQ ID NO: 55700 - DNA, 5657 bp, Homo sapiens
aggactggttagacaaataaataaaagatctcttccagttacctcctaaaatacaataaaaacccataccactcactaagcacaatatgagcaactgaacacataagactgaaacccactggggtccaacagactcaacctatctctttgtgtctcagagtataattggcagtaatgaccatcgaactctggtctccctgcccaaaaccatgcttacaacttccagttgccacttctgccgaaatgcccacagaagtgaatagactagtgagacagatatgtgatctcaaactcaagttttccagcttacacactattgataaaatactgaggaaaatctaagcatttttaaaagtcaaaaataaaaaaaaaatccaaattgagatataatgaagtttaacttcttttctctggagagtaccacacaatcttattaattaatcctaaaccaagcataattctaagttctacttttctgaaaacaaaacccatggctttgggtaatgctgcctgataataaaaaggaatataaaagtgaagtaagatggcaatttattcctcccagctcaaatcacattcctgtcttcattacagtggctggataccaccaaaagctttattacctgtttcctatgttttgacgttggacaaatgcaagtcatagcaaagatagcctgaggccaacaatgaagataccttacatatcttaatattatcaaggaactatgccgtaatcaggatcctaactagagtttgtaaatacatgaaaaaaaagtaagaagcacaattggacagtgtaaagggaaaaataaatggaggaaacatttgctaacaatcattacaatagaataataacccccctaattaacatgctgcgacaaattacagaaatctattttttatgtaatttttcctttacgccacttatccctgtgcagtattctttttaccatattaaaactccttattttaaattgtatggaacctacagaaatcagctattgatgcttctttctgctctattgtgctcccattttgccttttaagtgactcctcttcaaccctcagccagatcttttctaatcacctgtctccgaattaaattaagtacagtggtcttctgaatcattcaaccagtctaactgattttttaaagccgtttaatatttgcttacaaaaaaaaatgcaactttttgtctttacataaagacaaaataagaattattgtaatatacacatcaaagtttcctgtttctatttccccaagtataactttgtacaaacaaccacagactagcacacaggcatctatctaccttgataaatttgcaccttgagtttgtaaccaggcatttcctgggcaaccagtccttcagggagtgttcaaatatttgtagtggggcagtttgggctgcacatattttagttcttattcatgcattcctcatttacaagtcgtgaacctggtaaatttccggttttaagactatcgctccttcttttctgtaggtggtccttgaactaccctctttgcttaactgtggagtgtgggtcagactgattgtcagaaaaaaaaaaaaagttttctttttctttagaaattatttcccaggccactctatctctatgttcaaattcccaacttggcaaatgagtctacaggtttttcaatcaaaacctctgctctgaaagatacatcacatagtggttaggatccagggctctagattctcatagaaagagaggcagcagagtgtagtggttaagagcacacatcctagagccagactaagtctgaattcgaggtcttccacttattaactgtatgaccttggacaaattatttaacctctccatgcttcacttttgtgatctataaaagggaataatattacctacctcaatgggctattgtaagaattcaatggattgaggtatctagagccttagaatagtgtctaacatacagtaaacactatataagtgttttctgttaattagattagaatcttggctaggctacttattgtgatgccttgggcaagttgtttaacctctgttaagcctccattttctcagtggcaaacagtattattgtgtcaattgagtaatataatacataaggcatgtattacagtatctagtacatagtgaatcattagctattatgttaacacatacttagtggcagtctagtgtatcttcctcttccacaacatgcttttattaaaggtgaactagttccaaagtctctattgctttcccatgccatcaaatctacaatctttgttctaaccaaagtttccaaatttatttcccttattcactaataaaaactctaccataggacatcttttcataggctatacactccaagctcgttatcacatcttcactttaatatttactctcatattgcccttcccttctccctgaatatccaaatcccatccagtctttaagaccaaagttccagaaagttctttaaaattatcccaatcttgtatgctttttgtttctctgagttcagtgtgtaaaggggacagttccagtgatttagattgatgtcctatctctctcactatgaaactgtgtggcctagagcatgtcactttgccttctggtcacagttccctcaaatacaaaatgattgggtttaaatagatgatttctaagagccctatcaccacatcattctgagacctattgcactcatattcacagtgcaatgcttattatagatgcttaataaatatctcatgcttgaaccttccagagctgaacatatatggatcagtctgtgggtccctttgctactgcctctccttcttaatctccatcacatgttcccatttctctattactccaccctttaaatgttagtatttccgaaaattctgctctctaccctcttctcactctcatatttctaggcaaactcattattatccacctgataatgattcctaaatctgtatttctaacccagactccatttccaagtttcaaacttatatatccaacatctggtaggtatatctacctgaataattcagcatgtcaaaaataaaacccttcttctcacccagtcctccaaacctgatcatcatcctgtatttacatgatctgtccaccaatacatctctgacttcaccacataccacttccccttgctctttctactccatctttactggcctcctggctacacctaaaacatgccaagcacactcccacttcacatactttgtaattctgttccttctccctggaatacttttttttaccctaatatccatgtctcctgcattcaatttattcaaatcatttactcaaaaggaggcctctctgagctctataaatgtgtaactatcatcactctatattcttacttatccttaacctatttttcttcatagaatttatcactacatgatatttatctatttgtttacagtctctatcttcccaaactttgtccattttgttccttagtgtattatcactgctcactgataatgagcagtgatttatcattggtaaatatttgtgtaattaaataaacacctatcctgttgaacagaggtgtcaactgtcaaccaatgcagaaatgtgggagtttgcttaaatttcttcttagctaaatccaattaatcatgaattctatagatttatttcctcaacatcacacaaacccatctcctcatctctattcctacttatacctccttagccgagattctgtcatttcttcccttttggattacttcaatagtacctcaaatgttctccttgtctctacttttagcctcctcttttgagggggctaatatccaaatcctatccagtctttaatatccaatatctgtatttctaactcagactcaatttacaagtttcaaacctatatatccaacatctagtaagtatatctacctggataattcagcatgtcaaaaataaaacccttcacctcacccagtcctccaaacctgattatcatcctgtatttacatgttctgtcccccagatttggttaatcatttggttaaatgattcatccaagatcacataccaaatagatattctccacactctcatcagagtgatctttctgaaaggcaaatgtcatcccattctcttgcttatatcctttaaactattgttcttaattggtcataaaaggtccttcaatatctggtgcatagctatactctagcttcattttgccacacttgtacttgttcacttcattccagccttactgagaaatgaatttatttgtagttccctaacatgcaatgttcttcatctctatgaatctttgttcagactcttctctctgcctggacaccttccatcctggttcacattccttctcctacttcaaaattcagattcatatcaaatgtcacttctttgagcaagcctcccttactctatcaattgggattaaatgctcttcctctgcacttctatggcagtcagtgaatatatctaccataacacttagcacattatattgttgccatttactagactgtgagcttccaaagataagtaatttatctttctttttttattcttgtttccagcatagtacccaaagactagtagaaatttaataagaaaactttattaaactcattcaattcaaaaattgttgagttaatctctatgctgaaattaaacacatctcttcattcttggatactttcaatgcatctagacactgtgccaccagctcctctcaaatccccccttagttccttccaatttctgtaccttctcaaagctagtatttccaaaagccatcatactccttggtgtatatattatgttcttgtggctttcgtagggtatgactcccaggtacaacttgttctcttctgttcaaaatgaaactgatgccaaaatgcaacaacaacaattagtgaatctcattaatagatttcttttcccacatctcccaagagtcaacttatctttatctcaactgtaatttatatataaaaatcatatgataaatgtcctgtttcttcatattattggtaacacaaatgatgactaaatgtgtatgcacatgaatatgtgtggagagggggcacccaggcaaaatgaagaaattgtaggcaaggcttccaggagtaataaaaaaattcctcttatctgcttgtggctttcctgggtgttcttttaggaattcagaaaaaagatcttggtgaatgtgatatgggaattgatataaaattttgctctatgtgaactgactcatcattattattatgactacacactttttcaatttatatttgccaaagtatttctctacacattaactctaataattcttgcattagtcctatgtgcttgaagttacaggtgtgtgtgtgtgtgtgtgtgtgtgtgtgtgtatctgtgtgtttgttatctttttacagaaaagtctcacaaaggttaaatgattcatccaagatcacatgccaaatagatagcagagccagactttgaaattattattttcaccattttccatctcctttctttgcaggagaaagacaatgcaaatagtcccaataagctcaccttatacctaaatcatatctaccaatgatactacagaaataaacacttttaagagaatactatcatcaaac

SEQ ID NO: 55701 - DNA, 5708 bp, Homo sapiens
acattttaaaagcaatcaaacttctattagaaaacttgaaaaacattactcctatcttttcaaattgatgtttccaaatgttcattccaatgaatattttaagatcatgttctgtagttttctgaaaaagatgtagtcaatttatactacacaatcatatataagtaatacacactaaaaatatttcattaaaatattctgaactgatttggttgctgttcacctggagttctcagtgccacaggaaaacatcagtgaagacaaccagtcagtataaacagcactggactaagaagtaaaatatattagaaaagaataaacaagtaagttataaagcagtagtaaaaacaataattaactgatataagaacacctcagggaacttcctccattcctgctttacaaataggagaaacagagagaactaaacgatcatgttatttaacacctactgagttcctacagagggatctacagaaaaatgtaggaagccacaggctaaaaatcttgacctgagcagtaggagctacactgaaaattctaataagggcagaacaagggaacacctggacagttatttaattaagggtctcagcatgagtcataaaagagatatcaggatgagaaattattccaagatttaattgtaaaggctgactgtcaaaaatgccagacattacaactcatctatatttggactttttattttgcaacatgtgtacttgaatatggaatactgaatacgacaaaaaccaacaaaaaagttggctaagatctcctactgaaaatagctggacaaaatgccaattaggtaaagggactgcttcagataccaaattagtactttaagtgcagtaactacctggaacactgagtatgattaacaaaatgaagcaaggatcgaaggtaaaatccttgttattcatcaatgagatagaatattgcagtaaactatgacctcatgctactgattttttttttaaaatacagaagggcatgatattaacctcaagaaaagtaataacataattcagaatacactggcccagctagtttgaatcaagatcccagcaggttctccaataatcaagggaaacaagagtctaccgtaggataggcataactctgtgatcagtgtttctaaggattagtcactagacagccagttccttattctagggctttctagaagtcacacacctatatttctatttggaaagggaaaccattttccttgcctatctcaaatagctgttcattgagttaaccatcaagtatctaaaagaatgtcggaaatcagaccatcacctttcctccccagatcattgtaattatgatctatatatttttacattgccataagaaaaagggattttctacaccatgtcataattattcaggaacaagtttttcttcctttttagactgtaagctccttgaagacaaactatcactcattaatctctctattccctttagcatctagaaggaatacaattaatatttgttaaggaacaaattattaacagcctttttccagatttttctcataattggtccaattagtcctaacaagtaaattaaaagtaagttctctctacagtactattacatggtaaaatacaaaacagaaagtggtcagtggcaataaaaaataccatctgtatgctacctgggagaccattaggttcccagtaagtagtgttaggcaaaaggcaaaaagaaaaaagataagggttattttgcttacatatcacatcagagaataatgcttaggccaccatctagtccatatttcttacattcaattatagaattgtgcacaacatccttgaaaacagccttattggtgctgtttataagacaggggtacatctgcagagttttaaattccattttcaaggaggaaagtatctaagtataatcagacgagagtaataaaatacactgacctggatctgttgctgcaggagattaattttgtgctgctgttgcagaagttgctgctgttgtctcgcaatctatcagaaataaagtttcattaagttaaaatgaaatgcttacacctctgccattacctcaggtatttctcctggtattacaacaatcttttaccgcacctctatgtgaaagagttcctataaaatgagagaggccaaatcagaaagatggatgaaaggaaaaatttttaaacaagtgccacctctctgctttatctgtaggaaaactaccccttctattatatttgtgagctattcacctatatctgcactggtcagctggaaatcatgggattttagaaatcgaatccttgtagaatagagatagaaaaatctctggctacatttttctaaatggcttaatttggatgtaaaaagtaaaatctgtaagcaaagacaggaaaaatcttcgtattattgcttaatatggtctatgttggcaaaacctttcctgatacaaagattttcagaactgatacatttacaaatattgttaaaggagtgccaaaggacacagcaaaaagtaaaaaatctttagctttttttgttgatgctgtatgtgatgtacaaaatatttttaaaaacaaattaagctgtaatttaacatttatccatttatccttttgagaacaatgtgtttatttcatagtacaggatctatatacaaattttatatttccttgtttcatccaacaatcaaattcaacatctaaacacattatctggtctataaaaagaaatgttaaccatttaatgcaagccctactgatgactgtctctggccctcaggaggtcaaatagcttccttaggataatagtgtttactatgaagtatgagtcaggcatcaggccactattgactcaaaagctgagctgctacagctcgaagtccagagagatgatccttagtgagaacacactcactgccaacctaggaagccagagagaaaagcagccagagagcactcaggactttgtttagtagtgcctttttgtcaagagtgtcttttcttcctatttcttcctacttccaaagccagtattctagaatgggttatgttggaagtgaaaatgagtgtaaatcagttccaagctatatacttcccaagcctttttaatgttttagcctatgcagggggtagtgcccaaattatatttcattcagcacaagatgacaaaatagcagtctgcttctaaatgttgctttctgattttggatgacaactggttcctactggaagccatgataaagctgcccctaatgtagactacagtgtgagaaatgagactcctccttgtcagagctttatacttaaagtggaaatagtatttaatcaggttgggatggcccactctgcttgtggatattcaaatcagaaatgtacaactcattctgcagctctaggtatagatgctggatcctctgaatatttatttcttcttagcaaaccagtgaaatgccactaggcatctaatattgatggtccctcctaaatgataaagtgctgcatagaaatgcatccaaaacaccacagtgcaattactatcatccactctagacgtatgggtttgacacagtgaagtatggtacataagcgccatgtggctcaaattctgaattttatttgccaataggttgagctacatgctcgcttcattgagcatgacaacctagttttaagtgtcatttaattttcattttgaaatataattacaaagtgttcactgtaagatatcactcgtctgcaaatgtgtcaagattaatttgtgctagcttattcacaagtgtcaatagttaattactgtgtcatctctggatggctaaatgacattctaacttctgattttttacagtgttcctttatgttattttccattaggggctgagtccatattcctacatgtgggcaaatattcaagcatataaaataccagacatcacaactcattaaaatcaacagagcatatattgctctatatactcctataaaatacatttaactgaaaagataattccagtaataatgtcagattcctaaaaactgcacattaatttagatctgtctgatctaaagcatcagggactactctataggatcattgttagattaatgtactcttatgagacaagaaaaaacatttgggaaagtgatttatttttaaaagacatacatttaaactttgctattttttcttcattctcaattctaagtcaatcaggtcaaatacttttaggaacgatgtactaatttgtattcaatgacttacctatgctataaatagtgaccatgtgatgtatcatccaaaccaagaaaactttcacaagtaaaaggaggcagggtattattactctagaaaacaggcattataccagggctatctggggaaaactgaaatgtatggtcacctctttggactttaaacctgaagaaaatcattgcaccaatgagctaaaagattcccaaagtttttctggaacagaaccccctttttctgggaggaaaataaggcccagagaaaagtcacttactcatagtgaagctacagagggattatatgtgatgtctatatgaataagcatccccaaatcattaatcaaatccaaacctgaaacaatgtatcattttagttatgcccagttgctatgatgccttttttgtacacatattccctcaaaattcttgaagaccctagatttccagaaggctttgttttttttttccatcttttcttatttttatttttattttttaggaaagcttacaacaaataagccaatcaatttgattactctctgagcctggcacattccacatctccagttcgtcagtgccttttgcagggctcacctgttcttgctgttggcgagcaaggtccatttgctgccgttgtttctcaatttgtgacgctgccagttttttctgttcatcatgcgctgccagtagctgctcccgtaaactgatcagctgggtaatcatggtggagagctgccgttctttttctgccaggctctcaggtgtacctaaaatggaagcaagaagagatctcacaagcttgagaaatacctggacgaataagggaaaggagggcagaatttagaaagggactatcctaagacatttaaagatctgggacaatgactggaggccattgagggtacaggaacaccagagagtaattacagcagtggaatgaaagctagggttcctcactgttcctgccaagagaaagtattgtcactggtaaaattctcactcactctcccctcttgctctaaaaaaagcagacttaccccattttctcctttttgcccccaatctatctgattaagctaggaaatccatgatatttaatatgaaagatcagaaactatagattatattaatattctataatcacctctaagctcagtgactaacagtatctaagacatagtaggtgcttaataaaagttacttgaggaagtttctgatccttaccctcacaaaattttctattgtacaaagatatgtcactgaagtttagaagttagcagtcaatctcttggccatagagagaatactacagagagaattaaaactgcctcaggtgagaaaagattgaatgtgatttttttttttcctgagaaaggatcaagtaaaattcccaagttcatctgtaaaggcaacagtgttgcttggggggctctatcacccctttgtcatttgt

SEQ ID NO: 55702 - DNA, 854 bp, Homo sapiens
tccaaaaatgagagaagtagtaactaaatgtctcaagaagtctaaaccttacaggtttatggacttttttccagtgcttcataggccaatcaggtatcacaaaggtgtacataaatcttaccttaggagttatgactatgactatacactagttagaaccaagtgaacgagtgggtttcactacactttctaaagtacagtctcaataaaagtggggaaataaatttcattttggtgctgcctactatcttaaatgacaaaatcttacaaaaaactggcaacaattcaagtttttaaaatcttctctaaaataacaagattagaaatcttctcaaagtctgtcataacagcatgactgaagattagatcctcactaaaaattcctggattgttatcatgtaatgacaatagctccattcccagaaatggtacaaagtccacaccagcaattttatgactccaagtgaaaaacacaaaacactccagagttgattagcaacttcatgagactgaaagctagagaagcagagtagaaattgtttgcaagcaagaaggtgttttccccaatagttatttattaaatatctcagcatgcctaccattattttcattcaattacaacaaagggcattattgacatcttttatttaaggtggaaacttattttaaaacttttctagaagataaaaactcccctggaggaatttaagtaggtctctaaaataagaagttcagatattctggggctgatagtccactatggttatttctacctacttagactagtagttaaaagccacatgtatatttttgccaaaatgtgtatcaatataagaatgtgtgtaagtgtacac

SEQ ID NO: 55703 - DNA, 4130 bp, Homo sapiens
tccctcgggaatcctggaacccagaacagagctgagcggaccaggtcggccaagcccgtgcctgcgggcctcggggacgaggtgctgagtgcgcaggctaattatacatgtggcatttgggcagccgactgtccagtgacaccttaccttatgaggaaacgtcaaccccagcaactgttcaaaacaaaatgccattgcgggatcagcttcgccggcccttggccggttcagggttgcttttcccacagcctctcgaactttgtgcaagaatgtggcctagggaggccagccgtgcgcgggcgggccgaccaaggttgggggacaggcagggcaggacttgccaggtgtccgtcctgtccctcctcgccatggaccagctcgccgacctgaccacttgaccttttttattcaccaaacccacctcctagaaataaactgggcggggctgtgtctgttctcctcgggacccggggaaaaacctggacatgtgaccagaaagggcaggagagagaagaccctagtgggcgggagtagaggggccctctctcatctctactcccccgggttgctggctgggccgtgcagccagggccaaagcccggccgcaggagtacgcggctagcaccggcgcccgggacgcggacgtcatccgagcgcccattgacagtacagcgggaggtccggagcccagcccagtttgccgcaaggacggcttcgggccacctctagccctaaacttcaagcgcggccctcacagggtctcacacacaaaagcagcccaggacagcccatctcgctaacagcccagccccgccagttcagtcgaagacttatttttagtccccaaataggggctgcattcaatatctgacaattcacacaaaacaacattttcaaacttggtccgcctaagagaccgtaaataaaactcaaaacaagctggcgactgccaccttttatctgctccgaacacaccaattctttttatcttaaagctctgcggagcgccggggaagcagcccggcaccgagctaatctgccctcagcagccccgggccgctcctcccggcatcggagcacaaccccagcagcctttgcacaagccctttcccttctctgcccggccctttaagggagaaggaagaaagcagctcccgcgggagcggccgggctcgggctgggtcccggggcgggtggcagcaccgccccctgccctgggccgagcccgggagcagcggaccgcggccccggctgcagaggaacggcgggtggcggggccccggcagggcgccgagaaggacggagggcgccggctgggctcagggacgcggggcggggaagaaacgtgccggcgaccgtgcgctcggccgggtgactccctggcgaagtccgcgcccggcggggctgaactacccctcgcccccgctcccgccaggtcaggcaccactgccctcgcggccagggtaaagaggaccacagatcagtcagccttggatttcggatgggcttggaattcggtttgtttattcctgaaaagatcattaaaaagtactgtccaaaaacggggggagggggaaggaagggcgacaagcggagggagctggaggcaactcgagcggtgtcccgaaaaagttgcggcggagcggcggtggggtgagggtgggaggagggagcgcaagcgttttctagcgacccgggttttcttcatgaactcctccgagtaaactttatcccggcgagagagcggcggagatcctcgactcccgcccgccctcaaccagtgtcaaccccacaaacagcctaagtttccaaaccgaaatgggggtggggtgggggtagcattaagaagcccagaagctcagcgggtcctcccgacctcccgcacccagagcctgggtgacactgaagcgctccgaacactgtggcgtctcagtcacacagcgaatcaacccaacacttttcaagaaaacaaaatatttgctaggaaacttactttgcatttagtctctattctttgggggatgcggtttaggtcggctcgcaagggaagcccgttttgtccaggttggatattgtctacgtatggatcagcccttggatgagggtttattttaatttatggcttatgcattcttttaaggtcgatttacatgacctccggctacaactaagacagccgaggagggcactccagtcgtcagtcggccaaacccacaattaaaacagccctccccctagtctcggtgtgactagggctctcccggggtaggctagctgcctgcctttctctttctctcttctctctttacttccctcttttttcttttttttttttcctttatatctttctttttttagtatcgcgaaataagaggtggtatcagttttttaaaagtttcagtgtaactttctctaaacccaagcctgcggcggtaacaagagatacagcgctcacaaagccctcgggatgttgccctcttgtgggcacggagggcattaccgcctagcggtcccatctgaaccttcaaagccgacacgcatttgctttcacagaacgaggagggatgactacacacgcagccacaaaagcttcctctatcacacacttgagcgaacttcaatgaaatacctacctcgaacttcacggagacttacaaattcattctctaagccacctgacttctttttcacatcattcccaattatatagattagaataccaatgcggggaggcggaggtggaggagtgaggtgggccgagagggcagacagatttccggacgaatacttaggatggcgataacagctttctgttgtcaaaggttgcgttgtgtccctgtccctgcccttttgccttaatgtcctacgcacagttatctacggctacaacatgtgttttctcagggtggattttttggaggggaggtgaaggggagaaaaacagacccccgccacgcagatctgtcactccggaacaaggcgcaactctccaagagggggacgcatcctcgggatcagcgcgtccaccagcgagcggcgggcgcccgggcccctttctctccctccactccccctccgcgtcggcccctcggagcgccctcctcccgctcctcctcctcctttcccctccccagccaagtacgcaaacccgccccggcccggcagccgcggctcccggccacccgcgccctctcggggctccgctcgctcggctctcgtccctctgcctgtcctgccccagcccctcggtcccagctcacagaaactaaccctggagtgcccggaagggcaggagcggaagacgccgggggacggcggcccggccctgggctcctgccccctgccccctccggcgccccaacaggtagctcacagcgggccgcgcgccctggctctgcctccctcgctctcgagatcgctcgctccgtcccggttacctgggcgggctccaggatggtaccgcgcgggagggctccttgtgcgctgcgccgcaggagtaaatggcattaaagaaaaagggaaagatacaaataaaaaaaattaaaaggaaggggagtcggtgctaggtcaattgtcacagtccggggagcaagggaacagaaccccccagcgccgcggccggcgtagcccgttaactcaagtctgcgggggtgtcccgccccgggtgggggcagcgcagagcggcagaagtttgccgccggggttccaggaggtgcgcgcggagcggggtgactaggggcttcaccctggaacaagtgaaggcgatggttagtgctgtcaatcttggcaatcagtgtgagcggccatgtcgtaagtattcaaagcatttcccgtcgtgcaacatcagaaagtgagtggccagggcattgatctgagcgagggagaggaggctgggctcccctcccagacaacacaggcaagatgagacaagaggcgagggaggcagcgagccaggcagagaagctgggagggaggagggcgggccgggggaagaaggaggggagagcgggaggcaaaggcaagagagagccgcaaagagagaggagggcagagacatcggcgagaccagaggttggaactggggaaagcgcctggaaagagacggtgaagcaactactaggggagaactg

SEQ ID NO: 55704 - DNA, 2226 bp, Homo sapiens
agttcagacctggttacaaattcagacaccttaataaagtaggagatagtcttcagtatctgaacaataaatagctttaaatgcagggctttttgagtagaggagtgatcacttgaatctggagagagggcgagaaatggggagggattgctaacgggcattggggttccttttggagtggtgaaacttcttggaatcagaggtgacagctgcacacgattgtgaatgtactaagtgacagtggattgtacactttttaaaaaatggttaattttatatgtgaatttaacctcaataattactttttttaaaaaagaaaaaaaatagaggcttttgtggcagggatggactttgcttggtgaaggcccctactgtaacggtgcccagacatccacagcgaggtcagtgaggagcactcccacctcacacaaagccatatgaaaacttaacagatttccctcagctaaatccccgttttcaacaaccgccaattagccaacatttaacaacatactgaactcatttctgtatgggaaaacagcgaaatattcatgaaaacatttagaaagcagcatcaccgaccacctagaaatcccctgcgcgcaatagagaacaccagggtggaaatggtagaagccatttttggttaaggtttttgtcctgggtggagggtattcgtgaggattcagtcagcctcaaacattacatttaaacataggtgcctagctacgatgatacatttgccagtagggcagcgttgcacggtgaaaggcaaaaacccctctaagcctcctcctgtggcgacaaagctctcggccaacgctcaccgccatacacatccgcgggaacgcttcctccaccagccgaaggcggggcctctgagggcactcccgccacacagcgcgaattgagcctcggggcttcctgggaattgtagttttagtcacggacacatcttttttattcgggccagtatgcaatgaatcagaaaactacaactcccaaagtgccccggggcggcgaggggccgcaacggtgacgactgtggcagagaaggcccggaggggctctgcgttctgtagtggcgctgcttgggcccttggcggattgtaagctgctggttttgcggctgggaagagcggcgagagggttcggcatttttcgtcgggatccccgcaaggatgagtgctgccagagagtctcacccgcatggggtgaagcgttcagcctccccagacgacgatgtaaataataatggcggagtggctgagggttgaggcctactaaagcctggagtaggccgggaagggtggttggaggaggacgcgcctgaggtggcctgcagcgggagagcccagggaagaaaccagaagaatgagtgggaaatgcctcccttaatctttatgagggtcagaaggtttgaagaggcccacacgctgagagccggagacctgcgtaggaagggggattgaggaaggaaattctgagagggtcgaggagtgaaagagcttagtcaagggatttcgtacgtgcgttttggggggccgatgagagtgctttctcgggcctttgtactcagtatagagacggcaagactctccctgttttgggttctaaatgttcccgtgacaatgtcgaaatgttcgtgcacgtttgtacagatttttcctgcctggatgatttttacaatgtgctgttgagagttaactttagctgcactagtaagggtaaaccgagaacagtattgagccgaaaattgtgccacgggtgtaatttggtactggctctggtggtgaggtctaagacgttgagacctagaagcccattttgatgtcggatattaatacctcgttcttcttacctcgtctccccatcaaatgccgttcccttcctcagccctcacctcataggttttaatagcaaacggtttatcccttaaagtaacccgttaaatatttactgcactgccgggtgttgggaattcggagagaaatatgatgcttattttaggcctttttgtatatttgtcctagctcctagcccagtgtcatggaaacggtaggtaaccagtaaacgtaaaactaggtccttcatacaatggataagtgtcttggcaacgttgatggggaaaattgttggagagagcgcggagaggtcatctttaaggaagatgaagggatatctaggttttttttcggttttgtttaaagtactgtcaatttctga

SEQ ID NO: 55705 - DNA, 1401 bp, Homo sapiens
ggctggtcgacaccctcccctgcaggtccgctcccttcctcaccctgctccaacctcatctgcatttaacatcccttgttgggctgtggcagagaatactcaacagactcatattaaaaatgccctttaaaattcaaaagctttgaactaaagaaataccttgagaagttttcatggaaagttcagctccactggttcaattcactacacttagatgcaccttttcaaataatagggaaaaaatgtaacagggtcagacccaatcaatacgcttgttcaaacagaattgcagggactgtgatgtgcgcacattttgtactctgcctttgtaccccgccactcgctctgaagaaaggtttctttgctaggagagcaatgaaagtggtagccttttgagcggaggtggcaaagccatggcgtgtttactgggccgggaggggctctgccatttttcatgtcttccccagtcaggtctctttgttcttttcataacagtgcacaacccacatgggcaaagtcccttgcacaccccagcgtctgatgctgagtcggaagcagagggctcccagcatttgtccgccacatctcagaaatgtgatatggggattatacaaataatttgattcttctttcccacccttggtaagaacacaaaaggacttgccagggagtcctccgctgtccttgtgggaaattcccaaagcccaaaatgggctcctgtctggctgagcctgagccaggttctgctccaccccacccccatcccttcaggtccctggaatgaaactgtgggcagagagatgattccctggccatgccctgcaacctaaaataaccaggaaaattctagagaacccagctgacctgaaggcagcccaggggttagagagagagggaggggctagctgcagcttacactcccacagacaccaaggcaggcaggaaagtgaatgatggagaaaacaaaatgcttgttttcatcgtctacactagtctgggcatgtctacttcatatggactcacaaatcctacatatgattgtaatcatctgaacgacgttctgaacatgttgagaatcttggcagttcaggaggttcaagaaggcattaggaaaagatgttattcctaacccgtttcatactagatcctaaaatgttcttgttcgttcttgctaaaactagatatccggggctcaacctggacctgcgttaaagtcagaattgaggagtggacaccagcaaacggatgtagaagtgtgctcacatccccttcgtcaactgcaatctcgtttaaggccctggggtctcctggaagggaagttggaatcacggggccacatggcattccctggagtcctccccaccctgtagtgtcaccagccagccagcaccatcacaggtg

SEQ ID NO: 55706 - DNA, 4212 bp, Homo sapiens
tgtacaaatgcttttggtacatttatgggtcactgtgtgattcattcaacacagtcaaagatgcagcaaagatgtaccacgtacccactgtgtgccaggccctgtgccagggactagggatacaaaggtgaaccaagcagccatagacgctgccctgaagagcttaggaatagcatcgacataggccacaggagacaatctacgtcttgaagacactgagtgtgtcatcccgagttccctttctctccccttgggtagagacatttcctgatgggtagagatccaggagttacttgctctcctgggcctgccctgtcatgatgcatgtgagccaccagagggcaccagaagaattcagaccagaactctgcactgtctcctagcttctaccatggctggaaatttcgcctgtgattttcaaacctgccccccattttcccctagtcagactgcccaagttggcctcaccagccagttgaaaagccaacccctggtgttgcagggaacatttcctaacaataacaactgctgctcacgtgcctactatgtggctttgatcgctaaacctcccaagaacatgtgcagttacttaatcctcttcacaacccacttcactgttgaggaaactgaagcacagagaagctaaaattgcaatttgccctaaattacagagagttttgaaccttcatcgaaacatctggcctcctttcattgccttaagctgctatccatccatcctcctaggccacactgaagctgagccatgtccctgttcaggatgataccccacagtgggaaggtggatcaggctgggaacttgaaggccatgtctcctggaggacatgaaggaagtgcctgccctcacctctctgctgatgtccaagtcatagtcttgaggctccaggtccaactcagtgacaggcatggcctgcactttcaaccagccattctcctccttgtcctttttttccccttgcacgacccgttccagcaactgcaggtcaaagtcctgctcacgcttccactggcaacagaacaagaggttaaacgtagtcgcttcctgattgctgaaagagcccggctggtcacctttttccatggggtcctttggaagatgaacctgtgatccccttagggaaaagctgtatgtgcaatagagaatgaagctgctgtccccttcatatgggctgttccagactgctaagtgctctctgatctgggttcccagaggtttcaaacatacacccttggggcacaggtctaagactcatgacttcaggctcacagtggtccccagggaaatagaaggctcccagagagggtgacctccaaacaacttgggacagagttctagagaagggatttgtcccttccactctctacagctggttcaggagacatacgtcccaggctcagaattaatggaaaaacacgcccttcaaggccctgctaagcaagaagaataaccaaggatctttctattgggaattttcaacaagataacattcgtaggtgggggatctcgcacttacagtagggctggggaggtacaagcaaaagcagcttggagccaatgaggcagaaaaactgctgtatgagacccatctatttgagatagatgttttctttaaattagaaaaaaaaactaaatcatataaaattgaaatgctaaatcaaatggaatgtttctaaggctgtttcacagtatcaactttgtaacaagcttcccaagagggaaaatctaaccgataagatccaaccatgactgtccagctccgtggtgacttcctgttgacccaggacctgcatcctcacaggcctttgaccgctgagcaggttgttgagaacagagcaggctcaaagcctctcttcccctgagcaaaaccaaagcagatgcttatctatcccaggccatcttctctctcccatccatccacctcaaagccccaaatggtcctgattgtctttgatgcctcaagtccctccagaaccccaaacccagagccatattcgcacatttcacccattcatgcacaagctctcaatgactccaaatcaatgtaatcactcttaggtgatggtttccaactattgttggaaaggattaggcaactgaagttccaaagatgaaaaaatcaatttaatgattcacaaagaaaacactcatttccttacacgctcacaaatgctccaaatagagacaagtcctcatttaaacccagcctgattgtttccacaaacaggaaaagttcactagactctataaggtatcctggggaagaaccacgccaatccattattattaagcaacatgtttattggcgttgatgcagagacttacacaagtcttcttttttaagagaaaaattacaaggtattcaagttacgatttttagataatctctacatttgagacatcaaattataaaaggtcagtgttaccccatatgacatttgttttaaaagtttaaaggttaccaggtttgcagcttttaaagatatgaatgtcctgggccttacccctttggtgtctgagctagcagctgcagagaggccctctgaatacacagtatattttgctatcccttcaagttattaaataccagaaacacaaaaggttttccataagaaattgtgtgattggactacaggaattaaaaccgaacaacctcagtcttgggagaatgtattcaaacgtgcaatctctgaagtccctgtctactgtccaggtgtaaagcatggatttttataaattaataatgcccagacctctgccaatgactgtggcgtcaggcagcaggttggctcaggcttgtggggtggcttttgggacaagtgaattatgagtcagtaggcctgcatgaagagggcagcagaaaggtgagtcacatctgggaacactcaacaggctatggagacaagaaccgctattacaagcccggtaataagtagcacaggccagttagagcatgttcaatgcaaatcagaagcttctgtaaacacaatcaggcaggattagagaggcaatgagcggtaacactaaaagcaaaggagcttgtgcaatgaattagggaaagaacaatcaggctagaggtttagggaaacatgggatttcaaacaacagggaaaagtcaaatggaatgtttccaaagggacctaaggtgactgtggacagggcgcagcgccaggaagcgccaccagggggcagcacaggcctccccagcaatcccagacaccctgaggcctctgcactgcaagcccagggagaccagtggcccttggggcaggggtgtgaccccgtgctccatcaccctcacacagcatctgctggcaggtctgggaggctgatcagtttgcttgtgcttctaaccaaatcatgtcaccatcttcctcctctcctctctgaaccctgtattcccaggtcctgaattcagccgagattccgaacgcctgcaaaggcccctctccatcgcggctgggaggactgactgggtatttcctcaggctcctgggcctgtttgatcctcactccagctctggttcaggtcaccctctgaccaggcattcgtccagcctgggtcgtggacaaacagccccgtggggtgttctctgaaccatgtaggtcaatggacagctctctcactgggaggtgtgatgtgcttgtgtttgggggactctgaggggcactcggctccctgtccctgccccgctgcctggcccctcctaacatactgagccaagatctccagggagcggccggctgaggtagcgagatgagggcaggcccgtcctctccccttggcccagtgtcctcttgcgctctcggaccagggccttctggtgtcgcttcatgcgctccagctgctcctctgcactcatcttgcctcgctggtgatcccctgagtacaggcgctccaaggcactcttaggtctctgaggaagaggaggcaggcaagagagacacagaacagctgggctgggcacgcagaggacagccaccctgctggctgcattcccgttgtctctctctcacacacatgcacactctagttgggctcctcttggccttagagaactatttcctctaagcaacacgatgcccccaaccctcaggagctttctgagtagcacccattctgcagatgcagacacttaggctcaggcctgtccagtgaggccagaacccagggtgcaggcttcttgagctccctc

SEQ ID NO: 55707 - DNA, 1724 bp, Homo sapiens
ctcataggattgttgtgaatatcatgtctatataaagtgcttaaacagtgccaggctttctagtaactgctattatcattgttcctggggacagatgtaacaaaagaggaagagaatcaggatgtgggccagaggaagacaggccaggtcctccctcttggcatcccagacccccctgacagctgctgctcactcctaggcctagagctgcaggcagaagggtacgaggcaccagctgaaggctggaagcagtgtggtgggattcccagagaaactccagggagggccctgccttacctctgcctggcagcgtctggtacctgctctcagggcccacaagtcctagggagggctgggccatgtccccgctgagggtcgccagctcaggctcactgacatacgaccgcagctccacctgtgggcagagtcccaggtgatgtgacctgccagtgtcacacccctttacctctccccacatgtagagtggcagccccagggtcccccgctcaccctggaatccccattcacacactgccccagctcccggtctcgcttcctctcgtctgactgccgcttgaggccccgcacagatgtgtgccggatgatggtggcctctcttggcagaggcggcacagccgggggctggtcctctgggctgtagagttcggggagtgggggcctgggaggtgcttcatcttcctgctgagaaagagaaccagaccagtggtcagcgagacggagctggagggaggactgctaggtactgccacagtggaggtttaaagggtaggaacaggccacatcagagccacagaacatgactgcctcagccaaggagcactcacacttcccctggcggagcagtgaagaagggacatgctctgctcctctatcccctcagaggtatacagtttctattcctccaagtgttacctgtataactgtgtcctgaaacccaggactcaggtctcctgggtccatgccctcggtgctgtgctgaactgctccctccgctcatctggagtgcacatcgcaggcaggctgctaaccctgccctgacttccatgcttatcacagcaccacctacctggagagtaacatctacccactcagcagtgctcagcctgagccggctcattggccctacacgagctctggcgccttcagcaaggtggggacctgaacaaggacagagtctacatcctcctggcctttctatcagaaatgtgcatggttacaaaatatttcctccttcctgactcagacagaacaggcggtcaggatgagtgactcactgcctaccatgcagttcattccctagaatgtgatgaatgcaacattttccttgaaactccctgtccacagtgttctgtgagggctgtggttcctctacatatcaacagaccggcccctggttgccatgaacacccactcgcaggactaacgaccatcatgccttccacctcctaaattccctctttctcggtctaatttggttttgtttttaagaattttgcagagttcaggaaagggcactccaagctcttggaaagttcaggaaagagcactccaaagcaaaggtttatcaacaatcttcactgatgtgtgaaagttaagccatctgcctaagatacgcactggttctctgaggatccacagtttccaatcctgacaagatatccgaatcaccaatttctaaaaagctccccagaaagataaacata

SEQ ID NO: 55708 - DNA, 920 bp, Homo sapiens
ttcttgccaaaagtcatgcaggggctgaggggagtgactttcacagatgcaccctcccatggccaagataaggccagggagaaccaagtctattttgcctaatgtaggggaaaccacctcactgagctctattttgcagatctgaccaggaaaatggagggtggagctaacagtggcagagacaggtggtgtgtgtgtgctatgcagagaggtcccaatgtggaccgatagctgctggagagagaggtgtagatttctccccattctatctgtaaggtccaggaagtttgtcagtgtggattgggggtggaaataaattggcaaacattccactcagtgctcaagcccttcatgtgcccaactgtcctatgctacctctccctgcaaactgtcatgagcaaatccaaaggtcaagggagaggacctctccctgccttggagtgaggactgattctgggctacacacatgccccacccattcccacgatccctttggtcacacagaagaggacggaaccattgttttatcttggtaaagtcagccctgaacagaagacctggcacaaactcagcaaatgcttattgaattgcattgcatgtaggtcaaagggaaacacatgtaggtcagtgttgttgagttcccggaaaaaatagaactccagccaaattctgctcttcagactgtcagattatgtgtacatacacgtatacacacagttgcagaacacaagactgcaacaatccacaaacaaacagactgtgctgtctcctgcaatgcggggggggcggtgcagggaggtgtggggaggtgggcatgaagttaatcctggtgaatcacaaacagctgaacttctcaggcagaatgtgggttttaaactcaggggaacccaggagaaaaagcaggtgaaagcagtgaagtc

SEQ ID NO: 55709 - DNA, 508 bp, Homo sapiens
acacgcgagagccagaaagcacagacagaccagagcatgggcacgagcgaacgcgagccagcatgtcactccctgcccccggccctgagaggagcccaccagtgctgacctggcaggtgggaaaggtcagctggtgctgcagtaactggctgatggcgaaatttcgcacactggccaacttggcctggtgccgccttaaccgggtgagaagcaacgagagctcctccagctgcagatgtgtagacacagcacaaggaagttagcaccgcaggagcacactgctagaattacgctcttcaccccggtgtcagtgccaggacagcactgatgtgacaccgttaagcaattactgtgtcaattctgtcattaggacaaataaaggcactggcagtaaaagggcttcaggaagtttttttcaggaaagcaacaaccaacagtgcaacctcacccagactcaagctttttttttcttctgctttgagacagtcttgctttgtcacccaggctg

SEQ ID NO: 55710 - DNA, 523 bp, Homo sapiens
ccttccgtttccttacttgtaacaggaggatagtattacctgcctcataaggctcttctgaggaatcaatgagacaggttaggaaatgcaacccccacatctgatacacagaaggtccttcactaacgtgtgtacccttcctgcccttcttactcttataacactgttcttccctccccctgcctggatggtctccccttgctctatttacccaagtcttactcattctctaggatgctggctcatgccttcccccacgtggaccttctgtagtgccacagccctcagtgatccaactctgtttgacctcgtcatcacactgcctgtaacttttccaaggtcctatattgatgtgatcttttcatacttccaagacatgttttcccaggccaaggtgaaaaattcttgaaagacaggaactgtgtttcacaccgtggtattgtccacagtctaagaaagtcctgtgcgtaattagcccttcaataaacactccagcacacaaaactggatatgacttcaaaaa

SEQ ID NO: 55711 - DNA, 932 bp, Homo sapiens
acactctcccagccttttgtgcccagccatagagggttctgggacaggtgcctatcccactagatacaagcatagggagccctccaaggtacaataaagacaacagatccctgctgtacaaaaaattcatggagccagccttgtccaggaaatcaacatgggacatgcctcaaacatgcagacatgggtttgcatgtctatttgcgaatgagtcttaagagttacatccaccattacgaaggagttacacatgattgcaaatataaccctggtcactaatcaaaccagaaggtgctgtgcccagctgctcttgactctgaagagcagattccaactgtattctgcctgtgtgagagcatattcaatggattaactgtgaaggcaaaaagtacagggagttttcttttcatctggccaagtgacccaagtccaaagtatcctgagcctaggacctagatgatgtgaatcttctcactcctgccctagtctcaactcagatggtactgttttctctgctctttgctttccagttaacataatcctatgaagcaactttgcataactgaatagaaaacaagctatgcctaaaggaaatcaggatgtgaatgaagaacttacctcaaagacatgatgcccctaggatatggttggtctcctggctgttggacctcagttctagacacagcactggtgaaggagccagaagcctcatggttcaagcccccaacatcagcctttagaatagagaaacctcagtggaaaatagaggagcacccaaaaggccagggcccatcaactgactggctcattctggaacttgctcaacaataatgaatcatttattgagtatttactatgtgaaaggcaccctaccaaagttggagggacagccttaaacaaggccataatagtttatagccacatagaagaga

SEQ ID NO: 55712 - DNA, 703 bp, Homo sapiens
cctccctttgggctccacgttcggatagtgtcttccccagctgcaccaccttattaaatcttaggttcaggtcagacagggagggagactcccagcctgcctgctgtctctcaatttcggttcttgagcagctgcctcccaaggtgttacaaatccagcagccacttgttcctgctcattcattctcgttcctctccaccccccacacaaaatctggcaaccaggcaggaacacagttccagctctgagtcactgccccactgtggccaaggggagcagtggctagaggtaatcaaccaggcaagcacttcatgtctctagaatccaattcttccgttctttgagaccgtggggttggctgcccctctagaaccaggacataaagaaacacccctatctacagctctggagtcagaacaaattgctcattcaggtttgccctaccatgctgagctgaaatcagccccaaaacagagcctatctttggtgaagaaacaatggctccttatcaatatttcataccagtcagggcagggaaaggtttgagtggttacaggtcagcaaacccactccccctggtaacaatgattctttcctcaatgcttgggatggctaaggttctctcagcaccgatttaaccatgtggcactcactcccagaacaggtctgaaaacgagaagggcagaggggttaaaaagagaaa

SEQ ID NO: 55713 - DNA, 632 bp, Homo sapiens
tatcagagtccctgcagaagtcaagaaattacctaaatacatttggcccaccatagccattatagagaaaagacaaaatatctgctgttcatggaaataaattataaaatctgttgaaccatactatgttctggagactaagtagtttacgtgtattattctcatttaatctctgcaaaagacctaaggggcagataccggcatttacctcattttacagaggttacataacctggcagagttccatagccatgaagtctggctccaagcctgtgtgctcacccatgaccccatagctgccctatttcaagtcaggagtgagaacagctgaactgtgagggaggccaagtctggtcaaaggccctcaacatggagacagtagactctcaggggggtggtccctccacctatcccatctgagaaccacacagcaggcaggcaggacttctcagtggaaaagacctataacgtagcccctgacagccttgggaatacaggcctgaggtcacacccagttccagaaaggtttcaggtacacagggatgggagagccgggaaatgcttataacctgcaggaaggaagtcaacagcttacggtcctcagccaggactgagtttcctgtgctgcagaa

SEQ ID NO: 55714 - DNA, 981 bp, Homo sapiens
gtctcaaaatgccaaacccttccactgtgaagaagagcccattttcccaatattctcttaactttgtctgagtggggctagggtgggggttccatctctagagggagtcaagtccaaaacaaagaccggcaatctgtctcctctctcagaccccagaaacaggagggagaatgcagctaaccagacagtgacttccttcactcacctggcactcgatgggcaggaggcaagatagcaagaccccaaagcctgcctcagctagcctctgagctccaggtctctgagccccagcacagcctataccctccctcaggggctctctgcaacacctgggggcttctctacaggtgcatgtgctggggggagaggtgacaattcctactaaacccaaaaggggttgctgactcgacagaaggccgcatgcagtttgcttccagtgagtcccagactaacagccctggctacaccctctcttccctcaccatgcccatggactctgacctgtgcgaagctcgagtgtcttcctgaaataaactggagcagtctccacggcacagcctgtcacagaacatggtggagacaggccaagctggacagagagagactatgagaaccccagatagggaacgctgggtgaccccagctctgccgccttacacctgtgcatccaattactggactcaacctccctgagcctcagtttccccatctgtaaaatgaggatgataaccgtacctaccttataaggttggcatgaggattaaaggaggctgtgtctgtgaagcccttagaacagtgtacgtgtgaacagtgtcagtaccagataaacatttgtaaaataaacaaataagtagaagccattggcttctcagtgtgagagcctcacagccccacccctcagctcactagcacccttgaactgagcaaaacccaacacgaaccttcaggaaaaaaacaaacaaacaaactctcaaacctttc

SEQ ID NO: 55715 - DNA, 3848 bp, Homo sapiens
taggggatttcatctaatcccatggccttgaataacatctattatacccaatgggtctcttctgtcctctctccccaccaagcttcagatcacactatctgacatactcatatctcaaatgtaagatggcaaaacaagatctcatgattctcctccaccccaaaccggctcttcccatctcaacgatatgaatgctatccactcaggtgcccaagccctgaggagtcatctttgcctcttctctttctcccacagactattcagtccatcatgaaggtgtgaagagcctatttcctaaacacagcctgaatgtgaccactactccctgtctactgtgctaccaccctcaggcaagccacttctaactcctgcctggaagagggcaacagcctcagctgctctcctgcctccccctgcagtggccacctacaatccaatctcctcacagtgatcgttctaaaaacacacaccaaatcatgccatttccctgcttaaaaccctccaatgacgtttcactgggcttagaataaagtatgaaaattcctcaccccggctcacaaagctttgcggcatttacctttctcctacctgtgacctctcctcatgccactttctcccttgtgcaccacattccagccttcctgctccttaaactccaagctcttttctgccttaagcccttgccctggctgttcgctcttcccgaaatgctttgccaactcatcatcacatgatgtctccttcttgtcattcaaattttactttaaatgttgcctattcagaaacaccatcccgatctcccagtacaaccaagccacccagtcactccatgtcacatcaccttattttaactttctgcacagtagtaaccacgatctgatattattatttgtgttttttacttattttctactcccttccctctcctattagattgcaagctccatgagcacctagaacttttctgttttttgttcccaatgcctagaacaacgtgtgaacgtgtggcacacaggaaaattgtaataacatcaactgatgcagttatgagccagagaggcccactgacagcaagactctgatggccccagccaactccccaacttcacatacacacatatgaggcagggcaatagaaccgcagcaaggccctagtccttaggtctgtaaatctcacccatcagtattttcaactattatgcaagaacccaaaccagaaaaggaggttccggggttttcttgaaataggctgctttattcctaacagtagtagttctgactcacagtcgccgaggtacacccagtcagtactagtcagaccaccgtccagacctttggcgagctgattcattcagtgaacaaacatttaccgagtgcctacttgctgtccggcactggggcaaggggtcaaaggcagtgtctggcctcccggagctcagcaggcagagggaaacacgctgcaacacagactcccgccggagtgggaaagcaaagcctgtactggcataggagcctgacccgcgccttcacttactgcgccccaatctgacatggactgatcctacagacccagggtaacctggctggtgcgccaacactccggggcttttgcggaaaagtcgcccgtggactaacggaagcaccagcaatcccccggttcagctccggccgaagagacgcggagcgctcgaggaaagtcattggttgaccagttcccttccccaccccctccctccccgcaggcccgcgcagtggatggaggccgggggcgaggttccgactctccaagaccatcccagagcctgcggcgggagagggggcgtcctcctaagcgagattcccctagtctctccctctccccactccaaccccgcaggcccacaccaggacagaacttctcgttctactcctcccacccgagcccatccaggtcccggcactcgcctctcccggcggggcgcagccccagaccctagaggggaggcgtgcccagcccgcacaccagcacccgaatccagccggattgcaaggtccagggcgcagagtctgcggcctcttcccccccggcccaggtccccagcgtaggtgcggcccccaccgccttcctctcggaggccgccaaacaacttgggcacacaaaacgttgagtgtggccgcggcgcagcgcgcgccaacgagcccgggccggcgggagcagaggaagggcggggcgcccggcgggaacggggagggaccccccccccgcggcacaggtgcgagcgcggcggccccactcactcactcgatgaagtagctggcgccctcctccgtgaagccctcctcccagccgcggggcaggtctgcggaaacgccagaaaagtcgggtcaaacttgggccgccgctgcgcgcgccccccacccgccggcccggcgcccacctgagcggatcatgtggcccgagttgacgggctccccggtgcgcggatgcagccaggtcgtgcagcggagctggtcactgcgggcagagaggtgcacctgttagcgccgccacagcccgccgggtgcccgcccggcccccgcccccgcgcccccacccgcgtccccgcgtccccgggtcctcgcgccgcacttgatgaagaagacgcggccatcccggcacaccccgtaggaccaatgctcaggtaaagtgtcccgcccgaccgtcgccgccgccatgttcgccgagcgcggagccgccgcggggtgggggggagggggcgggggcgcgggcaggggcggaggcgggggcggtggcgggggctcggcctgcgcgtggcccggcggcgccgcgaggcgctccatccaggcgcgggctcctgagggagcgaccgcccggccgggtcctggcgcccggagttcgcagccgctccggccaacccagcgcagtgcccgcggcctttgtccccgagccttccccgcccccagcctgctggcaccggcgctcccctttgcccccgaggccgggagacccgggcggcgcggggggccgctggcgggggccgctggcgggcgcgcctgggcagcttcggggcgcgcggttggacccgaccaactccgaaaacggcgagcgcccgaacgctcagtaaaccccagccgacccgcaccacagaacttcccgacccgggaactccgcttgtgtgtgaaccaagttaacactcaggttcctgccatattcccagcctccttctcttcccctgtaaggttaatcgagtccacacgggattgttgtgtagattaaatgaagtaacaatcgcataaagtgcttaaccggaccatggcatgtagtaggtgctctatcaacggcaggccgagcgcgatttcattttcccaagttttcagctgggatgtgaaacaggagggagcagggttaccgccacacaccactgaggttgcagggatcgcaagctcttgccttcagtttctgtcaagtaacagaaaaaaggggttttgagggctcggcagcacgtccatctctggaagagcggtggccaggcggggcctctagggggccctgcaaagctctttgcagtggcggcaccctctcatattcgggtctttactcctatcttatctcctcggggagccctccctgagccctctgcaaagaaaatccttcccctccttccctcgctatttcattacttgtttacatttaattgatatttgtgtttgtcttgtttgttgtatattagttccaacatgtcagctggatgagagaaggggctttgatctacctcatacactgcctggtctccaatgcctggaacagcacctgactcatgtatgcattacgcattcaataactgtaggatggggtggggcacggtggc

SEQ ID NO: 55716 - DNA, 2147 bp, Homo sapiens
agatcgcgccactgcactccagactgggcgacaagagcaagactgtctcaaaaaaaaaaaaaaaaagaggtggggtctctctgtcacccaggagtgcagtggcttcatcatagctcactgcagcctgggacttctaggctctggtgatcctctcacctctgcatcccaagtatctgggactacaggcacattgcggctggcttttttgggcgggggagtcggagagtagtatgttctcaggccccagaaccatgttcagcacatagaaggtaaacatttgctgaatgaagccacttgcacgaagtcacacgcagctgagattcaaaccacacctaactgtgaggaactgtgtcaggcactctgcttagccaattccaactcctccacttgacagctgtgtgatttggggctggttagtatccagcggcagtgtgcctctgcttcctcaactgtaaactggggtgaaagccatgaagatttatttcaaagtattgtggtcagaattaaacgaaatcagtacatgtgaagtgcttacaatgatgcctctagcacggtggcgagaccagagttttggctatttttaaaataactttaccacctactagatcctacaagtcacacgaggacaggcgaaataggctatgttagacacaaacactcaccgatctgtgaaggagtaaggcccttcttggccagtttgtaaatctgctccttcacgtcgtcagatgtcaacttcaaccactgttatggaatagaaagcagccttaggatgagaacccaggaatggcgccgcagaacagcggtctctccttccgcaaaaccgcgctcctcatacacgcaagttcctcaccctggcgtcgcttcacccgagacaaatgccaaccccctccccggattctccccggtcccagcgcgctacttacagtggggacgctgcgtcgatagggtaaagccgactgggacaggcccttcctggggagagaagcagtctcgaggtgaggtggcggctagtgccagagcagcccagaacatcatcccctcggcccgctgcccacactccctgtcttcctcccaccccccgcccagcaatccggcttgatgccccgagctcacccgggagcatgcatgcgacccatgatggcggcgatcaggcaacgaaaggagagcgagagtggaaacgccgcaggaagccacccaacacgcaggaagtgacctcacacgtccccgcttcctctcacgcaggaggcggagctacgctgcgcagccaccgcccgtctgtgtgactacatctcccgaaatgcatttcagcgtcgcaagagatcgtcaatccagcctcatcccggcatgcatcggtctttggtcagccttgttgccagagcgggaatttgaggctgacgccagcttgcgtcgaaattccctgtggacgccgagatcacaaagattcgaatgctgcgctgggggtgggtatggagcaggtagggctggaagaagcagccatacacaggtgtttgctcattcaccagtgcctggctttgtcctggcactagatccctcagagtcggccctgcgcctaataaattaacagatacaatagcatgtgatgaggaccacacgggaagccatggcagcggctaccgcccagccagcgcttccatttctcatttctaaatcctaccctaatctgtcaggggagagtcgctgacggtgaagaaccggtctaaggagttgaaccaggtccccacggatgcctgccgccctccgcactcgaattcccctgcgcagggctctggggcgctgggctcgccggggagaagggttgggcagaggcttacggagctatgttcccaagtgagagagttggcgggcagggaagagccttgggagcaagactgcaaaggccaagaggatgagggataaaatgaagcatttgaatttcatgggaaaagggaaccgtcaaggaagaagcttttttttttttttgagacggagtttcgctcttgattcgcaggctggagtgcaatggcgcgatctcggcttgccgcaccctccgcctcccggcttcaagcgattctcctgcctcagcctcctgaatagctgggatcacaggcatgcgccaccacttccagctaattttgtatttttagtag

SEQ ID NO: 55717 - DNA, 1064 bp, Homo sapiens
ctcccgcctcagcctcctgagtagctgggattataggcgagcaccaccatgcctggctaattttttatttttagtagagatgcggtttcaccatgttgcccatgctggtcttgaacttctgggcacaagagatccacccacctcagcttcccaaagtgctgggactacaggcatgagccaccgcacctggcccccactccattctttagcctccatattactctattaaaacgattatccactgcacaactactataagcacattaataaaggccttaattctattttgacaaaaggcaatggttgcaccatagcttaatatccactagtagtcattattcctgaagactagtagtcttcagcccttaggagcaacattctacacataagtgattcacaaccagggtatctaaccatgataattttctatgtctgcatatgtgtatcactgtatgtatgtgggagggggacaaggaaaggggatatagtcacagcaagagatccctattgaaagacattttgctgaccaagaagttttcaatctaactcagaatcccaacagtagtactgctttgtggagataattactgaactttgatctacttcattgttcattcacttgacatgaatcattaaataaactttgacatcaccccaattccaacatgacagataacagtaaagcttctgtgttaaatgttatggtatatacctgcatttaacatggcttaaggtagaaaaaagataaaactgagttgcaactgagaaaccctgaatagtgaataataaaaaataacgaaaaactgacatgactacttctggaattttcccccaaactccatcaatttctatgactaaaaaagtcttactttcacatgacatcaacatgtggattaaattcatagttttatataacagtgatagcaggagaaagaaccatgtagcagcaagcaaatatcagacttccctcttataaactgtgtgattttttttttttttgagatggagtcttgctctgtctcccaggctggagtacagtggcacagtctccgctcattgcaacc

SEQ ID NO: 55718 - DNA, 1947 bp, Homo sapiens
caacaggctctctcttccacgttatgtccagacttttttccttagtttctccttcctcatttccctcctcaatccctcctcccccaaaaaataattccacagctagagaatgtcgtttttaaagccagaaattcagtgaggaaaataagtatgtgcctttttcttcaattatttatgattcctccgtcactcaggaagagttaagctagtattttttaatctgaccgctctctcagaaggatgatgcgctaaatacacactgaaagaatagtgttcccaaagcaagtggattcgcggctaaaggcaacgcggtgggagtggggggtccgggaagaagaaaaagtatccttggcccccagagccagagatgggacaggaggtgaaagaaggggccgtcactgagaagtacaacacacacactcgccagaactaacaatctgccaagaaaataggaccggccactgcggctccagcccggtcccgcgggacaaggcgggggaggggggccggcggccggggggcctgccctccttctgtgggacaaaactaactccctggcgcacctccgctcccgagaagaggggcctggtggggacgcgggctcctcgcacctccagcgcagcacttgctcacggcctgggtggaagcaaggcccggagggaggggggagtcgggctgggcaacgccaagagcacgggatggagggtcagacgcgggcacccaaggcactgggggccgcgacaagagacccttccagcccgggaaccccggggcccctctccacccttgcagagcaggaccccgaatatcgtccccagccgcaccgaccgctcctcacctcaagctgcctgagcctccgcctctaccacaacctgagccgccgaagccgccacagtccgagccatttttcccctcagctggctcagccgccgccgaaagcttcggccgactccacagccagccaagcgcagcacgtcacttccggacagggaagcaccgccttccccgcccggacttgttgcgaattggctggcgcggacggcctacctgagctggcgggcggggcttggacgctgccggggtggcgtgagcaagggagctggggcgctggggcgcacgggcccgggggaccagggtctggctctctcccgaggaatgctgagcaggctctggacgcctctccgtgcacaccccagacctggggaggggagctctccggacaccccagctggccgcccctcgggccctgagtccgaagacccgctaaacagggcccgggcactgaagtaccctattgttctcatcccctctcccgggaccccgcaccctcctccatctaggctgaggttcccagatttgtgtcttggcccctggcggcgccgagattactttgtgattggaagactgaaaggaacaggcaagacttaaactcgtccactccaaccagtatttaccgaggcctcacggtgggtcaggtggtatacggtgggtaattagtagcctatcacgtggtttctgtaaaatgcttgatagcacgtaaaacgctttcaggtcggcgtctcgtttcatcctcacaacagccaggtaaggaagataaccccctgataataactcacagccagacggctctttctacattacaaagtattttcacatgcaacctccataataatatattcttattgagaatttaatgagattatgcttgtaaagcgtttggtcctcacgtgttagatctaaaaattacgtaaccatgggaagatataggaaaattatccccatttacagatggggcttctggggcacaaagatgttaaggggagaggaacgattccatagcgttttacaacaagattgtcttttaagcagtaggagaagggggtccacaccatccagacgttcacaatctgatgtggcagactgatttaggctgcatttctcagccta

SEQ ID NO: 55719 - DNA, 1501 bp, Homo sapiens
gcaggatgcagaggaaagagctgtctgcgaatgggcaagagagaaggtgggtaaatacagttaaaccacagtgaccgagggcccagcacaacgggggtgggtgcggttacaaatgccgttaagattcccgccaaggcggaggacgggggtgtcagagccgagcgaggcctgtgggcgagaataggcctgacagccattctccgacctgcgtgggcgctgcaggcgcaggccagaggccaagggagaggcgatccctggggctctgcccgggtctcaggacggcacctcacccgcccgagtcctgctccacaggattctccgggtaagctagggaaggaagaggcgcggcctcctgagcccgcatctcagagcgccacgtccctcctggctcagcctcccaccaggctccacagcttcggccctcctcaccgcccgcctccaggctccccggcgcggccttgtccctgctcccgccaatcggcgtcgtcagcaatcgcgaaccggaccaatcagcggccgcagagtgtgggaactgtcgccatggcagccaggaggcgggcgcgcgcggcgggaggaggggcagagcggagcggtgggccgggggctggaggacaggtttgtgcgctggacgcaagcaccaggcgcagcctcgctcgccgagacccggccaggtaaggccggtggccgcgcggtaggtgcggagcagcgcggcgggagattaggggtgggggagtccggagataaggctccggtcttcgcctgccttgccagagcagagaggatggtgggggccgtgctgtgggcggggcaccggcggggagggggctcccagcgcgagccggaggcgctgggttccctctgctccactcgcagctgggcacccgagctttcttcggggtcgaggagggtggctggctcttggcggggagcaggagagggtaggtgccaaaccgagaccctggcggggtcccttcgggtttgggcaggtcgatgggcaagggggtgcccactagtgaggagggacacccaccaattccaggcgatgctcccctgtgccgctcagcaaagctaggcccggggatcctgctcttctccggtctggttaagccagcaacctctgacacttaggagaaagttagtgtaagtcgtgatatgcttttcacttaagtgacaaattaggtacgagatgaacccttttggttttaggagatgagaaacagtatttccttgttgcacctgctaagtggcaactcagtgagcaaatatggttattgtggttggtgtttgcaacggtcttagatgacagttattttacagtatcaaatggctgggagagggagggaaagaaggagagagagagagagaatatgagggaatgagaatgaacgggaaccattatgatttttgagagacagaacctcttgaaattctatgtctgctaaacttctaaattgaataatgtacattttatgcaattgaataagctagtgctaccatttaa

SEQ ID NO: 55720 - DNA, 1212 bp, Homo sapiens
gtgtagaggtggtaaaacttaatcaccgaatgagaatatttgggtttgcttcaggaggtcgcaagccacttcttgattagtagaaatgggaaattaagggccaccttcaggcgtttaactgaattgtcctggggatttaatttgcctttcgacttaatgctaaatttttgttgtttttggtttttaaagtaatgtaagtttatcgcgccaacggtaagatgtcgctctggacgcgtgcacctgctctcgcaatcaccgactgcggtcagcatcttccttagagcagcgccccgggccacttggatcccggtctcaatttactaagcgaacccagaggatgccccgagtcctggaccgcagagccgctcgcgagaggcaccggggctgtaaccgcgcaacctcgtgccgcgggcggaggcgagggaggattccccggccggtgcccgcccccgggctaaagtgcggcgcgggtggggctggtcacgcgcctggcttcctgcagtgcgaacctgggaaatccaggcgacttcgcagttgccgaagggatctgaagaagtgggatgtgcaaaagcgccggctggaaatcccggctgtgtctccgtcaactctttacgcaacagaggtctccccctgcccttggtttctaccgggccgcctgctcccactcggcgaaaaaaattacacaacagcagccgcggcgatgacgtggagggctgccgcctccacgtgcgcggcgctcctgattctgctgtgggcgctgacgaccgaaggtagggggcggctggggtgggctggggcgggggctcctggcgccagagggtcctcgcgggtcggctccctagcatcccgccaggggacctcaacttcctgggggctgagagctctattttcttttctatttcttctcctttttttttttttttttttttgagacggagtctcgctctgtctcccaggctggagtgaagtggcgcgatctcggctcactgcaagctccgcctcccaggttcacgccattctcctgcctcagactcccgagtagctgggaccacaggcgcccgccaccatgcccggctaattttttgtacttttagtagagacggggtttcacagtgttagccaagatggtctccttgacctagtgatccagccgcctcggcctcccaaagtgcggggattacaggcgtgagcccccgcgcccggcctgggggc

SEQ ID NO: 55721 - DNA, 1973 bp, Homo sapiens
ctcggtatttggcgcctctctcgcatcatccgaggggccggaggagagaagaaaatcagggaatcggtaaattggaaaaatcattcatccgcatatcagtgggtcctcctggctttgctaagttaggtctttactgagagagggaggggagtgttttgatcttgtggtgaccttcaaacgttctcttgcttttttgggaactcgtatgggcgtgttctgcgttaacttaaacaggagactaaaaggctgaaacgcgtatgtagagatatttaaactcatttctaactagaagaatggcaattaaacaacaagatgctgcttgacccttactaggctggccaaaatacgctcctgggtgccgggtggtggaggtggaatgtaggaatcccggaggcgcgctctgggcgccccgagtcactgcaggtggaggagagccgcgtgtggacctcaccgtggagaccttggcggcagcttcacaccacgcccttgctgcttgccgagcagcgtgaacggatgttgaaggcgtagagccaagtaaacagtggacatacaatgcaataccatttccacagtttgagaaacagaagatacagccttaaagagaacaaaaattacatgttaaacaccttagaatggctgcccgatgggagagggaagtggaaataaaaacgagtgaatagtatttctatacatttgcaataagcaatgtgaaaataagacagttccgagtgaagtgtgggcggtgaagtggaaagccaaaattgcgcttgtctccgcgctgcggacttgaaacgcctgtcactgcggtctggaaacgcctgtcgctgcggtctggaaacgcctccgcgctctatcagtctgggtctcctcgagctcgaagtggcgccagtgggctgccgccgcgcccacccggtcccatgcccgtcccgcgccccctcccgggcccggcgccccctcctcaggggccttgggtccccgccactttcgtccggtctcggtccccgcggatgctggtggtggtggagaagggccgcgagttctcagggaagcggagagggaggaacgccgtttggctgtgcggcggcgcccagtgacggcagcagcagcagcagctcctggaggaagctagttccggctcgtccagccacgaggagcgcggcggcggctgcatgagggtcggaccccagaaccaggcgttggtgctggactttggcaccggaagagactgtgaaatggaaaaccgtttcggaagctttcgcctaacaaatcatttccgcctacaagaaattcctacaccttaggatggagcatctgtttgcctggctgctattctgcgtggaagcaaatttaaagtggtacaagaaaaaaaaaatccagtcatacaaaggaattcgtcagattttaatgcaagagattctagcccgtctttgtatgagaatgtctttaaaggttgttgatatagaaaatgttttaaagaacgttaggttttatttcagaaatgaagttgaaaagagcaatttgtaaagctgtagttaacagtcctccctagttggagagctctagaactggaggttctctatgtaggttataccactagttgatttgaaaagataaatgcataaatgcttttccttggaaacaagactgcagaaaattccaaggatctagtccttgaaaaaggcgaatgctgttaagctgttaaggtactacactctgtacctttaaatgaaaatacatggaggtcctgggtgagcgcttgggcgctctgaaaatagacgaggtttcccaaatttgccttctaaattttgatttgttgatttaaatcttctaaatttatgtagtctggcactcaggtttgtattccttttaagcacatgttagtgtttttgatattttcccttctccctccgaccccccaattcttcttcttttttttttttttttttttttttttttggtagtcacttttcgtt

SEQ ID NO: 55722 - DNA, 1463 bp, Homo sapiens
caaaaaacaaaacaaaaaaaacagcctcacccttgagcccacctgcctggcgcctagggagcccccaaccctgccggctctccacctggccctgcgtcctcccccagcttcccccaccagctgaccacccctgggcctcccgctaagagcccttctccccgcccagcctgccttcccagcccagctcagaacttaacacctccggatctctcccactaaccggacctcacccccacctccgggtctcccgcctcacctgtctggccttcgggctcccaggctccagctcaggtcctggccacccccgccccgtctctcctccaggtgcgccccctatgtcctactccacccctcccggagcgcccccgccgctttccggatccccctccagctctcgtcctctctgtctccttgggatcctgcgttctctggagtcaccaccccacccggctcaaccgcggctccccggacctgcgcgcgacccggcggggctgactccgagtcgcggcctcccggtccctgccgcccgcccgcgccgcggctcccgctccgcgccgggtcccggccccgcccgccgccgccgctgcacctgctcctgctcctcacgccacggccgtcgcctccccgccccctcccgccgcccgggcgctcgcggctggccgtcctcccgtctgtctgtccgtccgtgggtccgcggagaccgacctgggctaggcaggggtctaggacggcgggaggggggcgcacgaggagaggaacggggccggggaccgccagggggagcccgacctgcaccggagcgcagggggcggggccggagcaagcccccgcccctcccgcgcccctccccgcccccgccctccacctcccctcccgggactcacaacccggcctttggagtttttctgatccgcggaacccagaggttcctcctgcccacgctctacgaaagtggggggctgggagggatctgtgacccgccctcccagtctggggccgccgccctgtcgccctggctcccctcccccaatatccccatccgtatttgggtcagtaatccgcctctcggccgcgccaggtttgcaggttccccgggaaaggaggcgctgagaggcggcgccaccaatcccagggctggcggaaattaggcggtccgaggacttctcaacctgcagctgcttctctttgggggatgctcttaatcttagtcttgaatcctttgacaatctgatggaagctcagactccctctcattaaaaaaaaaaaaaaaaaaaaaaaaaaaaaaggcctcggcaggaaaggagcacagtttaacacctgctactgctgtggggcagcctgggcggctccatcttctcagccattccggccctactttaaagaaggtttgagccgaggccacttgctttacactttctcacacctgtcacctgacttcttccacgttaggtcatgggtggtat

SEQ ID NO: 55723 - DNA, 2257 bp, Homo sapiens
cactgttgcccagacttgagtgcagcagcgtaatctcggttcacggcagcctctgccccttgggttcaaatgattctcctgcctcagcttcccaagtagttgggattacaggcacctgccaccacacctggctaatttttgtatttttaatagagaaggggtttcatcatgttggccatcaggctggtcttgaacacctggcctcaagtgatccgcctgcctccgcctcccaaagtgctggggttacaggagtgagccactgagcccggccttgctctccctttattataggcacgtatctcatctctccagctacaaggtaaactccctgaggtaggaatcaagattttgttttcacaccatctggtacaatggtaaataaagaacacaggctgaatcaaaatgaatattctccatacaatcagccaccttggttcagaatatgctggaactttactagagaaagccagtgggatctcaggtggaagctaaagggatctggtttccctcagccttactgtgaggctcccacgagggaggccccagccctgaagcagcattataatcggatcggggacactggcttcttcccagagggctgtgatcacctgatctggggaacccagcctcagacaggagaagcccccaggggtccgaggtgtctctggaaggggggatagtgtggcacggtcctctgtacctggtcgatggtgttacagtcagatgaaaatctgttcaggatgctcccaaggggcgtggtctcaaaaaacctaagaggcagccagaggaagagttactcatttgtccattgatttacttcctgtttactgaatgagatagttaattatttcatgtaagtgtctctggagtcattcatgggtctggcatcctctgccaatttgtagacatctggcctgtatccccgtgaattcctgcagctgcccaaaggggcgctggcctttcgttagcctttcagtttctcaagcccatctgacgactgccgcctttctcagctgccggctcggcctgactcagcagctgtcctcctgggacacagagtcctctccagagggacaacctgccaagaggaacagggccctggggacagcctgccggctggctgacccagagtcagcccaaccccaaccagggagtttcagaactacagagctggggcaaatagagagtaaaagtaaataaacttggaggccatatctgtgggccacagaaaactcatgaggctggaaagtaaaaagtgcagttagattgtgaggtctagcctcgacaaggggccagaaaatctgtttgcctgttgtgtttttaagccaagttggccaaccaattgggcagggacaactttaaacctctttgacatcaagtggcctttgagatttttatccatcccattacaggaaattattaatagaacagctacctgttcccccagtgtcaaaacctgaggctggctgagggagagagagtgaggggagggcagggagctgaactcatgggtggggatgggcaaattacacccacttagggaggagaaaacaatctttacttggatgtgcagacgctcactttaaagggccatggtaacaattaaatgagctaaccacacacaatgcctatcacagtatctggctgagtaaatgccagtttctccctgcttcttgcacaaggagggcacttttacacacactgtctccttgagtcacccccacaagcttgtgacaggttgtatatccccattttatagatgggaagactaaggctcagagaacagtgacttgctcacagtcccagcctggccaggggagacgggtacctcatgggggctaggatgatccggtttagcaggctgcggtgcagtctcttggccaccttcagccctgtccactccacagtgacagacgtgacgaggcacagcacaatgcccaggctgcagagcaccgtgaacaccatggcatagacagtctggtcgagggtgcactccttcacaggcagagagtgatttggagttccagggtgcccatgggctcagcccttcccccatccccactcccaacctctgccatgggccgccagtcacacctggctgagggagcagttcctggctgcaggggtcagggtcagggcgctgtcggtccacttggccagccagtagtcgatggccaccaggaccatgtgcttgagcagctgtgagaagaccagcaacgacaggagcaggatgccggcggaggacaggtacttggcg

SEQ ID NO: 55724 - DNA, 645 bp, Homo sapiens
ttgggtgcaagcaaacaccgtgtgagcttgaaaagagctgaggtcagcacttcacacagcgtttgggcaggttaaatactagaaggatggaattggttgggaacaaatatgcagagtaagtgatgaaagggcgctcatgatctctgtgcagtgggaaaagctgcagccggaacccgtgcttggggcactgcagggaaaaccactgctggttggtttaggcagtaatgatgatggctggtcaaatatttgcccagcctgttcctctcatacttccccagccagcccttagcctgggcaggtgccagccagagttcatggaggcatcagagtatgttggtgacaaacatgtacttaggtgttaggcagctttggatttgagacccatcttggtcacttactggctgggtggccttgggacctttctgaaacttggttcttcatctgtagagtgggaataacaataatatctacctactgaggttgttgtaagcatgagaggaaattccgtgtacaaagagctcggcactgtgcctggtatgtagtaagagcgcagtcgatgctagccctaactattatcattggagggaaaatagtgcaggagccaggcgaatggagactcacagagagagctagctagccctccca

SEQ ID NO: 55725 - DNA, 1352 bp, Homo sapiens
aggaatgaaataggaatgctcacattaggtctatgagagcagcataaattcagatgatcatagcaggaactagcctagaaactggatggacggtttatgagagctgaccaagcagaggttcatttcagctgactggatggtggaatttaccaatcatagaacaagggctttggagagcatatggtgaacctgaccaatgagagctgcatattgtgacagatgggtgattaaaccggccaggcaataactgagaaaaggggattattcagtgaaactgaccagtcacagagtcacaggaaagcctgcatctctgtgttgggaacttgctcctcggagaggtgatctgacctaatggcaaaaggccactctgagctctgcctggcgccagggttccaggaaacaggtctgaagccattcctgtgccagcagcaactgccagcacgcctttgctcatagatcagccatgaggtcaacggtttgagtgactcacctcgtgaaaatgaggcggcagtgttgggccttactgtttctctgtaagcatttaaattgatttttctgcctggttaaattcccccgctttgtttttatacagaggcttaggatgaagctggatatcaggtccaaagacactaccaggtaaaacagccctcctgccccgtgtcctgcaagatccaggctctgtgaccaatgaaactgactaattgaaatcgcggtcaggtgtcagtcatcccagggacagccttgctgatagtcactgcttgagacaaccccactagtcaactggcagtccagggaagccatcaccaagggcctagggacatttctaaccccctcctaaatcaccatattgagtgaggatcccacccactgccacaaatgtcaagaaatcacatgtcttcaggcccccacaaaccatgcgatgcctccctcttggaaagaaacttcaggagctccaggagtttgatatggggagaatctccagagaaggataggaggccccagctgctacaacccttagaatttaccttgtgtaaagttttttcctactgctgtcaccgggtgtcactccctccacccctcatggtgctgctccccaattcaaacagccctcctggcacaggcaaaccatcttggtttgggttgcccagaaggcagaacctgagacaaggacttgttgaatgttatctacttggaaggtgatctgaggacacagatagataggagtagcaagagtgagatagggaagtaggaaaatctaaaatgagggtgtttccttggactcatgtctataggtgtaggggctcaattcttctggaatctctgaaaagtttatagaacgtctcctgcagtgt

SEQ ID NO: 55726 - DNA, 974 bp, Homo sapiens
tattttttcctgtctggcagtctgaggattggagtaaaagcctggaatgtaggaatcacagtggtttgtgctggcttactgacactttccatgtccccagccctttccaaagcctgtggtgtgatccttgggagccccacctgccctgctattccagatcaccctgggccccaatgtgcatcatccattcccaacgtgctccggctccctgcccttctgcctttgcttattccgttgcctccactgagaatgcccactcctcctcctctgcatttctgaaatggatgcttcctgctaggccggctctcatggctcttcctttagggagcctttcccgacaccctctacctcctggaagagcctgctctgcccttcatgcttccagaaaacctttcctgtctgacttgaggcctttgatccactgactatcattctgtgactctcagactcaaccacaacctcttggaggacaagggtcaggttaggcaatagtagtgcctgttacataatagggaatcaatcgatctttgctaaagctatgtgcccctgtgaggtggaagggttaggtagtatacccctcttattgatgagggaaaaatggctcccagagagaatcatttatttgtccaagaccatccagaagagagcaagtggtagaaggattagatcccaggtcttcttttgaaaataaatcaagaaggtcagctagagccatgccagtgttccttctggctctgggatgctgtggttctatggttaaaaatgaggtagtgggagagaccgacgagtaatggacgaatagatgaaagaatggataaaaagacggatatgtggatggatacaagtgaatggatggaaggagggacatatggattgaaggagacacagctgggtgactcagtggatgggtaaacaaatggctgagaaggatggatggaggaccatggatgtgcttctccttgcgtgccttcaaa

SEQ ID NO: 55727 - DNA, 630 bp, Homo sapiens
gggcctcagctccccgttcgtagcatgtggtgtctcagaacagatcatatctacaggctactctcactctgtcattctgagatgccaactttgtcacttccctttgctcccagcttccctcaacacagaatgtggtttggaaggtccacataattcttggttcccagatccctgccaggttgagtgtcaggccctgtgaccatggttaatccaaacaagactgttctgggacttccagggcaccccctgggtgggggaggggcatcactgcaaacaaggcggcctctaggggcagcatggctgcctcctgctgttgacacagggcgcgaccttggccctcctccaaatgatctatgagggcaggtcagagaacaaaggtgtcacgccttgcagactgtagcccggagctgccttgtggagaaggcactgctttggccatggctaggcagggagaagggggacccaaaagggtggggtgcagtgaggacatgcaggcgggagtgactatctgggcccctgagagagggctgactggcaggggcccatccacccagggcagggccaagggaggccacagtgtgttagagtcccggcggggctggcaggagactgtgagaagagaccttgccc

SEQ ID NO: 55728 - DNA, 812 bp, Homo sapiens
tattaaatataggaaaggaggaaggtcattcaggaaaggcagtcttccgagggagctgtaggacaaagacgccctggaaacttccaggttcattaatgggttttacacaagcattcaagtggtatttctccttcagaaataacactgtggaaagtgtaggggcctggctcaaacctcagctaacacagctgagtgagtgactctgcaaactaaaaatagcttctttcccactcattccgacagattgcacttagaccctgtgcacaggttgatcctttagcagttttagtcctgctgcaaatgagagctgatggcatttgggcttgacaattacccaatctctggtttaacttttatttccacatttcctgctcctgctccaatggcactgtatgtgcacacacatgcacgtgtatactgagttccctggctgggatttggtgctcctgaaccaaacgtgggcagaatttaaaccaggaacatgactcaggactgtggctgcagactgagcccagagaaagtccttagaaacactgggagtcaagctgtttgccttggatcttctcctaattcctagctagcctctctggcctcagtttcctgaataacaaaatgggagtaaccatgcctattctggcctatttcacagcatcatgctgggatcgaatgagacaatgtatgtgaaggtcattttccttcagacagtgatgggacaggctagacaggcagccagattacaaaactaggttcagccactagaatgggtaggcatcctgattgcatcacaagttaaaagtgatctagactcaatt

SEQ ID NO: 55729 - DNA, 1962 bp, Homo sapiens
actcttaccacacttactttccagccagagagactgacgttaataataaattatacacatcattacaattgtgatacgtgctatgaagaagcacaagacgcagcgactgcttgttcccgtgcatgctggtcggccacctgccacgctcctgtgcatgaaccctcctctctcccagacacacatcaagatgaccctgtctctcccaatgctcccgtcaaaccaacagcagcccaactcccccaacacatgcaagaaccggtcacagcagagtgtcagcaaataggcagggtctgtgccttgtgcgcggccaaacaccgcaggcctcacatctaaaggatgctttcgccaggctgggacagggtctccctcctccaggcatcaggagtgtggggggcacaggtggccccacggagctctgggaccgggcgatcctctccaccgagccctccgcgctgtcttccaggcgctattcgggctggagggctctcgcggaaccagacgctctgccccgaggcaggttcttcccgcggcgccacagcccctccggccctgaccccgccagccggcaggcccctaagtcgaccgcgaagacccttccttccccgcccgcccgctcctcctccgctccccctccgctcccagcccaggatccttcaacccagagcccggctcggacctcagccgcccagcccctgaactgcccacgccgcggccagcagctcccacatctcggcgcccctcagggcctgcaccggcccgggggcggagtcacgtacccaggcgaagagcgcggccgccgcgggggcggcctccgaggcgctgggctcgcgctccatgcgaggacgctccgccggcgcttccgggagggacggcacgggggcggcgcctgccgggggtaggtgagcgccggagccggaccggggacgcgtgatgggtagggcgcggggcggggtctgtggtgggaagcggcccgcaggccgggagagagggtgcggccgggccctcgggccactggggatcagtggtgggcggggccggacgacagccccggagccgcctcccagtcagcccgccccggcggcgctcgcagcgtctccgcccgcagcctcctgtctcgctgggcctctcagcctctcgctcctaccccctcgtactctttatttttagtcataatttcatgtttcatgcaggtgcactgcgcgccacagttcacaaagctccttcgcgtttttgtctccttggaggcccacgacagcccagaggggctgacagggcagcgatggcatcaccatttgcgggaacaggaaatggagcctgaggggtagggcagggtcctgcccggcgtctcaggcgcaattgtcttgagcccgctttggtgtgcgttcgcaaacatctgagggggcgccttgggaggcgagtggagtggcacgtcgccggtgtcgccctctgcacctggcacggagcgggaacccgcgcctcgcgacgctgaatgggggaggctggttagcgtcgactcctgccggggcagcctcggcgctccgggcacggccctgagctcattctattaataatactggataatcgtcacccaacgaacatttccatataaaatggcttttctcagacagcgtcgtgttgctgatgggagttaattaagttcaatttatctgaaggaaaatatggcaccgcgtaccgggaatacagaacacatagggtcacattaaagatgatcatccacattcacattcggtagcacttggcccctctgctgacacgggcctccagcactcactgcccttcacccctgggcttctgggaagtgtctccaatgagctcttacactgtcctttcctgttctttcactccatccacttttaggagtttctgcctgtaagaccacttgagggcagcccctcacctttatctctccaacctgtggcatctggagaacgtcgatgacca

SEQ ID NO: 55730 - DNA, 955 bp, Homo sapiens
ctggctcaagcgatccttccgcctcggcctcccaaagtgttgggattacagaggtgagccaccgcgcctggtcagaagccacgtttttaatataaaagttgtataaccctaaagtcaccatttattctattacaacgatagtccatgaaatacataaattaaggacctgggcttcagaaatgacagtggggatggggagcaaaacccgaggaatgcagttacacgatcatgtatttttggagaacttgggaaagcaaaatagaacggcaagtatttcagcatccctaccattatacttccctttgtgtcgagagaccccgagggggcccagatagttttggggtccgcagcggccggcgaaacgcaaggagcaaggtcccgcagcgcacgcctggggaggggtctttgtggggatggcggctcccggggcaggaggattcgccagaggcggagccccggtgcctgggggatgtagggacaccccacgcgtggcgcgagtttccacacctggatgagtccgctgaggacgccgaagagccagtgtttgctgtagaccgtgctccctatgcagtctccaccggccacctcctcctcctcctccttgtcgcgacccggcggcggcggcgaggggttgcggtccatgactttgtcgcgtcccgcgcttgaaggccgtgccggaagctgcggaggagacgaccggcgccctagtgccagagcgcccggcgtacccggtgggactccccctacagcgccatctgctgttcggagcctggccagctgccaaggcggcttgacctcccccaccccatcctatcgaggaccctggcacgaacatactcataattatttgtcaccctcactgaatcaggtgttccatttctccaggagctcttagactgattgaagaaggaagggtggggagcagtgaggaagcctcaggaacagatgtgaatct

SEQ ID NO: 55731 - DNA, 861 bp, Homo sapiens
tatatagctgcaacctaaacttggcagcagtatagcatatatacaaatacatgtacaacataatgtaattcaattacatcaactagcttgataataactcttccagtgaaacatcagctgcatgagagcactagtcttctctgccttattccctactgtattcccagggtctagaagagttcctgccaatactaggagttcattaaatacatgttaaataaataaataaataaatggatgagtgaatttcgcaagcatctttaccagaaaggtaaatagattgaggactttgtgttaaagagaagcatggtactatttggacagtactaagtccaaccctaaacaggagtaaacaaagatcacagtgcattgcacacttgccacaggtcagatcatgcaggaacaaggcccatagagcccagcctagagttactgtaaattccctcagccatttcaccaaaggtacaagtaggtcatcggctagagtttttgcaaatatgttttaaacaatgtggtttgaaataaagcatactgttctctgagaatggacctggattttttcccataattagagattgtaaaaagtgaacctagtaagttagaggattgcaagatggctgcttttgacccaagtttggaaaacaagctgttgagtaatattttttttccctctgaccacagctgagaccaaagaagctccaagtaccccacattgtagagagaacatccaagaagtagagccagatctcataagcccccaaggcttatgaagaggtagcagtgtaggccttcagcaaccaaccacctcctcatccccattgcaccctccagtccatataaggagaagactgaggaaaggaa

SEQ ID NO: 55732 - DNA, 3175 bp, Homo sapiens
tttcaaatgctattcctagtcccacttcacttctaagattctgactcagtaactatgagaagaggcttcagagtgtacttttaaaacaaacaccggccgatttaaatgctggtggaccatacaacaaattctgaaatacactgacctaagggaaaagatattctctactatgtgcagaaaaacttagtacatgctaccaaaactttttaaaaactatttatagaatatcatttttaaaagcacaaaatgcagaaaaaatgaaaatttataaaatttcaattgaaaaattacaaaaaattcaactacaaaattaataacaacacatgaagttcaaagtattgcataacctgacaaacatagttttcccattttaacagctagtcaataagattcgtttcccatccagaatggcagaagtcagtttcccagccgtatctcagccctcctgtggctaatcagtagaaatttgctctttttatttatggatagaagttagggcttaattttcataagctctgcatcccaagcattggccatttgcttgggtacaggatgggatttctctactctctgctaggcatgtctcagtcttggagtataattgtgaactcagtatattccctgaggtggatgagctaaataaacatcatgccctgagaaatctgccatctgtaaatttccgcagtgggagataaccccctggaagtttttatccttctgcactctacaccaagagtacaggctgggcccaaagcatctttaacctctcgtctggaaaccccaagggagggtgataaatcagaccagcctagaggaagaaacagatacagaaaaccacactcctgctctgacctctgtgtggcttctctaaggagcactcacatccagtgagtatgtggcccctgctcagaatgaatcctgggtatgtgccctccatcctccagagttcttaccttggagagcctccttgaaaaacgaacgccagctttcactggtgactcccatgaccaaggagcagaaaacaatgcctgtgaaaagcctcattgtgctgaagagaaagaaagacaggggcagaggatcataaaaaaaaacacagatctatgttttgaggactgaatttctttcctttttttctttctttttttccttttctttctttctccttcctttctttctttcctccctttctttctttcttttttttttcctattgcccaggctaaagtgcaatgatatgattaaggcttactgcagcctcgaccttctgggctcaagtgatcctcccacctcagcctcctgagtattaaggactacaaacgtgcaccatcacactcagctaatttttttttttttttttttggtagagacaaggtcttggtatgtatgttcggcccaggctagtctcgaactcctggcctcaagcaatcttcctacctcaacctcccaaaggattacaggcatgagccactgtgccagccaaaggactgaatttgaaagactaattccccatttccatttgtttgtatgagaatcataactgcatgaaagattgaaacgggttttaagaagaagcataaacccttaattctcagcccagatctctagaaagaataagaggattccaacgtgttatttggtctgtggtcaatttgtcacccaatacagcagactaaagtcaatcaagaagcatttcctgagttcctactctcctcagcactgaccccgtaatgaggtagaaaacacagtttctctccaattgaaatttgacaattatgtgagaaaaggatctcaaaagagtcaaataagagaaattactccttggaagaaacctcacctgtggacctttctccagatgaaatttcagtaaaggcagagctgctggtatcttctggccgtggagctatagttggtacctctgctggctttggcattaatgggagaacggttttaaatccaacaacctgccttgccaaagtcctttttgctcaattctttgggtattttaaaaattaacatattgggtaatagtgtttccttatctagaagtagttttccaaattgggtcatcaaggtatttattttctggcagtttttcttaattgccacttttccctctttttagtttcctgtatcacagaagagttgtatttgcaaaatccagtgtgggaagacagaggtctttctccactttcttctctttgtgtctttccattcttaactgtttagtaggaggtcttcccaaaaaattgcacatagatattatgctgtaggaagtgatcaatattattagcaaaagagatgtttgcttgtctcttgtgacttctctctaaagaatgtaaggacacagaacaagcaagacttgactgtaccattcatgggatgaggtaatgattctgggagaatacaaggacaggaataacaccagaagatcaagggtgaaggcctttgaggcataaaaactcttttttcatataaatatgtattattctgcactttcttttaaacttactatttattggaagtctttccatgtcgggcttgttgctttttttttttttttttttacagctacacagtattccattgcatggatggaccataatttatacaatattaatggctgttttgacagttattaaccttttgatattacaaataatggtgcatttattaaccttgtacatatgtctcttgcacatgtacaaatatatctctaggataaattcctacagaagaaactccatggtgaaaaagtatcagattttataaattttttgtttgtttgtttgagacagagtctcactctgtcccccaggctggagtgcagtggcatgatctcagctcactgcaacctccacctccggggttcaagagattcccctgcctcggcctcttgagtagctgggattataggcacatgccaccacatcaggctaatttttctatttttaagagagacgggatttcgccatgttggccaggctagtctcgacccacttacctcaaatgatctgcccacctcggcttcccaaagtgctaggattacaggcatgagccaacgtccctggccctagattttataaatttttatatgttgcaaattgccttccatgagggctgtatcaatctctactcccaccagaaatgagtgaaagaacttggttccacattgtct

SEQ ID NO: 55733 - DNA, 647 bp, Homo sapiens
aacagagtaagttttaaaaatcactccttggtgtgctcctcacctgatctgtgctgtagctgagctgcgggtccctgtctgccagggagaggtggctgctatttatagtgagccttgctggtctcttgggagggaagaaaagctggatgtggtccctggggaaagtccctgcaggtcatttcccctacaaactggtctaagacaagttcctggatgccggtggtttcttcatcccgggtcatttatcccagttgtgtaacctatgggaacaagagaggtttgctgtgccttggcaatggacagggtgctagatcagctctgctcctcagcattgggggaagtgcagctgcagagatgccagtgggagccccgtgatggcggcacctgggctgctggaaggtgtggagtgagggcagctcttcagccagctcctgactataccggtcatttcctcaggatgggccctgctgggccacatggcagatgaccctgactgaaatccctgtgagttcatgtctaaagctttaagctttaaaacggacagcctacccctgccacatctcatgtgtgccctggaagcctccttccacccctctggatgtcctgatatttctcagcacagaaaatctctgctccgctggcttagc

SEQ ID NO: 55734 - DNA, 1348 bp, Homo sapiens
taagtataagctttatgtctacacatgtataatcatttttccccaagtataagtctctttttcatggaggcacagcctagacctggttagccgccatctcccctcattgtatgcccaatatctattgtagtatctgctgcatagaaggcactcgatgcgtgaatggataatgactgatgatgaatcaataaataaatggacatgtcattgtaaaaaattctaaaaatctagaataacacaagctgttggcactacctagaaacacagatgtaaaacttcctaggttgtgtttcaccatgggaacatgtctttgaacaaaaatgggatcatattctattgcactctttcccttaagagatacttctccaggtcattaagtgctcttccacaatatcagtatatggcagaggcaaggtcataccaggtctgtctgaaaccagggcttggctcttaacttgcagccatactgcctccaagtctaggtggctgggttttaggatctgtaatgggaactcagtgtcacaacctctactgggaaggtattctggtgttgcataacaggactttctgttagagataaccatggcaaaatggaatagagacaaagttcaggtttctgctgccaggagctgagattgctgtgaccaatggcattctcccaaaccaaataatccaacctggaattaccataaaccactcctcatcttttcaaggggtgtccaagttcccagaaaagaacatttgttaagggatggaggcaaggaggtggagaagaaagagcactggccaaggtatcatgagtgtcctgggttctggtccttgaataagccatttatcttctctgcagcttctccatctgataggagtttggaggcagagttttttcttaatgagcaaaagacagtcgtgcctaggagatgtggtgtacatgttagaaagaagggactggctgtgactctataaaagatgaattcatacaaaaacaaattaccctttcccagggagaaagtttggatccagtaattagagatctcaaaaagtagaagacctgccctgtgaggcctgtggcctccaagtttgaatgctgtgtgtcagctttaaaaactagtttcttgctgataaatgtttcatattaagcatgtgttgagagtactccttgcctaccttcactagccactgtttccttcccctcctcccttgtcccttcattctctccagaactttctgctaacttccattctcttcaggacttcagcatggttgggagaagatcagaaaggcatcctcactgtttttattttagtccacttgacctttggggagtagttccactggctcataagtatca

SEQ ID NO: 55735 - DNA, 842 bp, Homo sapiens
tattttgttttcttttagacacagggtcttgctctgttaaccaggctggagtgcagtggcgtgattatagctcactgcagccttgacctcctgggtctcccacaatccttccgcttcagcctcttgagtagctgggactgcaggtgcacactaccacacccggtccatttatttttatatttcgtagagacaagatcttacagttttgcacagagtgatcttaaactcttgaccccaagtgatcctcctgccttggcctccaaaagcattgggattataggagtgagccactgtgctggacctagtctgtcagctttgaagctttagatatgaactcagagggacttcatttcagaggcatctgccatgtggcccagcagagcccatcctgaggaaatgactggtagagtcaggagctggcttcaaagctgccctcacttcacaccttccagcagcccaggtgccgccatcacggggctcccactctcaactccgcagcctcagccccctcaatgctgaggagcagagctggtctcctgccctgacagctgccaggcacatcttgttccctcaggttgcacaactgggataaatgacccgggatgaagaaaccactggcatccaggaacttgtcttagaccgttttgtaggggaaatgacctgcagggactttccccagggaccacatccagcttttcttcgctcccaagaaaccagcagggaaggctcagtataaatagcagccaccgctccctggcaggcagggacccgcagctcagctacagcacagatcaggtgaggagcacaccaaggagtgatttttaaaacttactctgttttct

SEQ ID NO: 55736 - DNA, 2401 bp, Homo sapiens
ataaagtttatttaatcataacatacacatgcaatctcttcctctttaccttgtaaatgaaaataacttgaatagcaaaataaaattttcaaataagccaaaacttaatttgcttgtaaggatatcaaagttttagtcacttaaaagttgtattaaataatctggtacgtaactgcagaagagatttctcaaggatctgtttgtgattatctaatcttagaggttagaacgaaaaagatgaagcaaggtttagaacatgttagtcaggcatggtagcacacatccataatcccagctacttgggaggctgaggcagaagaactgcttgagcctaggagcttgaggctgcagtgagctaagatcatgctactatatgccagcctgggcaacagaagaagaacctgtctctagataaataaagttttggagtatgtgaaagaatttttcacctgtagatagcacttctcccttttagaaaaagacaaaataagtttactagggtttctatattttaggtccaaaatatattaagaatcaattgataacgttgataggtcatgacggcaaaccagaaaaatattctgatgtgttcattaaaataaaataatttagccaatagccaggcgcagtggctcatgtctgtaatcccagcactttgcgagggcaaggtgattggatcacttgagcccaggagtccgagaccagcctgggcaacatggcgaaaccctgtctctacaaaagtttttaaaaattagccaggcgtggtgatgcatgccagtagtcccagctactcaggaggtttgaggtgagaggattgcttcagcctgggcaatcaagactgcagtgagccatgatctcaccactgtacttctgcctgagtgacagagcaagaacctgtctcaaaataaaataaaataaatttagccaatagtagttagagcctttcttttctgccaggatcctaaatagaaataagccaatgcaagacaaatccctctacttctgatgtaatggtcgtggaggagcaggacaatgagaagctggtctattctgtcttaatgacagactggagcattctgttagggtaacctgagtctcaacccttctacttagccataactgcagcaagaagcctgaggacctgcagagcagagcaaagccagaaggtgtcttcaagattccattcaaaataagttatatccatcctgataaaaaatattcctagacctatgagtttcttctacacaagaagcagagaagaccagaagcctgggcaattggtgtcatttctatgtttgtcactttattcacaccaataataaatagatatcttttctttcttaatagccttatactaaagaatgctttaaatgagccatgcaggtgaatcaggaaggactgcaatagataatgtgcaaagtactgaagttagttcacaaaagccattctgtaacggtattgagctaacaggccaccgtgtgtactatataaaaacaggtctcctcaaaatctccaggtttggactccggattagtctcccaagaaatacagtagataaaatcacatcctttaattggaagttttataagacaacaccttgtatctcactacatacacaaagaatgggactgcttctcacctttgcttgtttagaagtattgagtttgatagcagaaaccttcccagcatgatcacctacaaaaactctaagaatagctgtatcccagcagagagctgtgactcttcggcctttgtgttctgaagacacatacatttgttccggtttcccacgacgctcttgatttaattcccaaacaaccacaagaccttgactgcaagaattgagtcacagaggcaaacgtggcaacagtgaacaaggtacaattttgttgcatcacagtatcaactatatcaaatacatatgcaactcttgttcttcagaaaagaggaagtattataaaaagtcaaggtattaatttccttgttttagtcaccaaaccagtttaataggagaagttaaatgatctaaattatctctgttccctttatcttttaaggcctttgaaatgttgtaaccttaaattagcattttctacaaatactaggatgaccagctgtccattctggtttgctgggtactgagagatttcctgagacacaggagtttcactgttaaaaccgggacaatcctaggcaaaccaggatggttggtcaccctaacaaacacatgtgtcaatttaaaatgcatttgaaaaaggacagatagttttggaacagattcttacctggtagctacagcaacataatcatcatcatgtaaacaacaggcgacttgagaaattgcaccttcctagagcacaaaagaaaatacattttttaaatctcaagttttacattatta

SEQ ID NO: 55737 - DNA, 2371 bp, Homo sapiens
ctgataattgttcaagttgcgttaagtgtacatgagggttcaatttattatcctacttttgtctgcgtttgaaattttccacaataaaatttaaaaaatatatacataatattgtacaagccttcaacagctctatttcttgaaaatctgttatctcctccctgcttctttttccagccttatttcccatcttaacctctctattctccaactacattggactcgactctttttttctttttcattccataaacttgctgtgcctccatggtttaatatatgatgtttatggaatcttcccccatttaccaaaaccctacctttctgcaaagctgagtttaaatgttacttctgtgaaggcactctaccaaaaactaagaacatagaagttggcgacaaatgcttaaccaaagtaaatgaaacaacttttgggagactggcttgcccaaggatcacagagttcataaatggtagagctgagattagaatacgcgtctcctgaatccaaatctcatctttccattatcgtaaaatagttcagtgtttgttgctcacacatcaaatgcaaacatgtttctcttttgccccagtaggtgcgtggaggaagaggagaaagaagtaagaaagatagcaaaaattgaagaaatgagaaggggaagttgcagactgcctcattttcacaatgggatctttctatccaagaagaaatgatcagaaaacaactctctgcctcagacaaatggcgactgactcatttatacattcattcattcaacattctgagtgcctactatgttccaggacctgaacacaccgctagagacacagggatgaacaaaacacaatccctacccacaaaaagctccttgcctagtggaactactacctttttaacagcagtaactttaatatcttgagatttcttgagaggagacccagtaaccaattttcaaagccaggctcacagaccagcagcccggaggtcccagcccagctccaccacatccagggcagtacctcgcagctctcagtagatcggatcttgtctcccggcttagcgccggggaactcaccgcgcactaagagcggaacgtgaacttcagtctcccctcgcgttcctccccttccttgctgacgtcatccaggagagccgcagactggaaacaacgctactaacggcacttcctcatcacgtgacgagtcacgcccctccttccgcgtggtccctccccctcaggccgcggtcgcgattacgctctctacggcctgcgaccgcagggccgttgcgggctggagacacggcgccgactggaaccggaggagctctaggccaaatggttgggccagccaggatcccaggacccttcgccgctcgagaccggagagaggaaacgaaacaggcgggaacccgtgggggagggagggaactagcggaaggtgtcatggcggccgcgctcttgagtcacgtgcccagggcccgccttgctacttccggtcacgtgccctcagactcctcgcagccagcgatggaggcgagaccccctagtaacagaggcggtggctactgctgcggccactgggtttcggcctcttcccagcagcggctctaagaagcgcagcggaactcgaccggatccaacccagttagttacttcctgtctagagttgtagcttccacctggtaagtttagaccgaagaatgcaggcgggcgggtgggtgggcgggtgaggagctgacaggcctgggggccgctggacggcgtggattctacccctgttcccagcgtcgctgtcgccgtcctcccaacgcccaagcctggcgtcttgtttgcccttatcccgaggcgaggaagaggcgacccctaatctacttgtctaaaggaaacctgctcttaaattgagagcaggtttacccaaagccaggatcagatttggcttatgagaatgaagtggaggcctctcccagacagagaagcccttcccgtcaggaaatgtgctgttgagtctgggattctgtaagagaaaagctgtcaccttgttgtctgcacaccttttgcttccacctgtcaatcttacctctcttaaaaaccttaacacgtgccagtccacacactcctagttttggtcatttgattgtcgtgtaatgatgaaaaatagaccatgagtacctggatatatgtaattattttgtaaatcccccagtgttctcaaaggccaaattaaataaggaggtgacttttcttatttttttttaagagacagagtcttgttctgtcgtcctggctggaatgcagtggcgtgataatagctcactgtaacctcgaattcctgggctcaagcgattctcctgcctagacctcccaaagcgcca

SEQ ID NO: 55738 - DNA, 2553 bp, Homo sapiens
cccaggaggcagaagttgcagtgagccgagatcacaccactgcactccagcctgggcaacagagtgagactccatctcagaaaaaaaaaaacaaaaaaacaaatacgcaggggtcagggaaggctgtgagctttggtctgctacaatgagtttcaggctcactcccatgccctgcctcctagtactgcggttggaagcagaggagatgtgcttagaggacggagatgagaagcaggaggaacagcagcagctgcagtttgtattctggtttgcttttctcctggaaacagaatctctcagaagatacctcctcagtcctcaaaagggtgcatttcaggttggctctcctcttgttggccctcgctggcccccgtctcactctggagtctttgattccacatggataaacagcccccctagttgagagctcctcaactgccccaggggacattttatggagttaggggtggcaaggaactggaattattgcctaatcaattgcagtctctctcctgtaccccccaagagagcaaagtctaaagccaactcacaaactcacattttcaactttcacccatgccctgaaaaagtgttaacactggaaccccacagcctaccgtgaagaatcgattccacaaagaagggagagccttcccagtctgccccctttcagaccttcctcaaagaactcctgagctgtgctgcctccctaagctgtccccatgcgaggatgatagtgagatgtgtaatgggcctactgtgacagccagccctccttgcaagggagccctgccacgggtgcaagctctggatcaaggcaggaagctgcggcccatggttaccatggagatgctggcacagcctatacccatctgtggttgacaggcagccttcctgaggaaaggggaggaatttgggtgcttgaaaaccagcttgtggtgggggtcgggtcggggttgtctgtgacatcatgagtttgcagccaaaagacaactggagaggaagctgaggctgggagctctccactgaggtagccttcagccgacgctgtagctttaaaagctggggtgtggcctcctgcagagtgaggccaagctacagagctgtcaactccaagcaagggctgttggaagaagctctggtacagtggaaaaaacccaggagtcagagactagagggagaaccacacccacagtgccaggcatgttgtgaaggtcatggtacatggtgcagagaagaaacctctagggtgcttgggaagttctaggccctgagtcaccaccactgaaacactagggcggaccaagaaaacttcccgtctcttctctgagcacgaagtctccactgtgtgactaatgtctgccctgtgggctaggcagggttactgagaggccctgcagcataagtgaggcaggggcaggtgtcaggggctggtgatctccctctgattcagtgggtaaaggaagaccaaggctatgaggatttctctgaggctttcatcccttctgtggctaaaactggagtatgagctcagtgaaactgtcctttgagagagcctgacgctgcaagtgtgtttgtacaaaaggcagagctcggccttgtacacccaagggccatgcaaggctaatgcagcaccagggagagggaggctaattagataaagccctgaagtagccctgtgagccagaggagctgtctggaccttcctgtagccttgggcaggggagggagctagggagtatttattacttttgccctttgaaatccaggaagcaaagggctaagtacttgcttactatcctcccagactgtgagacaggaagtcagaggtacagagtggtgagtttgaaatccacttggccactttcccgctgtgtggcctggagcaattcaatgttttgtgttttggcaatatcaccagttaaatattaaagctcctgctttcctcttctggtcagggtgaaaacaccctgagagaatgcttgtgaaagccaccacagctacacgcaagggaaggacctgatgtcctttatctggccacagaagaagccttctccacatcggcaccggccccccacagcctgagctccctcctgagcatctgaggagttttctttgactcctcataagagaatctcaggcttcccttctagcaccctacagaaatgagtagggctgccttttcagggcagtgtcctctgagcaggctcaaagaacagggcagagagcccccttgtccagcagaacctaatttttaaaattttttgtagggacaaggtcttactgtgttgcccaggctggtcttgaactcctggtttcaaataatcctcccatctaggcctgctaaagtgttggaattacaggcataagccactgtgttgggacaagagatatatatatatatatatatatatttttttttttttttgagacagagtcttgctctgtcacccaggctgtagtgcagtggcacgatctttgctcactgcaacctctgcctcccaggttcaagcaattctcctgtctcagcctcccgagtagctgggactacag

SEQ ID NO: 55739 - DNA, 2767 bp, Homo sapiens
ttgcagtgagccgagatcagcccactgcactccagcctgggcgacagagcgactccgtttcaaaaaaaaaaaaattaataattaaaaaaaaaatcgcagggcaagtgggcgcgcttgtagtcccagtcacttcggggagccgaggtgggaggatcgcttgagccagaaggtcgaggctgcaggaagccatgatcacgccactgccctccagcctgggtgacagagtgagaccctgtctcgaaaaataccaaaaaacaaataaacaaacaaaaaaccaaaaccaaaaaaacaagccactgacagttcttgggtatggttgagactcgagatgagatgccagtggggtgggcagtagaaagtgcagaataaaatgtacatttgaactgagtcaccctgcaaggcctgagaggccaaggcttcactgtgagtgggagctggtaggcttagcagcagagggaaaagcagcgtcgagttttggaggtcactcgacttaggtaagaacagactgactgactgctaggcattttcttcctttcgttcaacaaatatttgtggagtgcctattacgtgccagaagctgttctggacactgagaaacagggatgaagaagaaacagatccaagccttcctgagagtaacctccccaggtttcatggatgaggaaactgaaggtcgtcctgactcaggctcatggctccgaccccggcttctgtggttggagggcagcaccttacttagactcccagcgcacgtggagcagtctgccggtcggttgtctggctgcgcgcgccacccgggcctctccagtgccccgcctggctcggcatccacccccagcccgactcacacgtgggttcccgcacgtccgccggccccccccgctgacgtcagcatagctgttccacttaaggcccctcccgcgcccagctcagagtgctgcagccgctgccgccgattccggatctcattgccacgcgcccccgacgaccgcccgacgtgcattcccggtacggtagggccctgcgcgcacggcgccagagggatgggcgggtagagccaactgcctctggttctgctggcctccgctgctcgcgaagggattcctgctcccgggaggtgtaggagccgctttccagaagcacagcccagagacgtctgggcggcggcccacacaacgcatgtgttcggagctcgccgcgctctgcttttgctctaagcgggaaccatggcttctggccacgctggggaaccgaggaggtggccgcacccaagcaggggtcgaaagcccgggtggatgcggaacaaggatatgataggccttaagggtgggggatacctctgggctcgaaatcggcgggcggtgcaaaactcgaggtccagttctcggagcccatagagccaaaaaagcctcagcttgtccggggcgggttcttgaaagacggaaagcggctgagtaccacgcggcttgcatttttctcttgggacgctcgagaggtgggctccgtgagggcagctgctgcctgcagattatagggagccctttgcgcatttattaagaagctactggtgtatctcgggctgcgctaggcacggcgcatgcaaagatgaagcaggcagcatcccagcccttccgcacctcagacggtcagttgagtaggatccgccggtaccaactcctccttttaacaaatagggagaccgaaagctaggagacagtcagggatctctaagttcccagtgagtaggaggcagaggtgaggtgtagaactcgtttttgcatgtctctcgcctctagacgcacccttccctcatcccatgccctcccacctccgcccctacattaaaggtagcattggatcccggggccgttcagtgaagctagcaggtgtccgcaggaactcccttccccctgccaggctagaaaccttacaaggctgtctagaaatagcagtgatttgtaaggagagacccggctccagcttggtgactctgggctgactgcctgcctagaggtcctctcggatttttgccctttggagtggtgtcaaaactagacgtgatactttggggatgcagcctgtgatatttcctccagcgaatgcagtgcagggttggattaacaaggtggaaagaattcgagggttccaccaagtagctattaactctagggctgcaggcctcaggccttctgcagctatttctacactccctgtactgaaactatttcttcatactgggcctgacaggcctttgcaacaaggatcacggccgaagccacaccgtgcgcctccctcccggttggttaacaggccctggtttctagtattgcgatttaaagtctggcgctggctgcgcgccagacctgggaggctgccagctaggcttcacgttgctggcgtctgcttcggggcattcattaggtctgaagtctgaatcccagctccctccctctcacccactgagctgcatagctccagattgcctctgcttacgggcggggcttctcagccttctgccttctggcccgatgcccgcttcccaacggccggaggccgctagactaatcggcttcgccctgcgcgctgtaatgcgcatgcgcacgcgcacaagttcctgggcccgcccatcttccggacttgggcggggcgtaaaagccgggcgttcggaggacccagcaattagtctgatttccgcccacctttccgagcgggaaggagagccacaaagcgcgcatgcgcgcggatcaccgcaggctcctgtgccttg

SEQ ID NO: 55740 - DNA, 664 bp, Homo sapiens
tctttatttcccttcgttccttattcatgttaggttagttttagtgtttagctgttcttagtattgatacagctgataaagttttatggctatagacagaggccaaaaaaagattctgacccctttctaagaatattaccctgatatgaactttattaccataaagttttaataaatcataagacactctgagctatacttttattaatgaaatatctgtaaaatgttttagccatcttttatataacctttaatcctggcatgagtcattggatttaaaggattgcctctgggtttcatatctagatgacatagtgaccttatggcactaaggacagcagccacagccaactgctgctcctgccagccatacaaattccccatgattcattttgtcctacctattgtaatgcctttatcagcagtgtcctcactgctaatgaagaatacacacacgtgaaaaccaacacatctgtgactcattgattgtttgatggggcctccacgtattgcccaggctgctctcaaactcctggcctcaagcaggaggtctcggcttcctaaagtgctgagataacagatgtgagccaccttgctttgcccaacacattttttttaacatcagtaataatgataacagtatgtttgtatgcattatccaata

SEQ ID NO: 55741 - DNA, 2340 bp, Homo sapiens
aactaaggataacaagtttatcaaaacaaaaccaagaagcctaaaatatacgattacacaaccaatatatgctttattttgaaagctgtcattttctccttagagattatttggtcttcaatcaagaactatgggggcgatttaactggaaaaagtctgtttttaaaaaagttttacacataatagtgtgttttattaaaaattgaaaccgcttaaaccgctgattgctaccattcttgctttgacaaaactatcccaagctaacacgttgaactggtcaagactcaactctcaatcattttacatagttttggaaaattacaacaaaacataacaaaagccattccactctggtgtgaggtgccacgtttgaagtaattatataaataaatcatggctttaaaatacaaaatgcttaactgcttttttaaaaattgaaaaaaaaaacactagtcttgagccgtgaagatcataaattaagctcaaagcaaataaatacgcgttataagaagcatacacttaaaagtagttactcttagaaaatccctgaaatggtaatggtatgtatttcacctggggcagtaagggactggtattttcgcttcttttctggagaatacaaaactgaaaaggccacactctctgcgggtcggcaaaagaaaggctaagactggaggatccctagattgggacaggagtagaggattgcctcagatctacaactaagtatgatcccttgtttgtgtttataaaaacaaacgaaaaactacactgccccacagacagctccaaactcagtggaagagaggagggcgggtgggcggcaggtgtcaggtagcctccgctccacgcctttgttgactgtcgccgtcccccaccctcccagctcccgtacggggattcccgcaccaggcgacaggcgcctcggggcggggttctgaggaggtcgctaaggactgcaccggggcttccggcccgtctgggaagcttgcttggctgggccgggacggactcgacagggcgcggaagggagcggtgggcgcgccctgggaggcgagcgcgtcgcagcctcaccttggacaccattttcttgagctggctctccgacaccgccatgacggccgcctggcgactcccttccccgcaggcagagggtcagccgctgctgggctgccccagaccgtcccacacaatcgcacacccccaacccggcctcaaacaacaggaagtcggcaccactacaccacttccgcttccactacgtcacttccgggccgccgtcctgcgggcaagggtggacaccgtgtgggattgagaggggcctggtggggtgggttccaaccaacccgcccctcgagtgccggaatcagcaggacgaatcgggtcccaaagatgtgggcaagactgttccgagggtcgaaactctggttcaggataagattagcaggtatttcacagagtcgacttaaggaagctagtgccggagagggaagaagtacgaagggcttgccagtgagccttaatgactgattgatcaagtgggagggcactgcactggcggtcagagaactgttctgtcactgacttgctcttgtgataatggtaggctagtgcatttctagctcaggcgcaaatttctcccgactctaaagtcatacacttgccttagatgatgcccagtggtcctctaattaatgattttttttaagcttaaagaccttcatactatacgttggcaagggtaaagtgtagagcctttgtttcacaagaagccagatagtaatttcttctccaggaaatcattccgtaagtcagaatttctcctctgtacccacccataaatgataatacaggccgtattttacctggtgctgtatttgtgtacctgtccgctgtcaaaatccaagcccttgaaggcaggcttccttcagatcttcattgccttgcacaatgcaagggtaggtacttccatcttaattgaatttttacttcccataaaaattcttcatggtgacttacattagtcatcattacacatcaccgtcagttttgtaagcacagtgtcattcaaggtattgtaaaattttgagtttgatgatgtgtgacagtttcaattattttagtacagccctaatgagaacaaggccgtagtattgattcccttcaaagttggcgtctaagtgaaggtcacattcacaaggagggcctaactgaaagcatgtggaagcatcattataaactgttgctaacacgcacaaataaaggctattaataggtattgtttttctttttctttttcttttttttttttttttgagtcactctcactccatcgcccag

SEQ ID NO: 55742 - DNA, 1926 bp, Homo sapiens
taactaggaaactggtgaaaactagtcttcttaactagaaaattggcggggattccctcagattgtacaccggaaactcaggctagtcaggtctcagaaatataggtcagatttctaggtcggcccgcctactccccagccttccaacattaagatctctccagggccttcaagctctgtcttcatctctaaatctactcaggtctttcattcactgcacagttacttagtacctatggtgttgtcaaacatagtggctagaggaagggaatacaaaagcacaatgtctgcagtcaaaggggctcacagcaagattacggtttgtaaatacataattactccacaatgtgataatcgatatctttcaaaacagaagggttgattcaatcttacagggagtgactgagttgggtcttacaaaggatgagctttgcaattcaagaaaaaagaaaaaaaaggcagaccatttcagcagagagaaagagagaaaggcgtggttaggcgtgtgctgggagctgtttgaggtcagtgaagctgggggtatgaggagggctcgcaccaggtggaggttgggaaacctcagagttgcgggagaaatcagaatccaggtcccctcagcctccctggggccgcgccccatagccggtttcagaccagccgccccggctccaagccccactacaagccgggaaacgcaaaacggaggcaacctggccaaaggcagaggcaccccccgcaagaccctgaggacccaaactggcccagcggactgcccgcaccttgccaagcagccgtctcaggccctcgcagtcgaactccatctccaggccggtcccgagctaggtcccaggactccagcccccggaccttcttccggacttgctgcaggacggaagccgctgaggaccaaacttcccggcggtccaaggccccgccccttcccagactggaaattccacccgcattcaacgccccgggctcagccgcggctgcgcccggaatccggggcctctccttcgtgaccccggagtgggcaagtgacgagggcacggccagaaacgcattggcgtcaaggaaaccacgacccatcttcctggaaggaaacttggggacacttatgaagagaagactaggaaggaccggagtagaagcactaaaggaggtagaggcaacacgcggtgttcttgaagagtttccagacagatgtattaaattccacagtgtatcaggaaagagcaagaccgaaaattgcagttgaatttaggaaggaggcggtaatggaacttcagaagcaaaatttcagggagtagaaaggaaaaacaaagtcaggaggagccttgccggagaagcggagataggacagccccagcatgagggtggcttagcacggggagagtggttgctttttttattttttttaggggtgccataacaatgttggtggtcaaagagaggagaaatccaggtgaacaaatagttggaaaacaagagaggagggagatgggtggataaggtcatctggagaaggtgggtgaagaagagatgcaggatacagtaattttctggcgttgtttgatctccttggcccatggctgacttacctgccctgtatccctggcctgagccactgaagcgaaaagtcccaggagctggatattgtaattgtcaagaggttggacatataggagagagattgtatttataggaagatctgaagggagtgctgccctgactcaggagaagaagctgaaaagctggaaggaacattcattcagaaagtttttgttgagcatctactacttgccagctatttttccaggtctcaggatacagccgtgaacaaaatacactcagatagctgatgtcttaagggtgtcattcctttattagcagagagagagcaaaacaataaatgtaataagtaaa

SEQ ID NO: 55743 - DNA, 2133 bp, Homo sapiens
gcaacttatcggtttacagctgtgctgtgggtaccatctgaaaatctggaaatgattagcttatgcaaaacagccataacccccagaaaccaggcgctctccaccactttaccatttaagtcttacaccgctcttgcgactgtaagcgaactgacaaacatctactgaccaaatgggacctagattttaaacaaagactgaaatctggaaggctacaagtaaacagaagctgaaactagctcacctattctgttggccaaggatttcgtggaatctgctaaacttctcttcccaaaagatgatacctatcccctgggaggtgataatttaatcacctcggtggctgagtgggtggggccgagtcagagaattctttcaagaaatcgctaaacgtttgacttgaagatcgatgagaagccagccaaaaagctatcaagccaaggaccccaaaccccctaactcccttacatacatatttccttcccaatctctaggctgaagtttatgtggaagccaaaaactaccagcgctagaatccacagcgtgccaggcacagctcactcacggctttcacgcaattctagctacaacacccaaaccgcaaagtccctgttgcaggggtaaataagccggcgaaacccattcacaggaaggctcccgcgtctcgtcccaagctcttttctcccgagttcccaagagtataaacccaagaaaaggaaataaggcgtccgggtctttcctctcccggagccgataggcggctgcccagaagttccatgggccacacacattccgaacttggaagactagggtcccctacattgatgccccagctgctacttaccggcacattgttgacaccttgtcccttggaagctatcatgagaatttctctgaagtccatgttgggccgaggcgggagagactgggccaggcactcggaaaggactgacagcgcacctaaccgaggcgcccagctacagccaactgcactgcctcgggagccccactcccaccccgcctctgcgggaccacttccggcgccttcctatgccgtctgcccgcccccttccctccacggcctatatcctttcagggccgccacagcgctcgcgagtccctgcgtaacttccgcttttaggccgagacacgtacaaacgtgatacgtggctgctggcgtcgacccgaggggcagggactaggcattttagcaaccaagggggtgtggctaagcgagagagcggcttccctggtggcccgggcgcgcggtcttgtcatcttgttgctccttgtgagcgctgggtagagaaagtgagggggtagagggtttacttgccaggcctgggttctctgggtgtcacgggtaggcgcttagatccaaaacggcggcgccacaacagctgaacagacggatctcgagccggggtttgggctacttgtgtctaggcgctcgcgaagctgcgcaggcgcacacagcagcgccgtggtcctgtcttggatgcccattactcatcaaattcggccacatgccgtgcgcttacctcctactcagatgcacgcgtgccggggatgggggcacgcgcttacttcttttgccccgtttagaaagtaagttttatgtggagcagccaacctgtgtttttgctcaggcaatggattaaggaatttcacatacagacccagccttgacataactttggtgtactgatgaacatatgcttcatattcatattcattgggatcctagtcctgacttcttttggagagttatcttggatctgtaaggtcatttcgacttagcaaaaacactgaaaataattaggcaaacctgggtctgcaagtgggaacccgccaggggattgatagcaaacaggtactcgggatcttttcggtgggatggaaatgcctccaaactggattgtggggatggttgcactatacatgtactaaaaatcgtacacttaagacgggtgagaatgatacagtatgtaaatatgtcaagctgttaaaacatgctagacaggccgagcgcggtggctcacgcctgtaatcccagcactttgggaggccgaggcgggcggatcacgaggtcaggagatcgagaccatcccggctaaaacggtgaaaccccgt

SEQ ID NO: 55744 - DNA, 1370 bp, Homo sapiens
ttatgattctgtatgtgtgatgtatatgctacgattatgggtccatggctgctgcatacctatatacgtgccgcttttcaagtcgaaggttgtgtgtttgctgatgatttggatgtgtgtttgtacacagtgaaggttgtgagtccaattgcaatcgtatcggcgtggactgcatgtttaaaggcttaagggaatctgtctttgccttttgctcccgggttatgagaaaatgtatgtggctgtgcgtccaggacagcaatgtgtttgtctctcagccaagctcagtcctcacccaggcaccggggtcacggtcacgttcacgttccgtggacgccttggcacggcctcccaagggggcggggcctggggggtatccgccttctgacccctgggagatgcctcctttctccgagcagcagccgggggcctggccggcgccgccagccgggccccgcccccccggctcccgcccgctcattggccctggcagcggtgacgtcacggggctagctgacagaaccccggcgccgggcgctcgggaggtattgtccgtccctccgggctttgtagaatcgtcgccggcttacctggccgtgggcgcgtcctggccgctgcagcccggagcagggtgccagccgccgccgccgccgccatggtgtccccggtcactgtggtgagtgagcgagcgagcgagccagtgcccggcgcggctggagcccaccggcctggccaccggacttcggcaggccgagctgccgaaggggccgaggcggggcgggggtcccgtggcggccggagtcccgcggcgggaggcgggcgctgtcaccgccccccgctcctcagactcgcggcgcccctcctcgcgcgcccccagcccgcccgcggagggaggaaaacactggccacgtgactcggaagcgtgactttgttgatctccatgtatttggcgcgggtcggcggggtcgcggcccgggagagggaggggaccgctgccggccgcagagttccgcgtaggcggaccacagggaggcgtgggggcgggggatgctgggaggataacagggacctcctgggaatgccgtcccaagtttgtttcctaaccttcctcattttgtaaacaagttggcggacgcccctgagtctaagaagcgctgataacgcgctgggggaaaagggggcattctctatgacatcccctgcttttcagactttctcaacttgaaccttttgtttcgtctccccatcctccttattctactactgggttccctataactgtcagggtctctccagctactgccagtatctccttctagaaaatatggggctgggagaggccatggagcggaggttaatgctcccaggggctg

SEQ ID NO: 55745 - DNA, 773 bp, Homo sapiens
acatcatctacatcagggtataaaaagattaagagttgaatttttatggtaggagaaaaatgttgtatttaaaataaaatgagtcatctctccctctctcattttggccttgcattacaggattctttatgatggacaacatcttcagccacagctgtacaattgatggtagattcccagggctgactcataataattcttagtctgaactggtgacatcacatcaaggcaccatgcctactgcatgggctacaaacactgtcttcctacttcttccctcctgtaggaagccctcacctatagccaagacctacgacagcatttggaagtcaagggtgtatgtataggatacagagtcaacagagtactgaacctggaagaatatcaaatctggagtcagaaaactgatattgtgttttttttctttttagcctggccttgaaatctctctctgaagagagtggtaatgaactctagtcctgccctgatgtgactcagggactgtggtcatggctgtttacagtgtgcctttcaagtaatgcttctttatcctggcagatggcctaatgactaagtgtctgacccacaaccaggtattcctcgcacaggaaacttgtttatactggcagacacccttgtggcttttgtattatctgtgtccagtttactttttccaagatagtcactctctctcttttttttttttctttttttgagacagagtcttgctctgttggccaggctggagtgcggtggcataatcttggctcact

SEQ ID NO: 55746 - DNA, 840 bp, Homo sapiens
cgggccgggggtggagcctctggcgagctgttcacagcgggcttcccaggaggtgagaaagtcccgcccctagccgatggagggctgggattggttctccgggaccgattgacggctcagggcacgagcggggaccgcagcggcggaggtgagggcgccagcaggaagtgggagaagaggcgacccaaggcgggctggcgggctggcggcagtcgctacttgcctagtagcctcagccgctgtgggctcctggggagatggaggggccggggctgggctcgcaggtgagtgcggccgggcggtggctgtcctgggggccgggagagcggctgcagctgtggaggaaaggatggtgtgggtgagaggccgctcgatgagggggtttcgggagcggcggggcctaggtctgggaagcgggagcctggaaacaccacgaacgatgctggaaattgtctctgaggcgactgggaagaaaaggcgaggactgaggggtgagggcccgagccggcccctccagcctccatccctggccagggcgccccctggggccggtacccggagcccggcggggacctctgtgggcctggggaggggacgatggcccttcccgggagaggtgtcaggtgacacacctgattcggacccgcccgtcttgacgttggcccggagtcggagcggttctgttgatttctttttcagccctggcgtcttagcacccgccttcaccccacccagtccagttttcgctcctgtttccgcatccttgcttactccttgaaataattaaggctgcttgtttaggatggaggaaaggggcgtggagaggggaggtacaccaca

SEQ ID NO: 55747 - DNA, 432 bp, Homo sapiens
aattcagtcccaaagctccaagtatgcagttgggcatttaaagagtcttataattaagactttttttttaaatttaaaaaagggcttccttaaagatacaaagcactatttactccctgttcgggtggccagttcacaccacggcgttagactccaccttggaaggctgtatttgcccaataaggcaagcaggtactgtcccccggccgccactcgctcagtgcacttcccccaactttcggccaaaggcccctcccccaggccctgtccgcccgccgcagtcccgacagttcccggacagcatcatcgtggtttccaggacaacaattcccgaccaatcagagggccggaagcgggcctgcgattggccgacggcgccaggggcggggccggaccttccgccttcgatttaaaaatttggcgcggaaagtc

SEQ ID NO: 55748 - DNA, 2221 bp, Homo sapiens
ggtcagactcccagcaccacacttaccagttatgggacagtgggtaagtacttcactgtgctgcagtttccttatctttaaggaataacagtagtacccacttaatgagttagttcatgtaagcacttacaacatgtcccagctcacactaagcatcacataggtaactgttaaataaaatgcagtgaatcaaggtggtaggggagtatagggcaaacataatgaggatgggtctagaacaagagaagtttgtaggaatgtttgtcttctgcaattcttgctctgacagttgggggcccagggcccagggagcagaatggctgtatccaaagtcataaactgacatagcatggcaaggcagaatgaaatccctgctcacttgactcactatcaactacagggctgcagaggtggccccttctatggagaaagcaatttgtcccatgggccactcaaaatggcaaacatagtctccaacagaggtgacgcagacattacctcagaggcagccttgatatcgctgacccctcagatggatgcagtttcgcatagctcctacttgctgatgagatggccatggccataaagcagtcttccagagtctgtcccaggtagatctcaggcctccatacgccagggccaggcaatagaggtcatggccggagcctcaggacctaccacagagctggcccatggaagcctctgaaggaatgtttgatgactcaccaaatgaatgaatgaatgaatgaatgaatgaatgaatgaatgaatgaataaacatccccattacatggatcagctgatcagctaagcagaggatacgcatgtgcccaagggcccttttggtgcagtgtgtgttgttctttctgtgggtgaggctgttgaggtatgtgtctacagaaggtgctagcatagtgctggtgtgtgtcatacacgaggccacgccctacacttgtgcaagttttctgtgacctctgggatctgaaagatcagtatttcctagagttgagcaacagtgaggttaggggagtttgaaggagggaatggaggtgtgacatttctggggcccaggacccagggaagtaagaaagatggtgtttatgaaggcacttagctgcaagggcgaggtcctataggcaggtttagggcttaatgactataatcactttggcatgagcagctgacatgggcatctcactatacagtttacctaaagcactgccactccagtttcatcactggctcctcagcactgcatgagtgcagagcagttattgcagtttctatttaaaaacaaagcctgctaaatggcaaagctggatagaatcagctcctctgagcccatgtccagtatgatctcaagccaggctgcgttctgattgtgtatatcccagtaaccaatcctggccatgacatggtgcttaccacatgattctcatcccctacctccaggattgtttgctgatgagtcagtgaccaaatgaatagtgcaaaggagagacaagagacctggggtgagggcaaagggtgtcaggtcggggctgaagagcgcaggaggaagaaagggctggaacgaattctctgaagatgagctgcttctttcatgactatgtgggccaggccaggtttcggctcaagcctctccttgcttttaagttatcagaaaatttgtcattggttccctaaatattgaacgtgttggatccagagttctcaccatgggccacaaggtgccattgagctggctgcccactgtcttctctcttccactctgtagcccctggaatgtcacttcattggccgccttttgccacttctaaaacattccagcatacttaggcctcagggcttttgcacttgctgttctctctgcctgatatgcctttcccccactgtctacctcaaatgtacctcctcagagaggccctctctgccaccttgcccccttggcctaccttgtttttctccataacactgatcactccttggcattttattgtatatgcatttctatctatctactggaaatgaagcatcacaaggccagagatctttgcctgctttgttcattgctgtatgcccagtgcctagcacaatgactcgcatatattaggtacattaggcatattagattcaaattaaacgtatttgaatgagttaatgtggtttgaagcttttacctctctgaagcttctaggtgtgctactttcacaggaagagc

SEQ ID NO: 55749 - DNA, 1467 bp, Homo sapiens
agcatagataccgggcgagcggacgcatagccacccgtgcgcgatgacggccggcgggcccttgttcacagatgcgctgggaaactcttccccagcagatgcggggctgggcgcccggcgcagtgctccgaggctgctctgcgagctcgggggcgcactttcccggcctccagcgacactgcgcacgcccctatccggagtgggtgtgtgtccctctgggcgtacgtgcctgaggctgtgccacctcctgtgcttgttcttgtgtttctgactgtcttgtttgcgtgtctctgtgggttcccctctgcgtgattgtgtctctgggtgtatccccgcgtctgggtccctctgtgtttgctgttggcatgggtgtctgtgaacgccctctccaggttcttgtgtctgaataccgctatttgtggatccttctgtaggcgtctctgtgttttcggtctgtgtgtcctcctctctgtgtgctagtctttaggtgtatctatgagcgcgtgtgttttctgtctgcgcctctgttttctagctacgtctgtctccgaatgtaggtccagtacctgtctgcgcgggtccctctgtggaggcgtgcttcctcgtctgtgatctgagcttctgtgatctgtgtatatggatgtgcgtctgtaagtctgtatgtgtgtctgtctgcatgtctgcgagtatctgctgtgcttgtgtcggtctgtgcctctttgctgtgcctgtctgtccatacgtgtgtatgtgttggtgggggtggtgtaggtggatcggatccgagccaagccgggggcaactaggccaggcctgcggttcccctggctctcgctctcccacgctccggttagctgcgggcggcgggctagggcgcgggcggggagggggcgcccgagcactgggagccgcggtgcctcccgggtgtgcgctccgctgagccggctcctttcttgcctgcaaagggactcaggcggcggcggtggcagcccgcgtcgcccagctggggccctagtgacttatttttgtgtgtgatcctttcttttcttcagggaagaggcgggagcacgctccgctcgctcgcagtgcacagataaaggcgccagggttggcggctgggtctgccctccctcccctgtggcttagcagaagtggccggctcacgggctccctttggaagcaaaaaagcccctagattagaaactcagcccagaaaccaccatgcctccttggttctctttcatacctcttatgtaacttatttattgattgattaatgaaaagctagatttccaagaagctcttctgtttcccctattgacaccaagggctaattaaaaatgcgattttggtgataagtgttaattagaccattggaaagacccttcttttagatgcacccttcttttagaagcttaactccaggtataagatgaaacaggtcaggcccccaaccctccaaccttt

SEQ ID NO: 55750 - DNA, 6861 bp, Homo sapiens
ttacaaaaaactgtcaactcttgttatttttcacagatttgtttactatgcaaagctaggtttacccatacaacaatatttcggttttcgttcgttcaccttctgtaggaagatctctgggaaaaattttattaatctgagctttcttttgagggaaagaaattcacctccttttggaaagaatgagcgacaaatgatcccatctgaggttcttttccagatatgcttagagcccaagtttcacagatatggatgatagagttcagagaagacaatagcttatgtttgggcaaatctcagtaagactggctttcctagtggaaacagaaatgaaatctgtctaccttcacctcattctttccagttttctccaaccatctacccctagtcactattcaagattcatctcacatttctatccatttgaaaccttctctatcactttcctcttattctttcttctctcactcctttcagctctctccctgttttcctacccgatacatcatttcactgaatcacctgtggcttaacagcatgcactgtggtcaaaatgatgaaagtcctggttcagtgaccttcagaaagtcacttcacctcggtgttcctcagcttccttctttgttaaatggggaaatcaacagctgttataacctgggcttggtatgaggatcaaatgagaaaatacaagcacttagcaagtatctactagacaggaaatattcagtaagtgctgaccagaagcagtaatagtggtaattacaataattttgttcccaattagactctaagatgctagagggtggagattgagtctcagatttgttttctacccttcagagtcatagcataaatactcagtgtatttaaagaggctttatattttatgttttcccttctgtctgctttattagaattgggtttaaatacacttagtgttttgctgatacttagacccattttatagagtgcatgagtcagtgattaaatagtttgttcataagtgtttatcttcttagaacaataagcatctggacaaagccttgtgctttgaaaactcctggtctttgtcaactcgctgaatgagtgaaagcccaaagggagagccacctttgcccttttagtaagaagtgaaagtaggcctgattattgaaggagccagagaggaaggattagaaacagctctgagaatggggaattcttgtgggagatgtcagtaacccaaattatctctcatttcagcagccactaaaaagagccccacctggccccttcccctggaggggtgacctctcccctgagccagcatgatgggcccagctggggtgaggagtgagcagtcattaggggtcaggttaccagtaagcatgatgtcagggtggctcctggctcctaagagccccatgctagccagagagaagaggcagtagctgcacccaaagactgtgcccctctgtggagccctgctaggcctggagctctggatggatggcaggagggtgtggatggcttcttctcacctgtaggagagccagggctgctcttcctgcttcctgcttgcttcttctagctgggttgtctttctgtagctttccttgggatgctagtttgcagatgaagggtaccaggagcccctgggtgaggaagcatgtggctggatgagttgaagaaaggcttcagatccctaggatggatctgccagagctgtcagtggtggatcagaggcagagagtgattctgggaagagctgggtctggaattaaacagaccccagataaaatcctggatccaactcttacagtggaaccatatgcaaatcacctctccgtgagcctcagttccctcatctgtaaaatgaggagaatagcacttttcagggaattttttttctgtttaggagagagcaccaaggctgtctgagagaccctgagaaaacactgagaatgtgcatagtgagatctggacacatggcagccacttgctgtcccttccccgtcctcccactctcaagtattaaataggtaactagctagagtatactagctgcagtttaggagatgctatgatattctaatgatgtgtcagctcttcattttttgtttagtgactgttgagagcagtttttcttaagtctgatgaattctctttggtatttgggtcattaatccagagtcatcattatgcagacaagtacactgaggcccagaattgtcatgacaagggtgggagaaccagcaccaggctctcaatctgggtcatgtggcaccatttgtaatgtcctggcctctcaatgttctcacagcctctgagcatttgattcacggttccctctgccaagaacaaccgtcacagtgattgtgctgacctatttgtccacctttaagattcagattggagttgcctcttctgagaaaccttctctgcctcccacttacccactgggttgggagcctttcctctgacttccaaggccccttgagctgacttctacagtggcacttctcacattgttttgaggaaagctgtttccctgtctgtttcccctacttgaaaatgagcttttcaagaattcaagccaagtcttactcatcttcatatttctggttttatgtctgggacattgtaggtactccaagaactattcatccaaacaatgaataagtgaataagcaaataccaagagtataaagtgctcatggtggtggggttttcaagagagctcccactggctctctagatcctcccacccatctgctcttggagtcatctctgcctctcactgggatggtctccttgccagtggcccagagtgcagctattccttgcttgagttgtatgtccatccttgtgggccctaaggactagaatgcctcctaagtcaggtccagagaagcccaatatttagggtttgtatttaagacagctcttgcagctttcttatggctctatccttggctgacatcctcacaaggactgagttcccagaagatgcattaatggagacatcattatattataccccagagctggaataaataactcttatgtgcattcattcattcactcacacattcattcaatgcattcctccttccattaggacacataatcacaaactgactgtctacaactttatcactcacatggctcccgtgtcattcagaataggcaattagattttcccaaaggccagatttggggatcagaagggcaggctgatggagcatcaacaagtactctgatgttagctttaaaatatgcagtagaatcctgaaataatctgaaataatttgaaataatatgtctctcccactctttctgcttcatattcatgcaccctcaatgtccagtagcaggttcagagccacaactgctattttttcctctcccgaggcaaggaacagccagccagccagaccaagaggtcctacaggatttgaagtccttagaatagtggctacattaagtttgcttttgggtagaaacaaacaagcaagtttcctgctggcctccctgttcatctctaggtgaagtgaggaaaactgatggaatgttaaaggggccaagcttcttcccatctactgcagcaggactgtataagaagaaactggacctgaggtgtgtgtggccttggaagagccatttcactactgtgagcctcagttttctcatctgtatgatgaggctagtaatcccagccctttatcccttataatgttgttatgaggattagatgaggtcatatttgtgaaaataaaaagaacactaacagctaatgttcactgggtacttattatatatcaggaactgttacggtttatattttataactaaaggacctgaagctaagggaagttaaaagtcaaagtcacacagcaaataagtgatagagcatgtatttgttgtctgacttcaaagcctaagtaagcttttaatcatatttttcagataaatttttcagattttagctgtgcaactttggacaagctacctctttctcaggtcttcagtggtgccatctgaaaaggagacatggctcagattaacgttcaagtccatttagctccaaattcctggttatattttaacaaagtatacagacacacaccataactctttctttctccaagtttggtcttctttgagcatggaatgacttgactatttacagactctagctgagaaagtgtgctggagaagcaagcagattgtaacgcacatctaaatagcagagccgagcttcctaagtgggaaatggatgttgtaatacaaaggcagttagcagggtccttggaggtttcagcaggatgtaattatggttctttaaaaagaggctcgcatatgtttttgagcaaacttaacagatgcccggatgtcatgtctatattctttagggagtctaggatgactaattttctacagcaactttgcatagcacattggaacgacccattgcaaatcaattcctagggtgcaacttaatgaaagcttttattgatgattcagattaataatctaaaaacctttataaaatgaccacaacttcatttctgcctggtctactctgtatttgataaacaaaataggcagttctctccatagttatcacttaatgtgatttctttttaaaaagaaatctttaaccaggcctgttcatggagactgagggttttaatgctgtgtggttcatttttagtgcaatatcctttgcaaacttttgtgacttcctcagagattttctttgagctaggtgccctagggaatcttctatatggttcactaacattttattgtagaatgaaatgcacattgattctacagaatcaatgctcagttaaggcagtttgggggccatttccttaccccagcatactctatctgaaaaagcctcttgcaaacccatgtcctcctgaggttgttgtgaatatcgagccggtgcatcaggaaatcgaaagataacaagtctagtttcctttggtaggcaccttgacatctcttttcttgctggggctttaaccagtctgataaatttccaatcaagtcttttgaatcaagtggctctaagacctggtacaggcttctgggttcacttctctgtattagctgccttggagctaagaagttttcctcttaataataaacagttgaagatggttgaacacagaagccttgcatgtgtttggtttgggcagaatatcagcctttcaattgcctccaactattcataaccctccataatttcatagccatcgatttccccttctccctgatacgctctttcattggcctgttgcccacatcctgtaattgtgccagtcacccctgcgacctttcctttgctgagctcaattaataatgtactcaacatatttccctgttgcatcaaataccaatttggcctgaatgagtgaaagaatgtctaatgaggaaatggttaagtctttcttgctggacaagcctttacattgagccggtcttgggagatgggggaagagaggaagctgcattgtactacttgttcagcaagtttttctcaaattccacagcagagacttgttctaattacctaggtccagctattgtgcaggtgagagtgtgtcatctgatgtggaagactctgagcatcaaagacctcagatggcacagtttttggcacgtggttgcccactcctcaaatgtttctgctaaatattttagaccatgtggagaacaattacaacatggaatggaatgtttatttaggaaaggaggaagcaagaagaatagtcctccctttcctgtgatactttgtgtcctaaaatggcctaggaatgtgctcagtcagagaaggactggccagcctggattgtgtaacagtcagaggataacatggcgcctgtgcttgcagactccccaccgtgcacagatacatcatttgcagttgctttgagggccagctttgttgacagctaatgctaaggggacatgcaccaggagacatggcttccaaccttgtgtaacagcagccagctgggctctccaattctgaattttgggacgattccatggcttcatgggaagagggcgttttcttgattgtttgctcctgagctgcctgtagcctcatatgtagaaggtcagagatggaggttcttttaagaccttttagtccaattcccatttttcagacagagaagctagggtctcagatggcaagagacttaatgtcacacagcagcaggttagcctctgtaatcattgctgtcgctggaaaaggattgcagaaaagtgaaacagccaaaataaccaagctttattgagaatttactctgtgccagaccccatgttaagaattttacatgcattatttcatttaatcttcaggaaaattctggaaggtagatactgtttattatcttgatttttttccacggggcaatgccgtttggagagaataagtgtggaggagccagcactcaaatccttaccattggaggccagagtctgcattctgaatcaccatgttcttcctgtttccatctgattctagtttaaccctccctcattttacaggttaactctaacccaaaaaagggaagcaacttgcccgagacccttcaaatactggaaaatattgttatggtgactgaaagtagttaacgtttattgagtacttactgagtgcttaccagggattgtgctgtgtgcttttcattcacttgtttgttaccataattctagaagaatgtaggtagtactagctgaagtaactgatggctagggagcttaagaataacttatgccatattttatagttattaagtcaagattcaagaggaagccatccaactccaaaatttgacttccctaattctgctctgc

SEQ ID NO: 55751 - DNA, 4250 bp, Homo sapiens
taaggaattggaaaacctggatataattctagctttgctactaaaggcatcatgtttctcttggggcaagtcacttccccctctgaatgcctcagtttcctcatttgtagaagaggggtgtcatccttttataccatagcatcttgtgagacactgaatatgcacttgattccctagctgaaaagtgctgaatagagattcttctgactccttcaatcaggtccctttatcctttgaaatctgggagctttctctgctgccccatccactgggctcagtactggatggtctgcatttgttgtgaatagatgacagctgggcttgtattttcttcagatggagcttggcctgggtattaaatagctgtcagtaagaccacttttctaactggcgcagaggagcaacagagctgggctggtagtcctccctccagatgtctgggggtgcttgcagaggggagcagtggggtctctaacactgagtccccatccctttgtgcttgaaggatagcacctagaaaacattggccccaaacagaaaggctgacctccgctccaaaatcctaccttatttctatgtgactgtggaaagagcgggcctgagagatattagtaataagtaaagctgagaaacagctgtggaaacgaggtttcaggacctcctggccccatcagcactacgctctaattatctcacagcatttggccaattgggctgttggagtttctaggaaagattcattttaaccttaaccagtattattgtatttctttttatccagatgggagaatattgtttctttctccagtcttcactgatttctcgtttttaaatcctgcagaactttattctctttgaaacctatgagggacaacgaacatttttgggagtcgacttgttgttggacacttttacaggcattatcccataccattcccacagacacagatcatctttccatgtgatgttcacattctctttctttttctcccatgttaataaggtcttctcttctggctcctcctctgaatgttaagtgccctggggctcagaacttagtcctttcttctgttctctgggattttgtaggtgatcttatttaggcttttggccttacctttcacctctaggctgataactccccaatttatgactccagatccagctattcacctgtgctccagcctcatgtcccccacctggaagtctgagaggcactccaaggtctggcctctgcctgcctctcccctctcttctctttcactctccctttggccacaatgaccttcttgctgctccttgaatctgccaacaattcccacctcaaggtctttgcacctgcttttctctctggctggaaaagagttcccccaatattctcatggctgtatcactcttccttcaggtcacctcctctgaaagacctcctctgatcacatcatccaaactagtccctcctgcaggaccccatcttccactctgtagcctcttaccctccctgttttttgtttgtttgtttttttgtcatagcacttgtcctacctaaaatgatattgcatgcttattatatacctgttcattgactgtctctctccttagacataaaattcacaaaggcaaaagcattatcttcatgattgtcgctatagccctgaacctagaatgtggctgcatgtggcctggggccagtgaatatttgttacatgttgaatgaaagaaaatatgacaggtaggtgtcacctctagttttataaatgagtcagtggaggctgaaagacataatacaccccatatcacctgcttttttcccccctcagaaaagggggaaatagttttagtcaagataacctgtatgaaaacaaggcattgagttatttttataataatttataacttaaaaataacagtagatctttcttaattgtccagataacaaaactcagtatgtacattttatagcaattataataatgttatcatgaccataatttaccacacgtatcaccagtcttgttttctctttctcgaaaacacatgcttttctgacttcacacataatcttgctttcttgtttttcactatgtatcaatgaacttggcacccatacttctttgtcagctccagcagatgacaatttatctaggaatctgaatacttgacacatccaaagagaatttttccgaaaaggttttttttttttttttttttttttaaaatcagctattaaatgactcaccatgtaactgtcctcactgaaggatgatttgtgatagtgcctggcacttggttgcagggtgagctatcagtgagttgactggatggtcacatggcaccatagtgtattctctggcaacacatatgacacatagttgagacatcctcagtcactcacatactttagcagaaactaattgttttgatactttatgttgcaattatgcaagtatattttacatatccttttaaaaatctgcacaataggaagaaacaccaagagaactcaaccatgacttaatgagctagatcaactcttcttttttgttgtgttaagaaatcatctgtccttttgattctaagaagcctttactggaaatatcatgaattcaggagagatcaggatgtggacattcagggcatataacgttctcccgctttgttctccaactgtttggcccacctggcaatttgactcccattgtattactcaatgcctctcctaggtttttcttctctttggattggagcctgtctctgtctttccctatcaaggccttgccccatccccttcctgattctcagtcttttaggtgcacagaaactgactttgattgtagctatcccttctgatcggatactgcctctgacaacaagatgttcccacttggctcacccagcttcccagtcaagacatggactctgatgtccttctctctaggcacattggaagctccttctcgacaataatgatcttatacttctgtgttccttccaaaatgtagcccaagactaattaaaattagtaaatactcatttgtccaacttattggtttgtggcagccaattgttctttccatgatccctttagctttgagtagttacagtcccataaatctgggtaaaaaccctttcttccatgaggttatggtggaagacctctgcagaagcactgtttccctgctgcagacactcataagcaggtgtgtttaaatttatcccagaagatggctgggcacaggccgggaaacaagagaccagtcagtgagagcaggcaccgtgttggtactcccttctcctacaatctagcaaaattctttggggtcctattctttccctagtgcttgaatttcaatatctacctcctcccccacaaactcagctcttgctctacatcagtctaaatttactggtctcccagcctctccttcctattaaattagatattagagaaatccatcaagccagtgctgcttgagggtacagtttacagtccctgtgcctaaatcactggatgctgtggctcggatggacctaaatttatctacagaattacatgaaaccctcttgttttcacttgtgcaggtgttcaggtcccgtcacactacctaataaaacactgaactgccctggaaggtctcagcaaaataatcccatgttattatcacttggcattcctacagctctttattttttatcttctggtggcgatggtggggggtgtgtgtttacgatcattttattagcctttccacacaagattcgttttttattaaaaacacaaatatcattataaatatcttggtagagaggtagagaagagattttgaaagagactaggcaaaaggattaaatatctataggtttaaactgttgctaaaataaatgctcacaatatagccatgaacttttttcttaaaggtagccttcattaattatctttccaatgggaagtaacagctgagaccttaaaagccagatatgtcgcagggaaaaggcaagtttatggagatgatgttaagaaaaatctggtgtttagaaagtcttgttttctattttctgtagttacttcctgctcaaaactttttctcatttgtgcatttctggttatataatctggatcttgttacggcaacattaaagtggatttaaaaaacaaacaaacaaacaaaaaaacaattgctggtgaagcatcctaattggtaaatacagataataggtacatgacatttgggagtttacaaagcacctttata

SEQ ID NO: 55752 - DNA, 3763 bp, Homo sapiens
agggagtcgctcacggaggagatgctccctgtcatgaaactgacttcgtgtctgccagtgctctaggtgtcaagctgaggacaggtttggcgccttctttgattgtctcctctgaaagaatagctgatcagcacacacaccttagtgctgctaagggcgtgcagcagcttctgaggatccgttgggtccacaaggcaggtcatgcactggcaccccgctctgagctccctgagggcaggggctttgttgttttcttccagttgtcccaccccaggctcggtgctgggcatgtggagaaattaagtgtgtcagcagaggcccatggcctgagttcaagccctggcttcgtccctcactccctgtgtggttttgggcaaattactcaacctctcttgaatctcttccccagtgtgtgcaggggcagggcagagaagtttcctggaaaggctgctgccaaagctgagtcttgaaggaggaggaggaggactgtctggaggacttttgtgggccagtgaagttggctccatagatccacggggctggtggtgaggagattggaaacttgcagtgtggctcagggtcagacagactggatggggcgtgagcaggggcaaggacactgaggccctggtgactgggcgtggggtcactaagggaagtaataaggtggaaaagtcagaggggtcagagagagaactattaatatttagagaataagagcaaggcctattacttgggagcaagggggtggttgagaagggatgctgtgaagcaatgacagaagtagggaaaatttcaagtgaaattcagaagacattcacatctgtacatcatacttgcttcactggaaaatgtccttcttctgtccatttcctagttatgttctgaagcagatacctgagtggccgttgtggaggaaagggcagagaaatgggaggagagaaagtgacagcctccttagattactgacacctgctgggcttggccacatccgctgccctgactcttccctcctccggcatcttcccggtcctgttgtggctctggtgagctgaccagagcttcacatggacttcttccaggtctttctctatttcacgtcagactgcctgctttccttggcattcctctgagacttcctcgcattctcctttttttctgttttgctgtctgcaggcaatccagccacgtaattctcttctcacctgccaacagtgtcttcccaggaagcatttctactcccgccagcaccaataatttaacaggctcttccaaatcaccaaacaccattccaaaaacagatttaattaacatcttggttagctttagtatctatagttatagacatatataataaaattatataattaatataatttattatagttgcaaaagggataaatacggccatgatggtttttaccttccaggctcctgcataacacatcccttttacctaatcttcttcatccccttattgttgccatgttacttgcagttaaccatgtaagtggaatctttttatgcaaagaaataaaactaatagcgtatatcttctctctactctggcaacagtctagtcagtcttaatgagatttgaatacaacacagtgatgttgatacccatcaagcttgttacagtgggattctctccatattgaatttccttaggccactgctgttcccttgcattagatatttcatccctgtggttctaaaagtctggaagacactagctagaaattgtgctggtctgggaaaatcatggcatgcttgaactgtctctggaatttccatgtcctgtgatctaaagggctgctcaggaagtggagtgcttctgagtaggttaccatgaggcatgtgggtgtgcaggagggaagagctcccatctccggggatcttccatgacattctccatgacagcaggccaacaggaagtggcagaaccttcatgacaaagcattggaggtcagtgtgctctgaggcattatgaatcatcccatggtgtgacgtggaggaaggtacaccctctgtctggatggtggaatcagtggagtagattttctgcataaattataaatacaaagccaatcatgctgcttctctgctatggtcttccactaactccttgccacctttgcaaaatgcccaagctcttgagcagaacaaagaaccacttgtgtaaagtggccaactgtcctgctttgcctgggatttagggttttcctgggacatgggactctcagtgctaaaaccaggaaaatctgggcaaaccaggctgagctttccaccctatgactatgacctaggtcctcaactaccccactgcagccccacctccttccacacactgaatagtaagcactagtggttctaaatgggttgtagtggtttccagtgtttcttgcctctttgcctatacctgtgttctctctgcttcctagaagccttccctggcttccctatccttgcctaactgattctcctcatcctttgacattcagccaggcatcacctcatctaggaagccttcactgacccaccaaagttgagggagattctctcctctgctcccctactatcacagttatcactctataccttctctgtcaatttccttgtctctctactcactggacttggagctttgtgaaggcaggactatgatttattagatttggtattcctggaccctagcacagtcactggacataaatgttcattaaacacttaatttaaggatttatttaattacataaatattgaagtgaatgagtgaatgaatgaagtcataaatggtaaaatatagtccaggtgctggggatctttcaaaatctgggtgcctgtgttctatctgcaagcatgcggagtagtttatgaaacatacggagaccctgactctttccagagatgagaaaggaagtgtggtagctcagggccaccaagcttgctgcccagggaagagggcatggatagtgaggtggggatatttgatgaaggtggtggcaggatagggctctgaagcgagctggtgtcctgggagttgggattgggagaggaacaggtcagcactgggtataagtggaccaaagagaaataacgtcagggcaaatgtggccatttggttttttggtgccaaagagatattcttaactaagatgccttcacaaatggaggctggagccagagaaagagagatgggagatacaggaaggcaaccagaactaattaggttccttttagaggggccgtttctgggtttctgaggacaagaggggctgtgaagccaccagacaggacctgggaaaatcaaagcagctctgggcagtgtgtcctatgccaatctgctgggtcgtggccagagctagtctgcaggctgctcactggggccatcaccacctgacccccaggtgggaatgctgctggaaagagaagactcctgggcttccagggggctgccttatgtgctggaatctctgtctgcaggatgaatatttcagaaaggcagctgggaaaggcagtgcctttttaatctaagctgaatggcgcctgagggggaagggcgcagtgtcctcgggagtggaataatgtgctgcaacaccatgttcccagtgtacaatgggacaggaggtgagcgtgggagacagctttggctatagaattctttttctttcggcccatgctgaatgagagcctggaattgttgccatgctgaatgagagcctggaattgttgccagtgaccttcgacagcagcacggggt

SEQ ID NO: 55753 - DNA, 847 bp, Homo sapiens
agatttgtgatgctgaacagatccttttccttctttgagtctcaggatcctcatctggaccatgaagatcaaggacagtcatcacacaacaactcacaaggagttgtgcctcactgtgttgtgcctcataagggttacatgccataatttgtgtgaatggtcggtgcagtgtatgtatggcacacagtaggtacttttaaaatgtttatggaactgtgagtctttggtgctttactattttaaaccttgctgttcccagacatctcatgtgtgttcctgtggctggcctaggcctcttgaacttccctgaaattctctcgcccagcccacattgctaagctcttcatggtgaaggactggccaggttcctacattgcttctcagctgtcagctggtcagaccaggaaaactgtggcctcagttcggaggcagaatccctctgccctctattcatggcccaggctgctctgtgaccctagccatgtgatatttttgttctttggctagagttttgtaatctgccccatttgtgcaaacattccaggaaggaattgtttgtgtaggctcataaatttgtggatggtttacatgtgaagcctgattgcatgataatctcctggggcgcagtgtccattccaggatcctcaccatggtcattgctttattttgggcccagctgtgtgggtgctggtggactgatgctgtgatgattctgttctggtctccttggacttgttttctataccctctctgtggcctttcatgatggatagtcctgggcccacagttttctgtttctcaagtcttttcaagcagagatcaccatatccttgcctcagcttttgaa

SEQ ID NO: 55754 - DNA, 1444 bp, Homo sapiens
tgtcacatggggaaagcaggagcaagagagagagagcaaggtgccacacagttttaaacatccagatgttggagaacgtactcactattgctaggagagcaatgagaggatggtgcgaatgcattcatgagcaatcaacccccttgatccaatcacctcccaccaggccccacctccaatactggggattacatttcaacatgagatttgggcagggacacagatctgcatgacatcaccctgcattggcctgtctctgtccctttaaacatagctggctttcccacgtaccatgcttcagccaccacagagaacctgtggtatcagccccgcttacactctggcttgttggtccgccaagcccctgctatgttccattcaccctctgctctcatgaacttctgacccctgccttcattctccaaccttctgggtgtccttccctaatttcctgaagctcagtttcccttctgactctcagttcttgctcagccccttaattatgacttgacccatcatttgggattaaaaagcattctgttaatctcctgctcccaagcagcagcctgccctgctggggatccgggcccctccttccccccacagacacactcacagctagtgggtgcacaacatttttggacgcagcctcagctcctagcaaacacttttcctgaactcagggtcactgttgcttaagtcgcagctggaggctggcttcagagcacattgatttttcccagggctttaataatcctgagcttcagtttgcctattggctcttttgtaatgcatcagcctcataaaatggtcactttcggttaaaagatcttattactgcaaaaagagatgttgaatcacactttcaaggtctctggtgaaatgtgatctttgagacttgttggccctgttccacggcacgagaaagtggatattaagaagataaattagaagtcaaaacacagttctgtgttcccctgtgtcttaggctgagtgtccgtgatgaattttgcaagaaaaaaatcagaactccctctacccacgctgcactccctgccaccttcagaagtcagattctaacctggagagtcagcagctctttatttcagctctgacactaccagtatgctaatctccctgggcagtaatgcaggcgccttccttctctcccacaagtcagagattggatgtactccttagctgtcatattttgcaattctgtgcagctcagcaaatccttattgatcagttttctctgtacaggcccagtgtaggtggacaggggacacagagaaactggagaaggatcctgccctcagagcccacaagcctacagtgtgggagcagtggacagatgggggtcagagccccctcatgccctcagtactgcagggttaagatggcagaccctgtgctaagtacttaatgtgtattatgtcattga

SEQ ID NO: 55755 - DNA, 1977 bp, Homo sapiens
agtaaggagtgatagcagggcatggattccagacatagatgacctgtaggcttagttaagggtatttgggaggtaagggaggaggcaaggataacagtagtgagtgcagtaatagggactcaaggagggtatacagacctgtatatatgtgatgagatgtatgccttgagtctgggagctgagccctggagattcaagggtcagtggcactggggggctggcactgtgctggagtttgggtgccttccctttctttcatggcccctgcctgcaagtagctcaccttctatgaactgtattttgctcatctttgttgttgaaatgctgtttcacaattatttgctctttcaaaaacatgtgactttcttactatctttagaggagaggcactgcaggtgagcctcatcaaaagcacttgcagaaatccatcatgagccaattagaaaacttaggaaacatgtctgatatggaggaatctcatgaatatgattctcctggcaatgcaggcagaacttttttccagcagcgtgcatacctcaggacagctgaggaggaggttgctgcagcaatcgactgctcctccctttctgcgctttgcttggcatgagaaaggaaccgtggcaggtggggcttcgagacccgcttctcagtctgatgtgaagacgtggggaatgatagaaatgcatattccaaattcttttcatttccttgtagacaggattgagcaaggatcttccatttgtttacacacttggtgagtgagtaaaccactcacacgcttagaaacaaaccagtccaccataatgaaactggaaggaacatcagagatcctgcagttcaacagatgcttctgagaaatggagaagaagtgaattaagagtcagtttaaactcagtgaaaggaaactgaactggaatcagaagaaggtaggcctgaagtttgcgtcgggtacatacttggaaagttatgtaagctcttgagaataattccttccttgcctgcctttggcagtttgctgtgagggtgagatgaacgaatgagcaaagccctgggtcagggctttgtaaatagcagtggcagttctttcctaatggcattgcatcagtagctggagagcaagcagtaaggtgaggtcctctgagtcagtctactacgcccacgttactgtctttaaaagttacattgacctatgggcggttgtgtttttcccatgtcactgtctttagaagtgatgttgacctatggactgttgtgtttctcccatgtcactgtctttagtagtgacgttagcctatgggctgttgtgcagtttggaaaaaaacaaaatatgggtgacttatatgcacactagaatggctaattaaaaagataaaaaaatgccaggtgttggcaaggatatggaacaactgaaagttgcacacactgttggtgggagtgaaaattggtgtgactgatatgaaaaactgtcagtatccactaacctaaacatgtctgtatactatgactgagttattccattcctaggtacacacccaaaagaaatgaaggcaaaagtaatctgctagaatgttcatagcaacattacttagccaaaatctgagtagtattcatatactcattaaagatagaatgaagtctgtttatacagtggactactacacatcaatgagaacaaactaagctacatgcaacagtatggatcaatcttgcagacataatgttgaacaaaagaagccagacacaagactccatacgtacgatttcacttctataaagttccaaataggcaaaaccaatatcaggtattaggtattaagataatgtttacccttggagcaagagcgtgaccataatagaatggagcatgagggggcttctaggatgaagttgatgttttatttctttttctgggtgcagttcagtatttgaaaattcattgagctgtacacttatgaattatgcattgtcctgtcttct

SEQ ID NO: 55756 - DNA, 1391 bp, Homo sapiens
ctcactgagaattagctccttgacgcattcaagctagtgtaccttcttggctgcatttaattggtttcgcatccaaagaggtaagtgcttatccctgctattacttacactgaattcagatttggattacccgagttaggataaatgcagcttgtgttcttccttctaagtcttttgagatcactggtcaatggtgatacttgaatgcgaaatttaataccttgagcaggaattaaaccttgagctctatttgttttgctctctttggggaagtaccttagcagtcatctttcctctatgccacctagtcatcttcctgtcataaaaatttctaagcagagaatcagggtgggaagagaagggctgatcagtaggactgactgttaacttgtgaaatgagcagaggtgtacaagctgattgtgggaaacttctttcccatgtgattctttcttcatccatatcaggaaagctgttgcctaagaaccttgacgtgtgtgcattatgataatgtacttggaggcaaaggtaaggttagaaacgccttcctgctagctccactacacagccaaggaattcaaaactgggtacctctaaaacagagaggtcacctggggagaaggggaatggggaagaccctaaatggacctccatccttttctacccgattgcacaagctgattaagccctctgtgaagcctttctagaatcccccaggtgcactcagagtcttctgcttctcttgccagattgggagctcagtgagtccagaggtggtggtttccaggtgtgtatccagctctaatcatagttcctggagcagggctggtactctgtgaattgaaaacttgtgccaatgcatttatttactgggcacttcttggcacggccaagggggccaggaccaagtctaaaggtctccagtcacttttcagttaaccaatcaataaagcctcactgggctattacgggagtgtccatacacttcatagaagaaaaaagactggcctgggggtcaggagattttggtctcaatgttgattctgccagttacccagtgagtgaccttcggcagtaggactccagtctctctgaacctcagtttcatcttctctaataggaggaagttagaccacatctctccacagtctcttcatctctgctgttcttcaagtctgttggtttaaggttgcagggaggggcctctgctcagtgatggcaaatagaggaagaagggagcactgttggctgggcactcccaagtgctggacactttaaagattgacataacattttcattttagttctcaaaacacttctaggaggtgggcattttgctctccatttgacagatgatgaagaatctaaggtttgggaagattaagtcctgaga

SEQ ID NO: 55757 - DNA, 1175 bp, Homo sapiens
tcagaaaaaaaagttactgccaattaaactatgaaacgatgcattctcatcacttcaaatgtttctacccattataaagttttcttatacttaactagacataactttctatcatataactattgtgcaagcataaaaaagacaggcaaaatacattgaataagtattcctcaaacatctccaattagaggctgagttttcagaatcacttctgagtcattgatatgtgtatttttctccataatatcaccctctgtgccaacataatcactggtgatttaatgtctctggaatgaattcttaaaagaatgaaaagccttcactggggctaggttccaagccgcctccttggcaatgacataaagtgcttctacttttgactctggcctcacctgacttctgatccactatcacccatcccttgttctatagtcatttcattctcagggttaaaagaggagttccctgtggcctcatcgttgtgctttaatgtgcaccaaggtactctccatggactgtcttgtcaatccttaacagcaacctcatgggtactattgttatcccagtctacaggtgaagaagctgaggcttccgaagattaagtagcagtcatcaaccactgtgtgtggcaagacagggagcaggggaagcacaggtttggatgcaagcagccctattctcaaatcttgtctttagcccttgtcacctgtgcaatcctggggaacttattctgtatctcagagtctgttttaccagctactatgatctgtttttaactcataacacttctaacaccaaatgtgagggttttccacaccaacaaccaattttcatactctccagacaccaaccattccaacaattccattcaattctgactctaactacccagtgacattgaccaatcagctataaattaggattttccacacctccttccttgggtttgataatttgctagaatggctcacagaactcaggaaagcattttatttacattgactggtttattataaacggtacagattagtagtccaaaggagagttgcataagatgaggtctggaaagatcctgattgcaggagtctccattctgtaaaattagagtgtgccaccctcctggcatgtggatgcattccaacccaaaggctctctaaacccaaaggctgtctaaa

SEQ ID NO: 55758 - DNA, 1589 bp, Homo sapiens
gaggatgttggttgcagcagacaatttatcggagcccattttctcccttggcttcagcagggagccaggggctgggggtgctaagttgggcaggagtggaatccacccttctgtcagccgctggcttgaaagcaagcattagcacgtattcaatttggtctgggagctctcctctggacaccgaacctggtccttatctatttttcccattaataatgagctgttaaatcacattgctcatgccatttgcaagatagcaacgtgtggtttaattgtgcctgctctgttcccccatcatctcaatcctcctcctaatggcttggcaggcggggcagggctgcttgggaaccactggctcaggcctgccatttcctggtctagcaatctccagttttagaaacagggactgctgtggcggaagtggagtggagctccgaatgtgagggccctggggaggggagactgtgtgcactcacacctgcactctccctcctccccatcatcccagaggccctctcagaaatcctaatggttgaggaaagggggctggcctggcaagaggctgggcctccattcctatttcccctgctcattgcctgaggctttcaaacagttcccgctcctatctggtttttgctggcggcacaggcaagttgctgagttcttgtgataaggctggctgatacataaggataattacgtctgtgggtttggaatcactcaaaaccaaaggtgaaatgactcaacacagaggagggctttccccagagaggtgactcatgcgctggtggtggatatggctagaaaggaggtgcatttctcaaatgtgagaagttgacctttctctgctgttgctgggagagcccaggtgtgggagagctggccaggatcagagggcagggctcaggtggcctgcagaagcctgcagtgatgttgggagatggtggcatcatagcaagggcccagggctctggttccaccctgccaccaactggctgtgtaaacttaaacaagtccccctgtggctgccttggccctagagtcccaacctttacagcaagtgtgacaataggctatataaaaagtatcattctctctcttccagtagcttcaagaatgtgcttgtttcccttgactaaagcagcttagaagtggattgtcctgtgtttttggtgttttaatttcagctgccccttccaccatcgggagaaatgtggtcccttttaggataagatctgagatgcagtcccgcccaaagaggtccccctacctacccatcaaggtgtctgaaacacccacatttagatctaactggagagggaggccaggtaacgtagtaaaaagagcttgagctttgggaatgagacatgaatcttgggcatcatattcctcataccacttccttcttcctgaagtcacagttaccttgtcctgctgccacctatggcagcatccttgctagaatctctgagctgaagccctgggacagcatggccttcatgccctctatgccaggccttatccttgctgagttgctcctccactgcgacacttggatgaaatgctacactgcaggatatggtttctga

SEQ ID NO: 55759 - DNA, 1410 bp, Homo sapiens
taaaggccattgtccttttgaatatgaccatcccattacagactggaggtctcatgacccccaaacaacagtgtggaacagatgttgatgtagcctgggaccagggaaaggggagccaagcgtcagcctggtctctctagtgccatgaaagtcctccaggcacctgtgattctacttctctccaaggaggggagacaatagtgaggaaaagaacattgcatgaggaagtgaggttactatgctgcctgctggaccagaagggagttctatgtatcccctccccggaatcaagaagattttgccccactcacaacttgggatactgagagccactgttgctcagaggcctgcggtaaaagaggtttatctgctttctaatcctaacctgaatccttttccaaatgaacaaaactagttggaaacatgatactgccaatctcttccagattacttgagtcatctctgaaattgagtgggctggttcttttcaagatagattctccatcagtctgtcctatgaacccaaataatcattggcatttgcaccttgcttcgtggtttccaaagcatttccactcaccctcatctgaaccggttgtgtggggtgaaggttcagagcctgggctctggggtttggtagagttggtttgattccagctccaccacttcctggctgagacaccaggacaaacgtgcttaacctcagcttcctgctgtggaaagtgaggatagtaattcccacctcacagaggtttgggggaaggcgagacgatgcatttaaagcccttagctcacggtctagcattcagtgagctgctattgttattaccctgaattcttacaacactatgacataggtggggtaaatatcaagcactcctgacttagaatgtaagcctgcctcatgggcagagaccgtatctctttcacttacccacagaataagtcacagaaggtccctttctggaccgggtagaactgggttgacttgtaagacgtgctgcttctggagaagtgctgcttctgtcttccttagccttgacgttccatcagcaggtccttctgctggattcttgcagtgagatatgagagatgaggcacagggacccccgcctccatgctcacccccagctcccaatgagcagctcagaacacacaaatccagaccctcccaccttcctctctctcctctgaccaaacacgcaccctggtttagcttgagctgttgcccaccacaagtggttaaaggaagaagggtgctgtcatggcccagccctgccctcaagggacacacaatctggtaagggaggcagacatggaaacagactataataattagggagctataaaagcaccccaccctgtgcccctaccccaccccccatcacactccccctgaattcttccttt

SEQ ID NO: 55760 - DNA, 1901 bp, Homo sapiens
gacttcatcctcatttgttgtaattaacaggattttacaggattttgatgagaagtggctaatttggtatagaaatgtggagggtagactacttttggagcctgggtttgaatctgcactgtgtcactaaatagctgcatcacttaatttctctgagcctgtctccttatttagaaaatggggatcattaaaccaaagttggaggaacattgaaaataaaggatgtgaaatgcttagctcagtttctggagcattatagacagatactacatggtttctatgatgccgatgatattaatgaaatcatcatcattataatcatcataaagcttccatttattgaaggcttccacctatatgtccctatgttgtgtacattatctcatttaatctttataacaaccctatcagtgagtccattgttatcctcaagttatagatcaggacacggaggttcagagatttgcctgaggtcacacagctagtaaatgacaatgtcaggattcaaattcaggcagtctaactccagagcccaggcttttaacccttatacacagtgcccctgggatgaggattaataaatacgtgaagcctaagagacatgcatttctggatttcagttggctctgaaaggttggtccttgatgaaatggaaagtatgtttccttttatagcaagggcagtggtggggtgggatgaaggagggagattgttttaataagcacatgctgatgggggctgctctgtggaccagccttgctctgtctcaggggttcagccttctcttcctgaggctgtcctactgattcctctggagttgcagcaactcctaccctgacctgatccatgggtcagaatcagggtcaggatgagtcaaggctgactcattgactatccactctaatggcccttcctccccagggctctatggatgctgacctttgtcctcttccaaactaaagaaaaacaaataagcatacaagcacaaaaccagccccttggacttcctgctaatcctatttggttatttaagtgtggcaggtaccttctctcctcagggcctttgcatatgtttctactccttcctcctgggcttctcttcgcagttctcattctcagtcccatttactgttgggcgagttcctaatcacctttcatacctgcatgtaaatgttacctcttcagggaagccttccctgattatcctccactccagtctctaagttccccgtcctgtactccaacagccacctgtctgccttttgtatcacttaatcagaattttaattaaatgattatgagtataatgatttaagatttatctctctcaataaatgttttattcactattgaatccccaaatgcctgtaacagtggctgactctgaatttgttaaataaatgaactagcaagtaaaacctccgaaatctcaacatctgccctgggggaaaagcttatgctttgcaaggtgagcccttcataaatttcctagcttccttaatattgtggtcctactaagtgttcaggagaaagcaaacaaaacaaaattattacataactgggtagtttgagaaggaagagcagaaagtaaaattattaagcatctactacatttcagggcttgtgtttctcattgtatcctcaaataccctgcaatatagaagaaattatttgcatgtgacaaatgaggaaacagaaaaaggacagagcattaggacttgtcagtcccttactctggacttcagtgtcctcttctgtaaaatggggttggggatgagtgagcgaggcaacccttaaggtctgtgccaactcattcactttcctttggaggtttcgtcccctattgtttattagtgtgtttgtgtgtgtgggtgtgtgtgtctgtgtgtgcatgcgcatgc

SEQ ID NO: 55761 - DNA, 2853 bp, Homo sapiens
tgtcttaggagatccagtgataaatccatagctctctgttctaagcacattaagtgtgtgaagtcattaaccctcacagttacactatgagtttgctactatttttatgtctattttaaacatgaggaaactggggtccagagaggttgtggatgctgtcctgaaacctacatgagagccagttctccatactgatttcttgtctccttctctgataacagcagtaatcattacaaccatgacagcattaatcacagtggctgcaattcattgtttatcattagccaggctctgtgctgagcccttatgtcgggcgatcctagcagatgcctcacaagggtgtaaatatttttattccaaattgtacaggtgaggaaacaggtgagaggaggttaattacgttggcagagatggcataacagagccagcgctttacccaggactgccccagcccgaagtccgttggtcattgcatggtgcctgtgtattgtggcagggccagcacttttcgggcaacaggttacccagcccagggctgatcattttgtttttttcatctagggacactggactggaaagtagtcagctcttctcttcttgcttctcatggctgggtctcttgagttatccttggcagctgtgtagtaggcacacagaccaacgagcacagaggaatagaggcaaggaaggggaggacttagggttatgaggttttcacttttatttataaactcaaaaagggctggagttacacgatatttatttgcatacagcttcgtgatgtacaatgtgtgttcacatgctccatgttttttgatccccacgtaaggctgtgagatagacttgatttattagtcttggtttttaggctgaggaacaagtccaggaggttcaagggactcatcaggatcacacagccagaaaatagcaaagtctgttcctgactccaagtcagtaggttttgtcagtctgtgttgttgttggagagaacagtcgggagacacatggactaacacaaaaggaatggatgggagagcaggcaaaggtttggacctgccttgtcatcccacaggacaggtagccccagtggcaccatggctctggcaggcagacaaaccccaggatgcttaaactgggatccagggaggcttatgtgaaatgtccaaaatagaccagtttatggagacagagagtagattagtggttgcctaatgttggagaggggtggaaaggggaaagggagtgactgctaatgaatacagagttttctggggtcaggggtgattaactcttctaagactgatcatggtgatggttgcacaattctgtaaatatgcgaaaaaccatcaaaattgtagcagggagggctagtgcatgaggacctccaggctgggaagcaggagctatttcctgtgggctttctggtccgtaaagcctctggaagcagacgctgtttacttctcactgagcagtaattgctgtttctctgccagtctccgtcgcccttctttctgttctggcctggcaggtggtgctggagggagaagccagaatgagagaacctcttgttgcccgggcctgggttcccggtggtgactcccttcagcccgcaccactgctggaaccctgccaagctctgcagcctccccccagcctcaagccctgtgatccagcatggccaccagcctttccctcctgacccaggacacatcaagcccagcctgaaaaccaaacgcctgtccaaagactgcttgccaaataagaatggacatagccagtaacaacacattctgggggctgtggccagaattctgcacattgccctctgggtccctgcctaatgccttttgtaccccagcccagtctttgacattgctttgcatggacaggttccaaaggaaacagataaactctctgtttcccttcccatcaggaaaccacttcattccctggagagctctctacctaggaggctctgttgggactctgaggggtggaaagaggggagggtctgatcaactctgagagctgggggctgtaggaagggtggcagtttgtcttgagggacaacagccttgcatgggctgtaaagtgaaactcatagctggcagtttgctttcttgggaagattctgggtacagaggctagggcttaattagagacagagactaaaactggcctccatgagaggagactgagcaaggtgggcagtaatggtaaatgcctccgaggtgccaactaccaatggcccatgtgtctggggagaaccagagagggaggctagatgacggggagggaggcagggaaaaaattaaaaaggaagggtcccatcccctgctggtaggctaaaaccacaaggtaactgttctgcattcacattttattttaggatcttagagtgaaagctcaattaactagaatggggcaaaatgactaattggaattgctgaataactcgggaccaggtggaagccactttcctgtttcaccctttgccaggagaaaagaaaatgtttgaaaataacttggtctccttctccttgtcagtgctggagagggtttcccagcagtgtgttttcatactgacatgccacacagcccttcacaggcatgccaccagactatgcagatcagcacgatattgcattttgcaataactgaatatttgtgctgtgacactggcttggatgatgctgcaaagagagggatacaacctgtaaagaagtaaaatagtgaatccctttgattttcttgagatatgtgagaactttgctttggaaatatgtaggggagcccaagaaggacgatacgtaactctacctgcacagagacccaggctggggcaggggcggt

SEQ ID NO: 55762 - DNA, 3099 bp, Homo sapiens
gtttccctacctggaaaatgggaagatgtcatgtcatcattgatttggtgaggcaacatacacaaaacatctgggtggtggcactggctcacctgttgaagttctgcctgaagctggaggcccagttctgcttcctctagagcgaggccttctctgactaactcagtctggtgacatttcttcttcttccgagccactcttcttctttctcctctaggaagtccatgtgccatgagggcaagggcccccacattgacttaatgccatcgtttgcacattgcaagagcttgatcaaggtttgcaaagcaattgctcttcaggactcgtcaccatctgcaccccaccttcttctccagcatcctcactctctataccccagtgtcttcactcttcacctcccatcgcccactctgagcctcctgtatctgactccctgtgtccccagacactgaagttctctcttacctcctggcctctctgtttataatgccttccttcacttctttccctgggtagcttctggtcttcctttaagatttagcccaggtgttttctcctccttcaggaagtcttccagatactccaggctggttagatactcctcctctctgttcccacagcctctgacttctctcttagcacttgtcaacctgtatttgtcctgtttgttcacctctctatctcccctggtaggatatgatcccctgagggtagggaccctgttgttgtcatctctggagccctggcatttgacatggtggccacgaccaagccagtatttgttgagtagatggatgactggaggaatgagcacctagctgaaaaattctgcacatctgccacttggagtatctgctggttgggttatgcaacgtctgtgtgtgtgatgtcacttggccacctttacctttgcatccaagagactgtgctagcttgtcagggaatgggacacagtactacagagctgtgtgtaaatctgcatgtgcgtttcgtgcctccagttcaaaccttgttcattagcacagcaattaacagcagagcctaatgacagatggcccggctctgcacctgaacccctggctccttggcaggcttggagcagggcaggcacgtctggcatggttgatgttttcattgatctagtgagttcagctcccagggctgccggctatggagacagtgagctgacgtcagtactggctttggtggggggctgggcctaaaagggccaggcttgtaacagactcttggaaagcttgcagaagtttggggactttattgtttttatctttttttaagatattaatttcacattgggaagtcccagcaccccactctcaaattttcctaagctctaaggacttccctaggagatggtgtctctttcctgctaattctttacaagcttctaggctttctacaattgttatttaggattgtgatatccaggccctttgacttcagctaacagacacagcttcgtgtttagagtggcatataagatcagtgttgtgtaaacacaattatatttagcaagtttggagatgtggggtttttttcttcctgttaatcccgggtttgaaatggcttcctagttattaccctgtgaatgtcattcatttctccataaaagaaatatcaaatttgtgttcaaatagttgtctgggtcataaattcaagctaaagtgcagtgtgtcctaagccatagcagatttcacagaactggagttcattagagctagaaaggatcttactgtccaacctgtgtcattgacagatggggaaactgggccccagagaggtgcactgatttgcccaaggacacatggcaagtaggtggcagagctgaagccacgtgttggtctccagtggcccctttcctacaccatgtttcagatcatcagaaatgctcaggctttgctgtgtgccaatcccaaaccactctagaatgaatttcttaagtggtgttggatatgcttccttgagcctgccaccaaacttggtctgagtgaaatagaagagggggtgcaggcagaggaagtgaggactgcggtctgtcgttagtgatgtggaaaccacgcatcttctttacgaaggtgttgacaagtctgtgtgcccagggagccacgcaggggaagaaggttagaaggctgggtagtccctgaggtaggaagcaacttcagcgagaacctgcccatctttgcaaagtgggcacttctctcagtgagggggttgcaggcaaaactgcggggatagtcttgttcccacagaagaagtggttggagaaatacctatcacatcgtggaacagtgccctcattctgcattttcttatctaggagacaaaaaatgcctcctggagataacctacctgccctcccttcctttgaggaagtttaacctttctccctcattgatatggaatcccaggtatttatctgatgacctgctgagattggtagttcagaaaaaccagtcttcaggcttaggggaagctggacgtgtatcctagggtggaggcccaggtctcggggacaggtcccacctctcctgataatgttccccgcctccctgtcaggaggtgcaaaggtttgggtgggcattgtgaaatgttgccccagaagaaggtttccttctctttcagcatcatgctgagaggtccacacatggccctactgccacagtgtcacgaaggcagacctgtcctttctgccttgtctttttaaaaaaatcaccccagggccattacagctcctcctggttcctgattcactgtgttttaatcaagcataactcttagaatgagcagaacatgacttcatttttgtctctcagtgttttcttctcccctgcagtgaaaactcaaagaggccccacaatgttttcgtcctctgttaggtaatatcttgcataacttgaagtcacaaaacacagcctcagttctgtaattggaattcccagtcctgtgtgctaattccaactctgcatttgaattggagatcaatcttctccccttctctttctaaagtcagcttcagagtcagccttgtctcgggggaatgaatatgattggcctcttatctctttctctgttcttttt

SEQ ID NO: 55763 - DNA, 969 bp, Homo sapiens
atctgatctagtctaagtgctttttaaataaaatagaactggattccagtccctgctctgctactttattgtgacttgggcaagttatttaatgtttttaagtctcagtttgtttatcagtaaaatggaaataataatagcacctgcctcataggatatcatgaggattaagaggtgaaatatttgtgaaggactggcctaggtgatgcattttgcagggaaagcacctgagtcccaaagaaatgagtaacttaccaaggtcacatgactgttatgagaaggagagtccagaactcagacctgggttccttactcacagtttcttctgcagcacctatgctctgcagcatgtctgataagaaaatgccagacagaaagcagctcagtccaatagactctcttggtttgttttttctggttcctatatcttcaaatgtcattgatattggaaggatcctggtgaggtccaataacgcagccaagctgtgacacatctctagagtggcctggcccaggtggctattgtcatcattgagcttgacctttgcctcttccctgagctgtgaatctgtggaagctcactgttctattctagcacactcctctgtttcctttttcttttctttttttgagacagggtcttgctctttcacccatgctggagtacagtggggcagtcatgactcactgcagcctggacctcgtaggttcacgcaatccttctacctcagcctcccgtgtagctgggactacaggtgcacaccaccacacctggctaacttttgtttttgttttttttttttctgctaagatgggagtctcactgtgttttcctggctgatcttgaattcctgggctcaagcaatcctcccacctcaggctcccaaagtgctgagattacaggcgttagctgccaggcccagacttatttttcaattataactttcttttttttttatgctttagtgt

SEQ ID NO: 55764 - DNA, 732 bp, Homo sapiens
cagattctgagacagggatcaatgtacaggaaattggggcatgtcctggtaatgccatcaatgaggtggggaagcagaagctggcagagggagaggtggaaccatgaaacatgcacgacaaaggcctcagctggtccccaggtaggtctggggctgggaagagctgcagagtgatccccactggggaaagcaggccaggtctgtgcactcccacatgaatcaggcaaggtctatcaccttgggcaaggcagctctttcatccagtgcaattcctggggacgaactagccataaaccaacagcagccaacactcccagacctggggggggctctgggcagctcaccacagcatccactccaatcactgtgtactcataagaaacaacaagcagcagtgaactccaacccgtatgagttttacatggggaggccttattgaaggtcaatgttcaagttttattagctgttttggaagtaaacattgctcacatttttgccttcccagatttttgccttcccaggtactaaaggttcggggactctaggttgaaaatgtgactccttctttctagcattctctgagggtgtggggtttgtatgtcctgaagaccccaagaagatgccaccaccaaggaacaatagtgaatttctcagcaatagtgaattcctctgctcccatggtgcctggaagaagatgtaccttcctcgagcccacccagccccagccccagc

SEQ ID NO: 55765 - DNA, 1735 bp, Homo sapiens
gcccaggctggtctcaaacatctggacttaagcagtccccctgccttggtctcccaaagtgctgggattacaggcataagccaccatgcctggccagagcctgcattctttcgagaagttttgaccataattctcagtaaaaaatgtattttatatcacaattccgctcccaaacacacttacactaaataaataaaagattcctaaaacaatactcatctgtaccacgtgcagtgcactctgaaattttctgttttttttattaatcacgttattttaaaaatggtattagtcacccactaaattgttttcataacccagtaatgggctgcaacccacggttttggaaaagacagtgctctaaaattctattttataggacaatgttgatgtcataaggctggcatggggaatgatatggggtaggtgcccagggaaggctggtttccttgtgtgccctttctggcaaaccagagcctatgagctgctaccttctaggcttgcatacagaggcctggctgaacctagcacatttcttaaatcctagacttgccctagtggaatctgctcagcctcctccctggggatgggcaccatcttgggctgtgaccttcaattcaccggctccccagaagccagctcctccttgggaggtgaggttataccctgtccccacaacgttgtcatttccttcccctgagtctctctgtgtgaggattgttcccctaatcaggatggagacgcagttcattacaagctggtgaggcaacggctctgtgctccaggcccgagacaggctgtctgggagcttggccagcctcccactgccccggacaccagggcagtggcctcagagcagaaccagctcgctgggtttgtctgcccccttcccaagggacacaggcagacagacactgtttgctgagacttccacagctttcattattacaaaacctctgccatgctcagacaatgagtttcagcaaatgatggcactacttccgagagcatctgtagagcacctagaataacaactggactttattgagtgtttaccatgcaccaagccctgggctaaacacttcatctgcaggctgttcgtctttacggcaaacccagtaggtaggtataactatccccactctgcagatgcagaaacggaggcacagaatgttttggtagctaaacaagctcaccaggaggctagaaggtggccacacctagctggcccccctgactccaccaactgcctccctttgctgtattgcatgcaagaatgtgactccaagtttttccttccttctggatccaactctggcttcactctgctcagcaaccaggtgagtttccataggtgactttgtctctctgagccaagtttccttatctgtaaaacagggcctagtggtacttccttcctcaggctgttaggaagagtaaatgaaataatgtatataaatgcatctcccagagctcctaacacataagaagtgctcaataaatctatttatgaaagagttgattcagctgttttcctactgacttgacagtatcccacagccatttcccagaggcatgatgtcaccatccagaggataatagcagccaatctagaaacctccatgtgttcctgggcttctcatatttatgccttgtcttgcctcgctgccccatcttactactgacttccctggggcagaaatctccaatatgactaatatctcttggagggcta

SEQ ID NO: 55766 - DNA, 1879 bp, Homo sapiens
tgaggccagttcagatggagtgtgtggtgggcaagaagcataagctacggccagatggtgtagggccttgtgtgacacaggaaggagtttggtgcaatgggaaggcattgaagaagggtcttaagtgggagttaacgtgctggggggtgatgtgctctaatttatgatattaaaagatgactttggctcatgtatagaaagtaggcagggaggagagtggtcagagcagaagtagggaaatagcaggaattcaggcaagagatgatggtggcctgagctatatagggacacattggagatacaagtaggaagcagaatcaacaggacaagctaagagattgatatgggctgcaaggttagaaagagggtggactcaagatgattcattagtctagatctcagtttctttgagacattgaagacaagaggctcaaaccagaattcctgagtttcaatcctaaccctgccatctactagtggtatagccttgggcaagtgattcagtccctgagagcctcagtttctccatcagtaaaatggagatcatattaatttctacttcacagggttgttgtgatgtttcaatgagttactctctatggagtgcttagcataatacctgaacataatgagcactacacaaaagaactattattattattattattattattgctattaatactagtctattgatcatttctctgcctaccattaagagattgagcctttccaggcaaacaactcttgtttggaaagaaaatgttctggagaggagtaccccaggcatccttctctcactgtttgtgttcccttccccagcaagagtttggcaggcaaagctgttcaaagtaaacacaggttcagtgctgcagaaaatatcaggtttggtagcacggcaagtctggaccaaaggaaacaggcttgctttatgccgacttcactcggccactgcatcccaggggctgccccagcagggctggtgctttctggcagacaaggccttgatctgggagctcttcacctgtctggtttcttttctcgtgtgactcaggatgagtcatcactgtcactcaccacttcctggcctggacattagggttcatacgttcctgaactcaatacccaggcaacaagagatggagtccagaagaaagcaagtagggaggggaggcagtggcactgggcaatgtcaggagaaattagaggtccacagggtactagggagggggagaagccacctggaaagagcatcagatcccaacaaaagtcaggataacccaaccacctctggtttcagacacctagacagcgttcctcaacctttctgatcccatgtcctgccagtcgagaaagtgtggacaagatatagtacaaaagtaacaggtagatctgtttgctttcacaatataaaattataatattgaatataatttctaaacatttgtctgctgctccaaggttctgaaatgagcctgagtgtagcatgcccccagtcgagaatggagagttgtccttctaactatagtagtagtagcaatcataatagcacttttctgtgcaaatgctctaaaaattgagggaaagtggggcttttgtttggtgtcactctttttttaattgtggtggaaatatatataacatgacatttaccattgtaatcatttttaagtgtgcagttcagtggcatgaagtacattcacattgtcgtgcaaccatctctaccatctatctctgtaactttttcatcttcccaaactgaaactctctacccctgaaataataaccatctaccctgtcgccccagctcccagccccaggcaaccactattcagctttctgtctgtatgaatttggtactctaggtacctcacatgaa

SEQ ID NO: 55767 - DNA, 2201 bp, Homo sapiens
ataggtgcttattaggagcttgttgagtgagtgaatgaataagtgatagaatgagacaagtcaatgcataatctctgaggaactggagaactcactgggctagtatcaatgtgtattttatagacttctttgctatgagattagctagaagcacacagctagtaaagcagtggtccatgggttttagacccagaacagtgtcatggttaaaacaacacatttcagaagccaaaaggaatttcaacataactcaagtcctttatttgtattcctcaaacaccattaaagggacttaaaacccgcagttacacatctcaaggtgtttgtttccttgtgttttagcactctcgtccactgcccttatacttctaaggtcccttgcagcctgtcttagctaaatccccccaaactcccccagcccagacccacaggcccatcccacctattctctccctctattcccaggtcaagaggacgacactggcaggaccctcctgggagcagagaggacagaggaaggagagaatctgagcaggcagagcagggagggaaatgttacaaaagagaacatttttttggtcccatgacatataagatttgcatttcacatatgaaacattgtcgccatcaattgccttaaaaagtatccctaaggctgggcatggtggcttacgcctgtaatctcagcactttgagaggccaaggcgggtggatcacctgaggtcaggagttcaagaccagccaacatggcgaaacctcacctctactaaaaatacaaaaatcagccaggcgtggtgactcacatctgtagtcccagctacttggcaggctgaggcacgagaatctcttgaacctgggaggtggaagttgcagtgagccgaattcatgccattgcactctagcctgggcaacagaatgagactcggtctcaaaaaaaaaaaaaaaaaaaaaaaagtagccctacgttccatagtccagtgatttgaagtgtgtttgtagctcagtgatgatcttgcatcatctcaatccagggtggggcacacttttcctgtccctcctcattcaggcccttgactcatcctttgtttcaaggctaggttgaagacagggacgctgagccacctcaccctggtgtccaatctgtggctgctgagaattcacactctttcacatcagctcatctgcttgccaaatcagaagtaaggccccaggatccctggctctctcccttagggtattagttagcctgctgtctaggcagaatgcaggtaacagacaataatctcctatttcatgcttgttgagtgtttccctatacatgacaggcctatgggagacaattaggaaaccttggattttcatctcttgtccattctcttgggatgccagcaaaatgaaggacaagcagacaggtgaatgggaaaatccatggctggacaagtgacggccattagagagatggttagctctagcaggggcactgggcacaaagagacagtgcagccagcaccaaagttttattgagctattcctcagtgccagaagctacactgggcctttctgtatgaaaggccatttaattgcacaagctatctgcaagatgggcttcactgcccactccccacaggctccagccatgttggacacctacatgcactgtcactccagtgttctcatctactccatttcatctcactgaatactttcccattccaaagcctcagatggcctttctcattccttcctttccttcttcactgagtcactaaaagtggctctaccatgtacctgctatatggggttgggcaagtgacttaccctctctgtgctcaattttaacatcactgaagtgtggatgacaatagcacctctctcatggtctggggatgattaaatgagttgggatgtgtaaagcacagtgccttgtgcacagtatgctctgtttaagtgctaactgtatggattacctaccaaaggttaggcattgggtaccatggagctcacagctccctctccttccaccgccagtgagatcctgcttgcaatgaagctcagcactagtgagcctttgagccagaagcacctggctgagtggtttgagcttggtaagagggtcctatccagtaccctatccagttccctttcctcttagtaaattccaagtgcctttcagtgcccttttaaggacaagtgccaatgag

SEQ ID NO: 55768 - DNA, 1876 bp, Homo sapiens
ggaggctgaggcaggagaatcacttgaacctgggagacggaggttgcagtgaaccgagattgtgccactgcactccagcctgggcaacagaacgagactctgtctcaaaaaaacacaaaaagatttgggggctattattttgcccctctgttttttcttcatttccttcccctttggtacaataaactcacagtacctgcctcagcttttgtttctgtttttgtttagaagagagagatgattctatatccttcccctctctaccccaccatctcttgactcattcctactcttcaagattcatctcaaacatcacgtcctttagggaaccctggttcctagggtggtttgggacaccccggctgtgttctgtgctccccacatcacagcccttcctttttggcggttcttgttgtgacctgtgtactcctgtacctggtactgaaacaaacactaggtatgagcttcctgagggcagggactgtgtctaagctatctttggatttccagtatctaacatagaacttaacacataatgtgtgctccttaaatacctgaggaatgaggggctgaatttagtgctgaaggcaagaggaagggcccctggaggggagccctacctattgggcacaagagaggccaggagggttgggggccaaggcacctggagtgaggggcaaagacaggacatcctgggcacagtgggccatcccatttggctggagggtggggttcttgaatgagaatagagagaaatcagattggaaaagaggagggctccagaaagggggctggaacatcaggcttgggggtttggatgttattccagcacccaggacaagcctgcctcctcacaaaagatagctctggccccagcacatcattcttttcatcccccacccccctctttagagcgttttcctgcctttttggcaccgaatgcagtgctggcttctgtcctgagcagcgtgatctgctgcccatgagtcaggggctcggccattcctaagtgactaaggctgtcgcctcccgccagtttcccgtaaccgcctgagtaaagactcagtctgaatcactgtttattgtttttaagggtttttttcccctcctctccagtttttaaatatcaaccacccagccaggccagtagggctgaatgagtgctggggaactgtaggacacacccctcacccgcacacacaggagggatgcggaaccccattctgcttagggaagcaaggaggctgtggctatggagccagacagacctgcatttgaatcctgcctctacccctacctgctgtgcccctttgggaaaatcacttcacctatctgaaccttagtttccttatctgcaaaatggggataataatgcctatataagagggttcctgtgagaatgagagctaaaatttataaaggaactggcatatggcaagcattccagaagtggtaattattataaaacacggctcttctgctcaggaatgagctcacgtgagagaacggtaggggtctcatgccttctttgcacctgtcatttcagtaaagccaaacaatcaagggcttccaaagcccatgctttaggaatttatttcagactactgatgaatcacttagttctattatgaatagccaacatttttgcagcacttagcgggtgccaggcactgttctaagcattttacattaagtaattaatttaatcatcacaaacccctttggggtaggtattatcattatccccacttacagatagagacagaaactgaggtgcagaatttaactaacttactaatgagagacagagccaggggttgaactgaaatgatctagcttctggggacaaggtcatgcctggcagtgagattctctc

SEQ ID NO: 55769 - DNA, 2134 bp, Homo sapiens
ttttcatttcctctaaacggaatgtcaggggttgcggggtgtaacagaaagcctcatggcagcagcttaggaaggcggggtcagtgatgtgttttcttaaaagagaaaaggttgagttgggtcaccttcttttttagctgcttgtgtcctagcaaggactgaatttttatgggtcataatttggtacagataaaaacatattgtactgagctcagccaaatcccctatgctggcattactggtagagttctcagccagctgactgggcccatccaagaggcctgtggggagaagagtcaggcaaggcctggatgttctcttggagcaccttggcaaggatttggatagcactgtggtccccactgcctgcctcagtagagcagagctgtgcagggcatccagaaaggctgggcttccagtcgggtctgtgtgagttggctctgcccctttctggctgagtgaccaggacatgagcaagtcattcagcccctggggttgcaaactttactccacaaaccagcacaaggacaaggccacatttcaccaacgcccagaggagggagaaaactcaggatattaaattgtatcttcaacaatataattttattaagttttaaaaaatgacctttattctgattaaattgtctgccacaattgtttgcattaaaatatcttttcttttgccaaaatgggacgataagtttagatgtagcattttttaatttttaaaatttccttactaagataattgaggtgaacaatccatgtacactcccccaattgttttaacttgattgcgaaatccaaaaactggaaatcactgatagagcttctctgaaaattagtttcttcatctgtgaagtggggataattagctccattttcttcaaagggtattgtgttggaaaaaatgaggtaatatataaaatgtctgttcctgaactcaatttaaatagaattatacttccttttcatgccaactgttatatcctaggtctacatgctggacttcagcccttgtcacaatgtcctcccatcatttctgggagctttcccagggtattgactcatgtgtcaatgcccagcaggaggtatctgccctgctggcacagttgtcaccactgggggctgtctctgagaccccagtgatgaaggtgaagctcttgatttgatctaaaggtcattcttggtggcccacaactctcagaagaggggcagctgctcagatataccccttagtctggagcacccaagcactacctaaatgctgattatcaccaaacttggtgctttttgagctgctactgcctccaccatggtaaatagtggaggccaagctcctctccaagggcacggccaagggcactcacccacttccagatcactcaaggcccccccacactgcaagcccagtgccaaccccacagacaccagagtgaggaatatatttctccctcatccagtcctgagtctcatcatatttccagcccttccgggatgattgactatgggaatacccattctcttcaagggtagagttcttctcacccatccttcaagagtgctcacatccctatgggctcaagagcccttggttggcacattgcccaaagttgggtcattataacccatggcctctcagtacagtgcctggcacattgtaggtgctcagtgagtgctgatttcccatccaagtccctcactccataaaagcacatggtcaggcagggctaggacctggaaatccttccctcattctagctgtagttaatatgggtttggggcaggatgagagcaagacccaaatgctgacatcagtcctgaccctcagaggaggccctaccatgatcccaccctgggccagcctccagcgaatcccagaccttccctcagaaggccccacagactgcttagctaggcatgtttgggtggtttgtcctgccctctcagttcagaagctctgccatctgcttttaaatcaccttaatttccagccaaatgggagttttcctctcatttcaaaatgcccatgatatcatccatcagtggggagcagttgaagaagaagcctcgaagacttccagaccccagcagtaggggtggggaaagcaggtttcaagcagcccttactaga

SEQ ID NO: 55770 - DNA, 2529 bp, Homo sapiens
tgagaccccaagcctctgtgtcacacaatttacccatgtaacaaatctgcacatatatcctttaatctataataaaatttgaaatttaaaaaaaaaggaactgtcctgcctcttcctgaatagggcaatgcaggaagagacaagatagttcttttttttttttatttcagattttattatagaggaaagattaaagggcatggcatgtctggagatggctggtgcaggtggcaaaagaaaaactagggagggaggcaaggatggggcaggaggggtcttggggaccccgactgggacactgggttttagttaggtgattggaatagttaccacctgtaacaactagactgtgaaggcatttgctgggaggggcttagcatacatttctacacaacaaaaagtaggtcattgtcttcagaagagagcagggaaggtgcagatgcttgtgatggcaattggctctgacagcagctccgtgctgagtggggaggaatgtgagaagggcctcctgctcctttttcccactgaactcttgctttgacacgttatcgtaacgctggggtcagtcctagagcagctggctctgtgcctccttccctggaagctgccttgcctacccagcacttgtgcccactcagatcatcaagcccaccagaatcttcactacactgttgctcagaacccactcatcacagcacagggctgagtgctgatggggctgccatggaggagctgcaaacccacttccctgctcattgtgtaatccaggagagaacggggtgtaatcgttacacacatgagccagggtttgaattccaactccatcatttaccacgtgactctgagcaagccccttgacctctaggaagctcacttttctcatctgtaaaatgaggtggccatccctactttgcagctttgttttaagcattggggatataattcacaagggacctagtaaatgtgtcggaggccctcagtaaatggcagctgttattatgcctgcttaactgccattactgaattctagatccccgtgggcccagagagccctggtggagagccattgaataaaccccttattttgcagatgagaaagctaagcttgaaaagggcagtggctttcccaaggtcacccggactgtgaagagcacaaccaggagcaggagctacctgtgagaggcctcctggctccaaccacagagcagaggtgaaaagttcagctccagcttggccacggccacccatagcctttgctctgatttcctctctccacaatggcacagacacaacctttctggaagggtttgtgtggacgagtaagctgtcattccaaagtgctgaaaagtactccacaggtgccaaatcatgactctccatggatttcaacacctcggttggcatgccttcccaccagatgcaagcttcatgtggacagtgctcacgtgtgtgtgtgcatgtgagagagagagagtgtgtgtgtatgtgtgtgtgtaggcgggtaagaaaaaggagaaggagggagaagaccacttagaggattccagacattctgaagtccttttccatacctgaactccaggacattatgacttagccccctgccttatgaagaagaccactgctagctacttttgcagttgttccagatcctacttccagccacctgctagagaaaggcgtgaagaagggcaactggcctagggcccccactctgtggcccacagtgaatcagtaacactgttgctgaaatcttcagcaaacaagaagcacagtcaggaattctgtgccaggttgctgatgtcaaatggagtgtcttagcaaagcatggagtttagaatcagacaattaagaatttgaatgctggttcttcctagctctgtgaccttgggcaaattaccacttgtgtacctgtttcttcgtctgtaaaagaggggaaaatattacttccaagcattgtttgaagcaattaaatgggatgaagaccctggtgcataactgtttagttcttaccccaaatgctgccaccagcctcagtggcttcctgtgcctgggttaccatagcacctgagctgatcctggtatccccttgattttacttatggattttgaagagtcagaaagataccagtatgaagaggtggtcactgaaagcaaagcctgttttccaagaaaaggcatctcacttggagatgattgccttgggcacctcgtatatttggggcaaaggcagctattggtgatgaggggtagggatctgcttttatcccatatgtgatactccatagtagaagagtagtgcagcaccttgaatagacgactttgagataacagacattcatagccttaccatgcatttccttgtgaaccaagttagttaggcaagaggtcagatgtggacagatgtgatccaggactgcaatgagaaaagttgagcccctctgtgcctctcctggcctgcaaaactgcaagtaaagtgtctacagggagcttccatcacacactctctagcttccttttcctgcctgg

SEQ ID NO: 55771 - DNA, 5782 bp, Homo sapiens
agacatagacagggccgtgcatttcagcctaactagagtagaaagttgctacctagaatggctaagaaggtgccttctcatttcttaatgcttcagaggttaagactttgatgtttcctctggtctgagatctttgtcactttgggccactataacaaaaataccataaacaggatggcttaaacaacaaacatttatttcttacagtactagaggctggaagtctgagactaggatgccaacacggtatcagattcttggtaagggccctcttcctggtccacagaagactgccttctgtgtcctcacaaggcagtaagaaagcatctctctcctgtctcttctaataagagtgctaatcctatcatgagggctccactgtcttgaccttattacctcctaaagttccccacctcctaataccatcacactggggattacgggtttaacatgaattccagggggacagagttaatagcatctgagttattctaaatcaatgctatcagcactgaagatcaggctatagggtgggcacaaagtgtcctggaaacaaagaagaaagacaaatagtttataaacagagatgactttgggggaaagcagcagtaatttaacaacagggaaaataaagcccagcttttattggtctcttacattgccaggtacttgtgctaaatgactgccatgcaccaaccatctcatttaatccaaacaacagctcattaggtaaatgtcgtcaagcctccaccttactacatgtgaaaacagaagctttataagcatgcatgtaagcttaaataacttgcccacttctaatccaagcagttctacagggtgggaggctcctcattcataaatcgcgaaggctggcctgcctgatcatctctcagtttccttcttattctcatccactttcagtcagcgaggaaaccacagagcaacccaaacagcgaattcgagtcgaggaacctgttggggccagtgcgtcccaggcgcggacagggaggggctccatgaaacgcagcaaggtttggccagagcctgccggggtcatggagcctctcccggcttcttcaggccactctaattacagagtctgtggtaggttgcgtggaggagctgtctcggggcgggaagcttccctgcgtattgtatttgcctataaatacttcaaatagttaagtgaaatgtgcagcctttgaaaactggagaggaagccgttgggaggccccccgcccagccggcctggaagagcaggcagagaaatggctggcgcgctcttaaagcgggagacgagcttcggccctgcccaagccagatgggggcagcgaggctgcgggcgtgactccggaagactcaaaccgttaaggtgaccggagcaatttgaaaaaggaaacaaacttccctcgagccgtgcccgcgtggctctggggcggacggttgcgttcgaaagggcatttttcaaaagaagggtttcaggaacgcaggggtgtgggccccccgggaggcgcgcggccggggcagtgccgcaaagcggccaccagcccgctttgtactcgcggccaagcgcggccccagagtttcggcggcggccagagtttaggccacaccctctttgcagtgagacccgcggccgctgattggcgcaccgtggaccaatgggcgcgccggggcggccccggctgtcagcgcgcgccgcagcagcgccggcagcagcctgtcctcccctgcgctgagccccgcagccagcgcagccttcccgggaagcgcggcggccgctcccgagcgcagccctgcccggcccgccagccgcgcgtcccggcgcccgcgccccacggccacagccttgcctctatctagctcacggagcatgtgcagacccgcaggcgctaaggtgctctcagtccgggggccttctgggcagcggtgactgtcaccccaagagagacctttcgggggctcttgccgcacctctgctgcgtcgcgggtgacactgcggtgctcgcgagcagggtggcagctgcctctcggtggagacgtcttgggacccttgcgcccttcttctctccttccttcgctgctgtctcctttccttccttggctgctcgctctttctctcgccggctcagacccgtagcctccggaacgggactcgtgggtcgccgccgcctctgtctcttccaaaggggcctcctcacttcggagatgcagtgacaagttaatatgggcgtccaagcctctgtttcccaggaggaaatttgcaagaggcggcagcccctgagcgcccagagctcttgaaaggccacccaggagaggtgtgagacccggcggcagcatccgtccaggtgggacccgctgagcgccgtggccagtcccccattcccatcccggcaccccaaaggcgcgctcgcccgattgcttcgagttccccgacctggggattttttttttagccgctggtggtgggcgcctcgtgggctaaggcccggcgcctgctctgctacccgcgctgcctttagcggtcgcccccgccgccgctgccagggacgtgctgggaaagcccaagccccgggagaagatgccggccatcctggtcgcctccaaaatgaagtcgggactgcccaaacccgtgcacagcgccgcgcccatcctgcacgtgcccccggcccgggcgggcccccagccctgctacctgaagttgggaagcaaggtggaggtgagcaagaccacctatcctagccagatccccctgaaatcgcaggtgctgcaggggctgcaggagccagcgggggaggggctcccgctgcggaagagcggctcggtggaaaacgggttcgatacccaggtgagagatgccgtttgccggggtactgttctggaaggatggatgaatagttctttcgggatggtgtgggagaaagggctggatgggagaagggtctaccatgtggccagggaagggaaccattccccttaggccggcaggttgggggatgcgcgaggagagtgggccggccggtgggtgtggcccgggtgccggaggtttgccttaagagctcttcgagacctgggatggcgggcacgtctgcagcatcttcctggggaggaggaaaggtcgggatgttctcaaaaaacgtgtgcatcgctggaaatgtgaggtcctgcatgttgaggtcttggccccaagaagccagtatccgcagcagcagctgtgtgtctgtctggcggttccgcagagattctgttccggacaaggaatgatctaaggccccattgggttcgacgccccctagcctggctgtaagatccaggaagaaaaggggatcgcgggtggcagtgaacctgctcttcccttggcttgaagatgacctgtccctgccccatcctgcggggtgacgggattccgggcaaggtgctgggactgcggtactagtgcaccagctgaggccggcagctggagactcctagcgccttggctggctgttgcggtgggggtgggggtggaggtggctgcctcagaatggcggccgaagctaagcccctccttcctgggtggtagatcctggtgttggtagcccgagtgacggggcgtggggatgggagatggcttgaagagaattggtgactcctacctttccagacagagcctgcatccagacaagccctggccgtgcaatctcttttacagaaattagcaagggccaatcaggttctcttggtcctccccgctccatttcccccttcttctggtaggagggggctatattttcttggcagtcagtcagcagggacttttggggacaggccgacctgacggatgtgactgtccggttaggagaggcgggaagccagaggggaggtggtttggggctggtgtcaggaaaatggcaacagaccagctgacctttttggcacatacttccctgctgacaccatctccaccttctcctggagctttctctgatcagaggctagagctcaacacgttcctaggctttctgatgcgggaactggagctgaagctaattgtaagcagacttttggaactctgggctggagaaggccctcaaagcagattaagctcccacaccaggctgataagcatgccccttgctgctgcacttgctaaacatttttggaagctgacaggtttgagtgatggtgtgtgggaggaaggcaagatttcctccagtgctccgggggcctgcctctgtgagggttttgtgctctgctcttcttctgttgttacgtacaggatttgtccagtgggctctgccatgggggtgagcaccagggtacacttctgcatggggtttcccttcatccatggacttggggtttatgaggtgtagtgggcagtcggtgggaggtcagtacagtgactcgggactggaggtgacacataccctcgagcctgatgaggagcacccgaggaatgagagggaaagtccatgctgggattgttcatatccaggcagctgttctgcctttgcccgtttgacccttcatttaacaaacattgtcagaggactggcagtgcataggctctggaaaggtgattcatcaccctgtccgtgaaaaaaaatgttcttcagcttctctctgaggggctggaacagtccacttccctcaagactttgcttccctcttttgcccttggtccataatccccccatttcacctctctcgccctcaatgggcccttgtgtactgatggtgaacatagtttggatggactgctaaggaaattggccacttccagtggactaccctgatttttacctgcctgccctcgtttgccagtgcccaggggttctgggggctcttccctgtggcagatccctgtctgcacagctgacatcaaagtgattttggccaatgggattttaccttctttgccagggcttctcccacagtctgcctgatagggtacccattccccctccaaaacagtctcttggttatggcatgaggactgtgtctgactggccatctggtagtttccaggtcccaaatttggtatatattattagaagatactcaggaaacaatgaattaaatggcaaatgctctcttggggcccctgactccccttttattcaggggatttttggcaggagattgggttgtgtagtggctgataacatagcttttaaagtcagatgggtatcgctggtgtcttgcgtctgtcatatactagctaggtgaccaccttgattaatttctttgggctttagtgttctcatctattaaaaaatgagcatgaacaaccattagagttgtgagcattaagaaaaataacgtaaagtgttcagtgcagtgtctggcaaataaggaacacttaataaaagtagctatttatattgctaacctaagagatggggcatgctgaatcaacattaatagcccgtaaatgagaaaagatatggcttattctctcaagcccctggaaaggtatcaatctgttccaaggatctgtagaacatctatcacctttctagtacagtaccaggcagaacgggaagatgagggaagggcatgtccactttctgagtgcctgatgggtgaggctctttacatataatctcatttcatctttacagaaacacttaaatcaggtctgatacatccattttctatgacagtaacaacatggtaacaataataacaatggtaataatggccaaatccttatatatcactttctatgtgccaggaattgttctaaggactttacattaaaaactaattttattcttattacaatcaaatgagataa

SEQ ID NO: 55772 - DNA, 1397 bp, Homo sapiens
ttgaacttactttaccagtaagaagaaaaataggagacagtgagaggactagccttagaggagttctgggacttttttgggtcacacagctggtatagacagtgtgtggcaggatttgaactgaggtctttctgattcccaaacctgtgcttttaaccactgccttcttttgccagtaattgaaggaggcctgagtcccatatgagctactgctttagataatcaaacctccagaccctcctcttcttggagcctactccctgcttccctggtctcggcccttcttgctgcttccccctcgttggggccttctgtgcctgtgccagcttgttgccagaggctctgtgtttataggatgaggagccctatttggcctttgcccacatcctgctgcaatctgggcaggatctccttgtcctactgctgtggctgctgtcccccaggtgacccccgtgctgccggcccagcagggtccatgtgcctaacagctggcaggaccttgttcctgtcctcctgccacatgctggctgcagctctgcagacagtccccatttcatgctgatttgctttgattcttttcagacctgggagtgactcatgtttacttcaaaatgtgtgggccacaagtgtgccagagctgtcagaccttccggtgtgcaagctttgatcgttagaagacaagccttgaaggaaaaaacctccatttaggtgacaaaaccagatttagaataacctggcttacttgggatatctgcttagtgatctgtgcctttaagtactagagacttaggacatctgagccagaggagacctatgaggccatctgttcccatagctccattgtacagatgaagaaaccatgacccagagaggagtgtgacttgcctccagtcacccagctccaaagagcagagtaaaaaccagaacccaagccttctgactgtggaccagtattttcatctcagttagtaatcagatgttctgctctgaaaggcctgatagcttaaagattggaaccagccctatgctatatattttttcccctccttctaccaagtagttaaaatgagtatctttttttaagagactgggtgtctctctgtcacctaggctggagtggcgtgaccatggctcactgcagccacaaactcctgggctcaagggatcttcctgcctcagcctcccaagtagctggcattacaggtgtgagccaccacacctggcccagaatgagtgttcttaattgcttcatattaggaagcttttgcacttggctcaaagaatcagaaaaatagggcctctttgtggatggtataagtgtggcaataggccaacactgaccacctcccatagtccagacactttacatacattatcccctttaagtctcacaaggg

SEQ ID NO: 55773 - DNA, 1213 bp, Homo sapiens
atttaattgccataaaagcagtaaacactgagatggatacttttgtgattgtttccattgtacagatgagctggggcaggtaaagcataagcaacttgcccaaggtcacacacccagtgagtggaggcgccaggtctgaatctcaggcagtgactacagagcttgcctccttccccacagcatggtcctccctcagtgctgccgcccactaaacccaagtctagttgagggtggggaagagagacacatgcaactgaggacacagaaagggaaagcaacttgtttaaggtcccccagcaagtgagaggtcataaaacccagcaaagacttgctgtctaaagtaacacggggccttggtctttcaaaagtattccctctctaatggagaaggacacgatgtcctggaaagtactcctaaactagagacggtcaccaggaatcccgactgcctggtggactccatggctttcctctttggtccttgcctctcactcatttggaatcattccttctctggattgcagagcagaaaccaatataaatttgacccagtctctagaaatgtttacctggctaaaaatatgccagctttgtcatatttttagccacatttagatttgaagtatatgaattgcccacacccatgtattaggcatgaactgttggtacattttgtaacaggacctgctagttttccattccaaagaactggaattcagtcagaaatttgtcatttgcaaataccaactctcgctacattccattgctgtttttaagagtgtctcgtcacctggattgtgaggaagcaggccatgggcgaggccaggctggctgggctgccttggtgcattccccaggtctggtggcttctaatcgacctctgcctggctctgccgaggccctcgccgttctgcggtgtgttgcctttggattagcataagggcagacagggtgcttattttagaactggaaggagaggagatatatcaataaaagaaatgggaaaggaaaaatcccttcagtggtttaaaaatatctcttccttaacaggctagattatttcatttcttaaaaacaactagtaattttctcctctgaaacagcattggaaagagaggcgtgtcagactaaaaaaggaggggctgaaatggtggcctgtagttttcactcccctgtcctgttcctataggataggttattttccccagtctcc

SEQ ID NO: 55774 - DNA, 664 bp, Homo sapiens
cacttgggaatggcaactagagggaagcatctggagcagccagctataccctccttccacctccttctcccaccctgatttgctatagtccagaggcctcaggagaaatgagcttggatttgggtcattgaaaaagagagcctaggccccttcctagggcaatcataaaaggccccttggggggtggactgcaggggatgatcctgtggaaggctccaggaggacttggtaccctacacccttgagttttggctcatagtcagacgatgagtcttggctgaacctgatgccccaggatgggatggactgggtagtgagccaggctataaactgactcatgcaccaggcagggactggaccatccttggcccaggaaccaggtcagggaatgaaaagatacaagaatctcttctttggacttcccctaggatagaaactggggtgtatagatcagggtagcctgtacatatccacatttgggaattttatgtcctagatcatgagagtagctcttgattgtagtaaataagacagctgcataacaggagggaaaatgcagtgatagtacatgtcaaacttcatcacagccctgtctcaggagcccaaggcaggaggtcagatggtctgggatctaatcatgggtctagactgtgaccttgaacca

SEQ ID NO: 55775 - DNA, 1942 bp, Homo sapiens
ttataactctctgccagtgggggagagccaggatttccatcctaggatgtcatggctgcccaaatcagaaacaagttccgaggtctgggtggctagtgccatctttccttggggagctgaaggattcttgagccttttcaggataccgaaagttgctggggacccctggagggtcactgccagatgagaggatgctggacctaggacaagggttgggcaggaaggtggggaggtccccagtcctcaaaggaaggcacccggggcctgtggcaggtggagcaggcagacgaggaaataaaggccacaggctgcctcctctgtcgctgcctgacctctcctcctctccagagggccttgaatggcctttctccagcagcggccaggcaaggtgtgtttggaaatacccaaactctgtccttcacgtggcaggaaataaatattgctgggaacgcagcgtgtgggctggggcaggggtgtgtgtgtgtgtgtgtgtgtgtgtgtgtggttagagttgtgggggtcagaaaatgtgtgtgtgtgtgtgtgtgtgtgtgtgtgtgtgtgtgtgtgtggttagagttgtgggggtcagaaatgcatccatcctgcagccatagttccaactgctccagggggaggcggctctgtcaacttgcgtgagttctgtgcagaaagaaaatgcggatggagatgagtgcgcatagtgaggcgccggctggtgtctgagctaagaacccatggggacccgggagccatgaactgcgctccacagccccttcccccggcctcacccctacccatcttctgcccaaggctctccctactacccacgccctccccgaaatagttaagtatcctcccaccaactccgaccatctttcccccttcgcgcccaccggcggcagtggcgaagggcccactgaagcgccgggtgccacgcggggcggcccgcgggccagctagggggcggggaactcaccagccgccgacccccccccccaccccgccctcggccgccgcggccccagcggcctccgcgctgcgaggagcgggcgcttggacacagggcgagttgtttgatttggcggaggcggggaggccggcggggagcgagcgagggaggcacgagagctgggcagcgcgggcgccggtctccagggtagggtccccgcgcgcagcagcggccccggggcgggggcgaggcgaccgcgggcgccggggatgcctggaggggccgcggccgagaggagacccgggactggacggccagacctgccgggcgcgcgggcaggtgcttcggctttttttttttttcccctcctcctttttcctctgccccttccttcctcgccctgaagtaagatgagcgtgatgctgtggcgctgggaacagaataacaccaccatgaagctggtaagggtggattgcagaccgcaccccctgggcgctgctctactttttaaccccccaccccgccccccatcccctttaggaactggcccgggtggtggaaagcccctgaaatgcattccgcacttggtatttcccttattgttttgaagctagatctcaggggaggtgtgtgtgtttaaaccaggaaagtcgatgtgtgtatgtctctggttgtgagtcattgaaggggggtgggactgggctgcattatctctccgtcccttccacctacgaattcctggagctctcttggattgcacacgctgggattgtctcctacgagcatgtctgcgccctcacagcctgtcccgggacagcgtggtccgcgtcccccgagcccccattgtgtcttgatactttggggtgcacatggctattgatctctactgcggtttggcttgtctgtggggaatacatgagccccgagtgagtgagtatgcaccgggtcctcctcccgcctctcacaatggcttagttctctttcaagctt

SEQ ID NO: 55776 - DNA, 534 bp, Homo sapiens
ctccccctttctggaccagactcggctgtaagaagcatggagaagtaatgaagattttttacattctcagactgctttctgggaatcctgcaaagtcccgacttcttctctgattacccttctcatggctgagttcaagagcattttgaaacccggactttgaatctgggaaaatgctttatgaccatttttatgacctcaaagcaacccgctaaggcaagttatttccctctctttgccaagggggaaaaaccaaggatctggtaaattgcccaggatttcccagcctcggatgctatcttgtgggcggctctcatgctcccggctgcatgctgtcccttccattagacgtgctttggccgtttgaggaagggcctggtcagtaacctcagcccacattttcatggatttcatggtcttcctctggaaggaggaaagcccaattcagagaaccatatactgttagaactgcaagttttcaagacagagttctagtccaaaccaatccttttatactcgggccaactgacatcc

SEQ ID NO: 55777 - DNA, 1197 bp, Homo sapiens
aaaaggagaatgggtgtgtgtgtgtgtgtgtgtgtgtgtgtgtgtgtttgtatgcatgtgtgtatagatacatatgtgtatgtgtgtgtgtcttttgggaacttttgtgctttcattacaccatgattaaaatgtgaaggtgtgtggaagcaacattgggttctccaaaaacctgggatcccagtctggtctgtagccttgggtcatttatttaagcttcagaaaatttccccatcctagacaaggcatgaggccaaatgaacagtaggtcttacctcaggacccagatgtattctttaattagttcctgataagtttcctcatgaggttgttaggactgaacatttcagaagcaagcacaacagataactttatttttttagggaggttttgtattttaacccccgaagtaaccttatagtttatttttccttgtctgattacaatctcccaacttgctgacagttcacctttgaaatgagtcagctttgatcagggatgtggcagccagacaggtcatttttactgtctgtgacttagtccaaccagtttggcaacagcaggaccccatcccaatttagggaatggaaaatggtagtcagtctgtggtggtgcggcctgccccctgcctgtgggcagcagattgcccctctcctctttgcactgactgactgggtctccccaaaggcagagtcctttgccagccctttgctgtcctccttgggcacctctccctttgctgtgtcctctccaagcccagcattgcttcagattgctaaacgatacaaagtgtgtcctcactgcctcccactttccttttcctcttccctctctgaggcttacgtctgcctggatctttttcttttcagtagagcaaggcagtttcggcctccacctgaaagtggaagtatagggtcaggcacatggacctcctagccctgaggatcatgagccaggctaacaccattggggactactttcggaggatgtggctgagctggaatctgcccccatcttctggaggcacagtgacaaagaagggcagtctctggctgaatctgagttcaaatcccggcactatcacttactagctctgtaaccttgggcaagttacgtcacctgtgagctcctattttttcaaaatgtgaaattaagaggacaatagtcttgaactcccagggttgttgtgaggattca

SEQ ID NO: 55778 - DNA, 721 bp, Homo sapiens
ctcgtaggcactgaatgtgggttatcctgaggtgtggatgaagcaggcacctacaccctcatccttaaaatatcacctgtttctcccagcacgttcaccagcctggtttattttttttaaaggcatagtttcaaaacctctggaggtgctgtgtacacccacctgtggcttgttcatgttcccatcagacaatgtcaccattgtgtggctgtggtgccattcacaggcatgacccagtgtctgctgctgcatggggtcccagatcagccttgcacaccacagactggaagaactgggggactttgcccctgagtgtttccctacttggatacagtcctgcaatggtaactcatgttatattggcatttttgtttttgctacagtgagattgttgtgaaactatgtttgctttgtgctttggtgacatgggaaagtgtcagctcccctcttgggtctgttagtcctgagtgacaagtggccagccctgttcccagggtcaggggaaacactgtgatgggtattatgcaatatgcctttccctctctctctgctttttccgcactgctgtagcacttgaccttctgtggtagtggtttctgtgtgggcccctcagtaacagtgtggcatcattaggagccagttattgctttcaaaccccgcgtacttgtcacataacattgggaaagtcactttgcctctttgagcctcagtttcctcatct

SEQ ID NO: 55779 - DNA, 713 bp, Homo sapiens
ttgatgttcacttctcactcagctgatgttttaggtgcacgtggctttaaactgtaaacttcatggtccctcccacgtggctgaggaaatccctccagggtttgagagagcagtgtggtgcatcccctagttagggaaggaagccttgctttatataccagcctggccggtttctgacttgtttttctttgacactgtgccatactttgttattccaggtaggggatattccagactcttgaaatttggctgtgagaaggggaagaaatccttgagtcatttgtatcctggagattcagggtggaggctgtggccgattttgttatgtccatttcacgaagctgttaataaaattttttattactaacttttatttactgaacacttagcatgtgccagattctgtgacctttgtatgtatgagctcatttcatcttcataataccaatgatgtaggtatcattatcttgcaaatgacaacacttaggccagagggcacagagggaattgatagcatagaagctaagattaaagcaactctgtcagttccagagcacgcctctttattacccttctccccaattgccttcacttcctgagccccagcatggatcaggacaggcacttccatatagtcccactctgagtcttcacatcgaccttctgaagcaggccttattgtactcattttacaggtgagtaaactgaagccc

SEQ ID NO: 55780 - DNA, 683 bp, Homo sapiens
aatgctgccatgacaactgccacaacagatggtatttgatcagtctctaagctaccagggagatatatagcagtgcttccgaggtttgcatattttacgttatcaggagacccaagtccagccttaatcatgattgaaatgcaaagttttccatttgcttcctatctcctgattctctttccagttgtttggcatttgttttgatttttctaactccctggctctccttggtggggaaatacttcaggatatgggagacaaaggctgcaacacagcccatggaagttgccctgcaagtctaaaggtcagggactgttgagaaactaaactttgggatggcagtctcagctgagattggcagaaaggcttaattgcagcctctctcatggatgttcaggcactgcacaaggtggaggccacatttggctccaaacaaagggaattctggggaggtgcatcctggtctgccccttttctttacctccatccttcactcaacacctctctgctcccggagtctccaagccacgtggtagtccctctcctgggtttccccctctaccccagctaatgctgcaaattccaggaactcagtcccagagctcttggacccatttctatggcaacaactacaatagcttctcacccagtccccagcccccttcaaaaacactggaatgtca

SEQ ID NO: 55781 - DNA, 616 bp, Homo sapiens
cagagaagttatgagactgctccaatgtcttgtgtatggaaaaacctgtattctatccattacaccatgctgcctcacagaggaccagactgcctacctgatttaaggttgtgtctttcccatcctatgctttgattgcttgcctctataaagtccttatcctgtcctaaaaatctgctgtggttcagcctagggtcagcacagcaggggctctccagcaactctgaaagaatgcatcttttccctcttcattgctttttgcttcccttctctttgcaaattccacactgtggtagaatactgtgacctgcgttcccctacaccacttaataccattgctctgacatcatcttggaacaagtccataatccttttctaggcctatctgtgggcataatgattcccaaagactctgtctggtttaaaaagtccagcccaagggaggcccagatcttcacctgcagaagctcttccattggatgtgagtaatcagataacactgacttgaaggacttgcagaacattgtttgcattggaagcagaaccaagaggtactaagatcccactgctggacctccttggccagatgtgctagccacatctggtccccaaacac

SEQ ID NO: 55782 - DNA, 1386 bp, Homo sapiens
ttctactcatattctaaaaattcaaagtgccatatggtacagaataaaattaaaggggcagactccacgtccatatgtttgaaatgattttttttttcttttcaaaggaggcactgagttgtgtaatgttccaaagtataagtagatatccctttatggacaaaaaaatgaccctttaaatataacatcagaagtttctccctctcagaacctttgatggcttcccattgcctgtgggaacagatctgaatgccttaactgactgtggaggctcttcatggcctttgcctcatctgccttcgctgacttgcccccggccacatttcccttcacacactccagacttcccactgctctaggctacctgccaccaccaaaagctggttcctgcatttgcaaagccctgcctctggttcctgcatttgcaaagccctccctcctgggacatgctgctttcttcctggaattcctttcccctcatgcccatctgactaatcctgaagaaaatgtctcccctgtgatgtcctctgggattcccccagtcacagttagctcagtctcacgtgtttctggtagtcttggttcacacctacccttatatataagcgtttcactttgcatgggaagtgtctgaaagccactggatggtactgaggaaagagtatgttcttaaaaggcagacagacttgagatttaatcctggctctgccaagtgaactggaacaagttcttaacctttgaatattagagatagagcttgaaaagaacaggcaagaatctgagatgcacaagaaatgtgcacgcgcgcgcgtgtgtgtgtgtgtgtgtgtgtgtctttctccactaaacttggagttcctagcaggcagacagcactcattatttttctaaacccagagactgggacttagcaggtatttaatattttgagaatggtctattcttgatgcctactctggcaggaccttatgcttatataactcgctaccacacgctatgaagctcaatggttctatttacagaacacttggagaaagccagcttagcctgtggtgtccatctagtggttgatagaggctgtggtctcaattccttttcactgtgagtcattgtgttggtttaaagctcctggctggtgatatttagggctaaggatgttggcttttgagaatgaggctgatcaatagcctagtgtagagagaaaacaggatgtaagcatttggtcttccacagtggctttttaggggctgctgtcttccctccttggtggcaggaattactccatcaacaaatatgggcacagatgcctgcggggagactccgttcttcagaaattgaggaactcattcatgctgaattaattaaagtcatccctcagtatccatg

SEQ ID NO: 55783 - DNA, 612 bp, Homo sapiens
ccaagcagaggtagtgacctttctgtatgcttccttgttacttgctgtatctgtattagcactggtagcactacatcagaattggtttattagtgtttgtatgtatgtatgtgagtatatgtgtgtgtgtatatgcatgtgtgtgtgtgtatgtatgtgtatatatatgtgtatatatgtgtgtgtgtgtatatacatatatatatacatatatacatatatatatacatatacacacatatatatatatatgggataggaaagacaaaacccaaacctgttgtaagttctaaaggttagggtcaaatctgtcttgaatgctcctgtatcttcattggctggcactgtgcctgcctgttgcatagtaagcagtcaataaatatttgttggctgggcatggtgactcacatctgcaatcccagcactttgggaggctgagatggggggatcatttgagcctaggagttcaagaccagcctatgcaatatagtgagacctgttgcaacaaataatttaaaagctgttcatggtggcatgttcctgtggtcccagctgaggtggaagtatcacttgagtccaggaggttgaggctgcagcgagctgtgattacac

SEQ ID NO: 55784 - DNA, 565 bp, Homo sapiens
ttttccctggcgaggctggcagggggcccctgggaccttttgactcctctttaactcaggcccaccttttcctgctgctgcctctgtccccatggcctgctagatctgagcccttgtttgattagcttagcaacatctttgcagtactccccagtgaggtgtgctctgttgactgggactagccagagtcagctccagaactcctgagtgagttcacttctgcagcagccttgacttcctgctgtaccttgaccagaggatttatctgggttttcctggttatctggctcactttgcagcagagaagcaggggctggtgccccttcaactgtgtgttctcctgggggatggctcgtggccattgaagaaactttgcagcagtgcagtctatatgccatggtcacgtcatcctatgctctgaaccaaggtggtgtgtgttgtggccacaggagactgttccaggcttgagtgacataagggaagattttactcacgatgtacattgaactcccaaatcctcctaaaaagaacaagtcgctatcaacttggtgacatcctgaagagc

SEQ ID NO: 55785 - DNA, 4121 bp, Homo sapiens
ctcccgggttcaagcaattctcctgcttcagtctcccgagtagctgggattacaggcgcctgccaccacgcccagctcattttgtttttttttgttttttttggttttttttagtagaaacggggtttcactatgttagccaggcaggtctcaagctcctgacctctggtgatccacccacctcagcctcccaaagtgctgggactacaggcgtgagccaccacacccagcaaggtcagtttttttttcaaaaggatgcaggcagctttgttagactcgctggccggtgcatcctcctacgacccggagtgaagttgattcatctgtcttctcagaggccctaaactaaagggattcttttccaggtctgtccagaaactcgatttgcatcctaataaactcagagaatgaatgtcacactgtattataactgagtagaggggcctgtgaaagcatatgatgtttggggatctggatgttgatgacattgctcaacaacaagggcttttcgtcagcccccattagttttttcaatctaatgcaacaaagtatgtgttgatatatacgtccagatatttatattgttattggcaaggaatattacacacacatttgtaattattccatgtttctgtgtccacgtttcaaccaaaagtgtgtccaaaaaatagagacaggctgacgtgtcttcgaagaaaagtaattatgtaggattgatttgttttctgtttgttctttcatttcttgcatctgagaggttttttttttttttttttttttatgtcatgctctattagaaatgcactcgactagagcaagtcggtacgtatttctttccttctctgtcccctctctcctcacacagttcttgacagaggtgatttctggtgagattagtggcagtcagtttgtattacttatgcaggccatgttgaactgtgaactttggaaatgagaagccacctttcgccgcttctgaaggtgactcacaaagccagtttcacttggttccacattgttgcatcattacatttaaagaaagggaagaaatctgtttactaaatgttagacttgaagtctggagtatttgttctagcaggtcctgttagattccacagctttttcatagctagtgtcagttaccaacctattctgtagagaaagttccttttgtaaaaggcatgttgccttcacaggtctgtcttgactggagggatggtgaggactacccttcaagtctggccagctcccagaggtctgggatgactcagacaggactaggaaatggtgtgttctgaaaaatctgtagaagaaagtactgatgagaaaatgcccaccaaaaattgaatacagaatgttggaagaatcgaaaagtcgacgttctctttgaaacagaagccagagcctgttactcattagtaccttcatgtatcccccatcttacaggcagaggcctggcatccaagatgttcaaaaccatcccccaggtcccatgcagcccagttcctagctgtgatcccagtgttctaacaatagtgaactacttacccttctctgaacataccttcccctctgccatttctctctgcttttgcataggttatccatgtgtctagatggatcctcttttggctggcaaactcctccgcaccctttagggccaacttaaacagcactcctctgcgacgctttctcccgtgtgttctcaaagccagtcatgcattcatctgttataccacttttatgtagcagtagagctatttgcatgtcttagtccctagtaggttttgagcttcaccagagcaggaactaggtcttgccactcctgtaagcagctaatgattaggaagtgctccctatatgccaggcactgggctttctaaacatatgcactgtctcatttaacctgccacaatcctatgagggaacttaaactagaagaaattgcgctgaaatgcgacagttgggatttgaactcacctgcctgcgctgggatcttaaccacagctctgttttcctcatctgaacaatagagatgacaataacacttgataagattattttgaaggttgaatgccatgatttatgtgaagcacttaacacagtacccagtgagcatttagtaccattagtgcttactaacaatgatgtatactaggtccttcagccagcaaggggcagagaaggcatttgaacaacttgggtctaacaacagtcatgttccttaaccctgatgctcatgggccaccccagggaagcaagaaaaacaccccacagacaccttgtccctttagcagaggctctgactctttccatccaggggtctctggggaagcttaagaaggtggatgcggagagccgcctccacccacctatcatggcagaactcgggagggtaatggggagatggttcagtagcttagcaactgaggcaagagtccactcagaagacattaggatgttaccagcacctcattaggctccagcactaattatttatctctccaaggagaaggaaagtgtggcatgggtgttctgagattgagttcttggatcagctggttcctttgcttgtgacctcagacaagtcatttcttcttcacccagtgtgagcctcttataaaagctcctcaagtggaggatgaggccatcagtcctctggctccctgaaccttcagaaacacaagcttttttaacacttctgggcaaaagccagtgtttcagataaacacacccgtggctgcttcatctgtaaattatgctttcttaaggccttcactttgttaaggcagtctatattgatgtatacaatagccaattcctatacaaattttggtccagcaaacccaaatttgtatatttttcattgactgtataatacaggagttatttaaaaatatatacagagctgtttgtaaatcattgtaattggtggataataatttagaaacattttaaattaatttcttgagtgtgaggctggctctaaccacagctctgtctctggtgctgtgccgtctcccaaggagagacatacaacagaatttatttcaaagaatattgttgtttaaaaaacagttgaacatgtgtttacatatctctaaaagaagaggtaagttccccattttccttatcactctgcctgccctccctctacatgcgcacgataagtgaaatagacttgcagtcttgaaactagatcattgtcagactagttgcattcacctccctgactttcatttcttcctacagtttgagaaggcagaagatcctgatttagctttgcctttcccctcccctctgccaaaacaaagtcagaattcccaacagcaagcccagctcacatgttcagttccatttcagtcccatttctcagaggctttcccgcttttctggggttgtcgttttctgatacatccacgttgcacccgggtgtagctgggctggggctgcaacgtttctcagcattctgtgtctggaatgctcaccaggccccacagtctggccttagcaggaagccagggttctgtacatgtgggccttgtctacatgcctgtgtgtgtgtaattacccaaccgtgtgtgttgtttcaccagcaataaaaatccagcagggaaatgaatgctaaaattagtttgtttgtcctttgacaagatctccccagttgaaagaattttgtttatctaactggctgggcagacttggctaagatcaaaattaactgccttgcttaatggtgtaatagatggtattttgaagagcttccactgagttctccttgaaaggacgtggggtctagaaagtccagcctctggcaaagttatggcattttggtgtaggtgttttttcctccttgtgctacctgtaggatggatgcccataacccattactctaccctgagtcactctatctgttggagggtggctggatggatggatgatgggtagattggcagatcgacagtttaatttgcttgtcatatgtcttaaatgtaagtttgttaaagcttaagaggaaagaaaacctgtaatcagtgttcttgcaaaaaaaatttgcacagccctatggctgtgtctttgggcttcattcattcatgtgttcattcattcaacaaaaacag

SEQ ID NO: 55786 - DNA, 2442 bp, Homo sapiens
tcaggagttcgaggctagcctagccaacatggcaaaaccccgtctctactaaaaatacaaaaattagctgggcgtggtggcgggcgcctgtaatcccagctgcgcagcaggctgagacaggagaatcgcttgaaccgggaggtggaggttgcagtgagcccagatcacgccactgccctccagcctgggcgacaagagcaaaaaactctgtctcaaagaaaaaaaaaaaaaaaaagagtaaaaaaagaaaggtcagcctagccatgatttctgttactgaaatgtaagatctgattgaaataagcccagaatataaggcacttacggtggcctatggaaaagggtccctggtttcactataaccttttgcatttgtcatgctggacagctgtgacacccagagttgtagtgaaccgatgtttctatccaagattactttgtatataaatgtattttcccagggctgtctctcctcagccagttcacaccagatagaagctttcaatgtcaaggttgggtttgttcagaatcatcaattgtagccctgtcattttgccaatgaggaaattgagattgttagtagcccagtgactactctctgtcctctagccttcgggggtaaggtcatctcttgggtttggaaagcatgaactctaagtaactctgatgaaggcacacattatttatttggtgatgattatgaatgcaatccaggcgataaggaaaggagtgcagtaggaaccaaaagaccttgttctatacctggctctgccactagtgaattaccttgggcaagatgcttcccctctctgcacctctatttgttcatttgtgtggtcagcccagctgatctttaaggtccttgagctcctgtaagtcagtgttcttgtttattacttgaagggcagagttaacagaatgactcatgggtatagcttatccatgcagggcagggactctgtgaactgtttgtctctgacggtgatgatgacatgtgtctcatttgatggtatttcagttaggagtcaggttcttgcccaaggcccttcatgtgtacaactccagcaggctgagtggcttcttgcagctggcatgccgtggggccccctcttgtgcaggcagcagaggagaaggccttaaggtgtccattctcgctgtacttcaaagctaagcctagggtaagctgtaatgcacttcgaggtgtttgagagaggtggatagctgttgttgctgatggcaggtaaagaagaatgtctggacctgaagaaccagaatgaaatcttcccaaggagaagtgcaaagaggacagctgcggtggagagtggtggggtcttggacttttctgatgctttggagaaaatctgctattatacattgcaatggattttgttctaattggagcttcaccaaaattatattcagagatgacactcatgaaattgtagtcttgttttcattgagataacaaaattccaagtaactgaattgtttttattttttttgggtgctttgactcaggatttaatcagacttggatgaacgttgttccctaaatcagcactaatagtgggtgctgcctgtcctgagcagggcagtggtcagcctggagaatgggcaatgtcaggtcatttggagggactctcctatgctgtgatttttcatgcagttgacaggctttgcatggtactcctgagtgtcagaggacaaaacagctcttggaatgagttgtaagttacacaaggaaaggataggcttacaaataaggaaaataaggctcagaaaggtgacatttcttccccaaagccacagtgctataaggggcaaagttaggatttgaattaaggtctctctggccacaaaacttctgcttttaatcattgtgcttgcctccctctttgtttaaagagtcagttgttatccttccaaaaagcaaaccttgtttagacctatatgagtaataagtgagcatcccctagggcctagcaccaactgaggtgcttgcaaagccactgcatctggatttctgacctttaagccagtccgccttccaggtatcattttccccatctgggaggctcagcaaaaagaaagcccaagagtgtggctcaggctcaggccaagctctgctattgctgagggaattctatcctttacttaagaagatcttagggatgcttgaagctgtgagtataatatttttctctgaaggacatttaactgttttattgccagaacccccagctgaggcttcagagtttcccctgtcatgttgatcacaccagttgaccttcagggtctgtcttccattgcctcctctaggagcagcctctgctgtaaacccctgtggctgttttgcgtctcagtaatgcagaaagaagaggctagccttgtgtgtttcagctgcagtcctgttattttcgctcgtccactgtgctctttgat

SEQ ID NO: 55787 - DNA, 5171 bp, Homo sapiens
gggtcctctcagccccaggtccagcaccgtggccactggcctgtgtcacctccatggtgcagtgtccccttctctttgtgatctgctttgggaggtctcactcagctcttattccctgacctctgtccttggggaactctggcaatgaaaaaaaggcagaagatatttaaggcctgagaccctgatggataactggcaaaacccgaagtagttaacacgctccacatcctggcaggaggtctcaatctttggaactggcagactaaccaccgtgtaacaacatcagaggtgcaaacctgttaaaatccccagcaaaggtcttgaaacagaacatgaaagggtttatgaccctgtggatttgaacttctcatggagccaagctataattccagctctgtttttggaagtaaagatcagaaccataatttgaggagggcctcagagcatgcacttattatgtttcaggacacaagctgtgggatgaagctgcctgggggagggcccggggtaccgaccaggaaggggtgtggagggtgtgaggagagtaaagcagggtgtctagctgaggcaattaaatgtacttgcttctcagtttaaacaaaggcctcaaggaaacctcccagagggctgcgttcttaatgatctggaataaaggggtagtgagcaaagccagcaagctgggggagctaatgggagccctggccttgaatgtccctgcaggaagtcagctagggaggcttctgtacacaagcagcacttgtcatgctaatgacccagcctctctggtgccacagaggtcagctctgagacttcaggtttgagctccactggagagctgggacgaacgcttcctctccctccctcatccactgctctgtagcacgtccttgtgtgctgcggttcctggcactgtctctctgctctcactgctactgtcctgctgtgcccgtcctgttacccagcgcatcatcccagcacagccacagtgatcctcctgaaatgcagatctgatcctgtgtgccacctgcctgctgaaaaccctttgtggctctgtgtcacatacaggataaagtgcaagcctcagagatgaccctccagccttggcccctgctatcacacccgcctcgtccccaacatctaagccggctgcaccaaacacttggcagtctctagcacgctccggggtattgtaaacctccatgcctttgccccctgggatgccctctcctgacccttctttgccaggctaacacatcctcttcctggattcagctccaatgcccacttctaggcatctcaggcctagtaagtcccttcctcagggctcccaaaggaccccgtgctatcctttattttaagtctaaccaaatctttaccttcttttttcctattttccctgttgcttggcttgaagacagggattatcttatttatcactgggttttcaggacccaaaaatatgatgtctgccacatagtcggtgctcattcagcacttactgaaatgaactccagttttagatggatgggttatctctctccatccagagaccttggctttttcactatgaacactgttgtttttctcactctcaggactgtctcagcccttagcacagtgggtgacacagagtaggtcttcagtaaacatcagggcaagccaccgcatgttctcactcataggtgggaattgaacaatgagaacactcggacacaggaaggggaacatcacatactggggcctgttgtggggtggggggaggggggacggaaagcattaggagatatacctaatgtaaatgtcgagttaatgggtgcagcacaccaacatggcacatgtatacatatataacaaacctgcacattgtgcacatgtaccccagaatctaaagtgtaataaaaaaaaaaatcagggcaagcctccctgagatgatgtgggggtgtggctgtcccacctgttttaatccattcaggctgctataacaaagtagcacacattgtgtggctataagcaacaggcacttctttctcacagttctggaagctggaagtccaaggtcaggatgccggcatggtcgagttctgatgaaggccctcttctgggctgcagaaattcggacttctacttgtacgttcacatggcagaaagagggcaagctagctctctgggatcctttttattaggcactaacttcactcacaagggctctgtcttcatgactaatcaccttccaaagactccacctctaaacactatcgcattgggggttagatttcaatgtgaatttggggcatgggaaggggaattcagtccctaacacctctcatcaggcatagtacttgctgggaactccttgtgtaagaggtgctttggggacacagaggcctggagtggagcctttttcaaagatcccaaagccctctctctatctcagagatcaggtcgtgagcgactaaaggaagggacagcgcagtcagggagatgtcagtgcgttcagattcagagggcagaacaagagcactgtagcatgggtcagaaggaaggcttcctggaggtggtaggcttttagctggaccttggaaaacaggtgggagttataggtggtgagggagagaaacagcagtcccggtttggtagaaaggaagacagaatgtgcgggagggatggagaaaagagactgagcctggggagttttgttctctgggaaatcctatcgttgaaggccaaccacttgttttccaggccagtaggtgccccactctgatactcaaagccactgtaatagccacctccggtagctgtgttccactgtgcccttcagaagtaacctaccccagcgcccctggaactgtctgtgtcaggggtcagccttgtgttcttggagagaagccttccaaaaacagactctgataggttgaagcaaatagctgacttattcatagatgccctggggctcacagtattagaactggccacctcctaatgattaaacactacacaaacacccagtgaccagattaccccaccataaatgggctgtaaaccagagtggacagtggctgttccaccaactgggaggaagcgaggctacagaaatgctttctgtcctaagcaactagcccttcaggcagagcccagaaaacaaacgcagacctttcctgcaccctgggagggaagtcggagaggggaaaggtgggattctgaggtcactgagagtggaaaatgacaagtacctccctcccctcccctgtgctaggtgctctaaacatgctgcacattaacttacatcataacctggtgagaactggcaattgatcaggatggattcggatgacatctgtattgagggtctattttatctgcatatccatttatgaggggaaaaactatggccactacccttaagttagttgatacagctgattcagagagactaggtcttttgtccggaatcacacagcaagcaagtgactagaaacaggaccagaatccgggtcctctgaccctgcaatacaagccttctccattatctgaaatgattatactgagcgactcccaggggtaaatgactcagcgtgccaggtgtgggacactgcctctcttgttctacccacacccacttccctccatctctaagttagttctacttgagttcagcaggtaaaagaatcacccctgctctggtttgttgcctctccaggaaggaagcaactggaccctattggtgggaaaggtgagagattcacatccacctacctgcacacctcccactgttctggacaggccagaccagggctgtgggcatgaagcagaccctcaccagtctctaagagctggggatgagaacaaagcccttccttattgctagcctgaattattgggatctgttgctcttattcttcagtaagaaaaacagccattctgttcattggatttggatgttctagcttctggttttgttaaattgttaataatactatctatttctagttactgctagaaagtatggaaggctcatgtgagttcaggaatatttgagaagaaaacatcttaggaaaattgcatccagtctgcataagcccgttctcttaacttgctggtgaactcctgaaaattggttcccaaacaccaggggtctttaaactccagagatggagacacctcctgaccatccagaagctcacctggaattcctagtagcagatgttattacactggtcctacatttccctccatatcacctcaaaaggcttaatttgctattttgtatgttcaccagaacagttagaattgtgatgccaaaaggtggtaagcttgccaggctaaaatatcctcaggaggaatctttaatttcacaatccatgtttctggtgtaatccacaccttttttgtgcttcagtttccctttctgtcaaatgggcatgtaaagtcctggtctctcctctccccactgccgtaagtcaatactggcgaggagcttacagcacccctaggaacccaggggcattgtaaatgcagggctctggccagagaagcctggcttctctctgctgccactgaagaagtgactgcagtgggctctgatgctgggcagttttggtattctgatcaggttacagtgacttttttcagaggggctcagtcctgccattctcacataaattccctctccctcccagtgccttagtgtaacttaagggggtgctgaaagaagatagcacctaaatccactgggttgcttttcacattacaaacatgaagccctcatcatggactacactggccttggttgttgttccagacaccaccagatgtgttttagggagtcagggtttctcgtctgccattccttttttccaatccttcttttggtgcaagaccttgaacccaaggcagtatagcacagtggttaagagcaaaggctccagaatagggttcagctcaaatcccagctcagtcacttgctaaccagtgaatgacttggagtaaattaatgcagatagtaagaagtgcttcttggtggagttgtgaggcttacttgcgataatcccaataaacaatagctattattgggaaggaagtttaagctccaaggcagagcaggaacggaagtgtcttctgattcattctcactggcccacaagctctctgacaatagagaccctttctgt

SEQ ID NO: 55788 - DNA, 5996 bp, Homo sapiens
cttttcagctacttcttgaggtccaaaaacttccagagagcttttcctgccccttaacagccaaacagagacttcagggacacagcaaacaagcatgcttgccatcagcatcttaagcttgacccttaggatagaggctcagatgaaagtcattcacaccaaagctgtgtccaggcaacagccaacagactttgaaaaaggacttaaccagtataagagatgactaaatttagacttgtgtatttctttttctgttgcttgtgtctttgatccacttggcagttaaaaattgaagttcctcagaccttttttttttttccgcctgcttgttttgctagataaaccgtttgcacagagtggtgtgtgtgcttgcacatgcttaatttccctggcatctgataaatgttttgaaatagaataatgctggaaacattttttattactttaaattgctttgcttaaatagaattgattcttttcctcgactgctgtattgttgctgcttttgtttttaaatgaataagatcactctaactacgtttccttcttattagtcccatcgtgttcaaccatcacttcctgtagtgcttactggcaaatgagacttcccatcctcacgtggctacacaggcatcagtgagacctctctgaccttgggctaggaatttggaattcctggtctgtaacggggagagatgaagctgcaaaacaaaaaagcataggttggaggttggaggtctgaggtttaaccttggatctatccctaaactctgtgacctcaagcaaggtacttttccccctgagcttacttactcaaatttggatttgagtcaaatggcccctaattttcttttcagttgtgagcgtctagagtaacttcagtttactagataaccaaccctgtataaaatttgagatttgattatccaaaatgaagtgcatgaaggcaggtgctcgttgaactcaatggtgtctgaacgagctctagaacctgtgacaaatgagctgtgagatagtgttatgatttacagctttccatggggtggacatcataatttttaaaacgctgactttgtcagagaaattagataaaatgcaaacagcgctgtgagatttctgaattgggaagcagagctggagtaattttcctttggtatgtctgcatctctgctacccatggcttttccaaaagcagtaaatgcctgtctatgagcttccgatcccccttggataaagttcaaactgttaccgggcttactatgagatctggctcctgctattcttcccctccttctcctctcttcaaccacactgaattacttgcttccccaacgccccaaaccatcctttttcttgccttccaatctttgcagagacattctcttcatcctcaccccatcccttcagggctcacgttaaatgtcacctcctccaggaagccttctctaccccacaccaaagaccagattgggtgtccctcctatttgctcccatgatggcctgaacttttccttatcatagtaccaaatacatcctattataactgtctgctactagcctgtcacctcatctatactctaagcatcttgagggcaagaacctatcttgttcaccagtgtttcctcattacccaagccacatgaggaaactgctcagacaggtagactagctccagtctgtatagctcagcttattagtgaagccagaattcactcccaagcctgcatctctcaaaccccacccccttcccttctgtaagacttctcatcctgacccatctttcccctaattgtgaagatgtcttttttcttgagatggcttctgtgatctcataagaaggactggggggaaaatggaattggttttgcagacctttgatttagagactcatttacaagattgtctgctcccgtggatcaggactgcaaaggagaacacttaggtcaattggcttaaatggcactgcgtctgctgtgcaaataggggcttaataattgtgagtctccttttctccctggagtttgacatactgtgccatccagatgcatttgtgagataagcgtgacagccccccaccaccttttttttaatttgcgaattttgaaattcaaacacgcctctctgtctcttggattccaacagctttaaatgtccttggattttttagaaagcgcccaagtctataatatatgtacagccgtggcttttatcaaaatgtagacatgcctctcattactgctaattgcagttctaccaccgggtgatctgggctcaaacctcctagttctgtgactggttatctgttttatagcattggctacttaagatacattacagtgtcttccaggcagctgctctttaggtaaattaatacctggggatctttttccttctctaggaaactttaagtactgtaacaggctttcatttaagcctgtgcaaggcttatttcaccagattgctatttagaagttctaacaaaacacctttatgaatagtgactgtaatacccttaatccgctaaacttcctgacattttaaactaagtggatagctaggaatgaaatcaggctttcccatctctctagtctcttcctctccgcaggcctgcctatgcatcttcaggatcaaggtgctggggtgcaaattctttcttgctgttaggccatcaaactagcaaagacgaggaaacacaatgcactttcttcagactccaggttttgtaattacctggcctgacccatagcttttttaaaaaaatgagttttggtgaggtttctgtttctgataaaagattgggatttaaaaatattaaatgtgattttcttgtttttttttaagcctatgtttaattttggaaaaaatattgaaaatgcagataagcaaacaatagggataaaagaaaaaggttgtaatgttatatgacacagagaaatctatcgttaacaccgtggtgctttccaggtgttttttgttcatgtaagcacttagacattttgttttttgaaagaccaaacatgtcttgaatacttgcttgcaatgagtcacacactagtttaaattctttacatgtattgattcatttggtgtttacaacacctctgggagtaagaactcattgtacaggtgatgaaacagacacacatcgcttaagcaacgtgtccaaagtcacacagctaaaagtgacagagccaggatttgtagctagacagtgtgactctatagtctttaattttaattacattatacagcctctaaaaaatgagagatgttttataatctaattttgtaattgtgtagtacagcatgagcatttttctttatcaggattcattaacatcattcttaatggtcacacacaggattccattctatgtggcggagccataatttgattaactgtcttcctactggtgaatatttagggtatttcacttcttttgttcttataaacaaaaatgcaaagaccattcttggacctaatgtatgcacactagtgtgggctgccaataaagcttgtattctatatttcccttataattctgacatttgtgtgtgcagatgatgcccttgaggcactacagaggagcatagtctcgagtatcttctggcagtggtgatggggctaccctgaaccattcacatactttttctatccgtactccattgttcctggtatggtgtttggaagaaagttggctgaagaatggagtttctgtctaggtccagctagctccctgcagctgaacctccacatatagcatcagtttacattgtgctctgaattgaatgagaacatttatctttctctctaaacttaagcaaaaatatagaacttgaaactattaggttggtgcaaaagtaattgtggtttttgccattactcttaattgtgaaaactgcacttacttttgcaccaacctaataccatgatggtgcctactgatagaatcacccactcatggccgggcacagtggctcaagcctgtaatcccagaactttgggaggccgaggcaggtggatcacctgaatcaggagttcaagactagcctggccaacatggagaaaaccaatctttactaaaattacaaaaattagccgggcacagtggcacacgcctgtaatcctagctactcgggaggctgaggcagaagaatcacttgaacccaggaggcggaggttgcagtgagccgagattgtgccactgcactcaagcctgggcaacaaagttagactccatctcaaaaaaaaaaaaaaaaagaagggggaaaagagcgaccaggggatagggttgttgtcaatacacttttaatactcaaaccagtgaagtggctgtctgtaaagtcaagaaaatcatccccaatgtgccaattaccagtctcaaggcaaaaatccagaggtgataaagagtagttttaagcatgggctttgaaatcagaagcctgggggcttaccagcagtgtggccttgggcatcttacttaacccactgctccccaatttcttcatataaacttgggatgattatacctactgcatagggaatgtcagaaggatgaaataagaccagaaaattcagcacagtaaacaccatgataagaactccataaatgggagcttaagaaagccccagaaggacactgatttatgaataagttggacctgggtccagattttggctttagcattttttggctatgtgaccttgagcaacttacttaacctctctgagttgtagatcatctgtatatgagagataataaaatctatcatactgggatatgtgagttttgataccaacgttgtatacaaagttagtagagtctctggcgcgctgttggttttcagaaccaatagcaaaatttgtaagtactttctgtgtgccagtcactctatttaacttctcttcttccattcaaaacagtttttctcttagagactaatggtcaaatggaaggagtttaattcttaaccagtctataactttttcagctagccttcccgctaggcaaatacctagaatgagttgggctctttgccaaactttttttttttttcctttcattgtagacaagactgtggttcagaggttgggaaaggttttgtgaacctattttatagtccctataaactcagaagggaaacaatgaaataccaaagctaaggtatagaacaggttttcttacaagagaaattacgacctcatggagctgtaggaagggttctgcgggaaaaggtatttacagcatttcatacaatgcccggtccctagaaagtctgcagtaaattcaaggtctgtccccagtaggggacagatggatcatgagtcaaattcacaaggcaaatgaattttcttttgagaaggaattcagtgggagatctaggggtatagttttacaaaacattcatacttggaaggttcttagtggacctctggggtggcagcctgctcagtaagcaggagagtaatctgagagccacagtcaggaagtgatttggccaaagtcaatgtggtgacagatgtaggggctcagccccaagcttctgttctgttccggtgttctctcctctgccctgcagcgcatcctacaacatgagggctgcatgaccggggccagtgggaaaactttgggtgaaggaagtggagtgagatcagagtccccaactgttggcttaagtcgcagtctgcctaggggctgccaatgatgagcacctacaagtttcctctccaatcccttccttctccccgattacacttccccctcctcaccccagccacctgtccctctccctcattatcaccctgtggtagacacagtcaaggatgtccttggagctggactcccattggaaaaagccaaagagtagcactgaaacattttcttcattccccatccatcttaatagagataacagtgcagctgcaaaaataaacatttgaactctctctgtgcccctacagcacccttaataaaatatagatcctcaaagcccat

SEQ ID NO: 55789 - DNA, 1145 bp, Homo sapiens
aagagggttgaatatgttggaagaaaaggaacgaagtgtcttcactagcattgttttcataaaatactcattagaaataagtgaacatctttttagatttgtggttttctgttttgtctaattatgtactgtattccaagaataaagttttcttctactctttgatacctgagtagagttcatcaactacatcttggttttatagatggctctgtgagtaacctggaaaccttaacatcactgataacattgtttctgtggagaaaagtgttatgagttctgggagccctttggaatttggcctgtttagaagcaagcgtcaaaaatgacagagcaatcctggctcttgaaaagcgccaaagggcatctgccctcatggagttggtttactttcccttttcctctctcgttgcctgggtctcccttatccctactaattattatctttcaaaccatgagaaaaccctgactcaattagaacctgtagctgcaaataattcagagcctctaacatgaaaggtgtgattcttttaaccatagaaagaaaactaagacctccttaaagcactatgtctcctacaataaactcacccctgtaaaaatcatgtgtaatcaaaacgatatgtttagtgttgtacatttacatgaacttttataaaaagaagaaactccatctattaaacctccaatgtatcctctctccctcagagtaaaagacaagctgcttacgctgacttgcagggccccatttaggcactctcctctctcgctgtacccttggactctctggcctgaccccctcctcaccccactttggttcaccgctcactgctccagccactcattcttggaatgcattgcaagtcgtatactatctcagggcctttgcactgaccatttcctctcttgaaagtcccttatccccaggtattcagatacccagctcccatacttcttttagatttgtaataaaaaccatgccctcagcagacctgccatagccagcccatgtaaaatttcccacaccccaccttgacaaatcacatcttcttctttacaatacgttgttctcccgagcatttattgctaatgtactgtaaaatttacattttgtctcatttattttatagttctaccactgaagc

SEQ ID NO: 55790 - DNA, 3846 bp, Homo sapiens
cccaacttttttgtcttaatatatctggacactactccttccctcaaactcacccactgcccacccccacctctgcttcccactccccacggcagatgcctcagcagtatttcaagtggacgagggccctgaaggatgagatgtgaatgattaactttggttgggactccttcgagattacaatctttttttcattcacctgggaatcaccaccagaccctcctctcctctttgagcagatcttttattccctcccttttcagtgggagaggaatggctcttcattcccctttgaaagcttctgtttgctgagcaaatgctgaccacacagagacctcgcttggagccagttactgcttccttccctaaccatcccccagggccacaacccccgctccctgcttccactggagaggccaccctggccagggggagagcctttcttggggaaagtctttgaaagctaccaggaaccaactggtaggatttttggagagggagtcagggttttggagaacatcttaatccttcgttttcaaataaagcttgtggctataacataagtttgcttttgagttctcagtagtaatacagttgttcattgttcatagcatctgtttacatagttctttctgagtgccttgattacaggttttaatagggattagtccatgcaaccccttcccatcccagagctgggactctctcccacccacctccccttccagcctctgtaccataatgtttaatgtagccatgcctagactgagattctttttcttttgaaataagtagcctgcggaattaatgcatatttttgttggcactgcatcaaaattgacatcaccggaaataatgtatgtgtgtcgttgttaactgtacaaacaggtatcatttcctttttaggttcagaaattctctctgtaggctaatcttttcaatcgaatgctttgccttcagacgtcaatggaatgagctaagaaatgttatagtcaatgatttttgcatcattaaaagtagcacttagggctggaaagactttctgcaatgtttctgtgcagtctgtgaggatttaaagtagtttttcattcttagattttcttcaatttgacccgctgttgcaaactcccctgggaccacatggagggcccttccattcagtgctttacggtaatggtttcagagtttggtgttagcttttgctttgctgaaacttttcacagctgacttgataccagcactgaggcctgacctctcgatccttcagcacttcagaggttaattttgttgggggatcggatttctttcctggcctggggaatggtgatccctgctagctagtcctttagttacagagttgctgggtgcctgggattccctggcccagtgtgggctggctcagctggctaaaggacttgccatcctgtgagattcattcagcttctttgtccgctgttctccaagggccgcaatgtagtgaaatgctctggcctaggaaccttacaaggtaggacgattttctaaaatttctggggccagggggtgggtgtggtgcatgtactgccttgtcttccttggccggtattgaaaagcctggtggagcagcctgtggtgcagctgcctaaatcactgtgagctatgtggtggtgtgtgagtgggggtgggagggggcggggggcaaggttgctggtcaggaaattcacctcttctcctcttccgcccccattgattctaaccttgatggtttcagaggaaactggggcattacccgaatgtcctgggtccacctagacatttgggtaatgtcaatattttccaaaccgtcttatcaaattaggctactgagcccgaaaatctgggtattgatcacctagctgtcttaagtcgttattccggacttttcagctggtgggggcagtacagaggggtgagccggaaaaaggcagtgtggccccaggcaagggctgcttgtggttcagagggccctgattaaaaagacttgcagttggaggttttgtttggaatttaaggatcctggtgaacttgtggttgtgtttatacagcaaattgctgggtgtgtgtgtgtgtgtgtgtgtgtgtgtgtgtgtgtaaactaggctccaggagagatggcatgggaggtttaagcataaggacttttcttgctaccttatgacctatagagctgcccagggaagcacatttctgtttttaagccagacaaggggagaagaaaacaatgttcatgaccacctaccacatgccaagcatctagcagacattgtgtcattcaatttcattgcaaagccagggagattacattcaattttgaaaatcaccagtgggaaccaagagaggttaaataacttgattaaggttacacagctgataagaggcaaagctgggattggaacccaggttcactctaccaccatgccttcctgggtgggcttggcatctgagctcggaatggttttacctgttaattttaaatgtgacttcagctggatgaagggcgtactttgttgtggaggactcaccgaaatacacaggatgctagcagcacagcctgcctgggcttctcggattcagcttgtttctggaaggaagagggctgtgtattaagaagcagccctgctttggcagtaggacctagctgggagttctgtgatcttgaggctccggggctgctggattgatcaggctggagctttagtttgtacctggttcaggaagacttgatcccaagtgaaggtcaaatcaggaaaggccagtgaccttggagctggccttgggctgctgaggctgtgccctggaactctgggtctgcttcttaagacgctgaatgtatggagtcttggagggagaagatctacacccagcatattaatgctgaccaaagctattggcgctagctgttcacatgtgtgctggaggtgcctaattagctaaagctgagcttctcttgggctgtagaaatcttgacctgaggtcccttcgctttcctcttaccccaagaaagagagagcttaagggcaagtccttgacaaactgcaaaatgaggccagcctgtttttgggagatagccgcctcccttggctgccctggggcaactgtggttctgttttgtgcattcaggttcccacatccctaagatatattgggagcttagtggagggttggagggagggagactatgggggtattgaactcctgtcccattctacttagttttaagacagctggccaatgccctgtctgggatttgtcccccatcccctttcctttaatttctttgagatgttttaaaagtaacttgattgcattaaagtgtcctgtgtattttgaataacagttggaagttctgagttcttatatgaccatgatctatttagatgcatctttacctctgttcttaacattgagtcaatgtgattttaaaaagcttgggtttcagaatcaggcagatctgtattcaaatccagctctgtttgttagccctggcaccttgggcaggtcacatagcctctctaagcttcagtttccacatctatccaaagggggcattagtagtttgtgcctgataagaaagtggagaggtgtttatgggatggtgcttagcatggtacctggaacctattattaaaacttttcaccttgtataaatgtttactgttattttcatttgctataatatgctgaactctgttgatgtttaggggaaatatatcttctggtaaacagaaaactaggatgagtttgttgatatccttggcaaaagccagccagcagtggcccaagggtaagcagccctctccagaggagccttgaaggagagagggcttt

SEQ ID NO: 55791 - DNA, 5034 bp, Homo sapiens
gttgctacagaaggcagcatgacacagactagaaggagcacatattttgcaattagacatttgctttttaaacccagttccaacactgaatgacatcggtcagcgtacttattctttcagcctctatttcttcatttgtaaaatgggcaggatgatacctaccttgcaggtatgatatgaggactggagaaacctataacaatatatttaaagtacccagcacaatgcctgatcatgataagcacttagttgttatcgctaagcaggcccctgcatatatttggacgataggacggccctttgtatagagaatagctagaaaactgtgtaagagtgtatagaagcaaatagaaatgtgtgacactatgtaggaatttaaagtaggagatgatgtgggtgggctggagtatttgaagaaagccttaaaggaagaatttggaacaggatggagggctgggcacaagaagtagaattacaggagtgaagtgtgcagagttccagagctgctggacccttgtggattcattcacaataagccccttttgagccctcactctccctgcctcatcctcccaccttgggaccaccctcacattcccctgcatttctgtgcgatgttccaggttgggttttggaagccaaatagtgttgaaggagaaggtgatgaaaacaggtttttagtaagcctttgtcttcctgcctgatcagcagagctcaagatgtacaggcaggtatcttccaagctgctggaatgaactagaactttggggttatgtgtgtgtgtggcagacgttctgttggctttcaaaatctcaaccactcagcatttcccaggttccacgctgccactttgtagggctttcagcaagactgtggaagactgagtggtagaataatgaggttaagtcaatgctttggtatcagacctgccactcctggctgagcggcctttaaccaggctgcctggcctcccaagcctggcgtcctcctgagaaagtgggctgtgtcacatctggtgtgtgctgagaattgacataatacaaaactgtctgcagtcacagtaaagagggtagttggttctggaatcagaatggctcgatcaagatccactctgtctcttcctagccctctgaccttgtacagggtatctatttttttctaagcctcactttctctgcctgtacaatagaaaaacaataatacccttttcccctataggtcaattagagtagtgtcacactgatcttggaattctgctttattgtctacgtgacttctcacttctgtaagtttcgatcagcaagttttttttttgtttttttttttttttttgtttgtttgtttgtttttgagacagagtcttactctgttgcccaggctggagtgcagtggtgtgatctcagctcactgcaacctctgcctcccgggttcaagcaatcatcctgcctcagcttcccaagtagctgggattataggcatgtgccaccacccccggctaatttttgtgtacttttagtagagatggggtttcaccatgttggccaggctggtctcgaactcctgacctcaggtgatccacccgccttggcttcccaaagtgctgggattacaggcatgagccactgtgcccagccctcgattagcaagtatttattgagcacttgctacatatctgctacaccacagcaaacaaatgagtaaatgcaacagggtgacgtgacagagtgtgacaggcttgatggctggtggggtggttttcctgagaaggtaactcttcagctgagatctgaaagatgagaggaggcaggggcaagtgttcagaaagagggacaagcaacagaaagcctcaaagagagcaatcttggcttagaaggaacagaagtgcatgtgatcagagccactcgcaatggagaggggtgcaaaacaggactggggtaggaggcaagctcagagggtcttgaggggccatatagagagtttggactcttaattacctgagaaacaactcaagggtattaagcagtaaagtgacaggatattctgactgctgcgggcggatggaccattagggagcagaagcagaccacagagaccagctggccttttagcagtaatccaggcagcattgaccgcaccatgaactgcagggtggcagtgggggcagagaactgcacatttggatatgttttggaagcaaggtgataggactgggtgctggattaaacgtggtggtggtattggcaggtggggagatggtacaaaagaaaaaagaaagaaagaaccattgctaggagactggacttaggcagcttgggactgacctcattcggttggagggttgggaaatgaagaacatctattttagatgtatttggggatattattagagttagagctgctaaccaagttgacaggtttctcctaactgttgccgctctccctcgctcggcgtttcattccaggagtgaagtctgcagaagtcatacagcagctctgccctctgacccgacaggtgcctgctgcggagtccttccctgcatgcttttagctctagtccccagactcactgcccctactctgccactaggcctgggaaggaacaaattggtttccataaaattctcaggatgaagttgagaatggggtaggacatgggtagtgtctgtagccacccctgctatggaagcacttagtttggggaaggtatctgtcagcctcttcacccagcttccaatcccagacagcaatgattgatgtggagatgagtcacatctgagtcaagagagctttgtccggggcttcatggcacagattggatcttttcggggatggtgtttgtctgtctgtgtcatcagcctgagctggaacagcctgaggttttggtgctcaggatgtgtgtttgtcttggcagctgggacgacagcagctccgtcagcagcggcatcagcgacaccatagacaacctcagcactgatgacatcaacaccagctcctccatcagctcttatgccaacacacctgcctcctctcgaaaaaacctggatgtgcaggtgaggaacacaggccctcccaggctcctccagcagcctctggcagcagggaaccttgggcttgtggggtaagagggccatttggggcaaccagaatctccaggttgatgagatgaggcccagcctcctgccgcctctgctctcacctcctgaccctgacctgtgtccacaagggaggggtcaggcagcggatggtggacacgggagtagggaggcttcaccaccctcactgtgtggacttgatgaaatcactcttcctccctggacctcggtttcataatttgtttaaaaacaaacaacagaaaaggatgtgggactttagcaattttcagcccagagtgtgtgtctcttatttgccgcagcaagccactgctatccaggggcacgtgtctaatccctgtaggaggatggggtggaaataaagattgagaaccctggaccggaaggccgggatgtcctgacctgtggttgagaactctgtctctgggttacattcccctgctgacgtgttttatttggcccacagtgttacccttcttttaaactagattccctgtcaaatttttagaattatattatttcacatgaaaatgtcttcctggttgctcttgagaaaaacaaagatattgcttccttgagcctacattctccatgtggtgacaatcaacagatgtcccagtatccaaccccttagacctgccactcctgctccagtgtgcacagctgctaccctgctggccagctgtactccttaaattacctgcctgaccccaaggcactggagttttccattcctactttaaggcttcagatttcatgtttcaaatgtggtgtagtttcatgtggacacgttcactgaccctcagaccattccttcatgattggcaagggatggttctgaaaggcccattttactagtggaaacgtaaagtgctgtcctcacagcttgtccccagtttgggactgaccagcaccagaactggccagctgtggtggcattggcgtcgtaggctggaatctttttcatgattgatccctcccatttgcaggcgccacccctccccaccccccatctttggcgaacccttggagaaatctgtttgggacaaagtctctcagagcaaccttgcggggaggcagaactagcactgccccgtctttcactcccttccataacctcttcctttctcagcagtgctttacttcatacagataggagctgatttggaaatctattttcttttaaaggtatctcttctttgacaatagggctaaaaaaaaaaaaaaggatgtatcagagtgtgggagtaattctgtcccacagaaatggaaacgtttaatgcctgatgaaatacattaggtgttgcccctgggattcccagttacttcttgtattcttcatttgagccagactttctgattattgttcagaaacccaacctagtgacagtgggtggtggtagttgttttaagaaacaaaaactacccatatgactagaaagggggccatgggtaatgctctgtatgttaatctgagcagtggctatgtaagtatgttaattttctaaaatgtattcaagctatgtacttaagatttgtgtactttactgtacaaaaaccaaacaaacaaaacctaagccacacttcacaagccgatcactgtttcatcagtgattagacgcaagtcagaagtgcccagccaggctatgctcctgccaccaattttcctttccttgtgaacactaatttttttttcctgaggctcattgtatattcaagataagaacaaccagactgtccttagatactaaggaaggaaccaaggaattgctcaccctgcatctacatattcaggaggcaggctattagaggtactgcagagagagagagagagagatccatgaggtttccatttttgacttacaaggtaggagaagcttgctcctgagatgcaggtggagccagtaaaacactgtactggaag

SEQ ID NO: 55792 - DNA, 1190 bp, Homo sapiens
aggattaaatttaatgatacatatcaaacactttagcttagtgcctgggacgtagtaagtactcaataaattgtagttgttatgctactagtattagcaccattacagtttgattggggggaaataagtataggaacattaaaagaataaataatgcagtaacccaggatgtggcatgtgctaaattttcagtacctcttagagcatattagaatatgttaaaatgtacttgaatgtaagctccatgaggttaatgatttatacttgttcattgcagtattcctagtgcgaataagctttcctggcacgtagtggcacccaataaatatttgtgaagtgaatgttccaaagccaagttattttctgcctcaggacctttatacatgtggttccctctccctggtatgctctgccccaaactcttcttttactaagtaagtttcttttctttctttagggtacttctttttgaactgatcactgtcgcctacccacctcattgtcatctaaattaggtcaatgtctatatttatttctcagactttttgtctttttccttataatagtcttcgtagtctacaattacacccttgtttgtgtttatttattctatctctgcctgtttcactggatcgtaagctccaccatgggtgggaaatcagtcttatccccagattctctgaccctccgtggtgcctggcagacagcaagcatggagtaaattctggttggatgaatgtactggaagtgtttagaggaaggaaactgacctgaggtagttgggacaaagaatgggcaactttagtttctgtaagattgagataaagataacagtacttgagtacttgtgtacttaccctttctgattaaatagaggctgagatcggataagataattttgctaatgtctgttgtggcctgaaaagcgtgtgttccttggctccttcctaggctcattcattcgctcatcaagctttgagtgagctcctgccctgtgcccacatgtaggaactcccctctctctgtcccttgccacagctgaatgatgagcttctcatagccaggcagtgtgtgtttgtcctcctcatatctctagtgactaatacttagctggaaaaaaacaaatgaaagaactcataaggtgtctgtaatggatgagtggaattcataaggggagaaggggttggggt

SEQ ID NO: 55793 - DNA, 1174 bp, Homo sapiens
gaatgtggagggtgagttataggtgcttcccggtccccatatgagtagggaaaaagggccagcatcctcccagcatgaaagaacaaacaaatttgtgattgtttaggaagtttcaagtcaaaagggagagaaacacaaggcacaggattctgcttttgcctagtgttctttttaacagaagttttaaagaatgtatttacagagcaattgccccctggtttattttcttggtaacttaatactttgcaccctgatttatgtatcatttgcataccatgacattcagtgaacaggcacaagtctgtaaatccatatatgggaagctgctgggaccaaggattaaggaggggagaagcctgagtcactgaggggcatttgtgagatttaagagctagaaattaatgctataactgctcagaacagtgatagtagagaatatattgtgatcctaaggtgaaggaagtggcagtttgtcttgaacttctttctagtcagtgtactggccaagcatcgccacagagcatttcccaacctccccgggaaggatttgcatatggagtttgtcccgcactgtattcctcttctctgccatgtgtcttcctgagtgaaccacgtccagtactgaaacttgtccaaacaagcacacttcgcctcataaaggtccaggaccattacagtatcgtcatcagatagcttttatttattccatctggaatcaagctggcagacagcacaactgtggaatatctgggatgtcaaaatgacattgataaaaagtgcttgcccacaagcagtgtctagacttttgtaaacctaatgattcatggtgacatggaactgaagcacagaggtaaaagtcaaactttaggggaatggatagggaccgctgtcaatacactgtgaatacataacattatcatcttttggaaaatatggcatcagattgattttatttcttctaaggttattacattcaaaaataaaatagagtttgtgtaattaggtttttaattcctttcgttgaaattcctttttttgaatttattaactcccagtattgcaggagcagttggaagaaaattgacatttcatgtttggaccaaacagaacctccttgtaataatcagttaggtgtattatacgccataaagcagaatagaaatttaggaagaag

SEQ ID NO: 55794 - DNA, 601 bp, Homo sapiens
gaaaccagtacaacagattactcaaaggcagagcgatctccggacttctagtcagcagatcctgttcttgaattgctgtgtgaccttaaacaagtcatttcacctctccgagtttcagatttctcaatggcagaagtggcctagatattctctatggttccttgtagctgaaaaaatgtgaggtatagctatagggaggaaaaatatgtagcctgctttagctgtttagcttctgtaactcccacaggcattttgttgtccaaaaataaccacattgcacaacctaggctctgacctggctcaattcccttgaaggaggccgaactgcaatggttcaggtaaaacacattcagttttgggttgactcagaaaatcaaggatctgtctctttggaacacagccttgctgttgctatttacaaagtgagaggagttaattattgagaaaaataattacctctaccttaagcctgccagatgtgctcttctctgcctgtggccccatgcttgtaccgagttgttgctaaaactgtgtcagtaaatgtatgtatatgagatgtagaaatagaaaagaaaaaacttccattttccattagccacag

SEQ ID NO: 55795 - DNA, 2211 bp, Homo sapiens
atgatgtttcctttgcttaccacagtacttacccagccattcatcacccagacttgaacatgtccagtgacaagtgaggaggcttgtaaaaatattttctgttcttgcagatgatgttaacatgtacctaatgtgcatttgtcttatgactcagtcctgagccctgcttccctttggagctgtcattggaaacacttgccaaagtgtctaaagtctgcagggtaactcaaaaggcctttctctgtgcccagggcaggcttggtgcctgcagggaacaggaacagtgcagagtcagtgtggggccatttatcggattatccagcctgctctgagaccccagacaggtctcccgtctcttggccttgggttctccatctataaattgacaagtttggactagaagagtgttttttcaggctggtttctatgaagcccaaaagttccccagtctactcagttgaggaccagagatgaagagcaaatgtttgaaaaccatggtgccagataatctctgaggacatgttcagctccaggagttctagcctctgtgattctgcagccctgagcatgtcctcatccaggctgtagagtggagacagaagcagtagctgtcacagaagcagtagctgtgagggtttggttcagcctcatgtgaggtctggcttgggaaatgcagcccagtttccacagggaaagacctcagagggagaaacttctcaaaattgcacaaatggttctaatgtggagcagccttcttctgctccaaatatcccacttttgcattctcttctgccctgagacacatgcccacatacacacaaactcatgcccctcacacgattccttcctgctcacacaataattgcttttcaaatgccagactgagctcctaggcctgagactcactcctgccccaggttaaggaagacttagcaacagactgggccagagcgcaggacgggaggagtgctggtgtctgggaaggcaatgagtcataggaggctgcatgacttaagcagagggggtgatagccacgaatacagagagatgggcccatctgagaaggggcagggtgggcagcttccctgacagaaatcatagctagaggtcccagatggcacagacagtcatgggagtatgggcactgctggcagggacaatgagcccagcaggctgtcacactgatatctggccaacagcctgctccgcgtctccctgctctgggtctggctgagtcacgtggctcacatgactcagagttgttcaaggtggtgtcagtcaggaggggtggagaggaaaaaggcctggcaaaggaagctgaggttctaggttcaaatcgggctctgcctgacagcctttctcagcgggctctgctcttcaggccttgattggcccatctggtaaatgagggggtggggctaggtggccccagctccttccccttggaaagacgtggttttgttggttcagagctcagcttcacactgttgtcagcaccttgctctctgtaccctctccacggcaggattcgcgggagggcagggagagcagacagacagacagacagccgtggccaccctagagacacactgcagccgtggtggcccacaggactctttagtctctgtgctctaaggccccctgcagagtcctctctgcagaactacaggtgacactgccctggctgtgagcatgtcctgccacatggaccaagtgggccaaactagtgggccgtggaattgaacatacttagtttccaattctggcttctctcctccctgggcctatttcctcatctgtaaatcacggatattagtacttcctcttggagttgcacggtggttaagcaaggtattcgtaaagcatttctcacggtacctggcacaaagtcagctggaagatgtggtggtgttaaaggagaaaaatataaagcctatacctagctgtgtaatatacagagcctcgtgttgggccagtctaggtttctgttcttcaaagaatgtatgtatttcttgaaattgctagtaatggtcactaaaatcattttaccattagataattgaggcttaagaaaaggagcttggaggcatggtgttgatcttaccataaaattaagtgataatatagtttactgttttaagagccaattagctattatggaattttgagaaatacatgacaagagagaagccctcataatttcactgccta

SEQ ID NO: 55796 - DNA, 2128 bp, Homo sapiens
acaaaacctgaacaatctgaaattattcagatttctgcttgtcattctaacctctgttcaggacttccaagatccaggacaggcccagtgtagatacctgtgtcccaaaccactgatctgggctaggaagactgaatcacaggtgtggaaggtcacccgggttcaaccatctaggtgatgaattaggccaggacctgggcaggtagaccatttattctggggagatatgatgcgagcttgaattacatgggagaaatatttgtaaggcagatgggataacaggacttgataagtctgtagtgtggaaaggctagaaaagaaaggaatcaaaggaatcctgatttctgacttgacagggtagaaggaggtgtgtgtgtgtgtgcgtgtgtgtgtgtatgtttatgtagggacagtgacacccaagagaggctaggaataggtttgttttattcctgtttggggtggttgggtaggcagggttaagtttttgacttggtgaatttgagatgatggccaatatacaattgacattccagctggggggaccattgaagatcaagtctggcaagtctactagctggcgcctgggtgagctgagcccagcaggtgagggaaaacgcgggaagagggtcttgcagattccaaacttaggaagggtcgcggctccgcgcacgtgctctcggggtcaccttccccgcgcctgtgagggtgccaggagttcgtctccaggtcccgcccctgtgggcggggcgaggcagcgtcgccgcgaggccacccggaagaccaagccgggtaggcgctgtctccgtcgcctccaacccccccggtccgaccagggaaggtgggatgctctgatggccgggcctgcggcgctgagcgcggcggcggcggctgctctggcggccgccctgctcctgctgcgtcgtgaggacccggggccgggggctggccccaggtaacccctccgcgtatgggaccgagctgggccaggtctcctggccgggccggggataccgtggggtatgcccagtgatgccagcagcttgtggcacctgggcgcaccctccagctcgggccccttccgatgggtctgctggctcaggtgcgggcgatggccggggagccgcgccccgcacgtgactcagcactttccccagagcccggactgcggagaacaatatcctcctccctaacagataaacagcccttgttcctcgggataaggactggcagtcccctgacaccctaagaccggcatctgtcgatgttatttccccagcatggccgaaacagaagccctgtcgaagcttcgggaagacttcaggatgcagaataaatccgtctttattttgggcgccagcggagaaaccggcagagtgctcttaaaggaaatcctggagcagggcctgttttccaaagtcacgctcattggccggaggaagctcaccttcgacgaggaagcttataaaaatgtggtgggtatttcagctgggactcaaatggacccccaggattctgcgaggtgaacatatttcatgcctaaaggctgaatactgccctgccagtggtgggggtagtgagaggccatcaaaacttggccaagattggtctgtgagagtccctcccagaagtctgactcctggattgtagcccaggtgtgcctccctcccgctcattgtgtggtcttgggcaaagcccttctctccatctgcaaccctataaagctgggtctgggttgtaatgggggtgggggctggtgagacagaagagcactgttttcagggtcatacaagctgtattctagaggcagccctggtgaccttgagaattttctcagccactttgctgattttgtcaacctgcgcacttcacactaatattgtcagggattctgaaactgctttgcagagtgagataggtctatggcagtgaaaggtgggattattcacttacaagaatttgccctgcctgacttcccaggcttgtgtctgtaaatcggatattcccttcactctaagttaaaggtttttttttttttttttctgagacggagtctcactctgtcccccaggctggagtgcagtggcacgatctcggctcagtgcaacctctgcctttcaggttcaag

SEQ ID NO: 55797 - DNA, 2282 bp, Homo sapiens
tcagcctcccaagtagctgggattgcaggcgcgtgccaccacacctggttaatttttgtatttttagtagggacagggtttcaccatgttggccaggctggtctccaactcctgacctcaggtgatccgcccgcctcagcctcccaaagtgctggtactatagacgtgagccaccgtgccctgcccaagtgcagttattatccttgttttgtatttgatgaaactgaggcagagagaggtcgagtaacttgcccaagatcacagttacaaagtgacgtgggtaggattcaaacccagcaggctgcctctagagttcacgttctcacttaaccaaagattaaaatccgtcttggggggtttgacacctatctgtccctgcagtagacccaccctggcccatgcagttcgttccctctcgccagctgcaccccctccaggacctgggagcccagaaaccagccgagcctccagcgtttggcctcctccgccaccagagggcgtcatgggccgatcgcccctccgctaaccgctcatcccaggaaaaaggggcgcacagaggacaggatgccaaccccaaaaccgcagcgacgtctctctgccttggggctcacagcagcgggccgcgacctcccactaacgcctgccgcaacccaaggaggagacaaaagtcatcttccgggctgcaacattaaccgtcatcagcgcgcctcttcagcgcgcactgcgccaaccctgcggcaggaggaggcggagcccccgctctcgccccgcccccacctcacgtgacccgcacggcgcctcgaggccggaagcgattgcgagccagcgcgcgcgcttcggcgttcccggcggtctgcgaagtttccggagcccgggtcccgccgcgggttcgcgcttgtgctcgcgctcgttcctggagtcggcggccgctgcgcgcgctcgttgcccaacccggtccccgcccccagacacgccgggctctcggggcaccacagccatgtgctcgttagcgtcaggcgctaccggtgggtaccctggcccctcagcacccggctcgtccagccccaggccgcgccgctgtggggccggtggaagaccctccgggacacgggcccgggcagggtggggggctcgcagggatcatgaaggaggtgctgagtgagggccgcgggcgaacggggcggaggagagcccatcgtcacctgctcctcgagcccccgggccgcaccggtgtccgaggccgatctgattgttgtgtgtgtgtgttaggcggccggggcgctgtggagaatgaggaggacctgccagaactgtcggacagcggggacgaggccgcctgggaggatgaggacgatgcagatctcccccacggcaagcagcagaccccctgcctgttctgtaacaggttcgtccgcctcagcgcctggcctctgccctagggtgcccgggcgcgtggggtctgtgtgcccaggaacgccttcgggcgggaggcaagccagagtggcctgtctttgaattctggaaccactggtctggggtgagggcttgtggagaaggaggaccctcggtagtagagagggggaaccgtgaactggaaggccggttgtactgcaagcttttgactggtagtgcattgaatctgtggttcccaaatcttgtcacttgagacgctgaaaacaaaatgatactgaactctgcacctgaatccttccaagtcagggatggggtctaagaatattctgtttttatgaggacaagatcggaagtaacagtgaagttactaacgagttactactaacgagtaacatatttggcagccaccctgaactagataatccctacggagccttccggctttaccatgctaattctttgaccagtacagagcttctcaggtgaaacatttcttttttatttgagcggtttccatagtctaagaaggaagttcaccttacttaagtaggacttttcacttaaggaaaaagactgtagtatcaataatttgctcaaggtcacaaagctgtggtgtgcttatttccaaactcacattcttgccacttaaaattctgcctgttagtcttgggaagctttggctcctgtcctaggcaagtaggcatgaaagaggcccggttggcattggccggtgttactttaatacattttccagtgttccctgtatctgggcatggtgctgagtggtggtgcgttagtgttctcatctgtagccccattgggtagatagaatgcctgtatatattctagttgtcataaaatatttattg

SEQ ID NO: 55798 - DNA, 685 bp, Homo sapiens
gctgtcttcctccatatcactgaatggactccaactttcagtagctgaggccagaaatcgtaaagtcatccttgacttctttctctcacaccatatccaaactggttaacaagtctaggatctaccttcaaaattcatccagaaccagagtatttcccactacctatactagtgccaccctggtccaaaccatcattgtcttccacctagatcactgattctcaaaatcatgcacagactctgtgcacaaaataatacacagactctggcagttcccaaaaacccttgctggcagtcaggaaagaaaaactatttttggcatagtactaacacattgtttgcctttttcactgtatcaacattggcactgatggtgcaacagcaatggtaggtaaacttgctggccccttagcacagatcaaggcaccaaactatactaatagtcattgcattcttgtttgtttgtttgtttgtttgtttgtttgagacagagttccactcttgttgcccaggctggaatgcaatggtgcgatctcacctcaccgcaacctccgcctcccggattcaagtggttctcttgcctcagcctcctgagtagctgggattacaggcatgcgccaccacgtctggctacattgcattctttattaccacatactctctaaaatatccttgataagctgga

SEQ ID NO: 55799 - DNA, 1488 bp, Homo sapiens
taaaggtttttctaaagatgtggcatttaagcgagtctttttaaaaaaaatgcagaaataagacttttaaagaagatcaaaggaacattccaagaagaggaaatattatttgcataggccttgagcaaggttaacagtttggcctattcaggatattagaagaaaataggaatggttggagagaagttaaggatggggaaaaagctaggcagagaccagaatatgtggtaatttaatgaaatgggtttttaatgaaatgggaaatcagtcactgatgaattataatattaagtgctattcctgctatgaaaataagtcagtgggagtgagggtaagagtgaaattagggaaagtagctaaaaaattgtatctcaagcaggagatggtagtacattatgatatcattagtgtatgatctttaatggtgatagcaaaactgattggaggtgggaccaggtattaaactccccaattatttttctacgactcaaaatctggagataagacactttgaatccctcttgacagcaatcagctgactaccaatctgttgagagcaccacattgacaaccctgtcaccttcctgtaatgtgcaagtccataaataaacagtttctgagtcactaccttctgacctctatttacacttttatgcaatcagtcttgtgacacagcatttacagtgaaatctttatcaagcccattaacgatgtaatatggataagtgagagagagcaatcaatacacagggagaaatatataccacctaacttggcctcaaccacatacaactgaggcctcagtctctgggatgaaactatgagctttgatccaacctcaactctctttcctatgctccttagagcaatgtgcatttggtatccttagtttcttcttggcaagcattccaatttgcatattttcagtaagttactttatttctaaaccttctactcaccagcattcttttcccaatgacagaacacctaaaggcttgaggtatctataacttagcctttataggcaatcatcctggaaacttagaagccattgtcctttcacccagaaaaaaaaataaacacacacgcacacacacacacacacacacacaaacaaacaaaaaacacctccattctcatcagacctcagatcatctcagccacaaattttcaaccaaatgttcaaatactgttatgaacataatctcatatagttgtccttaaaaagcagacaaccaaacaaaaaagattccaggattcaataagagttaaaaatgctacatactttaatcaccatctcccactttagagatccatgatgcattttagcatatacaagttttgtgaaatcttacagtagacaatcttgaattttaagtaacagaatatttggcaaattcacctaaggaaactattctgtgaatacctacaaatattcttctggatagaattctgcaaaatatgccttggaaaatgctgttgtattat

SEQ ID NO: 55800 - DNA, 575 bp, Homo sapiens
gagtgagggggtggagagtagtacacgttttctttcatgaaaacagagtcggttttacaaaagttaaattcaactgaagagatgtgacaagaaagatataacaaaaatggtaaaaatggtaaccaggaggaagaagatgaacctctgctgtattttcatagcacgtttccaaacctctattcctatccttagtatattgaattgtaaatattgttcactggcttgataaatgatgaatgaacaaataatatctcctggtttgtaatgagcatggaaagtttcgtaatggttctaggaactgaactcagtgctcatgaactactaggaatccagatatagagagtgccatgaaaaagacacagaagacagaatgaactcagcatagtagtgggacacttagtttagtgcaggtacagagataggcatgaccttagaatctgtcatctctagccaatttaatcacaggggtacatttttctttctaatgagaaagagtaatttgcaaccacttttttttctatttttacaacctaatacttgtagtgaaggagtcaagtcttttgggctcctggtga

SEQ ID NO: 55801 - DNA, 1763 bp, Homo sapiens
atgtttaacacattctgtggcaaggactgtgcaccgtgcttctctcaacagcctaggaggtgggtactattatcattctcctttaaatatgtggaaactgaaacttagagaaacttgccccacactatccaactcttaaggggcagaggctgacttggaactcaggccacaagggatgaccttcccccacctgtagagggcagagatcctgctgggaacccaggaagcaggcagggccaggagaaaagtcaatactcccgctccagacgctatggggaaggggctgctggcaccttggagtctcgggccatgagccggccttaaaagggaggggttcctttaagggagagggacttttccccacgagaccaaaagtaactcccaactgggagaggggttctctccgagtggcacgcatgagcggatcgatgaagacccggccaaccggctgagggagcatcgggaccccctttggggatcggaggaggaggattccgacaggagggaagcggcagccctggggaaccaggattcctggtcgtgggtggacccagtggaaaaggacgtgcgaagcctgtacagaatggagcaggccggccaacagggccggggggcggcgggtcccgaggagggacgggaggctgcatgtccggaggaggtgcgggaggcggcagagcagggacctggggacggcttgagcggagaggagggggccagcgtggagccagccgggccggggggcggggagatggcggtctccgagggtggggcgccggccggtcttgcggtctggaggcggggaaagaggcgtggaaacagggacgcagcgaaggggaaaggaaagctgccagagggcaggagtggaaaggatcctggcgagcaccgggaggagtggcggctgcgggatcagctgccgagcaggcacagggacaggtgcctggagaagtactgggagagcgcccaggagcgctaccggctgagggtggggaagcgcagggccaagcgcgcgaagcaggttgtgggggaccgggtcgagtggaagtacccgccggagaggaaggccggctggctgtggcgcccagagacggtggagtccgaggaggaggagaaggaggcctgcagaaggaagagcaggcccttagaagtccagcagcagcaactccggcggcccacagtcagattcagcacctgcctcagatctccacgtctgtctcagctgcccctctcctgctgcctctcaggcaccagtgccattaacgagctggcgaagatgggcgacccggatctcctggaagtgttggcggaggaaggtaggaccgcgccaagaggcgtcaagggagagccaggctggctgcctgcacccctccacccgcggcgcagaggccccgggggacgttggcggccctgcggcctgagtcctagggaggttcgctgcgtggcgtgctcagcgcgaaaccgggactgcggggcagagtcccccgcctggggtgagtggggttggtttcggcgccccacagatttctctgctgctcctgcgcgccagggacctgcgacctgtgacccctatggttccggaacaccctccttgctcccctgcaggcctgggaaccgccgagtaattcagggctgctaggctagcgctgcagtgcttgggtctccgaacccagccaatggaaacgaaggctttcccaaaaaaagcagcagtatagagtgcaagacagctatcccacgtgtaaggagctggtccttgagtcttattacct

SEQ ID NO: 55802 - DNA, 2291 bp, Homo sapiens
tcaacattcttacaaatgggccttctattaaaaagcaaactattgctaattccatggctttaagtggagtacttccaatcacttcctctatccagaaaatccgtgacactacatgccagctactttgcatatttataactgtttaataaactattcaaaattagcatctaaaataattatactttggacacacgaaggcatatatttggtgagaacattgtaattttcattttgtaaactatatattctatattcaagtaataacacagcattgcctatacagaactgaggcctgcgctgagacccaaaacttgtcttttcctaaatgcaccactacgaagagctaataagaggtctgtccagatgctaagaccaggtacttcaaaatctccatcctgcgctttacaggtctccagggcagttagaactttatctttcagaggtggaggggcctgacagaggctttgaaacctattgtgcaactcctcccagggcacatcttgggactcagttccaacccaaatgcctttctgaaggtcatagtgcaaacgttgaccccagtctgttagcagacccagatagacaggagacagcgctgggtggcggctagtcactaaagtcaaaagcccggctgggagggcgcgacaaaaggcagcaaagacttccgaattccccagaagccagtggactagcacttggctcccctctccaggtgatttgtggatgccgggttccaactcttcttggggccgacgagacaaaggcggctgcaacagcgccaccgctatcaccttcaggaagttgttctgaggcaagcgctcccacaggctgctgagaaacctggcgggacgctccgcttcggccttccccacctcctgcagacgctccagcagcagctccgcctgggtcttcatcagagagtcctcctggagatttgggttctctctatagccattgaagcgcagcatgtgcaccgcagaccgccggcgggcaaggcgggccaggctctcttggagtgtctcctcatcggcgtcccggacgcccgggccgggaaagagttgctgcaccaggtggtaacgagctgcatccccgagggcccggttctccagcaggcgcagagagagcaggacgtcacagtgaccgagggcctggaagttcgctaatcccggaactggaccccgcccaaagccgccctcttgcctccactggttgtgcagccgccgctccagagccgtgcgaatggggccatgccgaccaaagcgccgatggatgtggcgcaggtagcgcgcccactgcaaggcccggcgcacggtggcggggtcccaggtgctgacgtaggtagtgcttgagaccgccagaagctcggaaaagcgatccaggtgctgcagaagggattccatgaggtgcgcgaaggccctacttccgctttcaccttggagacggcgactctctgcgtactgattggaacatccgcgaaatgatacgcctctctgcaatgctattggtcgaaatgcatgtcaatctcccagcgtctttatccgtgttccttgactctgggcaacttaaaagccctaatacttttactttcgccacacaaagaggttcttcttagtggagggagagcagatgtagggcatcctaccgagaatttccggaaccacgtgcgagatgatgccagtcatgaacgtctccgcgcttcctttcgctttggaaatatccttaagtagaaattttctgagctttgcctaaaactagaatctgtgttgaggtttttcaaaattaagtaacgccagagacatactgtgacgtgaggaaacgctcttaaatgaaattttaagatctatttgagaaacatgtactaaaaatgtactgacctcctattaatgccaggcgctatgctgaattctgggccttcacattgtccttccattattagaactgaagcccagattatttgaaacaaaaaataaacttcaataatttattaaaatttgcaaaggaacaaaattttacttcacaattgtacatttcgttttcgtaatttttaggacaaaatagcttaattgactcttctgtcatacaaataatcagctgaaggaaatggcatttaagagcatcgaacaataataaatgtttgattaaataaaaaccgtgacaagagagtagggaggagaaggtcctatgtcgctcactgatgcacttaacaaacatttgtcaactcctaggagttgcattctgtacaaaatgcacaacaattcttacttaagttcataatatagtaattcatttga

SEQ ID NO: 55803 - DNA, 734 bp, Homo sapiens
ggtggcaggggagtgatgtagactctgtgagattttcttggttgtgagattttcttggttataaatggccttaatgtgttgctattctcaaatgccagctgtagtagtaatatgctggtcacgtgaatagactcaagacctcctggttagccagagtgatgcccacaatggtgctaactgaggtcatccaaaagttttctccttcaggggagctgtgtttttgtgccaacagatgctgtaatggactgtgtcagttggcctccagccaggaggcggtgcttgcaaaagagtgtcagctgcagtgatagtgatgggatttgtgctcctcttatgttacccagggtaggtactctggtgtctcaggcaatgggcagagtcataggacttcccaaagtccctgccctttgtgttaagatactagggtagatggaggtgcaaagccaggtggtggctggatcaatcaagtcccacactatggcctcccacatgccagcataagcagcagctctagtggagatcaaagggcagttctgtggcttctgagggaacattccagggaggagcacagctgcctttgttgtgcagaagaatccatatggtgagcaggggtagtacatagcagtaggcctcacctggcccctacacacttgttaaggcacatctcacacctgcagtgttccacttgcagcagctaagtgggttccagatagcctgtgctcagcactcaaaactgc

SEQ ID NO: 55804 - DNA, 1434 bp, Homo sapiens
aagacgtttcatctcagaatacacgtactaataaacaacagttggagacaattgtctctgacattcaacataatgctgagctgaggctgaaagaaggaagggtggaattgtatttcctttggtaaagcaaaaacagccgtgagtacagcctcttctaaaaatctgatatttaaagagaattgtaagacatcaaaatgttcaatttggaatgaagagtggccgaagttactggaaagctcgtgcctccgtctgcaaaatcactggccaggaaagcaaaaacttttccaacacccaattttaatattgtgctaaagctattgactctgttaaacctctagagttaaatatgatcccctccccagcccccaccttttctctcttaggttagtgtctgggggacaaggagggggctggagcttggccccaacctcggaattgctgccaagggcttgtaatacaatctctccccgtttgaagggtaaatcagtgtcaactgcatttgcgtccaccaaaaaaagtaagcattttacttccgctcggtctatgaggactgatgaaatgtaggaaatctgtttctggcagggagaaaaaatcgttttcccaaacagcactaaaaggagccatcagagaagtatgaagaggggtagtgcggctgtagctgctgccgctgccgccaggctggtggggtgcggggagcggctgctgcaggacctgtgcctggagggggccggccccgagaagctgcaggagcccagcccggagcccaagcgcctctgagagccgccagcagcccagctcgggacgcgggggtgagcacgactggctggcccagttctgcgccaacgccgccgcagcgtgcgcgcaccgcagccggggctcacgggagcccctgcctgtctactgcacccggggcggcgggggaggggagaggtcattaaaaaataacctcaggaacgaggcggggaagagtgaagagccgcggacagttggacaggctctttctctaagagtgggtattcactgcagggggtgactttctgattctctggaaacaaccatgtgttccttatccctattgcggaacaccccggacaaccgcagcacgtaagcccgctggggtggctctgccaaccagggacagagtgaggatttttaatgaacacatcgattataaatgcacacatatgcattcgtgcacaagagtatctgtaatgcatgctcagcattgtctgttatggtggggtgggatagagccagaatggtcttaaagggctgatcctgaatgttttacttgagtcgttgaggccaggatgggaggaaagagcgccacatgtgtgatctggggtgatactcactgtgtctgatgagtttgatgaaattgagttttatgtgaataaacaaacgctagccgatatatatcaacacactttgggg

SEQ ID NO: 55805 - DNA, 4351 bp, Homo sapiens
acaaacaaaaatgccatattcaaggccaaatatatattcaaataccttttctacaacccaagtaggggattgcactgctcacaatatgatcaggttaatgaaagcatccttgtttttatagatgtaagatatttaagtacttctactctaaagatactttcaaacaaaacgcagcatgtaaaacaaataaagtggaaagataaaaaacaagaaagagaaagagattgttgtagcaatagcagaggacaaacaaacacctctggcagcatttgttagaactatgatgcagtgcttgggttatcatcaatatgggttcttggctattccattttgtaaaaatgtgtcattacagaaagagtagtggtcttgggaatatgaagactcaggttcaagcctagttctgtcatgacctagctgtatgatcttggtgaagtcacttatcctctatttttttattttttttttttatttttctttttttggtttctttgactgcaagagagaagtgtggtagagagtctttgggtgtacctcttcccctgcttctcacccagttctctaaattgtgagtccatgattgcttggccgtctccaaaaaagaagtactttgcttaaccttttaggctatatttttaagggtaatgatcatgtgtttacagtgagttgtaaaaatgctgtcattgccagtgttcagtcataaaatttggtgaaaatctatggttttaaatagcccaaacaatgggagttaacaaattgggcactaacattttaactttttctcgtgtttcaatatgtggaatttcttgcttagaagctggctctttccaagtatattgtttcatacaaacttggagtttcttgtttgattttctatttgacctttgattgctgctgttttcctactaagtgtttggccaaaagtgagagggccagtacagataaagcaaatagtgtttcatggggttaataattaataaactgaactgtcatcagaaaacccgcggatccagttcattataatgtcatgatgacaacattttgtgagagaagtctgtataaaaagcaattgctcttttgtttccaaaacaggtattacaagtggataaataatgtgcactgctctgagcccaaaggtacgcagtggacctggcctctctgatatgcatcagtatagccaatggctagccagcagacatgaagctaatttgctaccaatgaaagaagatctggccttgtggttaaccaatctattaggtaaggttataagatctcattttgtgagcaaagacaacagtttttgttttatttttcctcctgtagtgtccttcacctaagcatgtgatagcaccttggaaagaaagacttttattatttgacatttgcatctgggaaacctgaagcaggtggaaaatttaagtgaatttcccaatgtctgtcatattaactgtgcttagtaattccaatatgatgcactcaaatgtggaaatatgcagtcagattgcttattttatctatatgctggtctgatttatttttggcttttctttcatgcagctgaccaatttgacctactcttttgacattgtacacaggccacagtgtctgtaaaatctggcttctaaatctggatttctttgccctacttttacagcacaccttctaaaactgctgaatacccaaactcaggaacaaaatcatgtattctttttccaaatgagctgactagagtcatcccaccctgaactaaaatttttcttttccatttgcttttgtttttaaggtctagtctaacagtacttttgctgacctcatgctacctcctggtaaagattcctctccttttgttgctgttgtgctttcatattcccaggataaaatttcaactatgtgaaaaatagaatcacatgtttaaaggatcatcatatatagcagcactatttccactaagttttttatagagaataaatttaatttaaatgtgagaaaaaagatccctgtagactttataagatataagatttgagcatatcatttgcaggggagatttcatcaacactattttattatttaaatcatctgtcaaggtaagagttgttatcctcattttctagctaatgaaactaagagcttagtaaggtgcaccctgtccatctgaaattttagcaaggtttggcagaagtttagcacattttatcagggttttgcttgctctccatggctctggatttttgcatggcttttgtatttatttattttttagtccttatcctaggatttctttatcctatatttcttttttcttcatggtgtgcacacaattttggcaactctgtagtctaaccaaggctactgaatatgggtatgtaaattgtacccttcaccaacagataggtcagaaaaagaagaagacactccctagaaagacccttcacagtgctatggaagtgtctcccccagaaggaaggggctacacctttcagtaattgattcattcagagtgccttttatctccatcaaggaaagggagttatttaagcctaaacagatggatttttctctctcttctgtctttttggggttcactaatgattgtcatattagtaattaattattaaatttgagctatcagttttcagatataggcaatcacaagtatggtagtggaaaataaaagttaagagcacaggcgctggaaatagactgcctgtgtttgaaccctacctctgccacttgctagcagtatgatcttgggcaaattacttacctctcttgtccctcattttcctcatctgtacagtggtaataatagtagtaactactttttagggctgctgtggcagtgaatgattaaaatatgtatagtactttgaacagtatctggccctagtaaacactatattgttgttattattattctacttatatagttcagtgaaacttaatttgattttgtgcataaatttattctttttttcaacaaacatttgagtgtgaagcagcataagcattggtaaaaaaaagtggactctggaataagaatgctttcaattcaaatcttggttttaccacttattatgtgatactgggcaagtgtcttattgcactgtgtcttggttatataatctgtaaaataaataccataataaaaccaaccttatggaattgttgggggtttgaatgagataattgcctttagaagaaggtatggcacataatcaagcagtaaataataactattgtcattattgtgttccagacagtcatctaggtactagaggatagtgattaagaataaacatagtacctattcttgcaaagcttagattagcaaaaaaacacagtaaataagcaattgaatatataatctattacttgttataaacactaaaagatacaagttgcaattaaaatgtaaactgaggtgggagtagggcaaaggatcagagggcttgggaaatcttctttatgggaacgtatatttaaactgagaactgaagattaatagctagccagaccaaacatggggtaagagcctttgcgaggagggaagggcatgtgttgaggtaggaaggagcttggtacattgcaagaaatgaagcaagtctagtttcaacagaaaagaaagaggaagagagtttcatgagacatgttcgggctagatcatgtattactttgaaaatcatattaaggagcttataatttacagtatgatctatgagaagccattgaaatgttctaaacagaggaagagtatgattaattagagtatagtctgcttatacaggtatgctataatgtcctatgacttgtcatcaagggcattttatttagtgagtgtggtcatttacaaggcagcttgatcagtgtgagcagcccaagacagcctcaaagaatagagagtcagtgtgtgtaatggaaagatccttggattaaaaatcaggagacctggctcctaactgggcgtcaggagacctggcctctggttctggctctgctacttggtaggaaacttgcccaaagtcactcagctatcttttctgggctcagtgtcctcaaccataaaatgaaggggttgaagtagatgatctctaatgtcttttccagatccaaaagtctgagttttaggaaatccatctcttgaaacccagtttggggtagttgagacagacattaatatatataaataaggagaagatttacataaatgaatgactttttttttcaaattaagacttttttaatggtcgtagttataacacaaatgcaattgatggtttatgaaattttctcagaaaaggaatcctaaaagaatctcaagatacagtaaagtttgacctttgaattgacttca

SEQ ID NO: 55806 - DNA, 2744 bp, Homo sapiens
tatttgtctaatgctatataaattacatgagagcatattttaaagaaaggattatagttgttaaacatgaaataaaattgttcttaaagcttatagatctttaggatataggcatatgtgtttggataatgcagggactttgaataaatcatcagatatattaaaaatcaagttgtgctgaattgattttacttatatttagaaaatgcattgacagttgatgtcatggtaattttccctttctttgagctttgtacatgcatataaaagaaaatgcagttattttccacttaatatgagcaatatgtaacatttcattttttttagttattcttgaaaaataacattttcagcattaaaaatttaagcacctatttattagggttgctgctgtcaaatacagctactatctaatgagtttggaacagcttgcttttcttttttcttgtggcccttttaccagatacttattctgcagggttctcacattcttggtatggccaataaaaattccttaggacagatggtatcttccgttagttcaaaagtttacagaatcaccttcatgttcacaagttgacgcctttcagagcagttatcctaattttgtatgtgacttgtgcagcagaaccagcttgatcttttttgatataaatgcagggtagacacttgaaaatcagtgtgaagcaggtgctggtctagggattttgcatataatgaactgtttcctacctcacaaacttgaaacttttgtctcaaaatactgaataattttggttaaagagagcatatgaaccactttgaattctccagttagaaaaatatatttgtactgagaggtacagtggggatgaaaatagaatttgatagtatctggatcatctttagggattaaaaatataccaactttcttcttcagtgaatcatgccaaataccagaacttgcctgaatgatattgttagccattctccagtctacaaggtggattgctattcatttttcagcaccacaatcttcaatcccaagctttttttttccaccaaagaggtttctgtagtgtttctacatagaaaaagacagcggcatgagggagaatgcactgtcatggaaaatagtcatttgtgtattcagcaaacatttaagtagtcaagcatagtggctaaaagcatggactctgaacctaaattgccaaagagccaagttcctctaccctcgaattgggtgacctgaggcaagttacttaatctacacatctgtttcattatctgtaaaatggatataataatagcacccacttcacagttttcttgagaagactcaatacatgaatacatgtaaaatgcttagaacagtacttgacatataataagaactcaactgttaaatatgattattagaattctttagaaatttaatactgctaatttattgggaagaaaacattctttctcagcaacttggaagattaaaaggattattttttccaggtggccccagtctaaaacacttataggctgatatgtaaatctttataaaagttatggcaaacatatttctgggaggaatacactgatgtgtatgtgtatgcatgttgattatagttgcctggcaaaagatttcaggcaactgaaatcccaccattgagctataatgttttaacataaagcaactagccacaatatttaatcaaatttcctgattttgatctactggcaagttgtcattcttgactaaattaatcatgcgaagatcaaatatcgcaattataaatttaggaagtgaaactattacttctaaactaggacactctagattaatgttcaaaccaatgtctttacggaccagcaccggtcaggactttaacatgatttaattgtattcatttattgttctttctttccctacaaacaccaaccacaatgaaatgctgaggttagggaagaaatgattctctggtgctaaaatcacactgcttccagtacatgtagtctgatgtgttaaaccaggtgcacaatttaaactaaagaagatttgattctgtgtaacagagatatttacctttgtatgacttttacttgagaaagtgtaattatttctacacagcctgttcttaagaatttgccatggataaattcagctacttttatattatatttttttgaaaaaaatactgttgataatattaatattaatgtaataatgagataatatatcatccccatataaagattataactgatttcttacaatcatacattgattgtaatcataaagtatatatttaataatttttaatcattggaaggaaaatatgttacacatgaagttattttaaaaagtctcagacttgtgttttttcttcatttgaggtagtacatttcaactataaagtatgtaatagtctgtttttgccaaaaaaaactcacctttcagagctataaaatatacagaattgaaagctgacacctaatatatttttcattagatacagatgttcaatgtaaaattctttttacaagtattcatgaaaaacaggataactaaaaagatataatgtataaaaagtaaaaatcatactttttggtaaattgttaatggctttttaatgaaagccatttttttctttttatgatttatgtgttgttttaagtatattgtaactatcttataacttaaaattatgaatggaatcttcaaattgccatagaacttaatgaaataagaatacataaagatctattac

SEQ ID NO: 55807 - DNA, 1482 bp, Homo sapiens
atctttggacaagagtataggccctagcaaaatggaaaatgaccatatgcaaagcatggaaaacctttgtaaaaagcactcatgtttgagatagcttactttttatgccctaataagcaaatggcaaaagtaaaaattattttagaattccccttaaattataagagggtaaaataaaatctatcattttcatgtttgtctcctttcttatttgttgtaggccagtagctgctagccttctcatatgagcaaaaagccatttccccaatcttaatgttctctacatattggggtatgctcctaataaggactttgtgctgagatgtggggaagagtatgtctagccctattctgtactctgctgagaatctacatatttcagagcaaggagaagagatagggaaagaccaggtggcagattctaacctagaaatttgtctagattccagaggctactacatttatttgaatctgcttataaagagccccttcaaaattgttctttttgtctgtgagctcaaaccataatatattgtttggtagtgtaaataacagttgcattaaaggcatatgaaacatgtgactgaaaataaatatgttaaattgaaactccaaaaagtataaaaagaagaagagcaaattctggatagaaaaagggaggttcacacacacatgcacacatacacatttttcatctacgtgatttcctagcaccagcgcagtgttgtcccttgagcatgaaagtaaacctgactgaatttttccatgatgacatcatcccttctacttacagtctcacatcctgcatttaacaacatgcaggcacatcagcaagacaagattgtaaaaggagtctaactggggaactgttttcatgatatttgatagcactaattgcggtcaatgctttcaaagcactgtggatgtagaatattttgtcagaaaaagtcactctcaccctatggaaaatggagaattaattattttaaaatgagctgttactaaatgtgttggagaaactcaagtcgttggaacaaatcaataatgaatatgtatgctatttcttaaagggaaacattcatagattttatattaagaaccttttctaaaaggctgaaatttgggggaaagagttgctttttcatttaaaaatgtctgagaattgctaggtaatttaaaatgtaagcactcaccatatttatgtgtgtgtggtccaaggtatgtggtactggtacattacagagtaatggaataatgctttttagatgaggtaactgagtttacaatatatagagctcttcaactgtatcttaagctcttaggggctgacgacatgaatggcttctattgtttgacttagcagtttgaaaacacattacatatcatgcatgaagcctgaagccttctagtatgtgttttgtgtttatattactgtgctagtcatgtctaatttcacaccagtgtaggctgcttgtctaacag

SEQ ID NO: 55808 - DNA, 1229 bp, Homo sapiens
aacgtaaaagaatgagataaatactaaaaagaaatcattaaaaaaacatatccgataaagctcaggcgtataagcgactttccgagcaccttcttttaaaagatggtagacacagttgaaaacgcacatctcctagacgactaaagagctcccggagaaagcaatgtcttttcgcgccgaattccatctaccacatcccccggaatgtcccacgcgtaacgccctctgcgtgcgccggcgccctatgaagatccggcgcagctaaagtcagtggaaggtagaaagacgccacagccgcctttcgacaactttttgttacaaaagtggagatctacacggaggcgacggcctaggtcgctctgacaggacccaacgaccctcctgacgcgtccacccgtcctcgctagcagggtcccccagcgggctctcgacctgcgccaccaggtacaatggctcggcccgccccgcaacccgaggacaggtgctcaaggcgcggcccggcggacgcagggacctgctctactcaccaggtccggcgtgggaggcgcggactccccgggacaaggaaaacacagccccatagggacgacagcttgagaaccctgaccgggtccggcccaggccaggcggcgctaactgcgcggtccggagccggtccctggtcctccgcgcttgccccgcccccaccgccctccactggctcggctccgccccagcggcaacgccccgcccccaccccgcagctctgccccgcctcgcctctctgcggcaacgcccccctcttctcgcgacaccaaccagtcccacagctcagctgcgcccccttaaggcattgccccttcctcacccacagctccgcctacccccgccccgcgaccgctgggcttgtggccaaagcctaggttccaggaaacacctgctgtgggtagcaatgcagggaagggatggaaaagcttcgctacggttccaaagctcttcctgctaaccttgccttaccatttataaatgaatgagtggtacagctctgggtagttcatgctacctttttttatgagatgggactctggtgtcctagaaattaaagccaaaattccaagtaaacatcagcacccttttctcccttcttagtgacagtgctattccagaacagagggcagaatataaaatccattattatgacgatgaatctagcgtcataaatgtggcattagttgacatttccactagtt

SEQ ID NO: 55809 - DNA, 648 bp, Homo sapiens
gctatgttcattggtgaaaactcatattgacatcatcagtagtgtgtgtgtgtattgagggtctgcatcacccttttattttagggtagttctcagatatccagcaggtcaagatgtcataagctagaatgtaaccctaaatccttgagctccgtggcttttaaactatatgattaggcaaggtccacactcttccctggtggaagcagagccagattaaatagccatatttactggcagaacatttgttaccagtggcttgccctggcttcttgtactctcccagaatagaattcaagagagatgaccagacacagcaaagagaaagtgaaagtttatggagcttgtgcacacaggagccagcaccacggaagaaggactggctgctccctgagggtagtaggtgggcctttctgtatgggagcatttcgccagggcatgtttaagaggggtttctctagtgcttgcacaatggcttcccatgctttctctttttttttttttctttttttttgagcggagtcttgctctgctgcccaggctggagtgcagtggcccgatcttggctcactgcaagctctgcctcccaggttcacgccattctcctgcctcagcctcccaagtagctgggactacaagcacccacca

SEQ ID NO: 55810 - DNA, 716 bp, Homo sapiens
aggggcactgtctagtggaacattaagaagagagccaccatcctccagaccccagaatgttagatccacccacagcttgcactgtgtgcctggaaaagccacagacactcaacaccagcctgtgaaagtagccgagagagaggctgtactctgcagagccacaggggcagagttgcccaagaccgtgggaaactacctcttgcatcagcatgatctgattgtgagtcatggtgtcaaaggagatcactttggctttaagacttgactgccttgcaggatttcagacttgcatgagtcctgtagcccctttgtttttggcccatttctcacatttggaatggccgtattgacccagtgcttgtactcttattgtatctaggaagtaactaacttgctgttgatttataggctcatgggctggaaagacttgccttgtctcacatgagatgttggactatggacttttgagttaattctgaaatgagttaagaatttgggatactgttaggaaggcatgattggttttgaaatgtaaaaaggatgctagatttgggaggggccagggacagaatgatgtggtttggctgtgtccccatccaaatctcatcttgaattgtaattctcacaattcccatgtatcatgggaggaactcagtgggaagtgattgaattatgggggcagatctttcctgcattgttgtcaggatagtgaataa

SEQ ID NO: 55811 - DNA, 524 bp, Homo sapiens
taatttctattattctgttttatagattgaaaaaaaaaatctgtgatttgagatttggaacttgcccaaattcacagctaggaagtgtcatatccatgatttgaacctagcaggctggctccaggccttgcactgtgaactggtgagaaatacacacactgcagagttaataattaaagtcactgataatatgataaagctgctcaatactaatggttaactatccaatattataaagtaaacttcagcacatgcattgatgtctcactctaaggttgaagattaaacaagtttcaggatccttaagtttgattcctatttaagtcaaagtcttggagaaagatcaaagcacaagaagtgaaaacacaccagagcttgccttgcacactttgcacctaacttttcccatgtgtgaaacagagattgtaactgcatctacttcaagagtgggtgtgagtataaaactagtttaatgaatttaaagtccttacaatagcgacagcctcatgaagggcacttagtaa

SEQ ID NO: 55812 - DNA, 606 bp, Homo sapiens
aaaacaatctataccttcaggcagagaaaacccacaaattcaccctattcccaattaaaaaacaaaaaaagtgcctaagtgggaggtaggggtaggagatccttcacagccccagcattagagtggaagtcacaactgtggagcagatcagtagcggatcagaaggactgccgtaccgagaagtgaaagaaatacagacacagcatgagcagtgacagaactcagaaacccaagcaaatagaatgcactgcaagaggggagagcaccattgtaagggacatggatgtgctttggtcaagaattaggcctaggcagacatccaggcctgtgtgactcagcggggttagggtgcaggtgcatactccacttgttatataacctgtttgtgtaagctcaaacttggctctgagccactattgtctgcagaaggtgtaactgccctgctgacactacgggctgttaggtatggcttgacatggtgctggcacccagagaaagagagagagagagaaccagagctgtctgtcttgcagaaggatatataggggagccacagcatggctcgtgctggtgcccagaaagggaaataattaagctgctgaccct

SEQ ID NO: 55813 - DNA, 1984 bp, Homo sapiens
taggcacgtcactcaaggaacagaatatgcctagcccttctcccagcatgatggcccttgaaacatttgatagtatgtcttaattctccatttgttgacatttgtgacttcgcgaatttctaatgttcatctgaaagataaaaatctcaaaatctctagatattgaggtttaatatgttagcatttaaaaccataatcataaccaactactcagaccaatctctaaatcagtgctttgtttggagataacattgacaggcatagtaaaaaagagaaacatgttctgacttcctacaaaacacaattcacttagtgaattctttcttaaatatttgataccaaaatatgcatcttaaactatgggaaagctgcttgaaagagccaaatgttcttgtagtcaatgatgattttggtcatgcattgtctctgggttgttctctaccatgtacctaggtcccacaaagcacctggcacacagtcatcacctggtacatctttattaagggccaagtgaatgaaccttattaacattgcctgctgctgtcataattgcctataacattaatccttatgttcatcattatcattgctgctacaatatataatacagaacacagtgggatgagtgtcactcagataagtgcattaaatatatgtccttatttattccttacaaatattgatgaaaaaacttgttcctcattttaaaaatacgaaaattgagattgaggaaaattgagtaatccaaggccacaaagctagtagatttaagaatttaaacattgactaaacatagattccgtcacccacggggtttaaccttattcttctttgtcatgaaatctcttatgtgaacagcactttttatctgtttccaagagtcacagttccatttcaggttttgccaggaagaattaaaagaatgaaatttcaataattactccaggtagaggaatgaggcaaagaatatatcagtgtgacaaaactttttgtgtttgtgtatgtatttaacagtcatagtcaaaagataatctatgagtcagagaaggtgacagcaaagattcattattttcatgctcactcatacaccttcactatgattcatcaaagttaatctgatgactacgttctatgacacatcttatttgtttaacaaaacagtctccaaccttctaatttcatccatcttctctgtctgcctctgcacttatcatgcttagcacacaaatagtaagaggaacaacaatgaaaatttggcagaatctgcttttttatactaaccataaaaaccttccagatttccaaatgagcatttgttggaaggaggatttctagggaagctagttcagagtgttatacaacattttgtcttctcgggggattttatttcttctattttgtgactgaaaaaatctcccaactcttcctattagttatgcattaccaaaaggctatttgaagatgaggcaaattttcattcactgtggcattgtccagtgatggtctcagtggaaaggggaggcatgagagttggtagtataaaatgattgcatagagcttttcaacacaagatttatgatctttggagatttataacttgaactgcttattaaatgatacgtgggagtttacaaaataatgttttgtgatcatttgggggataaacaagcctgagcaaagatttaaatttgtccatttgcttatcaagtttgaagaataagtaaaaacctgtggcaatgacattcgctaaggggctctaagtgtagccatataatgaatgatcttaagtgttatttagctaaattcatgctttattctataggcaatgggaaatcacatatttgtgtgggggagatattttttcttgttttgtttagattgatttttatgcagtgagttagcatgataaaatccattttaggaagacatttctggaggctgatctgtttgggttggagaaaggtgacgttagagagagttaaaa

SEQ ID NO: 55814 - DNA, 1068 bp, Homo sapiens
agtttatgtcttgccctatcatcaaacagaaggaaaaagaggtgctagctcagcagctaatttcctaaagtaatgacatcaaaatagccccaatgataataatgaataagtaatataaaatactatctgtgtacttggcacagtgcaatcataacatctccacgacaggggtgcactattttccaaattttacatataatggaaataagggcactgtgtacctgacaatattgaacattacctgaaccctattcttctgaaaaatgatagttatgaaatcccccaccattgtgtgtttcaggaaatagctctccagatgatttgtataataggtggacacactttctcatgactctcataagattcacaaatgactccacctgtgacaaggcaaaatatagacctctctccttttgcctgatctgacaaatagagccagctgaaccagctgaacacagcaataaatgttttctctttagtgactgactgaaatttcccctgcaaatcactcttcctttgacttgtacactcatttctataaaaggataaggcaaaaccacccccaggaacactctgttttggacattggaacctcaccctgttgcaatagccatagtaaagtcaattcccttaggttttgtttgtttttgtctttgacatactatattaatctgttctcatgctgctgtaaagaactccctcaaaacccagggcccagccccagctgggcccctgccaagaccccggcctctgtgctgggatggagactccggattgaggctggtaaaagctgaactcaatagcagcaatgagagtgctcacgccactctgtgtgtgcagtcagcagtgtggccacagatgggggccactctctcaacctcaggtgtccccagggcccggaccgctactgggcacagccaggctggctaccaactggttacctgccctgtggctgggggacagagcagcaggtatcagctgggctagggtcagggtcagggggccactggtgcacagcctggcacagactggcagacttgaggcccagggtgctgagggtggtcacac

SEQ ID NO: 55815 - DNA, 1770 bp, Homo sapiens
attccatagaggttcagttttttccttgagtctgtgaaacgcttcaacattcttgaaacaaaaaacttcttatttttaataataaaaatattgtgttaaattctgtgttttgttttttgtttgtatgtttggttgctataattagatgaattacaaaaatgagacctaagaaaaaagcattaatgcctaccagaagatttgtcttgagtatctccgtggggatagaaactgtagacatttggatttcagttcaatataaaaaagaactttcttttactcagaatattacaaagatgggctgaactgcttcaaaaagcaggtgacaaaacatgaactgggtgaccatatcataatgaagttgcaattatagagtggatgcagctaatgttattggattatattatatatgcttcttttgttgtttaagatacactgaagagaaataaatttgcatttatatggtaaagaggtcagtttatgagcattgccaaataacaaacttactgtttaaaaggagaaaagttatggatacaaaaggccctttcatccatcactatatatacagctttaacaattcaggaactagcaaaaaattctgtaataatgtcattataactttgctgggtcatgaacttaatgcaccaaaagaggctgtttgagaataagccttgcttatctcataccattgatatgcactgaactttctttttctgcatgcagtagttttctttatgtgtctgagagtttcattgtttttttttcagctagactttacagccatttaaggaagagtgtatgttttaatgattgaaggaatttaaaatccattagtgtctctgaaattatttctccttagtatcaagagataattcttttttgatgatactccaagaaaaattagagcaacagttttgggtaaagttcagattatacaccatcaagcaaagggcaaaaaacatgagatgaggtggtgaaaggaaatgagtgttgtcctaaagtaaataaaggaaattcagctgtgtttgaacctggctttcacactgcatacctgcataactgcaaaaaagcaacttcatctctcagagccaccatttccttacatgcacaattaggataatttcacaactagagctgttgtgaaatttatagcaaatatttgagaaaactatgaatattactatttgcttataatttgaaaatacaaattataaacaaatactagttactttagttaatttaatagtcatatcaaacctataagtaacacaggaacttcagagagctggtgattcagtgtgaaatatgctcacaatcttgtcctatctttcagaatgtagaagaaattgctattaaatcacatgggccactactggttgtagacatatttgtttactgaagtcactatttttatcctggagtatttgattagctgtcttaatcacagacagttcaaaggaagaaaatcaaatatttgaaccatagggagagttgccgagaaacatcaacgcttccaggtgaataaagtggttattagggtctaaatgaaatagttcagaacctcctcccaccatcactctctacatgcctactcctaatatgttttggagtctgggggtgtttgcatttcttctttcaactcagggatctactggacctctcactcagggtcgactgcctctcatattgccttcacctgttcaaccgttcatagttttcagtcttctctcagtaatcctttctcatctggtatttcacaaaatgttttgttct

SEQ ID NO: 55816 - DNA, 2068 bp, Homo sapiens
acgtgaataaaaaaagatagtaaatttctcaagaacttttacatgattattaattaatttttatatatcaatactcaaaatataatagtatcatatgtaaagagataaaatattctttttttcccaaagatgtcccattcttaaataatgtaagagctgctgctagagagaatgagactgtcctgtgagctcagctatcattcccctagggaaatcatttatcagatgatcataatgacacttctcatgccaaatcatatttctatgttatcacattctataaagcataatttgaaagaaaaagcacttcaagatttgggcaaatgtaccagaggtatatagagtagaagtttcctggtagttaaacctcattgaccaactcgcaaatgaaaccatttagatttcatctttcagaaagtgtccttggcaatatttcataacaaatacttcagctgagaattttaaagtctatctttcctgattctagaatctactttatttctgtaaactttgtttgtacctttcaccatttactcatttccctacatttgttttccttttaactaccaactgtcttttcctcaaactgaattatcatttataatttggatcctgctttcaacatcttatctaagcaaaatgtcatataattaccagtagaacatgtccatgttagccttttttagtcaaagattttcatgcctgtttcgaaatagtggtggcctaggcttgcacaacatactttgtttgctgttcatgctgttggaatgacaatcatttccctgcctgagtgatagtttatgaaggcacatagagcaaagagtcagtttctttactcgtttttttaattattgtaactatgagtaatacatgtcaccttttgtccagaatacattttatattaacaactgacttgcaaactttataaatataaatataaatatacataaatgtataaaatatatattccatagtatatatctatatatacacaaatactcttataggtacatgtatatgtatctgtgtgtgtgtatgtgtatctttttcaaagagtgctgagccaaaaaagtaagaatgctttaaatatgctgttcagcaaattaatgaataactaatggtttaaaatgcaccatgagggaaatacctggacctcatctagtatggacccctaaactaatgataacttttactaaattagtctctgacaaaacatcagtgtgcacctctggcagtctacagcggatgcatggactaaggagcagtgcatgaataaaggtgaaatcttacattaaattttctaaggcaacccatacagctattttacctctcagttaattcaagaataccagctccatcagttgccaactttttagcagtttgctcttcttatggatcacctgcttgtattgtgaaatctcacgttttgtgtttctcaggctgtatattttatttgaccaccatttaaaaagaaatcttttcttttccacaatcacagtcatgttttaataagcagtaggctacagtctcacaatctgcatccaggaaatatcttttagtattaacttccttccaattaaaacattcctctgatgagctgcccagtggaataaagttgctctccctgacagtctttagccccacccagctgatctcttgcatacagaaatatgagtgagaacttctagtaccagcttactaaaagcatctctctgcagccttgcctatgtcttcacttagcccattttacttttcactgcagcctctctgagatgggataggtgctgctgtggtttaaaggcaaaatatatcttcaagaaaaaagactctaaaattcatccatcctattgaagttaattgtctaggaaaggcattaacacagaaaacctcttagagtcagctctgcatgttttatttcctttggatttccaagtgaaaataattacaggaaagcctatagttatgactgattagaatactgtgattttttttcctatcccttaattttaaagaattcaatagtgtgaactttactttacatagttatatgggaattttgcaatgtcag

SEQ ID NO: 55817 - DNA, 462 bp, Homo sapiens
tttggataagtttctttcacttccaagctttggttttctcgtttttaaaatcatgcctcttaactagatactctcaaagggcgattcagctctgaaagtttccaaacatttctgtttgaaattgaatagtgttaatgttgttctactttttcagcaaagccccaaagcagacaaagtcctccagccacctgagaaagtcaattatcttccaatcagtaaacaatatatttcttaatcactggcagaagcatttccaatcttttataaatagaaatcctttggtaacataaacaaaattgactgaacctggagattgagctttcggaaaaaatgagcaaatctctcatctcctttggaagatgagcatgattttgaaatgtttcatctgaagtcagcttgtacatgaaaatctcactttaaatgttaatggtactcttgcttggagtctttctgcttaatctc

SEQ ID NO: 55818 - DNA, 4515 bp, Homo sapiens
ccaaagtcagaggaataaggcagctcatagagggaagattctataatatgctaaggtaagcagggatcgttctagagagaacatggcacttggcaatagaattgctagctagagagaagcctaacaattcattcattccacaaatatttatttttaccttattacattccaggaactaaaagggaaaatcaatttaattaggactcagagaatgtcctcatgtaacctattttctagaagcatcaaggattccccaagtgctcatacgcttttctaaacaggccttctggaaagcagatgagagtgccaaaatcagttaacacttcctttgcagtagtccactgagaagaaaaaagacacatgagaactttgcatccacatctgtccccaattatgactgattttcactctgctcagatgcatttaatgtggatacccttgttggcttatgtgactgagtcattggcattagacctgaaaaaaataaaagacactggtcactcacaggatggtgattatgcctgggctcatcatgaaagaacccacccattgcagggatctgtgcatggtctcctcctcatggtcaccctcagagactagaaactaagtccaaatatagaaaaagtccaccatggatctattagaatataacagaactgagagagatttcagaaaatatctagtgccaaaaagagcagtagctttcttttgttttaatctcatgtacattcttggcattgaaagtactccaaagaacagaagtggcttcttgtagcatcgtgttgagatgaagtctgaccctgcagatggattcagtggaatgtttagtaattgattagctatgactgcctttggcatagaaggaataagttgggaaaatagtgccacatatttgcaatttcgtttaatgccctcattatacaaatggaaaaactaggaccagagagacaataccttccccgaggtcacacagctggtgcaacatattaccaacactgggatcaataggtccttctgccttcctacatatcttcctttttaatttcaacctttgcttcagaaaaattaatcctagaccctaagtcagatgatcttgaatttggtcctggctttggtaactaaaaagatgagcaacctattagaatttcttacagtagtaagtcctagaagagaccacaaggatagcccaatcaatgcactcattctgtaggtgagaaaatgggtccagagaggtttccatgaattagtagaaaagctaggattagaacatatttccaaagtcttgtccctgatactccttcacagtgtcctttcttatttgtaaaatctatttattaaataagagttcattgggtacctggtatgtgacatgcattgggccattgtcaggggggatataagggtaagctcgtggtttagtaggggaactggttgttcaaatacttttcttacagtttgatgagtgccaaaaaaaggtttgtgtaaaggtgtaaagtgtcacataaagagagggaaggagcactgaactcttcctgagtcatgacaacattcacaaatagggtgaatgttttgttgagtcttaaagtataaataggagtttcataagaatacagagtgggccagggcattccagataaatagtaccacatgagaaaaggcacagaaatatgaagaggcatgacatagcttaacaaccacgagtcatctggaaactaaagaaaggtacaaaagatcttgtgcatgacactaaatgattcagacttgacctaggaaagcagtgatgagtcattagcatagcagaaaaaagagaggggcaggatcaattccttgctttggaaagataatgataatattgtgaacagaagaatcagaagcttaggagaccagctaggaaaaaattgctggggactatatgagagaaaatggcagcctccgtaaagctagtaatgctgtaggaatgtgtagagaactgactcaaagaccattgcagagttataatcaatggccttgatttatgttggatacaagagctaagggagagaaaataaccaataaatgaaaataatgcattatgtttatcttataggatattacaaatgaaataaggttgtggataagaaagtacttggggacaaaaacaacaatacgcaaagctctttaatatgtaaggcatttttattatcacaagatcttattatcaaatactatgttggtttgctctttggcacaaagacatgggtcaaatgcattttgaacaaagaaacatggcaaaaggaaaagtgcaatgtatggcgttggatttatccatttgctcctccaatagtcattggcaacattatggattaggctttgcaaagtgggagaaacagagagatgaaccaaccacactctctgcggaagcatcaaaggttattgtttacatttgctttaagaaacttacctatttcagtaaagaagcaccctctcagagtttctccaaccaaattatataatagatctttgaagagaactaccttaggtgaatggcagaagatgtttaaatgtgtgaatctggtttagctgctccaccaataagctgccaaattgagctttttggtaattatcaaaacatctgtaataggattagtgtgtcagaaacagctgctgctttcttggtaggagaaggaggtggggaattgggacatggacttcactttagcccagatgtttctcatttggagaaaggataaaggatagacactgagtcagtgagaaggcatcaagacaaaagtgaaaaaggacatgatttcaaattgcactggccctaagttgactcaagtgcataccatgggcatgtggtgagcaaagcttccctgctctccacagtcctgggagctagacttgtttgccaaaaaatgtcctagtaaaaatatttatatgaaaacaacacaaaggcagtgttaagagcactgctgaccccttacagtttgacctcatctttccaccgcaataagaacttggaaaatctccctctctatgtgaatgatgcaagacttggttacactaggtggttgagcacttccttctggctatgagccttcaaagacggggaggagcatgtgggaagctccagtgaattacaggaatacttccatgaaagaggctgcttctgctgagaaaggttgtacaagttactacaaaattcagactctagctctctacttgtagagtaacctggttgaatccaaccatgtattcaagtaatcaatggacaaatatttattgagcacatacaatgtataaggcaatgtgccaaattcaaggacagcatggaacgggacagacaaatttcctgcccttatttgtcctcatagtccagggaaaatatgattgctcaagtaagaatttaaattgcaattgtcataaatattgcaaaagacagctgaccaatgaatttagtcatgtcatagtttttatagctttaggctgttctgcatgtgtgcaaagtgttggtcattatgttgcagaatccagtaaaaccagaatctactaaaaatgagccttcaacttccattttttaaattagaacattatcttaggccctcccgctttggtactacctgtgacaattttctgccttcccttcatccaatatctactcaacttctgactcattagttcccattctgtgtgcttttgtttttactgatgagaattctgtttttgcatccatcatgcacaatgaaacacccttctaggagaagattagacaaggatgacttcacttaactaatggtcagtcccaggacagagctagactcagagggtgcctttagggatagggctgagcaaagcctttggccaattatgaaggcaagccttctctttgatgacccacacttcctcagtaggcactatttcttcctgttcctttttttctttctttcttcgcttaaaacaacctttttccttatctctagctttcaaaatcatattagttcttcaaataccaccttaattgtcaccctttctatgggattttcctgcttcccacatgcctgataggcagctcctttaaactcccttagtactttgtagttctgttgggatatcagagcctgtcttattttattttgctgatattttattttgcttctaactaaaatgaaactatctcattcatctctgtattctatgcagccagtggtacaaaactttacatacagtatgtacttaattagaatactttaatatagatcttcaagttaaagtaagcttatttttgaatcttgacactgccttttacaaggagacaattcacttatctctggacctgcttattcatctcatcaaaaagtagaataacaacagtgactttatagggttgctaggagcagcaaatgatgtgtcatatggaaatccctagcctagaatatggttcattggggaattctataagtgtttgttaccttttcttctcaatatcatttattgaattaaaaatgaattgaaactaaggaaactgaatttgaaaga

SEQ ID NO: 55819 - DNA, 1483 bp, Homo sapiens
aagaaatgaaatctgagtaagaggaagagcagtggcaatagtaatactagttacccatctttaccagaattcccaagaacacagagattgagacaaaggctatatgctaacgccccccaaattattgagactgaaatccctgaaaacagaagtaaaataaagggaggaatgagtcatggaaaggctcaatagcatgctcatagcaagcactgctgaatgctcagtcccacagggcatcttgagagaactgcctgaaactactgcactctagagctgtcagggagcaaaaagaaagcccagctctgagctcctgttactcaaagtgttcacaggatattgagtccacctcatctcagaattgcacctttccacctggggaagccagaacctgaggcagcagcagtgacatccacggcacaagtcacggcatgaggggtgagcccataggtgcccgtgagcctcatctgcagcctgcaactggcagtcttgctggcctggctgagtaaaccaaggcaccaatgtgggcacctctcaaggtctgttgagcctcaggggcaacagggaagcactggcatgggaagtacaaagtgaggcaagccaccgccaggtcatgaaagccagcgacacaaggcagcaagaaacttcctcacagtggggctgtttggccaagtaatagagtaccaaaaagacacagcccccaccatggagagctgccatgtggattaatcgaaatccaaacatcccttctgtggcctgcaggaaaacatttgacattgggcaatcttcattgagagtcatcagccacatagacaaacactcacagaatctgcagaggctcttaaactaaggccagcacattacagcgactgctattgagcaccttattgagcacctgctatagctaggctatcttcagacgtctatatatttttaatcctcaggataccaccatgagggcgaaacactagtctgcactttacatatgagtaaacccaggcccagagtagttaagtaacttgttcagatactttcacttatttggggcatgtggaaaagagaccaaatccctcctaggtggccccagggaacagaactgaggccaatgagtagaaattactagaaaccagtactgagaataggaactttctaagagtctgagccagttttccaacaatcaggagagaaagtaaggtgcccacggatggcactaatgagtacattgtggatttctctgggagaaaagcaggattctttgctctggtgaagattgaactagatgaagccagaagttttccagaatcaataccaacacacttttactgatgtcattttaacatcaatgcaggagaagaaaagatacttataaaataatggaaatatccaccagtattcagcttttaatatgtaccaagcacttggcaaatagccagatatatatatatatatatatatataaaatttagtcttcataacaactatgagt

SEQ ID NO: 55820 - DNA, 1202 bp, Homo sapiens
aggttggactaggccttctctgaatatctaatcttaggcttcctgtaagttaatgcccttagttagactgaagtggacttttagttatttgtacaaaaatgattcctttctaatacacaatatggagtgtgtatctttagatgaggtctttgcaggaagaaagtaaacactcttcacactcttcacccttcgtatgataactttatatgggtatatgcccgactcttcaaccagggagcaagctctttgtaggctgaaacttcttattgcacatctttgtgtctgtagttaccttaatactgcaccctgcaagtggggagcaagtagtaagtgcttaatataggtttgcttaattgaattggttagtaagtcagagagagattgtgcaagaaatggaatgaatcagagtaaattcctcttcgcttctttggccaagcagccaatatgaatccatctgttgtcatttctgaatgtcccagagaaaaaggaatgaagcaatgtagctcttgagtccaacagtccagtctttcaactgaaggaagttgtagttttcttctgggatagagtgaaaataggccttggtcttccacttggcataaacagtaagaaaactcctttggtctatgtttccatgatgctaagtatctggataagaatgaaaatgtgcagtcaacatgcttcagaaactccatgcatgtgataccacatcagcaaaatatcaagttacttaaccagacttctcattttctctgcaggagtctgggttgtttatatccatgaaagtgatgacaatgagtataactgtcccagaacagtgtggcactgtgagtctgaatgaagccagtcccttattacttggggagggagataggtatggaacactggcaagtcaacatgaatgtttcagttacatttcaaggaagaaggagaaaatacccatagaaacaggagtgctgcctgcttctgctttcccatgcttcctctgtttcttttcttccacagccctattgatgtccaacttacatcttatttatttacatatttttctttttttgagaaaaggtcttactctgtcacccaggctggactgcagtggtgcgatctaggctcacagcaacctccctctcctggattcaagcaatactcctgtcttagccccctgagtaactgggattacaggcatgcaccaccatgtccagcta

SEQ ID NO: 55821 - DNA, 1174 bp, Homo sapiens
tccttccccctcccaatatgtcaataacaaaccagggtttttgtggtggaaattccatttattctcttctcattttctctttcgagctaaattctattgtagagtcttcccttccaacctttaaaaagcgaccctgtacctttaatagtggagacctggtgagaggttcttttccaaacttgttccctggcttccaagtgacgaaaccagctgtaatttgagagcagagagatcctcaggatatctttagccaaaggaaaagctccgcattcccacccagtccagaaattgaaatactatcagggggcaagagcctttctctccagctacacactccatctcccgggagcaaggggaaactccgagaggagggcaacagagccagcatcttgccagggccccggaggaggggttccccgctacgcctgtgccggaggagttccagtcaccgagcgaggggcgcaagggtgggtgcatcctgcgctgcggcgggcgcgctacccagacgctggtgtgcagagccacatgaagcctgctggggactgggggccagggagcagcaagccagctgggactgaggcggacgctgtctcagggagacgctgactcgcaaagacactcccttccttgtgcctgggtaaaaagtctcctcctggggtccctggccatcctgaatatccagaatggtgtttctgaagttcttctgcatgagtttcttctgccacctgtgtcaaggctacttcgatggccccctctacccagagatgtccaatgggactctgcaccactacttcgtgcccgatggggactatgaggagaacgatgaccccgagaagtgccagctgctcttcagggtgagtgaccacaggcgctgctcccagggggaggggagccaggttggcagcctgctgagcctcaccctgcgggaggagttcaccgtgctgggccgccaggtggaggatgctgggcgcgtgctggagggcatcagcaaaagcatctcctacgacctagacggggaagagagctatggcaagtacctgcggcgggagtcccaccagatcggggatgcctactccaactcggacaaatccctcactgagctggagagcaagttcaagcagggccaggaacaggacagccggcaggagagcaggctcaacgaggactttctggg

SEQ ID NO: 55822 - DNA, 724 bp, Homo sapiens
cttgagcattttcttcattttgaaaaaagctttctctggtcaacataactaatatatttttatcaaatttctctccatcctattataccactaaaattaacttatcaattaatttactcattgtctgtattccttaacagaataaaagctccttaagaaacatcttgaggaatttatagtagactagacatgctcattgaataagtgagtaaatgaatattacagtcaatttagtctcttcactgttacataataatgaagagctcaggctttaaaatcaaagttcatttgaattccagcctctttaattattagctgagtaaacttgggcgagttacctaacttctctaagctttagtttcatcatccgtaaagtagaaatgatagtatcattgggttttgtgaatattaaataaagtacagcgtaaaacattgactgacatgtctgccctgcaagaaatattcgataaacattgggacaaaagaatccttcactcaaaggatatttgcatctgtaaagatctcaggaagaggctaaattttaaccaggagattctgtgcctggctaccataggtgtactttgtttaggcagagagaacacatggacacaggaaggggaacatcacacactggggcctgttgaggggtggggggagcggggagggatagcattaggagatatacctaatgctaaatgatgagttaatgggtgcagcacaccaa

SEQ ID NO: 55823 - DNA, 1415 bp, Homo sapiens
aaagcaaatgatagaacagaaacagcgcaatattctgaattgaagaaacagtgcaatattctgaattacagtggtctttaagtaaataataagcattaatattctcttcataaagacgagtttactaatttagtatcataaaaacattttttttcaaaagccatgtccaagtgggcaccagttaaaataggacaggggtgattgttacactttcaatttgtggaacatttttcttccttaaacattccagagcttttatgcaaacataattattaaagtgcatatgtcattggttctgaacttaatatctgaattttctgtgagaaaaacaaggaattcttttcatttggatcctgactcagcacttacatcccatttacttttagtcactgtgtttctgcttacagtatgtgaaatactctcaccagaacaaaggtcccagcgtcaataagtcaaaccgcagactctgacagctgagtgaatagcagaggccagagtccacttgaagtgttcacactctcagaggccaagtttagatcttatctgcctgagattccttttaacactgatttgtcatagcaggtagctgacagcatctactcctgaagaccggaaacatggcttgtaccatccaaaaggcagaagcacttgacggggctcatttgatgcagatcctctggtatgatgaggaagagtctctctacccagctgtatggttgagagacaactgtccgtgctctgattgctacctggattccgcaaaagcacggaaacttctagtggaagctcttgatgtgaacattggaattaaaggcttgatatttgacagaaaaaaggtaattatctctaaattatgtctcccttctttctcaagttcaataatggggctagtcaacaataatttagataactcttttttatttggtcacgcatatataaccgcatatgaacccacgtttgtatagtacttggtgcgaattaagtatattcagtaaatggaagcttcagctattattattactattatcattactactactatttttaataaaatttgcagtgttacttgtcttttagtcaaattagtatgtagagatacaaggcttgttctgggattcccaaaagcacagctctcaaaactacaaaccagaggcagccaccattccatgtttctctcttccaaatttactaggattcttattatgctcttgtccacatcccgacttgaggactttactcccagatttcactgcttgctagctagatagaaatgttgtttactcttacatttctcacctgaaaaaaatgagaataatagtagtaccttccccctagagttgtaaagattaaatgtgttatgtctatagtacttgttatggatactcaaaatagtgttatttttattattgctgttg

SEQ ID NO: 55824 - DNA, 419 bp, Homo sapiens
aaatttagaagcagctttggaactgggtaacaggcaaatgttggaagagtttggagagctcagaagaagacagggtaagtttggaactttgtagagactggttagatggttgtgaccaaaatgctgatggtgatatggacagtgaatgcctggctgatgagttatcagatggaaatgaggatcttattgggaagtgaagcaaaggtcacatatgctatgccttagcaaaagagcttggctggattgtatccatgccctagggatatgtggaagtttgaaattgagagtgatgacctacggtatctagtgaaataaatttctaagcagcaaagtaagtgtttaagaagtaacatgactgcttctaacagcctatgatcagatacaagagcaaacaaataagttggaactttaaaaggaaa

SEQ ID NO: 55825 - DNA, 771 bp, Homo sapiens
tgtagtcaaaatataaactcaacgtttaaagaaaattcatcttgtgaaaatgatttttcaatcactgtgtattatatttccctgccacatggtcactgaaactctctggaaagtgataatgaccttaagtaaaaccaaaaaggcatggatcactgaaatatagtggcacatactaaagaagagaagctagctgatttttcagtgtgcaaagccttggttcatttcaccaaaggtgaatagcaatgttgtttcagtgttgtgcaatgaaacctgctcatagtgcttttcctgcatttaaaattctgactaggagccaaggtttatctttaaacacccatgcttgaacaagttcagacaaaatgttcctaattgtaacttgctctgctttcatttttatctagtagatttcctttatgagggacagactaagctatggatattcagacacaggacataaaaatacccatgatgatagtacttcaaggcatcaagtgtttattttatatgcagttgttaaaattatagatttttgaatcagtcacttggatttgactaagtagtcttataaatcattagctgcatgacttggaactctgttcccttctctataacacagcaacactgaaaacatctgttacatatatttgctgtggagattaaaagaaataaggtactagcactgtgcctgacctattcagcaaatattagctattattattgatactatggatcttctatgtgccatgtactgtaccaaactcctttcataat

SEQ ID NO: 55826 - DNA, 782 bp, Homo sapiens
ctttacaacatattaaactttatgttaaagttcattaaacttttacctcccaagagttggctgaaaataaagttgggccctgagaaattaaaatcagtcacagacatgtttaaaagataaaactaacattcataaaattaggcctatgtggtttagtaagtaacagggagatataattgattttaactttggaacaagaggctgtttgcataagaatttcctgggaggtaacattaattatggatggttaaacactaacaacaggaaacacttatgtagatgtgggagtataactgtatttctttagagtgagtcccttatgtgggattaatgcaattattcttgggctcatagagtagagagcattgaaagtgaaagggaccttccaactccaaaggttacaactggaagcacacgagctgtattcagatgtttggtttggcccacatgatgttgaaagaaaatggaattagtcgttaccacttgaaaactgggagattttacattacatgtggacctgacttttcttgaaaaatcatatctagcaacaacagagcctaaatccttgcatgccaacaatctactggatacaagtagaggctgcccttgaagagaggtagactcactctccagtttgccagaatcctccacgctctccagacctgcaagggccctgctactctttacgtttgccacccctaaactagagtaagacttggtctgtagataaacaggagaccaaaaatattcaatcactgaaagactctgccatctctgccatg

SEQ ID NO: 55827 - DNA, 810 bp, Homo sapiens
atactaataatacgtgcatggcactgtaccaggcattttgttgggtttagatttgggtttctactttatgaaaaagtaccttttgtaattgctgtatgtgggtaaatgtaaatacttgaattggcttcctttaaataatctaggccaataaaaattccataaagcgaaggaacagactgaaaagtaaccccggacttttggcattccaactgagggaacatgacagtcaatatatgccaacagcagttcaaagagggtggataacaggaaggtgatccccaggatgatgcaaagcatggtcaagatggggaaatactcatctaccaatattatcttcagacaaaatgaatccactcctcaaaatttacacaggctaccgttgtgtaaataggtgtggcaaaataatataaatttaattaagattatgcaatgtcgtgcagcccttcctccccatcctcaagctaatccaactcagacacatgccatttctatgacatgccattcttccctattcctggccatcccctaaatcagtccctttctcacttgtttgttcaggaccgcttctttctcttcctgcttaaccttttgtttgctgcatgtatctctcttgcttttatatctcctggacctttattctgactacagacaacctgtgccaagtcttcatgtctttttggctgctttttggcctttcttgcccttttcacttgacttactaacatttttcctcttcccttccaaccaccacacctgctacatcctcccattgatctggcatcctctgcagcgctacagtagaaattctct

SEQ ID NO: 55828 - DNA, 1078 bp, Homo sapiens
tgcctataaaggagaatttcattcatttatgaagtgtcttcctgcctctctaccacttcctgcctcctctgcccatactccccctcagtccacacacacacacacacacacacacagaggctggcctctgtctttgctgccatgtggctggcccaaaataaagaaacccaaaaatgggttgaccttgtacccatggccaactgtaatgcagagcagacggtggcagccagccagacaatggaagctgaatgtttcctgggctcagcctagcaaatattcaactgtaataaaagccacggtccagtgagcaattagagaaagatgcccaggtgtcactggagagggtagttcttatttacaagaacacatggagcctggtgagcaggcagccctcctccttggccttgactttatcacagcaaacaggcctgaccaagagctttccttcagacacttgcagctggctgggaaatgagtgtgatagtaaacacatgttgcttcgcttgtgacctgacaaatcagattacctgcctcagacacacacaggggctttatagtgaggctatctaaaaatcaagctctctgaatgtacaactggtttgttgttgtttgttggggtctgaaattactcagaacaccttgcagtcacgtggaacagaatatattttattttattgtctcccattccaacggagctaacactagccttgtttgtgtcaaggaacccaaacattatcattcaaaggccgtattcacaaacgaagtgggatggccataaaactgatgaccttgctgcttctggaatctcataaaaagtttccaagctgctcctccccagagcaaataagggcgttgcagttgctagtcccctggcagggttccagctggggctattacattcctccctcataaatacagacttgtcggcctgacagggtgcttaactctggaggtgctgctgtgtttggagcatttaaacccagaggcaggggcgacgcagaaaaaaaaaaggcatcagagttgtcggggagcaggtagggaatggtgaaaagaggcaacactgattgagaagatgtca

SEQ ID NO: 55829 - DNA, 1739 bp, Homo sapiens
acgggctagctctacctgcaagggatgggaagattcacaagcaggcaaagttggcttgggccttaaagggtgagtacgacaatgggtgtgttaagtgacttgttatttttctctgcaatcttctattagcacatactgacagtctttggggtccatcacactctcaaagaccttcatgccttgaaaatcctgcaaattcacacctctatttctagttttttattttgtactaatgatgtattatcatactataatgttggactagctttccaaaggcatgcggtagaaacaggccccatccccaacaaccttcttccttaccaacaaaacattagctttattcaagacagaaaagtgccagccctgggttggtgggggttaaatcgtgattgacctaagtcagtcatgactatttcattaacatttgccagacactcacttttccaggctcccttgcatctaagggcagtcatgggacccagttctggtcaataatattgtggtcatttaggtataagagtgaatcagctgggagggcttctgggatacttttgtttcctcactgataaaatgacatagtcattccaagaaaaggatcttttgccactccacactcccactccttgtcacctgtctacttttgaatactgttgtaatatctggagacacggcagccatcttgaaaccatgagaaacaggcagaagaatcaatgacctacataaatatagagatgaaaaagtgcccgtcaactcaataatactgtggaactgctgttctcactttagactacttatctccagacttcctattatgtgagataatcaaagtgatatggtgtgggccactatccgtcagggttttattacttatagccaaatagattttaaattatatagatgtttccagaaagaggactatctttcttctcaccaggattatgaagctctaagactattaataaaatggccaactagccacacaaagatgcaagatattgttttcccaatccagaaagcagaaaactttcttcctttaatcttcccttcccaatgatgactcttccttggctgggaggagatgtttgcacttcagatttcatacctccaaatattacctattgcttcattgccctttatatttggccaggcctttattcatggtggccattctggagaccccagctggttaggaaaattgaacttgtcaaaaatcagagtgagattctccttggcaactgcaaaggtaagctgtcaccagccctgtcaacagtcacagcagaaagagagctatttattcatctaagaccttcatgagtcacagtctaaacattctgcaaaccctcccctggcaagtcataccctgccccagtctctggggagaatgcttcccacccagagccacttcaacacaacagactcttggctttggctgtctaatctttgggctgcacaagtggtcatgttattaatgactctgagtcatcatatagggtatttcatctggagtgtgtgtaaagaggaggaagatggagggctactgtagcccagacaagaagtgaggcttccccttgctatgcctctacctcactgtgtacccttcaaaatgcaaccaatttcttgcattataatgcttcaaatctctccacttcttggtgaactcctttttttttttttttttaatgagattgagttttgctcttgtcgaccaggctggaatgcagtggcgtgatctcagctca

SEQ ID NO: 55830 - DNA, 1104 bp, Homo sapiens
aggccctcagctctcctaggtatttagcttttggccttagtaagtaccctgaaccaagacagctgagctgcgctggagtctggatggagagcaaggagggaggcactggcgagtctggccaagtgggacagccctctgccctcaccattactcatattcgtcatgttggggtcagggccgtgctactgaacataaactgggaggcctacattccctccaactgtgtccagtcacgaccagttcagaatacttcatctttacaaactttgcttattttaaaaaatgtttccttgattcctgcaagccaaacccatggaaaaataacggaaaccaaatgccagggaaatagagccaaagcaaacacatgtgagctctgaaataacaggagatactgtggtcacgtctgaccttctgaactgtgctatgggttgaagcaaaaacagctcttgctgctccttaagaggtgcatggtaatagtttatttgtaatgtggaagagcttgggtttagagagatcaccatttaaaatagtagggacttggccacagagccagaaataatatcattttgaggaaagactttttcttataaatggccacccttcacctccaatgatcaacattaacccaagatcatctgatttttatcttttatcttttattaataagacctccagagcttctacaaatgtttctcttctaattacaccaatattttggtgcagtctaatatagaagcaggaatgaagttcacttgtttatttcagcagcctgcaagagacaaatggagaagggcccagatgaaaatgtgaaatgatgacccagggtcaaaagggaaaacagagacgactcctggttttcacactaaccagttcagtccccagcaatatggcagcgtcagacctgctgggggcctgccaacagttacattcctgtgaaaagccagtggctgcattttggggcacacaaaacaagtcaccaggagaaatttgctccatgttaacattaccaagaaaagaccacaagctacagagtttatgcaaatgacgactggttcccatggaagaaatgcttgtattaaaattggcaagtttgcctaagagtaa

SEQ ID NO: 55831 - DNA, 1494 bp, Homo sapiens
gtcatgctatgccacctcagcctacccctgactaaagcacaaccatttcccttatgctctctgaacttcagtttgctgtaaaatgagaataattcttcctacatggcaggattgttgtgaacattaaatgagaaatcgattaagccctggacacagtacctggaacatagcaagtagctgtaattaataatcccatgtaataagagctgttttgttgtttatagagactagtatgatgtaatgagggaaatgcatgatgtgaacttgtactgagggacacacagaccaaaacattttctcatccatgaccttatcatgatacctatccttcctcactataaagccattccataagggccatctggaaacacgtgtttgacaagattaagagattatgacactgaggtagacagataaagcaagagctatcttacacattatgaaggatttgttaaggggagaaaaacccattagcaaccaagttcccattgcataaagccagttgctgaaagaataagacagtggaaacaggtaagttttgaagaggaaagaggaaatgtatggtctaaggcatagatgatactgcaagggagaatccctggagatcagatcacccatggagcataaaacaggaagggtggaaaggttccggaagagggataggaaagaaggaccaaagtccaactttgccagttttaaaattttgcattaggtaaggactaaagaaaaaaatattttgtaaattgacaccattttaaagattcctattgaatgatcttgttgagtgaaaattcatgagtaatcacgaattttcatcctgcatttgatttaaggcttaagtcaggatgggtgtaagaaggaaatgcaggaaatggtaaacccctgtaatcaagcaagataaagtccgtatgaggagtgactattttacttcaccctggctcaggcaatttctggcagtgcagctttggaccttgccccaggtttattccacagctcggaagttaaaggctactctgctgcatgaggaattgccaaaggcacagagaaccccacgacctaggcctgaacaagtcattatccaacaatatgcattaagtgtccacaccccactcaagacaaaagaattgccctcagtcaataaaactgggctagtggacaaaagccacagggagaccactctaaattcaataatagaaaagctttctcatacttagagccgttcaaaggttagaatataaagtagtaagatccccatcaccaactgtatttcaagcagaggctggcttgtagaaattcaaatattaaagaggaaacgggacttgatgagtgtaaagttcacttccaatcttccagtcctataaagatagaggcatgacctccaactacaatgaacttacagtttcaccaagataagacaaattgtaaaaataacagcagctccaaagcaacataaaatgagccaaattaatggtctaaaaactcactataacaatt

SEQ ID NO: 55832 - DNA, 709 bp, Homo sapiens
agagtaaaggaaaaacaccaatgcaacccaatgaagacttacataaagtgatatatttaagaagtgaaaaatgtcaaaaggtcaagacggaggaaaacatttacaagtggatgaaacagattgccaaaaaaactactgatttttctaacaaaaagccctagtttattgcctgcaacatattcccttacattatccaaagtataacaaacttgtttcatttcaattacttgctactagcaagcaatgtactgtgtcacttttgttttgtgatcatttcgtaatactcctggattacttattaatggtttgtttatttaattcctaggacacaaaagtgtgcattatctgaatgcaatgcttttaaaagtctgttcaaccctgttcagaacttccttctaatagcaataaatgatgcaggattttttttaaataacagtgaatattaactctaacttggaaggtgttaggtagcaattgtttttgactacaccttcagcttttggaagaaaaagtagcatttctttatctaattatgtgggagtaacttatgtgttaatcatatacagtgtttttcaatgattttattccatttaacctcaataatgctcaggttattagggcttcttaaatttttagattatatttgttaaattttaaaactgcaagatcagtaacatttacttgtagactcgcaccaaaaaaaattact

SEQ ID NO: 55833 - DNA, 637 bp, Homo sapiens
tcttcaatcttggccagcaatattttttcatgtttatgttgaatgcctctccttcacaacaatctatttcttggaatatgttctgtacagcagtaattctagctggcatctgtttcaaaacaggtgtgaattttcccactttatcattctgataccaattcaaacatataaatgatatgatataacctttggtactgctaactcagtgaggaaaagctcagtttctgaaaaagctgaaaataaaaacagacttcgtattgtttgccttctcaaaggttagtgataaggccccgagagaagacaaacaatcaatatgcaaacaagagcattccaggagggctgcagatacccttcttttcctaagcacgatataaaaattgcatcaacagtacagccagctccgtattcaggaacacaccctgagaaattctgatattatagaattaataaaacagaaataatctacaaacacacttacactgaaccttaaaggaaatttaaacattgagtaaattcattctgagacatatttcctagataacaaggaaactcaacacacttggttccaaatcacgaaaagaccagcttcttagtgtcacttatcagtttctaaaagtgatggcaactaggagccagt

SEQ ID NO: 55834 - DNA, 769 bp, Homo sapiens
aaaagaaactttcaaaaatacttacatagttcttaagagtggattaccatcaaatgctccatcagggataacagaaatagaattactatgaaatcctctagaaagataggagaaaagtattttgaaatgcattatcctcttgcgaaataaaacccaagtatctactgctgttcagcattatataaaatacaactgataatgactacatgaaaattttcaaaagcataggaaatctcaaattttaattttattttatctttttcagtatcatacctaattcttttttaacccactgcttagcttggtatctatcagatccctcatatgcatttatctgttgcttcatcataaaaaaaagctttagaccatgagaaacaggtgttctaacctcaaaatctctctcactgtagcctgtatttagcctcttggcaatgcatcttagaatgttaaccatcaactagctcatgacacacagtccctgttgtgccatatacagtcactaactctacccatgacaaacccgacgtccagaatgttccctcaggcagggcacagtggctcacgcctgtaatcccagcattctgaggggatcacttgagcccaggagtttgagaccagcatgggcaacatgatgaaaccctatctctagaaaaaatttaacaattagctgggcgtggtggtgcatgcctgcagtcccagctacccaggaagctaagatgggaggatcacctgagcctgggaggtcaaggctgcagtgagctgtgatcat

SEQ ID NO: 55835 - DNA, 1239 bp, Homo sapiens
acatggacattaggtaaagccaattttttcaagcggatggcagatcccaagctcttaaggaacagcaggcatgtcctcaatgcatgtggggccagaagagaaatagagctttgatcatctactagttagggcctgccaaatagatgcatagatccatactgaaaatgaaattcttttgatttttttgcctgaagccattcctgtcacattaataaaatgactgcctgacgtgagtcataaccacagaatagaagagataaaggtcccacctagctcactgaaccagagaggtctaatgaccttctgaaggtcatccagcatggtagtggcagaagtgggggcagtcagttcacctgtttcctaatctgccatactccaggctcctgaccactgccaagaatttatttcctcaccattcgctggctatacaaattgtaggcatctgaattcccttgagctctaaaattattttaacatttggagcacttgtaagcctttttcccttttagagtcaggtaattcaaagttcttatagctataaaataagtagaaacaaaaccctaccagtaaaactgaagtaagggtttgctccaatgcattaggcacccaaaaagcctaacattcaaccgtaatatactggaggtcagaatacgtattatttagagttttaacttttgttaatctagatgcagggttgcctaaatcaaactctggcctctcatactactcactggccactccttaaatcttttaatcctgaactaaaagaaactgtgcttaacctagttccaagcatgttgactacgcagaaagaaaatacacagccagctgtgaaactctaaaattgcattacttacagaactttgagttctttcaacccagacaaggcctttgggtggataaaagaaaggtcgttgcccgccaattgtctagagaaaaaaaaaaaaaaagtagcaagaaaaaaatagtaattcagacttaaaattcagaacttacaaaaacctaatctgtgattaaaactctatgttaaacatttctcaagtctatctgacattaaacgtggacttaaacccttgctaaaatgatcctgtgaatcttccaatgagataaatgtctctagaatttttttttaagtcccaatacaataatttaagcaggcacatttttattctggtgaggtcaagcaagccaaaacacattaaaccaaattaagtttgctattcatggtcactctgcagc

SEQ ID NO: 55836 - DNA, 2555 bp, Homo sapiens
aatgatccgcctgccttggcctcccaaagcactacatcttttaaatgtttcacctagcaacctcatttgtacccccttaaacacccaactgcaatgctgctcctcttgaaagcttcagttcttataaatgtgccctatgcttgaacactcggagctcataaacttgggtcacaagctaccgtctactggttgtttcttgtacattagtcttgtgggccaagtacaaatgccttcaagaacaggatgtgcatctcaaacttctgttaccacccaccaacatgccaattcatgaaacagaaactgctttctcagaagctcctccttgaaaatgctcaccattccgatgccatagcatcccaaagtctaccttagtgcaagcttggtacaagcaatctcaaagggaccccggtctcacccattaaattcaactgataatgctcacagctgtaatgcaaagtgcttaaaaggtcacattttaaaagatcaaattgcaccataaaagccataagaggcagtagccatctttccccagggcctcagatagccctgtgactgctcttccaagtgttaaaaagctagagtcctccaaaaaagaaacactataaacagagtaaggctgttacaggattcttattattcttttgtctctaatattagttgtgaatgtccttgtatctatgggctttccttgagttcagcctattgtgctgggctcataaaaaaaaaaaagtattttataaagtaacaaagtggcaaaatgcagaacacctgattatcttaacttgtcaacagaaaagagtgtttgaccacattagccaaaatatttgcttccttttcccaaatctctgcccgttttataaaccatgagaaaactaaagtcacctaacttcaaaaagcattctctttctcctctatttatctttaatataaatgacaaaatgagctctgcatgaggcttatcctgaaatacaagccaacgatctggagaaataaacactactagtatgtggtggacagtgataatgctgtccaagaggacactctactttgattacttagtttgttagtagagtaaacatatcctgtggagccttcaggaatgtatctacgtaagtttacggagctgctgtgttaatgagtaacaagcacagcagcgtggtaaaagctctgcagctccagtaattgcacccgccagaagctcttcacatgttgcttattttatgagctagtatttcttatagtaaaccttggggatgcttcatgtctaaaagctcagattcagaaaagagcaaagtaaataaatagcaaggttaggaaaaaaatcccaaattctttggaagaaaaaaactatacgcctacagtagttgcagacactgtgatactgatagctggtacacaaacattctttcattttaatcatctcaagacaactgccctgcttttctgagtccctgagtggttaggtgacttggcataagtcacactgcttgtacatgaaggagccagcattccagttctcttgcccggctggctgaaatacttatccacttctacctgtattgtgatgcctctggtagtcaccaaaagattaggaaataattcacagaaaaggtggggcagagtggacttgagcaagttaacagccttgtctgagtatcaatagatgtcacctagcagaataaagctagtaaggagagactatgcattaggagcccagaactgcagttacggagaagttcctaacagacctacagtgccatccttcccatagccaaagatgaccagcaagaggggctgagaatgggattccctgagtgcccaaaggtagggcatgccctaaactcagtgagacttagttaaggatacataccattctctgttgtttgttttttattattattttttttatttttttaggcaactccggaggaaaaagaggtggctgatcctgagcaggaatttggccctctattagcaaagaccagccacttcccattccatgcctgggtttgcacttctgtgctatagccaacagttttcgtagcttctcactacttcaggacctattggctgccctcagaaaacctttttcattgactaaatcttgttatttatatttttctttttgtcccacaaacaatattcttttactattttccagtggctgtgaaatactaaaggaaaaagataattagggtgaaaaaataagagtgaaagtggtatggttttctgtttgtgaaggtggagagtcccaggcatcagttctttcccctccgtgttctgtttccaaagaccacgagagtgtctctctgcaaggtttcaacccatccactctttgactcttcctgttatcacctgattttttttcctcctggactactgccatgaacttccacaggattcctgtctcaaaccacttaatctgaaaaagcacaattctaagcattttcccaaaggctctcttttcccctggtgcaactaagcaccgttattacatccaaacacaccatgcattgccacctctgactcttggctcacaccatctccttcacttg

SEQ ID NO: 55837 - DNA, 1811 bp, Homo sapiens
ggtttataggccatctagaactcttctacctactaaagagctttatattcaattcacggaaactttaagttccacctgcaccgaattggcctttgcgtctcccacttcttacaggaacccatggaatactttattttagaggtaaatcagtaaaaacccaggcaacagttatacttcctgagcaaagttatcctgacaacctagtcatttaccctctggcaataaacacatgcaatatccacccatgtgaggaaataatatgttccagctttaaaaaaaaaatacagctaacgtcaaccaacaaatatttattgagtttttactacaggctaagtaccctaagcatggcaaaggaggtattgagttttcccaggacatttctcatttcatttcttttaaataaggacagttcattaatcacaaacttcaacagaattccgtttttatatagactgataaggtttcttacatcaatcaattcaaaatgagaagaaatcctttgtcttaacccctccctcaatttcaagttcaagaatgtggtaactgtcaccaaggtcatatagaagtgtgacaacaggccctgcccttccttagagaaaagtcaatagagttgaggggataagtacacactgacacacttgaagcacgaaataacaaggcatgcaatacgctgctaagtggtgagaagtagagagtgcaagaggggcttggaaaaggaagatcagagaaggcttcatatggcagaaagggctcaaaatggctctataaaaatgggtaaaatgtgaatatagagaggtactctggcagacagaccctgttggttgcccacctaacacccattcacgccttcctggcagagcctatatttgttcaaatatcctcccgtccacatgactcagctccatgagtaaataccaactggccttaacccttcctgctggtcccattccagtaattggtttagggatagacctgtgaccccagctctggttaatgaagtgagaggaagtttactagggatttctgagaaagacagctctactcctaaatgagaacgcattagaaggatgacccttttctccttctaggtgctttcctgtctgaatattctatgtggagtgataacaggatggtacagaccctcctggggaagagcacactagaaagtaaggagataccctgggttcttgacgacgtggctgagcaactccataaatcagccctggaatagttctaccaccttgtcatgtaagataatatacttccttactgtttaaaagttacttttaattgagttttgtcacttgctgccaaaagcaccttaactgcctaaatgataactactcttcttttcttacctagtaataaagtaagaaaagattttagtccaggcaacaatatacccagctcaaaggtcctgtttcccagcatcccctgccgtttggccatgtgactaagttctagccagtgagatgtgaatagaagcattgtgcggtatgctcaagatgccttcttaaagaaagctggctactgggaactatgcccctctttattccctacttcatcctatctactgctgaggatagggttttgatggctgcagctccagtacacagtcatctagtgatcttgacgtagaagcaaatacacaaacaactacagagcagaatgtcagggcctacgtctctgctaactttgtgatgcatcatagcagctccaggtcaccaggctgcagatttcatattcaggtaaataaaataaagcctgatgtgtttaaagacactgttacttggagttttcccttataaaca

SEQ ID NO: 55838 - DNA, 1363 bp, Homo sapiens
gctgccagcaaagtttatgcacatcaaatttgctgtagaaacgtcatcctgacagccatatattacaatgggacgaagggaggggaagctaggaagaagaaacccagacctgcttaattccagcttccttcactgtaaaatattttgtaccaactaacctctaaggccctttctaaatctatcatgattactcctactttgacattcctgctcctgcacattccatgcataattatggaaccctaagaaacccttagattcatgcttttcctagctgtatgtgtaggcccatttgcttgtgttagcaagtatgggagtaagtacaggctaaaatagacccccttcagaattacaagagttcagcaattaagaaagacgcatgacttcatttccaaaggtaccattttatgctgtaattgtttacactcttgatgaagcaatacagcctaggagacatttaagggtgtgttcttcaaggggaagctaacactagaaggtagaaaagagtgaggataaaacactggtgtgtaaatatcacaacacaacaaaaggtatgtgtggcttaaattacaaattcttaaaagggtaactaaaaaataaaactattagatggtgcccacctacaaagaaagaaagaaaataaataaaactagttagactaattcaatattttctagctttaaaacaagttcagcttcttttggttttgtttatttgtttgtttttcttttggtctttttaaacaggctagttttcacaagtgtgggatatgttctaaagagaaaaatataaaatgctctaattctggagtaatgtctattaaatggcaaagaaaaataaatgccaaagacaaaaaaaattactttcctgtctctaatttgatcaagaaccctaccatctggcaacacagggaatagataagggttaaaactataatattccttgttttcttcctacctaactggtgttcccaggcatctctgggtgtcaacagctgttctggtaaccctacgatgacaaaacagtgtttattaccagccaaaacacacagacaaaatactatttcaatagtccatttaacatcaacaagaagtattataaagattatcgtctgggcaaattggaaacactcaattacttcatcctagcagacaaaatgcactattcataaagaaaacaatccaacagcatttactatggtaaatattctaattaactaaatgggttatgttttattatggctacacttattaacgcgactgataggaaaacattacttcaccgtccttgccttcaaacatgcacgcccacgaaaacttctgtttagacgcgtattttttaaacttcagctcacaaccaatta

SEQ ID NO: 55839 - DNA, 834 bp, Homo sapiens
agatcccatggggtatttacaagaatttcttacacttctattttcaactgtttctatagaactggtgataaactgagttagctgtattttcactctgctactcctgggttctattgagtttttagaagtatacattaacatcgtgacatttttttcacttactgtgcataaaatgtttatacataacctgataaaaccatccctagataacatattgattttaagattaaaaaaacaaaacaaagggaaaaaaacacaaaaaacctacactccagtaaatccctcctaatgcccccagtctgaaaggggccttccaataagcactgtttgtacatccaataagtgacctaggcaagaacagctccagtttctaagacactaaggcactgacctcattatgttgaggcaagaggagaattctaaatgatgaggcaatccatataccctgaagaccagctgccaaccgtcagagcctgaacccaaaggcaagcttcctgggatttcaccatccccataatgcaggcttgtggagcaatcacttcgcctcaggcgatgaggcgtgcagactcccctcccaaacacataccccacacacactctctctccttctcccctctgctctgatggccattttttaaaggcttataaaaatgtattctatccttaaagaaatgactcaaaattataactgggatgattcaattgtttctattaactgtaagacaatagacattgataatgatggtttataaaatgtcactagaaatattcccttgggaatgacttataactcattaaaatcactaatgatttattcagcagagaagaggctat

SEQ ID NO: 55840 - DNA, 1233 bp, Homo sapiens
tacaccattgggagaaactgactttttgctttccccatggaacgacatagcctttttgatgggtgggccataataaacaagagttttagatccactgcattagatgacctttaagatcctttccaaatctacattctaaggagctgagaacacttcaagcacagaacaaaacaaaacctctccagaattaattccccatctacataatgagaagtttccgatacctaagacatgtacaatggatgaacgcctacatttaggaagagcactgaaagatactgttatacagcccactcaaccaaataaccctagtctataaaagcaagatccaacaccctacctgcaaaacctctcattactagtggtaataagtcctcacttgccatggtttctccatctctaaaatggggagaataatagcattgctttggaggcctattgggaggattaaatagataacacgtgttacgcacttcatttagtgcctggcattcaataacattattatgagcatctaagttaataacaagaggatggtgatgatattatctgaatggcaggacagaccagagagctcttcatgactaagaatgcaacataagtgaaatgagaaagcaaaatgcttccaggggaagaagacaacctttagaatcaccaagcaaatgactgtttagcatgaggctggctatcaccagtacattcaaaattaaaactgtggccacagattcaatcatgaataatagccctgctgctaaaggaaagagcacacagatccaaatgggaacccatcaagtctgtaaaacattaacagcttaataaacatcagctcacaccatcaacacacagtgttcgagtcaactaaagagtaccaactaaattaataccaagttgactaaatgaaatgccttgggggagaaaaaggctcatgggtgattcacttttatgctgacttccctataaaaacatcttcaacaggagaggcaggaaattccagtgagtgaaagggggcagctatatggaaaccatcatactgcacattttgctttttaatctactgcaaagttttggtttaaaggagcacattcagaaatttgctcctttagaaacagaaaagtgagtctgctaacagatctgatcctcatataccatgtaagtgaagtccacggaagaaagaaaaagccagtcaaaaagcatatgactgatactttccagacacacacaaaaaaacactat

SEQ ID NO: 55841 - DNA, 6108 bp, Homo sapiens
tggaggttgcagtgagccgaggtcgtgccactgcactccagcctgggcaacagcgcaagagtccgtctcaaaaaaaaaaaaaaaatcaaattaaatagagaacaacaataaaaaacacttttggcagttaagagttgttgacttgttttacagatttacagatgaggaaaataaggtcctgaagggttaagaatatgactcattcaaggtcactcctgtgaattattgacagatctggaacccagcactccctatgcctggcagaatattttttcctcgcttatatttaaagagaacacatggttcactagtttggaaaataaaggacctatacttaaagatattcatacatcgttcttgttttgaacaaagttcacttgtatataaaactaatgcatctctagaaagacacacaacacaaactaagccaacaattgatttctgtaattcagaaatcaaaagataacaaaactctaccatcaataaatacaaacatgtagccactgactactgacctgacctgccaggaaatacacagtagatatcagagaatacgttaaaaagtactttcaaatggtattagtaaaagaagaaaggtgcttggagtagtgggggaaaaaaaatacaccttagggaagaatctgagatgatctttccaaaaggagattctttaaaaacactttaaagtccttcaggtaactcaattctaaataaaaagctcaacaacctgctcatgtacaggatacatacactgtgaaggtttgagagattatgactaattatatggaagtgaggatgttgagtaactttttgtacagtatccaaattactgaaacagagtgattttattttccaagtgttaagccatacccacaggaaacaaccagggctattctaccctagcaaagtgccttagctagtcatgcattctgcaacaagtctccatggcaaatttcctaacacacacttctaaacacaaagaactcctccaagtaataaagagggtggtgtgagctcaactaaaaggatattctgctactcctgggatatttttatgagaggatcataaccttattgtcaccttgccatcctaaaatggtgtaaaaaatataaaatcatagaacttctggaagtaagcagcagccttagaggtgatcaagtgaatccagttgcttcacttttcagatgaggaaattgtcacgagaaaaaaaaaaaaaaagtgaatgacttgcccaaggccattcaattactcagtggcatagtaaagctatgatcaaggactcaggtccaccactttcttcacgaagtcacagaaatagccttgctaatcttaaaactatgtgccaaacataacctaggacatgcaaatttgtgctcgaggtctacgtttctcaaacaccgtagcaataacacacaaaccagaggactcacatacacattcccctccccatgacttcatctcttctcccaatcttggaatgtaggtgattgagttattagcacaaatacagtaataaccttgaatccttctgattaaacttcggaattttaatattagtaagattactgccttgaacactcctcggggtgaattgtgacaggccagtgcattgtgacacaagattgaatactgttgttcaaaaacataaatagttgctacaggtgcagcaaatggtgtgaatacaggaatcccattcacagtactgaggatcacatctgacgctgtccccagactccggtaaagcggctttcaccaggaaatagacactgttagactgaacaagtttcaaccagcctcaaggagaagaagcaggtattctctctctgggaccttctcaaatctggacaaaaggctaagtgctgagaatgaatctgaaaatcccctgtgggaatggtgtctgaattccatgccacggttctgctcctcggtgtggccttgcatccttatttattcactccagcatttttaagtgcctcctatgtaccgggctctggggatcccaagttgagtaaaataaaatcactgccctgtcagtcccaggatctttaaagtgaaatgcaccccccacccctgtccccagggaaggtgaaagcactactccaggacaagccattgagcaatgagaagaaaatgaagaactctgattagtaattatagtttcatctttttaacttctactttcatgattgtaattttctgtataactacagaggtttttggttcacatgctccagcaattaagaataggtgaacaaacgcttagagaccacggaactagtctcctgatgtgtaactgtatctcagtaaagctgcgatgggagagcagactggaagtacttggaaaaagaccctaggtgatcgcaacatgtcccatatatgatcgactggagtgtgcaaacctgcagcactggccttgcttcatacattgcttttgagaatcactgaatgagctagtttccccatgagtaaaatgcaaatatgctgtccttgaaaacccttttagagagggtggttatatatatttttgagggtgaaatgagtactaaggagaaataaggagtcaccagaatgtacgatcactctacctacaggtcacaaatctaagaaaataaaacacatttgcacaccaccaaagctcagaaagtgctaagataatgctagtttaggcactctaattgagactggtaccaattatttttctgtttcctaagccatgaacactaacttattctaaggcccaaagttgaagatacagcatttcaccaccttcagtgagttctaccagaagatgctttggagagaggagtatgctctcataaaagtgtgattatttctctgtggttttagatactaatgtaaaacagcccgtttccttataggacaagtctactcactaaaatgtgaggaatctgctaaacaaggtctttactactggtcaaaatagtaaaattgtgcttttctattctatgcagagccttgcaagaggttcaggtaaagggacctttctttctgcatttctttctgcacgaattccctaaacgtttctagagaacttggggaaaaattagtcccatttcctctccacaggtcttctttctcttgattcaatcaattcctgctcaaactttcccacttaatgtaactttatgaacaaaatgctcttcactgcaaagttaacttttttttttaatgacaagttaaacttcactatactgaaaaaaaaaaaaaacctcaaatacataactaaaactaacctgagacaggaaaaataacaaatggggaggggaaggctgaaggtagaagaatgaaacaggttccaagacaacaggcctcgatgctcactaaaagtccatcctgagagggcaagcggaacacctttgccaccacccacctggaaatacagcaatgctcctgcctgcataaagatttcttcacagggtcctttaaaactgtctatttctaagaggtcccttccactacaggtaaaaggaaattccctctaccctagggcccctcaggatcccttcctctctcacacgtttcttcgactgctcctgatttaagcattcagctggccacgcaacgcaagaagcaataagaacacaaaaaccctaccctgttcctcctctatccgtggcctttgccaccacctccacaacctagttcagattcctcttcttttctcaagggaacgtctaaagctctcaagtccgttttggcagggcgattttgtaagtctgaaacatttcagtgtgtctctcgatctcaggcagctcaaaagaaaagatctgctggctgcgtgaaggtgcattagaaacctgctgctaccttgcagcctgggctgagcatatgctccggaacttgcttctcttccaacatcctgcacctcaggtcagcattccttctttaaaaggccttgttgggtaagagcatgtccaccaacagaaccctgtaattctcccttgttttctcggactcccctgcgtgctgcagaagcctgggcgttagtggggtagtcccgagtggaactgggccgaggtaggtgccgggacgcactacctggatggggccaaattggaaggagattcgccctgactgaggtacaggtgtttcttctccccacatgctggaacccaggaggctccaggtgcttccccacgagacatgcctcggtatgcagactgaggccaagttctcggcgccctcagccccgccagtagcggaactcctgcccgctgagcgagggccctcatgagaagggaaggtcgcgtggacaggctgccaggggcaagcgtttttagattacttcctccttcttggccccagatgcacttgtgagttgggggtgtgcgcggtggggtgggagggtgcttgtgcccaaaaagtctgggaacgaaagctactgctggctcgaacccggactagcaaagtgcggaaagcccgtggcacaggagtgggtgccaggcagcccgcacgcaggtgaccggcggaccccctccccaggcccgggcggcggcggggcggggtggggtgggactgacccctggctccgccccgcggcgccccccgctgggccccgtttcctccccccccctcgcgtccccgccgcccgcactcacagcgcttgggtgaaggcgctgagcccctcgggcacggccgtcagccccttcccggagcagtccacccgacggtcgccgtcgcagctgcagggcgccgcgcagagaggcggcgccgcgccgctgggcccggccgagccgagcagccccagggcgaggaagcagagcagccctagcgggcccggcattgctgcggccgcctcccgcgccggcctctcccgcggcgctgctcgctccgctgccctccgatgtcccccgccgcccccgggcagccggcctgcgggctggagcgggggtctcttcctcggcggtccgcgcgggctcggccccttcagcagtccgccgcagcggcgcagggacgcggcgctccggagtttcgcccttcccgctgctccatggacgcgcagaggcagccccgctcctccggcggctcacgccagccgggccggcccggcgcagcggcgggggccgcgctctgccatcgcaccggtctccctgtccctggcctctcaatgcagcggctcttcaaggttgcagagcgcagccttcagccatgccggccactcgccccagcccccgccgtggctctcgcacaaacacccagactctggctcgctgtctcccagccgcggctcaatctcttcccgtccttttcccttctagggttgcacgctctggttcccaaacccccggccgctggcttatgcaaatcacttaggtacatgcaaaagtatcccttctcccggagcgccattggcccggggaggtctcgagctcattactatgcagagaggagagccgccattggccaagaggaggaccagaggggcgtgtttctcgggcgtgagtgacaaggtggtggtggttgtggtggtggcggcggtggtggtggtggtggtggcggcggtggtggtggtggtggtggtggtggttcaaggcaaaatcttgacttggctggatttgtctggcaggttgtggattgaaggtagaaggatagtaggacaaggggtctagtttttccctcccccacccgtctttttgttccctccgcagaaattggatctcctaaattggatgacctggtaagtagaacttccctccagcgttcagttaagttttaaatgactctccgctgttccaaagggcgaggacgtctggagctctgcaaacggaaaaaagattttgaagaggaggaaaaaagtttccctcgatctgacacacatctttgggttttagctatacactaagttaaaagtgtaccctctccagtgcctcacttcacctgggatctttacacctatcttgatacacatttggtagctaagtcttagcaattcattctccccagtcctctctctgtatttggtgtttttggtgactgcaaattagactcctttctcacgcactttaaaatcctgaaacacaggaattttgtaaaaggtcagagaaagtgatgtttctgaacactggacaatttccaaaacatctgag

SEQ ID NO: 55842 - DNA, 2110 bp, Homo sapiens
cagtaattctaaaaatgtgttttcttagggaacaatagtaatatttagactaattgcaaatgttaatatgtgcaatataatttcagtctccatcctacatatacatttttttttaccaccagtactcaaaatgtttatttgtacttctcaattcctatcaatgatttctaatgctggtgtatgaaaagcatgcttgaaattgtttgaaataaaggacttagggacagagtggaatgctggaaatctgtaaaaggactggaaacgctggaatgctggaaatcatggtaggcgcatagccagttattttcgtaggcttctctatctctaattactcagcagaggtggttttattttccttgacagtctgctctaggaagcaatcagccaaccagtttgcaattgtagggtttgtaagaaatgaaaaacactgcacctgcaagtgttttagcatctaccactattcggcttacttacgtaacctccttcccaagaccaagtcagtaggattgtttttaaagcaacctctccatttctaggaggggcacaaaagctagcaaataccccaacccgaatacaagcgaggttgtggagaaagtaatgaaggagtttgtgtgcaaacagcggggaaaggaggttctgttgaattgtaccgtgtgtccgttctcgtgctgtacaggcaatgagtgtagtctgtgcgaaccgggtgtgtgacgtttgcttttcgggtgtacgggtctccgaatgctgcttctgctgtgctcaccaagggagcgcgtgtgcggcgtgtgtctgcgaagcgggcaggttgtgtttagttgtgctgtgccttggaacagtccgtgtgaacagaggagggcttacggttaacagacaaaataccgtaagcgcccttcctagagccaggcacagagacaacggcggcctctggcgccggcacaagggacagcgtggcccggatctcagagcctgggtcactcctcctcccctccagcgacacagcactcccccaacccttccgcccacctccgccgagcctcggctgcactcacctctctccagccgcacgggttcccctagcgccgccatcttctcccttaacctacagacccacaggaaatgacgacagaagggctgaggtgggggggcggggcctaggggaagccggaaaagtgagtaccggctagtatcgcgagatcaggaaggtggccgagtgtgtcgccgcggccatcagggtaagggtacctggacttgcggctttttaggtcggcctggctccgctccttccgcggtgacgaggtcccccggcctcctagggttgggaagagctgctttcctgactctcgttccctgcctcaggcttcccttatcccaatcgcttcgaacccttggctcagcgtagaggagtcaagcctggattctagtcccaccttgcccattagcagctctgtgacctgggactgttcacttaccctctctcagcctcagtttccgcatctgtacaacgagaggtcctatctcttaggtccttacaatttttaaactctgggattcggtggcaattaaatgtgtaatgacatgttgtcagttctcaatttgtgacagcattgctttaaatttaaaaatccacggcttgaatcttccctccaaatctgttaaggggtggaaagtacaaagagcatgaaacatatctgggtgagggagagaacaaggtgctttggtgcaccacaaagtaacaattttataagcagctgattcttataaaatcttaagtaaatgaaatattgtgaagcaaataatattcttaatgcattacagatttttgagccacttctgaaattttcgcgaaccaagaagaattttagtacttggatttgactaacatttatccaagcccttagtctgtactgatactgtggtaggtgtgtttacatccagcatttcaacacttcatgatgggactgttttaataacctgtttgcccctggtccaccctttccattcacctttagtattttcttctccaaatccatcatggatgccaccactatgctcctttttctccccttgaattctgatttcatcatcacaagttctgttcagaaactttcaa

SEQ ID NO: 55843 - DNA, 1084 bp, Homo sapiens
acatagaaacccatctgtgagttccagagatctaacataaaccctacttttccttgtaggatgagttgcagattctattaaagtgtaagggttgacttttttaatgtcacttgtttcatcatcactctgtagtacatgtaaaggcacagattgatgtatttttctggcatcttcctgacgcacccttgccctatataaatcggtttgccaggatcttgttgcttaaattagcgattgcaaactcttggtcctgccaacacagccgattgtgccaaggttctcagcatctactggcacatgaactgttgccttttctttggctttctgcatgtacctggggccatcatccttccttcacaaagcagcagtctggcttagttgtccctgagaaagacttcaggattggttggactcaactctggccctcttcaggttgtgcatcctgcacaatgtattttcagccacacaatgtattgttcaggatttgtcgtgcacatacttgcagattggcagagccaactgccagagatgagaaccttttaagttgttgtcaaacgtcataaaatgtgttccgtgattaattttgtgggcacagattggtttttgcacagagtccaaaatttaggatatgtcacagtgactaaatggcaccggcatgctgaatgaatttggaatttgttttgtcaagtgtgggagcaggcacacagatgggctttgatccagtggtgctgcttggaattctcattatagcaatgatgtcacttgtcacgtggagtaagtgataatgctgccaaattgtggaaaaagcaaggcaaataggaaagtacacagaccaagagaaaggacttaggtagcacagtaagctttcactatcagatgaatggacataaacattgcttttgggctgccaaaaatatgcatagtaaaaatacaggcagaaaggaaaacttccaactgaaagggcccttaaagtagggcccctgtaatccaagaagtcttcacttcttagagaaaatcaagtaaagcaaacatgtccttgatttttatattaggctatgaaagaaatttctgagctgcaatcaag

SEQ ID NO: 55844 - DNA, 1111 bp, Homo sapiens
ccacttttagttaaaaattggagtataactgctgtgttatcagaatacaagtttaatatactttcattgtaaaccaaagagcagagataaggataaatgaaaagttagatttaaagttgtttcagaccaaaaaataaaaatggaaaaagtaaaagtgaatttaaacatggcaatagtgaggtcttatttatttcccccaggaaagtcgtttggaaaccccaggccaacaggaccctttggcagctgaggctggaaacagcggaaccaaaggcagacggtcctcagttgcttgggcggacgtggacccaatctgtccgtccttacaagtttcccccaggggcaggacctagacgcgcggcgcattcaggttctcctggaccgtagtggtagtcgctggcccgagttagaggccagctgagaagtcttcgtgcttcaggtgaggagaaggggaccgagtcccgggaactcgttttggaaaccaccaaacctttgggggtactccacaggggtcgctggattcgtccggagcaaaagaaaaatacgcccctgaccctctccctctcttcaacacgccttcaacctgggtttggaagtttccgaatagtttttcctcgtcagagcgtaattcttaggcaaaagggtgtatttttctctttccttagaacctctttcactttctcagcgttcgtgtgccagccgccacgtcgcgtttttgtccttaaaaattacattttcaaacaggatttccctgccagacaaaattgactgcaatgattataattgttagagcccttgagggagtatccttcatgggcatcactcacctgtgtgttttcacaattaaaagagtaatctggcaattttatgctctcaacagccaaaagtgaactttgcttgtagagaaaagttaaatgacttaactaggagatcacagaggcagttttcctgactccctgcttccttatgaccagagggaacttaatcttaaatcatttagggtagctggccactagcagactgcaggagagctccaagttgtctggtaggaaactgggctccaaaagagaagaatataattttctttagagcatgccacacccccagcttccat

SEQ ID NO: 55845 - DNA, 641 bp, Homo sapiens
atttatatcctctatatagtttaaaaaacagctagcatattttatagatatatttgcaagactgattttaaaataatatattttcattgttttgttaacaaatcaaacttttcaagctatttctgactgttaaaactttctggaaagttgttccatatccttccggtcatctaaatttatcacaaggttttaactaagaaggttggtgaaccctctttccttttgatcttgcatcctggcgagtgcttggatatttcttgtgtaagaaaagttttggtagatgagtcagtgtactgagtcataggcagcatgaagcctctagtgttctatactaactaattggaaacagtttcaagattaattaaggcacagttgtcagctcagtgttactgattgacatcctaccaaagtattttgtcttttggcaacttgcttaattgttctttggtatttagatttttgttctgcttcatagatttttaaaaatctgttgaatagacctgtagttaccatgttgatttttattttttagaatcctgtaatgaaccctgtgtcattgtgattaatttcttccttgtttgatgccttttttctcttaaaaatattcaatacaatatcttttctttttatcttgctaattt

SEQ ID NO: 55846 - DNA, 907 bp, Homo sapiens
tgccacgttggtgtgctgcacccattaactcatcatttaacattagatatatctcctaatgctatccctccccctccccccatgccacaacaagccctgtgatgctttttgttaaggagaaattttaaaatacagaaaaacacaaactgtagtacaaatattacccatattctcatgtacctgaattatataatatagaacatatttgtggaatgttagtgcattccacaccaaaaaatggtatttatcacaccatttaaaaatttacatggagaagacattgcaacagatgaaacagccggtgggaaaatgctgacactgaaaacagagggcaattcagggaagccagagcgtaagacagaagatggaagcaagtgactggaggcaggtcaggaccagattagaatgacctttgggccacagtaggaatttggactttaacctgtaggcaacagggaatcactaaaggttttgaaatagaagagagacatgcccataagatgctaagatgaagtttcacaaggtaaagtggaggttagaccaaaatggagagagactggtagagaaaactgattaaaatgtatgtttaataatgtaggcaaatggtggtgagagtttaaataaagcaatcatcattactattgtgagaggggaatagatttgacagagaaatatgaattctgtattcaaaaaactagatagggttattagtggacaaacaaattcaggagccgtggctgttataagtactttgacaacttcacatagtaaagattctccagatattttttatcttggttgttcaaatatttgaaagctttagatttaaaactgatattatgatttgaagatttttactgctttcatatttctataatatttttaaaattatattagaaattaaaag

SEQ ID NO: 55847 - DNA, 1287 bp, Homo sapiens
ttgaatattttccaaaggtagaatttgcaaggctattgaaatcctgttagacaagacttattgcctatgcatttacaaactgtgcaatttaagataggttagagtgaatgttatgctcagagctgctaacaaggaggcctctcaccaataggcactgtacaatattatggtaatctttttggggagtttgtggtagccagcctttttgctacacagtaaggatccaaccttattccaagttatccctcttgtccaaagtaggaccaatactattcataggctataaacttcttactcattccatttctgtaattatgtcaagggaaaggaattttcttcaattgccaagtaaggaaaagtggcaagtagtagaggttaagttcaggtcattgtgatgggtgagaaatttgggctggaatgtggtcttcccgatgtgccagtgttcataattttacactcttcaacctactactctctgatgtgagatgttgatgacttcaatataggagaatctatgggacttctccatagcttgtgagattagagcttgttcctctgtgaagcaaacagggatttctgaacttggatacttatctttcgagataaatgaattttctgtttatttttctctttcttccaaagctggaagaaagaacttgtaagagatcacagcaatattctccagttattttcttcttacaatttaggaggagagaaaaatgtatttagtctatagataaaacctggttttgagatactccatttctcatctttaaacctgagatagttcttaatattggagcactcactgttttcccagtttttgtatgaaattattcatataatatttacattctcatacagttttattttgtttttggtctctattcctttcatttttgttttaacctcaacattaagccttgcttttacttaccgatattagtgacaggttctgtaagttcaagtgcaatatgttgggcatcactgaaagcagctccatatcatactgaccttcctggagaaggtaaagcacaactcattggtttaatcattgcattccataaaggaagatgtcacttagccagctttcctttcagtgccagaaaatcagctcaaagtatttttcttcagataagtgagcatgcttgtcatagcttacttacgcctgttaaatctttatatgaaatattttacagagaaatatgtaaatattttgactgcttgtgccattcttttcagactactttgcagattacacatgggtctctatatgaaacaagaagg

SEQ ID NO: 55848 - DNA, 1580 bp, Homo sapiens
atgtttatctcttcctttattttctggattgctttagaaatatctttgtgttgattttcagccttgtcttgaatctcattgagcttctttgcaatccgtgctttgaactcttgatctgtctttatgagtttccattttttgttagggaccactgctgaagatctagaatggtcctttgatggtgtcataacaatcagatattttatggtgccagaattcttatgctggttgcttatcacctgaagaggagtgtattgggtagagtcttttgattttacttctatagccctatgtactttctgttggcaggttttatattgggctgtgcacttcaacctacaggccagtagatgaagcttgtgagtaagagctagctgtgacactagcagatgggtatgtacctcagctttgtttactgtgagtcattttctgttgcttcaggtgaagggctggacagtggagtgcctagtgccctgagcttcctgttctgtggggttgggaagacaccactgggcaaatctgaagctcctgtcttgcccatgaatgccctgatgtcaagtacaggagccagtcctgatgagaatggctaggagaagcttctggtgaagtgtgctaaggtctctgcaggaaggtcaggtggctgcagtagctccctgtcctagataggcaggagcctgctctgtttctctatcaaacccctgttccagggcttgtgactcccagttcagacgcacactgtagtctatctccaaactacagtgtggctgagaaccacaggaaacacctgtttggtgattctgtgggaatagattcagggcataacttcatcatgttacatgatacagattgctttatggtccacctattctccaatgcgatagcactgctgcttcttgtaaaggagcaggctctatctttgggcacgttgagtgggtgttagttgtggtggtattggctggttgggtcagtctgacttcagggtcagtctgacttcaggcactggggaaaggggtcaggtgccagtagagttgcaatggggtaagtggtttcccagttttcaggcccctagttggcctactggacagtgtgtatgagtcctgaagggctggactggagtcaggctaccccagagtttcagtgctggctgtgatgtggaagggtggactgatctctgggtcatcagctgaactttcaggctgaggtaaggtggaatgcataggtggtgagagcctgagaatatcacaggcaggtggggattgagttttcagaagagctctggactgcaggtgaaacattcagacaggggcagggcattccttgactttctttctgatgattttcatgcattttgtcagctttatggcaatgcttactaaactatgcatcatcttcacaatgcctgctctccttatttcagtgttacatccctaataccagcatgcctaagtactgttctaaaccaaatcaatccctctccatcatagtttgttaacttatactatgccaattgttaagaatggctcaaatatctcttatatttatagtgaacaaagttattctgaagtctaaaatcataagaa

SEQ ID NO: 55849 - DNA, 1193 bp, Homo sapiens
atgacactcttcagactgcaagaattgggaattcgttaatatccactcctatatcttaggaaataattacatattaagaacatgctacagggaccaatgtaaacaatcaaggcctctaacacattctttgaaaataaaatatacatatacctttaccttgaccaaataggggaaaaggtgagcagaaaggtcagatgtttggcaagaagaggagtaagtaattgagtgggagggggagcataaccaagtcattttcctcatcagtgaacagcaccaaacagttggaggatggaagccgacagtgtttttaaaacaaaaagcagagtgagtagccatacgtgaggctatgtaaacaggacacttttgatcccaggagttaacaaagacagtgccagaaaaatgagtcactcaagcactgccacaaaagccaaggatgaggttggggctgagtcatctcatattcagatctaaactcatgtctctgcctccttgtccaggtcccctgctttgggcagatgaaatggaatcctagctgtgtctcctctcaacatggactgggtggataaataagccagaaaattcaggatttttgaaaattactttaactgtaacttttctcactgaattagtcaacccttcttttcaggttggtatctacatttgggtacaaactgtactgaaaatgatagcatactccaaggactcctcaataataaactcaaggaattatctacatgcacctctggccaaatcaccataatttggtgaataaaaatgtctacagagaacacctttcctctgcctccctcagaaagtccttgcatcttgaagagctgactttggtctctgacttctaggtttaatgctaggcttcgtcagccaatgtgcctaagacaagtcattggctaagacacacgcatgaccttcaaagaactaataggctttttggtaagataagctatagaaacatataaccttcaaagataacagttaagtaaaatattttattttgattctgtgaatgaatgtatagacaatattgtagaagtggcaaggagaacatttaaaatagatacaatatataaacatatatatatatacacacacacacacacacacacacacgcacacaaatacagaagatttatgtgcctgtgtatgtttagtctgagatgtatttcaaaaggaagatg

SEQ ID NO: 55850 - DNA, 1918 bp, Homo sapiens
agtacaacttcccgaattcacagaaattggaacgttttggctttatgctctcatccattagtcagtcaatattgcctggggaataaaattactctaactagccaggcctactacagaggtcaatattaattttcgtggactatactgttactaatcaagcaggtgtcaatttcctaaaatgatttaaaattccaacagctccttgggtagaacttttcataaataaagcatttcctgctttatttatcaccatagcatctatcattacctaatatacttattttgattggctgattgattgtctattctttttcaactagaccataaactgcatgagaacagggatttttatccctgacctagaaaaatgcatgacatttaggagggactcaataatgaataaccctggggagaaacatatattattattcacgatttatggtaaggacagaaagctgaggcataaaaatgttaaagtttccaaaattatatatttatttagtaaccaggaagtctgacgaaggagatcagagacttcaccattaacttttatactagttgccagtagatgttggtttttatactatgtctaccatttgatagctttctgaattttattagtgactaagggactctggactcaatgtttctactctaaaatgaggtaatattagctctgctaacttcacaggaatatgaaaatgctattcaaattgtaaatgagtttataaatgtgagccattattgtttatgttgctaaaaattcaggtatcatgagaggtcttaataaagacaattatgtcattttgataaaggaacaatccagcttccctggtaattagttcaaatactggtatatttgatgtttgcacaccaaagtttgaagtgaatatttaagccaaatcagtatcattaactttcacttgattaagctcagacatccctaggtaactttctcaaacttctcccattcatagatgacacagctgggtagaaattagtctctaaaaatactttcacacaaccggcttgttttctagtcactgtctgcttatgttatgctcattccatctgtcaatagatgtgagtcacacattcgacctttcagtttcacttgcgcacataaatttcttccaatttcctgtgaaacaaacacttttaactctttagggttttgtaatttgtacacaggtcattcagggatgattcaaagaacaaagtaagcccttgactgtgtgacaaatttggcttgagcattttataactggaacaaattttcttttattgtttgactaataaatgtaggtctatgtagagacacagacatacatatatttgtatttgtattttaattgtatatgcataaactaaatcttctggtagctttctataatgtaggacaactaaaagtaaaatagtttaaaggaggcccatgtatgggctaaaaaattctcattagcctccctccttaagtcagtatagttttatcttcttacaattcatgtgaagaaaacacttggattttcaagtgaaaaagcaaagtttattcctttctaatgtttacctgtgatcatgactgttatatcaaatttgtctaatctttttattttgactacacacaagaaataaaaatgatatgttggtagaaacatctctattttgagaaatcgtatttggactgagcttaaattaaaactagtttcatgatttaacagaagctgcaaagctctccccaaagtcttttatgataaaaagtacacaataactgaataacaaaatgatggaatcaacaaaggtaataaaaataaatgtattcttatctcaaaagctattcttacccaagacaaaagaggaacaacaaaacctttttcttccatttcctccttggttaccaatctcagagcagctaaagtgataa

SEQ ID NO: 55851 - DNA, 1775 bp, Homo sapiens
ttcattctcttgggaatgtgtagaaatggaaactataacttattattagggtatccctaataaataggaaatcataaatgaagagcaaatctgaaacaaaaaataatggagatgttcaggagatcagaggagacatttaatatgtgacaacgcaaccagtcacagggtctgttgtaactcaatcttattaaggaaacagcaataatgtatacctatataggttggtcaataataagttcaagaaaacttgaatttcatttaaaagactaatgaaacatcctaggcaaagaacaactttcaagacccaagctaaggagaaaactttctagatacaaaatgtgtgcaaggactttgtagcacaggaagagccaacatcatgccagctatgaattcaggtttatcaagaaggcataaccattaagaccaggttctttcctcaggtccaacaaaacaaaaaatccaagaagacataaccagaaacggaagaaaacaaaatgttggttgaaaagaaaacttcctagcaggacagtctatccaaaccatgattctttccaagaaggtgattcagccagcctccccagaagcaaatgaacccaggtttgcacagaggaataggaagtacaccatggtgaacagtctgctcctctaagtcgctaggtgtgccctggctgcaccagtgaaggctttccatcttgattctctgtgattttaggacaaattgcttttggggttcctgacccctgctggaatttgcaaagttgttagagggtgactaaattagtggaaaagagagaagtgaggaggctcccaaatcagattactgtgtaaatattagagatgcttcagagggcccagtgtatttggatgctggcttctgattcaaaaagcaaatttgcttggcaggtatctgtgtctatggctcttggcctactgtccagttgtcagtgttttaaacaaataactttctaaactttatttcatgacatctaagtcacattgcaaggttattctcaataggtggtgagtcaaagggaggtggcaaacaaccttaccattttttacagccgctttactttggctacagcttctgaatgacaggaaaaatatttaagatagtcactcatatttctttctccatcaattgatattctaggaaatctatttacaccctgtctgaaacaagctggcatgtaacagaataatgaaaaatgatgctattctagtaaggaaaaccacttctacaaactacaagcaagaacaggtcagagaaatagagaccttagtatcaatgatattggattcttttccagaaaatttttcctaaaattaagattaaataaacccaaactaaatcagattggcctactgccaaaggtaaatggaaggctggacacacaatctgaaatttatctttcacattttatatttgcactattcgtttttgccagtgcatttcaacaagattgctccaaaggtaatttggatatatcaaaccccatttagcctttattatctatataattaatggaacagcagtcacaactataatgaatctcaatgaaacaagtagaaaagcagtagtatacttaaaatggctggccctgttacaagttggggactataatcctaaaataagaacatctagtgtctgtaaatgccttttcattgtcaaaatgtgttaacatggagtcctctccaatttttaaatacggaggaaatgaactgccaaggaagttcactgaaatggtcaaggacaggagaatgacgtgaaccca

SEQ ID NO: 55852 - DNA, 1698 bp, Homo sapiens
attacaaactcttaaattttattcattatgtgttgtaaatacaaaagtggaaagggaacaacacgagaacctctcatttgattaggaaattgtttatactcttaccaagtgaatatgagctgttttttgttgttgatttttctccccaagtacttcatatcttagttttaggcttgtttttctgtaacacagttttgatatttctttcaggtcttatcacttatatgcatttactaatccttcaaggtcttcttactgaaaagttcatcaaatcttcccttgaagagttgacactcaaagtcttctaccattaagcttcctttccaacattatcgtccactctcccctttcaaatgtggcctctgttttgatatattatttgcttatattgctcattccacatatgattttcttctaaacctactcatcctgaaatgcagtgacaaaaccaagtagggctcccatgagccaaacacaatcccccgtaatatcgatttgtccccataaatgagtctaaataaatacaccttctaaattggcataagccacaaagactggtgaaggttaggagactgatggtagacactcagcttcaatgtgaggttatttgcttgaggttactattcaacctgcaaataaacagttcaatggaaacacaagatcaagggtacaagttaggggacaaggccctgtaattcctttttttgttttgtagagatgtacactgaaatttaggccattagttagcccattagaatgacagatatgcctaatagagtaaatcagagccacagactcataacatttgtcatttgtggctggggatcagaccatgtgaagagcaaagggtgcaattattggcgtatctgagtttattactataccagagttacatactatttcattcaatatcttcctggactattgggtttgtagctggctgggcagtgccctatcatataaataagatagcatgtgcttgttctgcacacataacccaaagatgactcacataggtgggggcaccctctcagctaacccttcaacctcatcactactcataaaccacttctaagctgtttcgagataatgtttcaaggccaaactgaaatacaaacaatgtggaatattttctagatatatccattttctttctacaactgagagtaacttttcccttcaaaacatcaaaagtgccttggactgctcttgggattcccacattctattttccatgaaaaccactggagtgtgtatctcgtttcccttaccagactgaaagctccttggaaacaaggattcaaattggattaactttttattgtttcccagttgcttagcacaagacctggccaacaatattctttgaattcacgaatggatgaaaaaaaagtcagtcacatctggtatcatggacataaatatatcacgcaagcatggtattggccagagactttattatgctaattattaaaagggaaaaaaataggtgggtaaaagaatattgatttattttgctgcttggacaagatagttaattctcctcatccacatgcctgtggtccttgctcaactctggatcctgacttttcatccccaccagcatcatgaagagagaagccaaaaagaaaatcacaaatgctttcagatgtcaaatgaaagagctacttacagagcaaatgcacttgcttatcccac

SEQ ID NO: 55853 - DNA, 866 bp, Homo sapiens
agtcttcattatctgggcttatttgtagctgcccttcttgggaaggtgttcaagatatttgaaaaaacttaggtattgtgatctaaactgtttctgcaccccaagctcagtaacatcgttgttcttgcagactcatagagatactgtcttgatggtcttggacaagataccagaaaattctctagcttaccaggcagaaactcttgttatcttcccttactttctcccaaacatgcagtctctctcctctgttctgagccacctaaagctgtgtgtggagtgacacaatcacccctgtgtccactatgactctgattgcactaggtcagacctaaagccagaacaatgctgggtctcacccaaagactgatgtaaccattctctggctactgcctatgtttgttcaaggccctcgggctctaaaattagcaggtggcaaagccacccaggtctgtgttctttccttcagggcagcgatgtcccccagcccttgggtgggtctagaggtgccatccaggaatcagagactagagtaaaacaccttagaagtttacctggtattgtattgcagctgagctggcagtcaaaccacaagacagtctttctcactctttcttcccctttccaatggcagaggaaactcaccccatagccaccgccatacccggccacaaggagtactgccagactaccatgttcacttaaggcctaaggtctcttaagtcagtttgtggtgaatgcttgcctagcctggaactcacccttcaggactgtggactcccctctggctcagggcaggtctagaaatgatatccaggagttgagtcctggaattggggaccaaaagaacttgcttggtgctctat

SEQ ID NO: 55854 - DNA, 1577 bp, Homo sapiens
agcatcttcctggagcctacattttactcgaagtaatagctatttttatagcttacaataaaagatgcattttggaatatatttcgcttgaattaaagaaatagaatgtgagaccttaaacaaagggtccgttcttcagatccttttaactcacactctccttcaggggtcggggtatttgggtgcaaaagtttactatcacgcacaggtgtagagatgtacaaatacgatccaatttagtggaaactgtgtcttgtaagagatggcccccagggacctcccacatccctaacctctcggaggactgcaaaagacagcatctgaagcacctcttgcctcgccttgaatcatttgccacttcacaccgccccgccccttccgtccccggaggcggccagcctcgtgtccgctctaggcttctcccggacgtctctttgtggtggcgttgagctcctctagcccgcgcttgccgtcctctcagtggtagcgcggggactggctgggaagcggtcggtcgagtgtggcctgtgtggactcgcatcttgcccgaagccgggcggaggagagctcaagctaaggtggaaggggaacgggggaggccctggagaggagtgggagagtggagacaggcccctgggtggcgagggagcccggcggcgtaacgggggaacccggggagaggtggaagaggaggcccgcacacgtgagggggatttccagctgctggccggggcctctcacccctacccccgcgtagttcatctgcgacgcaacgccttgtgtcaaagcccagcacaggttctgccgcctctgacctctctgagggtcgtcgcctgtcctgtaggcccaggaccttcaaagctacgattttgacgtgaactacttagggttattgtggccttgaactccgtagacagcctttatctctgctatttttgtttttaatttttcaaatcagaatcctttcaaccctggccgtttgaggccaaaggctaatgtttatttttccatcccggtaccatgaacttagtaggtgcccactggacggatctggtggttttagtcatttgtaaatagccgtgaactaaggaagaaatgtatgtggcctcttacagggttgggttgggaatcattgcagggtttgggggcactctgttaggcatgataacaacagctctaggcttgagtttcttcatctgtaaatgagaatgatagtactttcctcagggtggctatgaaggttcctgaaatgatgtttgccctaagcactgtacctggcatgtcctgactaccacacttgaaccaaatcttttcaatggtgttatggactatatttttgttttaaattgcctttacctttcttattgtacctagatcttcctgaggattgagactctcctctttgcctttgggccaattgtcatgttataggtaatcagtatttgaagatgacaggcacaaaaagttcacagttgcaggatgcgtgacttttgtaggcgtatgtacccataactaaagctcctgatttggggagtaggggtagattaaattatatttttattaaataagagataatc

SEQ ID NO: 55855 - DNA, 912 bp, Homo sapiens
tgacaaaaccaaatccatttgagaagaaaatacaaaggagagaatgtgaaggcaacaggaaattgatggttatcgtaaacagaaaccatcatgataatcacataaatgtctactgtaagggagaagtagagaagtagtcaaaaatgaactacaacatcctacaccgagtctcccgtagctctatcttacagccatctataccactgatcaggacacgaacatcattttttggctgaatagagtaatagtgatgatgatgatgatgagaaatggcagcagttttcattgagaagccaggcactgtacagggcactttacatggatcactttcatttgacccttacagcgataggctctttttcccatttggcacacaaagacactgagactcagattaagcaatagggcaaaggtacagggataggcggtggctctgctccagtatgactgctcaatgtctgctttactccagcttctacaatctcctcttacacaaaacagcacacagagatctaagagcagattctgttctaaaatgggacacatagttttaggcatgactgatatacatatatatattttttttagacagagtctcgctcttgtcgcccaggtagagtgcagtggcacggtctcggctcactgcaaccacctcccaggttcaagctattctcttgcctcagcctcctgagtagctgggactgcaggtgtctgccaccacgccatgttggccaggctggtctcgaactcctgacctctggtgatctgcctgccttggcctcccaaagtgctgggattacagacatgagtcaccgtgcccggccacaactgattcttaaaaagtaagtttatcaattcaacccaaagttcggaaaaaacaatagagacatgcctaaaactattattttaaaa

SEQ ID NO: 55856 - DNA, 893 bp, Homo sapiens
ttcgctcaggggttgaaaatcagccctccccgagcgccgaattgcccgggaggcgcccgctcgtgcggatgtcaggggcaccggggcagcccgggtccgcagcctccgagcccctcgcacgcgcctctgacaaggcacctctcacccgggctccgctttgtgtgtgcatttttttcccttcctctagtgctcggcaccgggctcccggccgcctcctccccctcccccgccctccgcctcccttcccggggcggattacctttcccgggctgcgctccggatcccggggatgccttcagcgcccggcgagcaggcgatccatagccgagcggcccgagccggctggaggagcgctgggggcgcgcgggggcggcgaggggcgcgagcgggccagaaccttcgaccccggaggtcccgccgcaggctggggctgggggccagggggcgcggcgctagagggaggcggggggagaaaggacccgagcagcctcgatctggggagagagcgagcgagggggcgaggagagggagcgagggcgcggcgagccggagggagagcgagcggtgcagtgacagggactgccactggggtcaaaggagcacagctccaggaagcagggcggccgaggcgccgctccgtgcgcgctccccggcgggaccccgcgcccctgcacgcccctcccgcagtccctgcccactcggacccccaccggtgccccgaagccccagggtttcgagaggaggagggagccgagggcgaggcccggtagcctgctggtgctcccgggtcaagcaggcggcaggaagctgagctgcaagttcatcatcatgagtgcgatctgcgtaaaaaatgataggggaaggaaggcgggctacggtgccccaggaaaaga

SEQ ID NO: 55857 - DNA, 1474 bp, Homo sapiens
ctccctccaaccacagaccacaggccctccctcctaagaatgcatcagcagaagcagttatgaagcaaatggcctaagtggctggcagatatcctcaactatctgtccccagagagacctcaggcacctcattccccattttccatcttctaccccaaccctgttttatattccttggtggtcctcatcattgcttaatacaaatatgcttatcttgttttcttatctctcttctcactagaatgtcaactccacaaaagcagggaccttatttgtcttgttcattgatccctggtgcctggcatctggtatgaccttaataaatatttgttgagtaaatgaataaaatgtagacaggagatgtacctggaagtcccaaaaataattcagaagtggtcagttgtggtgggggagggtggttaaatgtgctgagatggaagtcaccaagtaagaactaagaggcataatcattttggattggtgaagtcttgaaaagttttgttacaaacaacatttcaatataagcatcaccatttccattttacagatgagaaagcaaaggctcataaaaattaaataaattacttgcccctggtcccacaggccatatgtggaagaacaggaatttgcaactccatctagctgttgctatagctcatgctatttctactccacctcgttagtgaacgtctaccactggagcctgtcttctatctatgaggtagatggaagggaagagacaacatgggcataaatctctcaaagaacagctgcaacatatcttttattttgacagcactatgcagggccaaaatcaaaacaaaacaaaaacaaacacggccaaagttcatggcctttgtctgccaaagcacagccaaaacaaaagggagatctctttgatgtaggtgaactaaaatgatctcttcatggtcaacttacgacctaaaaatgtttattaagctgcagttacacaaaagtgacattgagctatcctttttcatggaccacataactctctaggtaccacagcatgggaatgataatgtcacaaagaaagagactgtggtagtaaatgtgtgaggtcttcttatttaaagctagcttattttcattgtggttgacaattacaggatttgttgctttcactgtccttgaaatatcttttcaaacagcagtggtggcgtctttgcctggtcccttgttccctcacaactcccaggagagttctgaactttattttgccaagtgcaaagagagtcaatgagtagtcaatggttgcagctaatcaatatcttatccccagttcaatttcaacaatggagaataaagtgacatttaaaaggagaccaaaggggaattctgttaagaacatctcaggaaatatatcaagttaggattaaaatgaaatcttctatcttttgctaagagatttcatttctataaacaattcttaggaaaataatactaaatgcag

SEQ ID NO: 55858 - DNA, 733 bp, Homo sapiens
tttggtaagcaactgatgagaaataggagaataaccagattcacacaattcttgacacaacacacaaggtctgtctaatctgatctcagggtgagtcagttagaccagccagcacagaaggtcatctgctgtgattgtatcagaagcaattcctattgttcataacctggacatttcatatcctcaaacaaaggtgggcgtaacgtgacgttcaatccccaaggatttgcaaactctacccgtgactttaagaagcagctgtttagttgaaagcaggtcagctggtaagcacagagctgttttttgaaagtccaggatagttgccagtgtaatgtaaaaaccagcctgtctctcatagaagtaaattggcacctcccaaatgacagggggaaccgcttccacatgtgctgatacatttggaaacaacgggagaagagactggagaaggagaaaactgggaatggcacctcactaactaaggcaagaaatacagtttttcctaaaaggatgggagtccagggcggttggtgagttcccagggtctcaaagtccccacatctaaccttggccacaatcttttccacagagatcagatgattccttcatttctgaacaattctttccttgtgaatcatcccaagaaaggagacactgactccttaatttaaataaaaagcacaacttttcgattctgtttcccacacttcaagtcttcagtacaggaaacaaaatc

SEQ ID NO: 55859 - DNA, 3142 bp, Homo sapiens
gtcgtgggctctcagcaaggaagccacagccaaaaaatataagagacaagatgtgaaacactggagacactcagaaataaccagggagacataggaaaggtgatctacaagagtgaaggtgctgcagctgtgcagatgaagcaattaggaaatgcagctatttgttaggtgaccttatttttacctcgggtagtaaggtctgaagacatttagtttacactaataacaaagcacgtgtgttttataatacaattctatgtttgtttttttctgattaactgtactaggctatttacacagtggaattgtagttaaagttatttagtaaagacgtgacatgaatagacagtttcactgacgctaatcacgcaagtgcagtgaagcacatttatgttccagtaagtaacatgggtgagaacttcccattcttgtgacattttccaggccagtagccttgaaattatgcaattccaaaataattttggggtgggaagcttcctggtatcatacagtcacatttaagtgagagttacgaggaaaagctgatgtgagaaagctgtaatattgctggcataaaaataggtgctgccagagagtgaggcaactgacaaacgggtttgccaagggagggctaagggacatccctggtaaccatgaggaggctggcttgaaacagcaggtgttcagctgtaatgagaacccaagacctcaagagcagacaggagagaaggctatgagagcctgccttaaggaggagagaggcagcatagctgggagtgagtgtgactccagaaatagactgtaatactaggtatacatttatcaaaacatcagagtgtacaccttaaccatataccataataataaataaaaagacagagacaaaggggtcccatgcaaggtcaccaggcttagttgggtattcccaatcagcaaaatgccatgattctaattgcctaattctaaaaactgaattgtattggtgctgaaaattagtaaggctcttaagtaacataaaagaaaactcagtggcaactggatcggacagctcaaattgggaaactttaaactagatgtttatttagggcatgccatgcaccaccgacgtcactaggttctgtggttactctaaacgtaactacaccaggtgtacaagcctgcacatttgatctctgctgtctcttccctaatttctcttgtcttctccagcttgaaaaaatatatatacttctggaattattcagtaggcataacaccaaaataagtttatttatgaaagattttaccaataaacatacaagtaaatttttttaagtaacatgggtagcaaattgcattccttcagataaacactgggaacatataagacaaagagaaaacagctttcataatatttttgggaaaagaatttaaatgtactgaaaatgaaggatcaaagtaaaacaaggagaaagaatatcatatacttcacccacatatgtaatattcattcaacaagcagtgcttgaggcctagtatgtgccatgcacttctgtgttgttgagaaaccaaaaatgaaaatggtacgctccctgtctttctaagagcaaatgttacacaaataaagtacaatgtaaaatgcactgtcttaaggtaccttaagaaaaacataaataaaatcatacttcttcccataaggtctcatttgagtgtatgttaactataaattgctaacaagtcattttaaaagaaatgctgtatttttctcttaacagaaatgtatcaacatgttaaactacaggtctgaatcctactttccaaataacaagatcctgaaatggtgaccatgtagctgagggttaaccccttgcagtgaacaaataatgactgacaaaccaagacaggctacttaacagggtaagctccctgcggctgaatgaaagatctgacttccaaggagttatttaaacccagacccagtgaggcagtcctgccaaagatagataccaacctgacttttcatattcaagctttccaggccaggactccaagctaggctgcagcaagttctcagaaagaaattgccttccaagtattaccccgttatagctggtgcccccacaacctggctttctcccatcaccatggtgatttgctgagtcatatcctcagcaggtctcagaaggtatactgtaaagatacatggagaggccatgatggtactgagagacacaaagctaaaggaatagttaaattttcaaccactatgtaaactgaagaaacaaagtccaaagtctagacatctggtataagctatttgtaagacaatgtgtagtatttcaggaaaagttactacttcctgactgtcaatattagtcttgatattaaaaaatctaaaataaaagtagaggaaatttgtttttgtgtgttatattctatgaagaaggtgggtactgaagtcgatccaacaagtatattgtacagcttgtggtaaactcaatgcactttgcatatttcataagagatttgagaccaaccaagttaattttgattttcaatcataaattaggcttaactttcctaaattttaatatttacttaatttaaaaaagtaaaatggcactccacatgaaaaaaaattatataaaaattacttttctagcatatagcaaatgttgaaaacttatgttaaatcctacttcttcaaaatactatgtgtaatttacttctaaataacccctggatcaaagaggaagtgtcaaaatttttaaatattctgaaataaaatacttttaatttaagttaatgtagctttttataagctaactaaatgaaagtgaaaatacaacatcaaaattcagagattgcccatgttatagcactactttgaaggaaattaacagcattaaattttatattactaaagaataaagatgtaaaatctgtaatctaagcttctgccttaagaaactagagaaagagaagcaaattaagcatcaagcaagcaaaaagaaagaaataataaaggttagagcataggtcaatgaaattgaaaaccaatgaacaacagagaaaatcaatgaatgaaaaactatttctaaaattgataaacctctagctagactgacatagagaaaaacaagacaataataactgatatcag

SEQ ID NO: 55860 - DNA, 1217 bp, Homo sapiens
aaaattaaaccgaccccatcccccgcacatctagccctacctggcataggttttagttcttttaattttcgaattagaacattgtaaaggaactgtagggacgagagtggcatcaggtctcctcatccttctcacatccttgcccccgcacccctctctcaccccagagttcaagcaccaaccgaaaagattgagagtagctcagggtacggtaaacggaggaagctttgaaaaaggcggggaaagcctgggatggcgagggggtgctcgctgaggaggaggagagaagcgacagtcgcggggcccggaaaagagagacttagagcgaagccaaaggcgcctttcttcacagtttgggaacttactggtagtaaacgccactccatagaagcggtgaccggttaccatagagaccgcgtcggggtgggcggagcgtcgcttctgagctgtgccacggccacatcagctcggccagaaacgcgaacacgtcggaacagtgacttccggcggaagaagaagccggtccggagttctggccgacagcaggcgaggagtgggtagcagcgcctatgtgaagttaggtaggtctgatgtcgtataaagcgcggagagggtgcccgccaatggctgggtgggtaaagccgactgtgaatggagaagattcccaagtcccgagcttgaggaggccccggctgtttcgttaagtgtatatagctgtgggaagaggttgcctgatttctggggctcctggtagggtctctcttctggagcgtggaagactggggcatcctcgcgtagagagtttcactctgtctttgcgaggtctcagcgcctctccaataacaggggactcttgttctctaccagctggtgctgacgttatttcccatatcatgctctccagacaatctggaggaaaagcaaacgagaaactttcagaaggaatgcccccaaatttattttaattctttgatgttctgttttgctttttttttattcgttcattttgtaaatattcattaagctcctccagcgtgtttagtgggtgcttacttgtgtgccagttttatcataagactagcagaaataccttcttagaggttcatacaccacctggttcattataaaattcttttttttaatgctgttcattaattaaagtataaatatatatcgtgaaatacctaacacgttttccatacttgtcggtacactta

SEQ ID NO: 55861 - DNA, 2374 bp, Homo sapiens
gtcaataactcagtagtgcggtaatgatttgggagtccttttcaatttagacatttgtcaatcatgattgcctttaaacatcagttacccactgtccctgctcagttttgaaaaaaaaattaaatacaaaaatacaactcaaaatacatgttttttccacacataaaattggtattttagtaataaactctcgattcagggttcataaaataaagtaggtatacttctaattcttcctagcagttttttgggggaaagaaaccctaagtattttctgttatttgcagctgctttaacagcaaacgacaattaaatgtgtgaacaaggttgtcagagtaacacttgtcatttacaccgcttaggaaagacatccaagacttccagaaacactaattaaaattaacaaaagcttcttatcggaacttgtcagagagctatagtttgtcagacacaggaaaaccagatagcctcaaagttcaagagttttcgctctaaggtttaattccaaaccacctaccactaggcactaacgaactaagcccagacgctcagcaaccaactcattaaggtaagagatcccatcctttccatataacacaaaattaagaaaaagacatcgtggggaaggcggagtgaattttctatcagaaatcagaagataaatgagcaggaaaaaagtctatcctcacacacagcggagaaaggtgctagcaattgcttgataagccctaagggtttattgtttcaccaaccttttctttaactcaatgtgaatgaaggcactcaaaaggagaagaacgttacgtgatattacctacctcgggccccaaagaaccctggagaccctcaaccaggacacaggtgggcctttctcacctgggccccgccgaagtcgaccgtcctttcgtagggcgcacttttcagcaatacgccttccgattggttggctcgggactgacgtctcagtcctattggttacgagagccgcggttggggcgaggaggcgggagtttggcactggttctgataggacgggtgtttgcgttcccagagttcctattgggttaacactggaggctctaagatggcggcagtggcaacctgcggtagtgttgccgcgagtactgggtctgcagtggcgacagccagcaagagcaacgtcaccagtttccagaggaggggtcctagagccagcgtgaccaacgacagcggccctcgactggtgtccattgcgggcacgcgaccgtcggtgcggaatggacagctgctggtatcaaccgggctcccagccctagaccagctcttaggtcggttcagagcggagatctgggctcagccgaggggaaacttagggaggggacctgtcggggaagccactttgaccccacatctctttctgacccctaaaccttcggaggaggagagaatagcctggtctgattgagatggaggggaatacgggttgtgtggagacttctgagcgctgttaactaaacatgttttagtgccctcgctctctatttcattccctgccctccaaccccttttcatattacggaggaattcgtacatgctttttaccctgaaatgctttctagtcaagggaagacattaatttatggagatggtttggctttcattcaggatacctcccttctgctttctccaggcagctcacggtttagaccagcctgcaaaagtttttataattgtgagagacagacttcattagaagatgctggaaaaaaatgatttcccctctttgaccgtcagactgcctgttctctggttctaaatcttaaaacattttggctttaagagagcgaatgttaaaggcttatgttgacacataatccttataaagtattttgagcctgtcgttgatatttagatagtgtctgcgttaaatctgtgtatatattttttattttttctatatacattttgcttcccagtattgattgctgctacattccatacgacatctttaaatttaactcacattttaacgagaaaagtctagttcttaggctttcctttaaaatctctggaattttttatgagaagcctgctgaagaatatgcttgtttcataactgttatattcaaaggaatgaccagattaagttggtaggacagatttgctgtgttaataaagcttctagattaatttctgaatgctgtttcattaaaaccccgtctgtgtttacataacttttttcatagtgtgtgatatgtgtctgttaaatcttgtacactttcataaaatataactcattgcttgttcttgtacttcgtttgacatttctttcggttattttcccctcaaagtaggcttttcataggtttagtgcagagaaagtaagaagaccagc

SEQ ID NO: 55862 - DNA, 1247 bp, Homo sapiens
aatttctgttattcatataattgagaaagtcctagtttatatcactgaaatcttgaatagatgagttctaacaaaaattgacttgtatcattttagtttcagatatttagataaaaaggcttagtcttttatttatagataaaaggaaatctgaccttttgattaagaaatattgtcagtagcctttataaatgcttgttcatctgagggtccatgacaggagtactcttcccagttgagtttatcctaaaaatgaaatgataagagcctgctggttattatccatgattcttcttaatgggggagccacatggttattcttcatctcccacttgttctcaccctttactaccaacccagccacaccccacccccaccccaacattgttcagtactcagcacaatgaatcattttcaagttgactcattgtgaactgtatcccagctgttggaatgtctggcagacatttttgtttgggtgaagaataactggctgaaacccaacctggatgagtttgatataatggtctttggctaaagaaatattgagaggaacatgtttatggcctctgaagcccctgttattcctggagtaggaccatcccctgtggcacagaactgaaagtaaggaatcaatctggattattttctcaccattgaatgaaaaattgccttagaaaaaataggcatttccaaactatgtttttctatacttagtgtgcccacgtgattgaacatattaaagacaattaagaataattatttttactgattctttttaacaacactgatccaaaggctgaaacattccttgtataatgctgaaacattctttatataacacacattccaacttatgaaggagtttcaaatactgctctaggtgtgagttaaccagtcatttcaacagaatgtttggtgacacaggctactatgtgtttcataataccaagtcaggtaacattgaccagccctctttaatttttcattcttaggccatctttataaagggacttaagaaacaagaatattagtaagctcagttgtaatcatgttcccagaaaatgaaaatcttttattatatttgacctctttctaacaggggatatagcaggctgataaattttcttgactgttttatatttcccattctcttcttcaaagattagttttaaactggtgggcattaccattgtataaaatgagagtttcaaaattgcaaaattttacaaaaaacattttcagct

SEQ ID NO: 55863 - DNA, 538 bp, Homo sapiens
atttaactaaattattgtcttgaatctgtagcaaaaggtataatccgcaattgggccaattagtgaaccccatagttagctatgctgcagcaaacaatttgattagatctgacaccatcctagttcccactgttgttttgccaggtatgatggtcagacttcaaagagcttgaggcatcagcagggcaaggtttggaggccagcttaggtccggttgttaatctctctgctaaaaccacagcagctctcacacaaaacaagcttacacgacacaatcatgcggtattaaagttagggttgagtcatgccaatttccctttgattttttgatgattgaccaaagatggctacatgactagacacatgctaaaagtatcctgattaggtaagttcccaaaatatttgaagtattttttaacttcctatataaatgttgtgaaagcttattccctttgatcaaaccttccaaagtaatagtactgtactggggaaaaatgagcatttcttaccggcaacctgaatatcaaacttttcactt

SEQ ID NO: 55864 - DNA, 821 bp, Homo sapiens
agctcccctcacagctgcacagcatccatttatagctgtgcctccctacagccccaggctgcctctgagacgcacttctgaggtcagcgcctgtgaacaccaggctcaatgtcgttggagaacagaagtgctcataaggaacctattatggtcttgtgactgtttttcaggactcgccccaaccctcagagactttaaagggccaaatttgttttgacctacagccagaccactttttgtccaacaataacccagaagcgggtcagattccatcccctgtgcccagcagcaggtgaggacgttgcacttggtggcagcaggacaaacagtactgaagttatgcctgggcctcaggccaagtagctcggacacctccagggaagatcgaccatcgggctttatgtatgtacgtgttcttttattagcaataaaacttgggctattaattgactttcttcactcatgttattcatattgattctgaatgccaaattataaagcaaagagaaagagccctaaccccaccaagctgtgttccgtacttcctcttcatactccatctaaaacaaattagctttgacccactatctctcacatggcttatttagagacggcccaaaatagtccatgaactaagtatactttgctttttcactgtcaatcctaagtagagccacgagggcaggagtgaccctggctggcctctcgagttgtagtgagcctcctactttctgcaacagccatcagcacttgtcttcatgaaatattttttgttgaagtgaactcaggcctcatctggagcttgtcctgggcaattctct

SEQ ID NO: 55865 - DNA, 924 bp, Homo sapiens
cactgaaattaaccaatctgaaaccaatataactcatgacttcttgttgcatgagatggtaaagttttcttcttgtttcagtaacttctggttggatttttgttgtagttgatggtgttacttttggccagatgcgggagaccagcataccctaagctgatcagtttacccatttgaaactcgcttttccttttcactgaatcaaccctctgctaaatgttacttatcttgttcttgttcctctgcttcatcaagaatggaggttaacctaagacctaaggcatgacaatgcacttagtcactcttcccaaacatgcacatgggggggagatgcaaaacagctttgaaaatgaaagaaagcaattacacagtgcaataccttgactattctgtcccatcatccttcctgaacctttgattgggaggacttgaactcttatggtagggtggagggatgaaaataaatataaaggaaaagagtgtaggcaagcccaggggaaattatgtaaattcttccggattcacagcagtgctagaattctctggtaattcccacaggagccaagactacctctgaaacaatctaactgttggaaaccaccagtgtctggcaggaagccaactataacaagggcaaaagatatgcctttttggagagtctggaccaatcccagggacccaggccagcctgtggccaaagttgtgaatatgcaaaaactgtcaccagtctccactcgctttcccgttcccttcctagtccccttctttttctagccccaatctttttctccctgttcctcctcccactcctccttctcctccctcactcactcaacaattcatatcctgcttgcctgatgagcacagaaggtactaaaccgcctaccttaggacacttgcatttcagcagggagctcttacacc

SEQ ID NO: 55866 - DNA, 1956 bp, Homo sapiens
gttaccaacatttagaaataaaacataaaaatctaaaatcctgattgatttcatttgggaaacaggactatctatcagcgtggggcctgcgttcccctggcagctggaacgcacagtaccgctccctttagagggactcttggtcatatagaagttccccgcttgaccctccttgacgactgacagtacgaccctcgtttctaggggacttcgcccgtcttggtctccttccaggctcgcgtttgtaaccagactccaaattttactaaatggggttgaattgggtttgagagcacatcttagagcagggtctagggctgagattcggggtctcagttggaagttgaggaagggcaacgtctccttccttacagttttcccggaactgtaggaagtcagagggaattttatcctgcacatctgttgcttgacaaagaacttcccaatcctcctccgagccctccagtccctagcccagttcgcccgggcccgcccctagcaacaagatcgcggggaggggccgaggcgaaacacgagccccgcgcccaccaccccagctggcgacgtggctccgcggccccggcttcccccggcagctcagcgaccaatgggcgcgcgagcggggccgcccgcagcttcccagcccgaggcccaggcgcgcccctctgctccggctcggggcgggcactggcggagggactggccagtcccctcctccgcgccggccccaaccctgtcgctgccgccgcgctccgagtccccattcccgagctgccgctgttgtcgctcgctcagcgtctccctctcggccgccctctcctcgggacgatggcgcgcggtggccgcggccgccgcctggggttagccctggggctgctgctggcgctggtgctggcgccgcgggttctgcgggccaagcccacggtgcgcaaagagcgcgtggtgcggcccgactcggagctgggcgagcggccccctgaggacaaccagagcttccagtacgaccacgaggccttcctgggcaaggaggactccaagaccttcgaccagctcaccccggacgagagcaaggagaggctagggtgaggccgcggccagggccccgtggggggcggcgcaggtgtccgagggccgcctgggcgagagccacgcgggataccaccgccaaagcgaaagcgaaatcgcgcgcgcggcctcgaggatggggccctgcccaactcggcgctggggctcaggctaacttgctggagggccccgggaccccagcttggagatcgccgccgccgcgccccggccggggtggtttctcgcggggaggcgagaacgtggcagcggccgcgggagccaggacggcgagggcccgccccctcccccaggttgcatcagaagggaggggagagtgcacaaaagaagagtttgtccacagtggcctgttagtgccatgagttcctccccactctctcgcagtttctctctgatcccccactcccggggagaagggcttgagacactcgctaagaaaatctcagggatgaacataaatggataaaagatgaaggggcaggcgagcgacaggcttgcttcctggtctcggccgcagtggtcttgccttttgcctaatcgccctgtaaatctatcgtaaggagtctgggcgcggtgactcacgcctgtaatcccagcactttgggaggccgaggcggggggaggggtggggagatcacctgaggtcaggagttcgagaccagcctgaccaaacggcgaaatcccgtctctactaaaaatacaaaaattagccgggcgtcgtggcacacgcctgtaatcccagctacttgggaggctgaggcaggggaatcgcttgaacccgggaggcggaggtagcagtgggccgagattgcgccactgcactccagccggggctagagtgagactccatctcaaaaataataaaaataaaaa

SEQ ID NO: 55867 - DNA, 1293 bp, Homo sapiens
ccactgcgcccagccaaagctgctattttttaaaagcggcaatgaacattcttgtacaagtctttgtacggacatacagtttgggtagaagaatagctgggtcatatgctgggtggatactgaactttttcagaaactgccgctcctctgcaaagtgactgcaccattttatgttcccaacagcagtacaggagagtttcaggtctacacaaacccatccatacttggtaagacccaacaagcttaacatttcaagggaaggtggacttagggaggcgccagcgggaggcaacatcaatgcagttagctacacgggcctgaaaactggaggccgcgacaagcgtcgctgagtggaggcccagtaagtcccacccactaggccagcccgagcgcgtctgccacgccctgctgcattccgcggcgagagcgcgcgataggattggctctcaaggccccgccccaacaggtcgccgctcagggtgacccggaagcagttgcgccagcagcgtcgcgcggcccagttcccttttccggtcggcgtggtcttgcgagtggagtgtccgctgtgcccgggcctgcaccatgagcgtcccggccttcatcgacatcagtgaagaagatcaggtgtgcttcggtctacgggtgccgccacggtggggtgggggatgtcctagtagcgcaagggaccgctgccgagcctgggccgggcggccggggctgacacccgcagctgttctacacgcgagaatggggaggccggtggctggggcgcgcgttcctggcctcgattcgcaccagctcgccggccggcggtcccagcgcggggcccgacgcttcaccgccagctccctggtcggcgtcgggactcatttctgacgacatagtacttttagactgatgaggaatgatgtctgcttccgtccgtcaaatgcagccacattcggagtgggaggtggtgaatctgtagttagcataagcagggtagggaaaagtaattttgtgctaaagatcaaaatgccgggccgggcgcggtggctcacgcctttaatcccagcactttgggacgccgaggcgggcagatcacgaggtcaggagatcgagaccatcctggctaacacggtgaaaccctgtctctattaaaaatacaaaaaaattacccgggcgcggtggcacgcgcctgtagtcccagctactgccgaggctgaggcaagagaatcgcttgaacccgcgaggcggagtttgcagtgagccaagatcgcgccactgcactccagcctgggcgacagagcgaga

SEQ ID NO: 55868 - DNA, 572 bp, Homo sapiens
cagtggatccatggaaaagctgtttcattattaacattgctagactcgatcacttgattgaagtggtgaccttcaggatccttctaatgtaaaaatatattttgctctttgtaattaatgttatctgtttgaaatggcatgaatatcgtcttcccaacaatcattatttcactagttacttcattttactttttgtcttccccactagactaagcttcacaagggcagagatttttgtcttgtttatcattgctgtatcctcaatgctgagaaaagtgtttgcacatagtagaccctcaatatatattgaatgaatcatcattagttaaatacttctgtattctctaagagactacgaacaacttaagggcaaaggtaatgttttcttagtttttgtatttgcagaaaataagcacagtacttagcacatagcaaaaattcaatgctattttaatttttaaggaccatgggtaaatcagtcacaatatatatgccttactcattttccttatgtgtaaaatgttaaaaatgtatctatttaactatattaataagatatactaaaaattatt

SEQ ID NO: 55869 - DNA, 1763 bp, Homo sapiens
acgtataagtacttatacgcagaaagtacattagaaaaataattgtcatggtctagctaagaaaataaaggaaaataatcagtgggcaaatcaatgacactgctatggggagaaatcgtgtattcaacttctcattttattctcaaacttgcaaagagaaatttctctaaatattaaaagtaacctctctcttgaagccaatgagctacacagataggggtatctcaaataatccacagatattctccctgtttcagcctgttaactgccaacctcggttccccaaatgagaaatattattttcctttacaacatcatgcccatcaaattaaaagatagggatctattatgtaaacagaattgcaaaattaagttctctcctgttttttattttccttttcttttccctcagatccctgatgactttcctgttcataatcagatcgtagctaatttagatgttgacttacgggtaactttatgtatgatcaaaccaaattgaagatctccatgaagtagcactttgtgggaaaaaagttttactgatattggcagtaaggttcagatccacccatctaaacctctacctaagtttacaaaatacctctaaaaccagatgctaaagaagaactaaagccaatagtccaaaggcctaatagagaaaagatgagtcataccttatgaagtatgactggtataaaaatagtcacagtaaaaatgagtcagtctttaaacactgttgtttcccagtcaaaaaacccagtgaatgaggataaagatttgttcaagaccttaagaccataaataaaataaacattttacccacttctttgtattactgagcccaagtactatgttatcttcagtgctactcgaagttactttttttttttttttaaccactatagatacgtgttgtgctttctatactgtccctttagatcaagatagtcaacacctatttgttttttcctgggaaagtcaaaaatttacctggatagtgatgcgtcagggatttactgaggaacctcaaggatattaaatttccttgtaacactacacttgcataatatggggacaagttttttcgacgttctaaagatgtggagagttgtaagactgattccatttatcaacttactcttttagcaaggtcgtgaaaattccaaaaaaagtttagaagtttgtcagaacaaagcacattatttacggtatgattaatctcaagggggtaaatgtatcactcctgatgaattataaacgattcaatactttccaaggctggttactaagagacaattaagaatttttctgggtttcactggctgcttcagacaacaggttccaaacatttctgaaatcacccccacctctatataacttacgtgctcaataatggaacatctccctcaggaacttaaattttgtggcttaaaaataactttgggttcttgtcatgaagtcattgcctaagccaatgtctagaagggtttttccagaatttttatggttattctagaatttgtatggcttcaggtcttagatttaagcctttgatccatcttgatttgatttttgttaaggtgagagatgaggttctagcttcattcttttacatgtggcttgccaattatcccagcaccacttgttgaaaaggatgtcctttcttcactttatgttttcatttgctttgtcagagatcagttggctgtaagtatttgggtttatttctgggttctctattctgttccattgatctatgt

SEQ ID NO: 55870 - DNA, 1900 bp, Homo sapiens
tcttgagcccaggagttcctgggcaacaaagtgagaccccctactctgaaaaagaaaaaaggaaagaaaaaaaattaagttcacaagtactgagaacaaattttattaatctctataaatctacataaatctctataaaatgtacatactgataatgtaaacatactactatggaaaataccagaaaatacaagcacgctcactcaggtattctattaggagacagaatgatgacgttattacacttcaaatagcccctggaaatttccactgtacactcttgagagaatgaaagtgaaaatggcaaatcatttattgttactataatggaaatagttttgccctcagagacccctggaaaagatcttggagacatcccagacctggcggaccaccattggagaaccaatgtaatcaattacttgtaaggtcatttccatttcttatcacgaataaagggtattttgtctgatgaatatcttgtcctcgtccccggaccacccttttgagaacagttgacctaaggtaaccacaggactcctggcccagtgggacccaaagcgaaaagccctggacgcgccgagggcgctctgcttaagactgagaaccgaaatgcttcctgaattaggatcattgagaacgccgagtgcagacacaaatcgaaaagcagccacccgcgccgccaaggcggggccagaactggcggcaggcggctggcccgcccggggatggggcagaagctggggcggctgagagcgcagcgcgggctcccgggagacgccggcccactgcccgcccgctcgccgcaggtaggcccggcccccgggaggtggggcgcggccaggtgtccccaggtagccgcctcctcccgtcctccgtcggccgcctccccggaccgaggcaggacctcaccccgcgcgtgttccccgggcgcccctctgcgaaccccaggcccttcccaggtttgcgcgcgggggccatccagaccctgcggagagcgaggcccggagcgtcgccgaggtttgagggcgccggagaccgagggcctggcggccgaaggaaccgccccaagaagagcctctggcccgggggctgctggaacatgtgcggggggacacaggtacgaggcctggcggcaggacctcggcggggagggggttacctggaaggggccacctcggcggactgggttggattcgaacacatagcgagggttgcccgcggcgacaggtgcccgatcagccctcggcagggtcactgggcacggcgtttgtcccaggcgctctcaggggctgcttcctgggcgcgcgtcgggttccggcgaccgaaaccgcgcgccgggcgctcttgcgcctaggctttgagtacaacaggttggtgattcagttcgacagaaactcaaagtgctgagctaggggccttttttttttaatatttttttttgtttgttttagtttgtttgacagttgccagactatgtttacgcttctggttctactcagccaactgcccacagttaccctggggtttcctcattgcgcaagaggtccaaaggcttctaagcatgcgggagaagaaggtaagcactaaaacgtccctggaacccagagccgcatagcacagatctcagtgagaaagtgcagtatttgaaattacatacccccagcaatcatagaaacactaaaatatcctttagtttaatttgtggcatatttggcaaggttgtgtttttttatgttctttaactgcaatttatagaatttgatgtctgtgagtctcctttaataagtatatacgtaagacctagtttgtggttaattgaatggaaaacctatttcagcttctgaaaatcagtgagtgacatttctctagatgaagctgtgtggcgattataataagc

SEQ ID NO: 55871 - DNA, 3150 bp, Homo sapiens
acttgcaaaaaggaatgaataggaacaaaaggatgtaggcgccaggaggaaaacaggatcttccagaacaaaattaatctcgcaaggcatagcagatccaacaccagattattaccaaagtttaaactttttcaatggtcatcagagatagcgtatcaagtttattaggtctttcactacggctgatttgcttaaacctttatgttatgcttatcttgagggatagatttctgtgctaagcacataataggtgttaaaccaatattgatttttaaaaggaggtggtcattaaatagaaattttactgttattttaacctttaaatttatggcccaagggccaaacgatgatttgtacgattccctagtttcaatacttgtgagttattacaagaaatacaactctgctatgcaacagaagaaccgcaaatagtcattaaattaccgcacaccaagcagcttggagatcagataggaaatgtttggggagagagtcctgctgaagttccaagtctcaaacaaaacccctcaacatcagagtgcatggtgagtttaaatttattgtaattaaagtcatccagatggtagttggattaatcaatgaagaggtggttatctatcttgggatagaagattctgaaacccagagcgagaaaaatccccaaggtgggggtggggacagttaataagagcccttgggaaaggccctttcagcgaggattggaaaataatacgtttgaatttgaatctctttgaatataaatctcccctaacagcaggaaaagggtcctctagcccagcaagctttggggagggagtaagcggaactgcaaaagagctcgctcagctgtttctggattggggcgcagagaaagaaatcgcgatcagggaactgagtactggagtccctcaaaataacccgaagggtcaaatagtgagctccaagcaaagcgttgacccggctacccctgagcagcgccctacgctgggttccactccacttcccctcccccgcgcggggcgatagccaggcgcggtcccttcccacgcgggccgcggcgagtgcggacagctcccttccgggctgcggaaggcgggaagtctgcggttcgcgggctccggctggcgggcgcccctcggagtccctgaagtcggccgggccccgcaggacccgcgccttctcggccccaactgtccctcgcgaagcgtcctgcggtggcggaggcctcgcggccgcccgccagccccgcgagcggcaagcgcggggctcagaggggaggcggggcaaggccgcggggcggaggggggcgggaggtgcatcctgggaaatccaccaacatggggcgcagcggccgccgccgccgccgccgtcgccgcgagtcccggccgcgggtgcctccgcttccctgacgcccagctggggcctcgccgcccgccgcggcccgggtctttgcggcccagactcgccagcgcgcccttctcccgcctgctcgccggggccatgtgagggggcagctccctccaccgccgccgccccctcttcctcccccgccccctctccctgcccgcccccgtcacacggagccctggaggatcccccgctgctgcccgccctccctacgccacccccacgatggacaggaactacgcgacctcgggcttcaccgagccgccgccgccgccgccgcccgcgccccccgccgcccccgtccccgccagcgccgctgcgcagccccccgccccagcctgggcgtacgaaccccgagccgccgccgccgccgccagcagcagctgcagcagtggcagctgcagtagcggcagcagccccagcctcaaggccaggtagggagggtgggcggcggggtcgcggtggaccaggaaaggccggggatgcgtttggggccttcgctcggttgcagcgccgcccagaggtctgggccgggcggggagccctccgctcgccctcggccagctcgggggaggcggctgatgactcctacggggtggtcgcgggtaggtgggggcgcccggtgcaggattcgcgcctggggacggcgggtgaaggaatagctgggcgggagtcgtggggctccgtcacctcttgggtcctgggctctcacatggtgaagtttgggctcgtggctgaactcgggatctgtgagacccaggattggcgccgggggtccgaagggggcgccggagagtttggggcagtggcgatccattgtattggaacctgggtggccgacaatgcggtcttggggactccggcgtgtgagggttgcggaggcgggagaggaagagtcgcggaaccgcgtcccggagacactggggggcccgggagggctgggctacgggagaatccccggggcgcagggcagaagagggggcccggcagggcgcgaacgcggctccagggccgggtgacatatgtttgcgctggtggccaagatttaggcgatttttcttccacgcgttcaaagttgctcttaggtttcctccccttttaacaacagcaggaagtaaggaatctttctttgccttctatgcctcggggtgactgagagttgggaagaaatggggcgggggttggggtgggggtagtgaaggccgtaaaggttgaagaaccaaagcatgcttctccatctcggcctttaaggtccgggtgcattatgtagcgtggggttcaagagttcatcttgcatgaccaagggaatctaaaattttgactcctacttgatatttaagctcgcgggaaatgtgtagtagtgccacactgtgaaacggtcccatttgaatgataactggaaggcgtggtctggtttggagaattggtgagcggggtgttttaaagccacctctcccgaacaatacagaatctggtaggtgcagcttctgattacatggaccagggaatcctgggttgctaatgacttcatcctcagctaccaacaggaagcttcgtggctttatgatctcatcagatttcttcattatttttcacgacagaagtgaacttttgttttaagtttatacattaccgtgttccaggttatcttctttgtttttacgaaagttctacgttcatgattgagcaaataagtgtgaagggtagctggtctttgtcttagattgtccattgggacgattg

SEQ ID NO: 55872 - DNA, 1009 bp, Homo sapiens
ctcctgaacagctgggattacaggcgcccaccacacacttggctaatttttgcattttttagtagagacggggttttgccatgttggccaggctggtcttgaactcctgacctcaggtgatccacccacctcagcctcccaaagtgtcgggattacaggcatgaatcactgcacctggcctgagcctgaaatttgagtcagcaaaaatatgagatggaaatttaaagattacaacttggatgttttaacagtgaaaggatgatattatattgccatcttaataacaaagttaaaaaaactatggaagagtttttactcatcactgttttacagtgccacagaaacaggaagtgggttggtggttttttaaacatttttttgggtgaattttggattgcaccagaacagactagtgaatcataaactttctgctctgtttcctacctcttgataggtttagacaagtttgatcttagacaagcttagatcaagtgaagtttttcccatatgctaaacatatactgacttgacacacttgttggtgaaataatcaataaaagtggttttaaagcactctgtaagtgaaaataaaaaatactatgcaaagattacagcttgggtgtatgctgctggtagttttatggcactgaaaacaaaaaaggccaaagtctttgcagctgtgcactgattaatcagaaagggatgaaagaaatttcctttcacgtcataaactgtgtgattgtgatacttgttagttatgaaagggtttttgtttttgtttttgtttttgttttgagacagggtctcattctgtcacgcaggctggagtgcagtggcacgatcttgacttactgcaacctttacctccctgggctcaagcgatcctcccacatcagcctccaaagtagttggaactacaggcgcacaccaccatgccctgctaattttttgtatttttttgtagagatggggtttcgccatgttacccaggctggtctcaaactcctgg

SEQ ID NO: 55873 - DNA, 447 bp, Homo sapiens
acaggtgctcagagaaaaaaaacacacccgggtaacctggaaaaatctgtccagggaagaaagtgggaaaagggataggcatttcctatcccatggttgtagaaagtatctgagtagagatgaacatttcagcattccagaagaggtaaacaattattgcataacctggtgaaaaactctctgaaatgttatataaagtatcaaaatggtcactgaggtcaccaagctttttcaaatattagtgtttttcaagatttgtcttctgagacagatgagcttttcccccctcccatgcagtgagggaggacttgtgtgttcattcagttatacagcacgggataaagttcattggtatactgggtgcctgaaaccagccctgaatgcatcctctttctgtgtgtagcagccaattgagagattacaaagaaaatccttaaacagaagtaa

SEQ ID NO: 55874 - DNA, 3389 bp, Homo sapiens
acgttccggacgcagttactaaatgctgaacctgaattggttcctataaacctcgttaaaaaacaaacaaacatctcagtgaagcaggtactaaacctacccccgcatcacaggtgaggacaccgacgcacagagcagttaggcagcttgccaggttcccgactttttctatttcttttttttttttttttttttttgagacggagtctcgctgtgtcgcccaggctggagtgcagtggtggatctcggctcactgcaacctccgcctcctgagttcaagcgattcttgtgcctcggcctcccgagtagctgggattacaggcgcctgtcaccaagcccagctaatttttgtatttttagtagagaaggggtttcgccatgtaggccaggctgctctcgaactcctgacctcaggtgctctacctgccctggcctcccaaagtgctgggattacaggcgtgagccaccgcgcccggcctggtcccgagttaatctacggcaggccgcggttcgaatcccgctggtgtgagccgcgggccgcgtagtgccggcccagggaaccgctttgtccccgaccaccgctcgcgtggcatcgcgcccgaggaaacttggatcgctggcgccgcgggctacgttcagtggttgccagagagacacgtgaccggcagcgggggcggggcctgcagggagccacgccccgcacagttaacagacgggcgctcagggagctagggagctgtgaagctgctggaggagttggcgtccggggagcaagggccatggccaccgtgcaggagaaggctgctgcgctgaacctctcggctctccacagccccgcgcacaggcctccgggtaggtgccgaggactgccgcctgggatggcgcggggcgggctggggtgcgcgggctgggtcccggcgcggggcgggcggcgtggggcgttcggccgcctgcgcctgtcaacggccggctgggcgagcacagcacagctgcgaccacttggccaacgcccccgccgagcgggcggatcgagttcctctctggctggtgggctgcaagcggcagagcccgcccgcacagcccagcttttttctttctacccagactctcaacttgaccgcgcgttggtctgtgcgcccgctaacgtgccaggcacgcgccggggagctccgggatatgctccgcggtgctaccggtgacaagtgtggtatctggaatttgtgtagttctttgccccctgtctcaaccacaaaccttgacgacacagtatggccaggggccgagctcctcccttgcccactttgttctccagactgctaggagtcaagagtcagcttgtctccccagactcttcctgggagggatgagaggtttatgtgagttctactggcaggaatttggcataaaaggtatttattaacactttatgtataagcagtattttagtgaatagaagtttttggctaaaaaaacagttacatgaaattaggagggaagttggcaaattctgccacgggcctaatcgtgtcttttgggggcagttgatttaggattctggtttctttaaatgttcaaacacatgaagagaatcggatatcacttctaaaatgctggttatagcagatctacaacccagttaataggggtgactcagataactgttaagatactcagataacccttggcttttttcttttggttaagttacaactttttcccctttctggagctccagtctgggatgtcgtaggaattagttccctttctgacaaaagcctttcatttgtaaaaacaccaaccagtgaaactgtgattccttcctctgggtcaaatgggtgcttctcagtggccccactcttgtgtttgacttactcactaatgctcattttaatcttcaaaatgctaacgacagattatggtagagaaccatttttcacttgtccttttctaagaaaaatcataatattgaccttagtctgcttccatgtaaaggattcaggtaagcacatagtggccacattgagaatgtctccttgatttatgttgtgaagagaagacaaatgctaagacatttgggaatttaaaaccaaatgacattgaaaacagtcttgagaaatcttttgggcccacttactcagtgaaggaaattcccaaatgtcacctgcttaaaataaaaacatggtaccctgttttctctaatagctgaaataccaattctggagctttgggcatttgtgaacaggttcttagatggtgtaaggaagtatgtattcagaaattaagtagataactctctaagggaagagttgaagtgctggttatcaggaatcaaaggaacactgtcctcggcacactagctgcagtggacggagaggggcccgctgttgttctcactcgttttgcttgctaccgctggaatcccgacctggtaacatttgttagcctttctttcaccctttagttgccttgtcatagttccagtgagcaaggtagtgggagcacacggttattggttctttgccattctctttctgtgtgctctggcaggcagctttgtacttttgtttctccaccgattagtaactctcacttaccttaaaggggctgtaatgaccagggacctgatttatgtacaagaaatgagatctatatgccagtcttcagccagtatgtcaaaaacacttgtcttttaatacgacaaacaagaaagtagtctgttatcctgttatccctttatactgtaacctaattctttgagtttgcctggtatcacttttccagggagctcaaagtacttcccatatgctgtctcattaatgtatgtgaattaaagcagagaccaatgtctgcttttgctgataattctcgtagatattgtaaatttttcttgttggtagacttcttttacctacctgcagccttcttttcagaggcaatcgcagtcttcagcatgacgcctctaatgccaactagcaggaaaataaactttggactaccagaaccaatatccagtaaaagtgttgtaatcttgggatcatagtatagaaaatttttccactcagtcacaactgtcaagttttaacaccataaacacaattctctttacatttatctattaatattttcatgaggttttggttactatccaacaaatgtcctttttctttgttgtcttgacaattctttgtgtgagtaatattttaaaacctcttttgaaaaaatctttcttaaaattctcttaaatcctaaatggtctaggatttatagatgtgttattttctgatgaaaagttaaatcctctggtatgtgtcacatcttgtcttctcatctcctgttggcctttatgtgattgaatactattcagaacttgacattatcatccaggtagt

SEQ ID NO: 55875 - DNA, 1929 bp, Homo sapiens
tcgcctcactgcaacctccgcctcccagattcaagcgattctcctgcctcagcctcccgagtagctgggactacaggcgcgcgccaccacacccagctaattttcgtatttttagtaaagacgaggtttcaccatgttggccaggatggtctcgatctcttgacctcgtgatccgcccgcctcggcctctcaaagtgctgggattacaggcgtgagctgctgcgcccggactaacttttttttaaagctgaggaaatgagagaaggggaataaactttgtgtagctacaaacaggatggcaaaattaaatttcaaagaacgggcggggaaggtttcagatgcaatggcttcttattccttcttttgactgacccgcgccttctccgcctccctttctcctcgcgtcacccgcaccagcggctgggatgcggcgcgcgttccgtctttccgtatggaaacatggcgcctaggggcgggccatccccagcttcgagccaccgccagctgagactcatcggcgggcactcggccatgcctctcgcgtttccgtacgaaaacatggcgcctcactgcgtgcggcgggcgactcttggctgggagccactggccacggagccccctgagcggtcatcggccatgttttccacctctccctgaggaaacacggcgccgcccagctgcgagtcaccgcttactgaaccccttcggcaagcaggggaaagaccctcccgcctttccgtacgaagacatggcgctgccctatattgggctggcgcctcccggccaagagcagtctcctccttcctgatgctgagaagcggccgctctgaccgctgcccacccgagtcgggctgggaggaccgcccgccgcgtggcgagggatgcggcctcggaggggcagaggctgaaccgcccctgcctgccgcgcatccctccggcttccgccgcggcgccagcccgcgcctgattcgcggcgggagcggcaggagggagaacgccgactccgtggcaggtgagagcgggagctggggcggaggctggcggggcccgtccgggaggcgcgcggtccaagtcgcaggcatctcttcgcctcttcccgtcggatcccatcccgggatgtcgggggcaggcgaggaagaggcggggtccgcgggcgggtggagctcacccctcgaggctgtcctctcggcgcgcccgcgtcctcccctactcccggccctgccactccctcgctggcctgaacagctgtttacaacggaatccggacgccgggcgcgagtggagctcagtgccagaggaggggattcccggcgccgggggacagagccccttttttcttttgccgaaagaccctttctgctggggagcctcttgtgtccagcctaggcccgcgtgcagcgccgacggatgaccgtcttcttggcaagtgcgaggatcctcctcccctcggctctctttttagacacagtgggggttgaatggatgcgcgcgatataagcaaattaaatggttcgtggccgcatcctagagccctttaattagagttaccatttgtagaaggcctgccgtgcacaatccctcgtttcatctccccccaaaccgagcaggtaggtagctgtgttttacagaggaggacactgaagttacacagctagtaaagagccagaattggggcccaggtatgtctgaaaccaacgcccagcctcccagatacagtgacatcacagagatgacgtagggattcatctctatcaacagatacttgtgggtgtctatttgggggatatacagatggagcataagtggggaatatgactggtcctggctcttaagaagttcgaaatctaggtggggaattttaaaataaaaactagcacttttaccatctggccccaacgcatctttccatcatctctagccacttccttt

SEQ ID NO: 55876 - DNA, 2810 bp, Homo sapiens
gagatagagtctcctcactctgtcacccaggctggagtgcagtggcacgatctctgctcactgcaacctccgctaggcagagttttgtagcctgaagagccgtaatattaaggcctggacctggaagctggggcatagtggaggactcactggtagggtggaagcagctacagtgcctgcatctagcacttaactcacaacatgaaagcctgggtttcccaaagctggggggttacggagaatattatcagcagaagagagggtgaagccagatggcccaggagtcatgaccgagagctcagggtaaactggagctgcatccccctgccccagtgaagagcaaaccacagctgtgaccttggccgcccacttggttttaaggaagcaggaagcctccactaacagagctgcaacacctgctgggacctgacaggtgcagtttttatcagatgatgtgtgagatcctccagctctctctctgtatccctcagagtgccccctgcattaccaagcttagaaaagcaggggtgcaggagggctgctgaaagccagatggggcttccctgacagagttcactttcccccaggttgaaaggaagccagattgatacaaggttaagatctaaacaaggaaaagcctcatcatcagtgtagaggatactttacacagggaaactctagctggtgtctcatcctatctgtctctagagctggagttgccagggctttggggtccatctcatgcagtggtcaggatgggagagaagggaaggaaggtttgttaaataccaggtgggtggcaaggcctggctaggtgtcatgtatttgttactattattattattattttagacagggtctagctctgtcccccaggctggagtacagtggtgtgatcaccactcactgcaactttaacctccaggactcaagtgattctcctgcctcagcctcccagctagctggggctacaggcatgtgccaccatgcccagctaatttttgtatcttttgtagagacagagccttgccacattgcccaggctggtctcgaactcctgggctcaagcagtcttcccacctcagcctcccaaagtgctgggattacaggcatgagccaccatgcctggcttattcattatcttgtttaatcctcacaacagcctgtgaggtgggtgttgtaaatttgcctatatcaggcatctgaaactcagacacattatgacttgcctgagatccctcagttagtcattggcactactatgatttgatccaagttttatttgattccaaagttcatactttatactttatcactccaccaggacatcgattgtcccttaagtaattccgagaagcatcccttcttggtgtcaaggtaatgtgtgcagctttgtttttcacagattccctggactttgtcacccagtggctggaagaagcctcagaggaccttatgactcagaagtataaacacgccctgccagtggggggaatggctgctggctctggggacatgcccaggctgagccctgttgctgtccagaattacgcttacctgaagcttctgaagtgggaccacctccagaggccgttccccgaagtaggtctcctgagccatctcactactcatatttgtttttgtgctgctgaactttttaaaaagaatagctttggccaggcacggtggctcactcctgtaatcccagcactttgggaggcagaggcaggcagattgcttgaggtcaggagttcaagacttgcctgggcaacatggcaaaacaccctctgtactaaaaatacaaaaaattagctgggcgtggtagcaggggcctgtagccccagctacttgggaggctgaggcagagaattgcttgaacctgggaggcggagcttgcagtgagccaagattgcaccactgcactccagcctgggcgacagagcgagactctgtctcaaaaaataaaaataaataagtaaataaataaaataaaaaataaaaagaatagctttattctgatataattcatgtaccagaagattctcccttttaaagtgtacaactcagtgttttctagtatagtcacagagttacgcatccattgccactgtttaattgagaacattttcatcacctccaatagaaacgctgcatccatcagcggtcactgccctccccccctccctccaacgcctgaagccacagatctgctttctgtctctatggatttgcctatcctggacattttatttaaatgaaatcatacactaccagccttttgtgcctggcttctttcaccaatgttttttcacgttgtagcacatatagcagtagtttagtcctcttttccactgtgttttttttgttgttgtggtaaaatacacataacataaaatttaccattttaaccatttctagttgtccagttcagtggcattaagtgcatccacattgttgtgcaaccattgccaccagccacctccaaaacattttcatttttccttctgtgaaactgtcttcccaccaaacacaccaaacagtaattcccattgcccccgccctctggcccctggcagccaccattctactttgagtctctgtgaattggactaatccgggtacttaatatgagtggaattatacaatctttgtccttttgggtctggcttattttacttagcataatgtcttcaaggttcatttatgttgtagtatgtgtcagtgttccctttctgggttttttaaaatttttttaaattttagagacagggtctcattgaattgctcaggctaggtggtacgacagctca

SEQ ID NO: 55877 - DNA, 2036 bp, Homo sapiens
gagataaagcaaatatggcaaggctttcagctgttgattccaggcgaagagttgtcctacaggtgttcactgcacttttctttcaacttttctctatgttctaaactttgcacaataaaacctttgggagaaattatttttctataaattttcaccaccatctgtcccactgaaacaccacagttctaaaacattcaagaggtcatggtaacatttccgtgtctttgtaattttagataaattctaagaattaacaatgaatttcgaaaactttcaatgaaacctcagttcattagtccttcactttcagataacaaatactagatcagaaaaggggtaaacagttttgatacagtaattttaagactttgcatgcttgggcatgctaacactatgtaaaatgtaaatagtgcgaagatttctggactgaaaccagtcctcgggcaaacacaaaacaatttaatcaaactgccgacataatgaaatctacagtcttacagactatgcaatagaacgctcctattttgcctcatctctgccaacctccaataacatcttccacgttataagctagggaacctgaaaaacgaaaacctaagtgcatgtcgttgctatggcaatgggaaatttcaggaaattgagactgcaggctacctagcctccattttagaaactgtatttatctaaacacaccaggacttagatcgaaaaacacatttaatggcatttttcataactatttagcttcctctttcacactaaaaggtaaatactatcctacaaaattctgaatacaaagagcaaaagaaacaaatcacactgatctaacctaaaagtgtgaattttaaaatatttagttgtcactcatatttactattaaaacagatgcttttatttacagtggccaaaacagacttctcattttcaacttatacctgcaatgtttatgtagctggaaaaatgaaaacgaaatgtggctaaaagaaaagaaaacgaaagaaagccacaaaattcccaaaacctcagcataacttgcttctttcttcactcgctctcattaagtcttaattctccagattagctttgtctcaaatatttctcaaactagtaacctatttctgggtacagtatatttggcggggtaaaagaaacactgtcaagtttttctaaaacgtcgggtgcacgttaaaataattcctatccactctaataccaaaacgatatcaaaggaaagcatcccatctggagtagtcccatgaatctaaataggacgaagcagcctaccgctattgtctaaatcaagtatttactcgtattcatgcctaagagagagaagtaaaaaaaaaaaaattaaatcttagatcttgctccccattcccaccactcttctatataccctgtcccccgggttcactagacccaattccttcctcagccgaacatgtctggagcagtcggaggaacagacgtggagaagaggtcgccacgaggccccaccactctccttcctcacctgctccgtggctccgtctcctgacatggcctcagctgattacaacgtgcgcactgaccgtcgatgggaagctagaaaagaaaaattaaactaaaaaccacccccaaatcagtaaagttaccccctgcccagctgagccagaccgccaacaccaatcgccaccgcccactcaaatatgaattaaaatggctgcgcccctgccggccgaggaggaggtgtgtggcttccgcattaacttccggggcagtgggcggggctaatttcgcgactctggttattccgagcgtgcagaaagcagcgagatcccggggcgggcccaattcctgggctgacgtcactaccctggcttggagaggctgttgctgagccggctccaaccggctggaaggcgggaagctgtttcgcctggaggctcgcgcgctttttggaattcagttatcaagctttagagcctggctactcacagttgaagcctgattgcaggtcagcaatgctaaacgttaaatgcctcttatatttaggg

SEQ ID NO: 55878 - DNA, 3094 bp, Homo sapiens
atttgtttcctagggaaaaggaggaaagatggggtgggagacatgggctttactgtataaccttggtcatgtcacctaaacttcttggaactcctgagtgtaagagttgggaccaaggatcgcaaagcttctttcattcctaaaattctatggttccacgattatgtaagctgaaacaggccattctgttgatttcctaatctccaggaggaaagaaactagtctttgggagttaaaccgactaatttaacggagaattaccaatgtggaggtgggcgaacttcacaattatggggttttggacagtagagatgctcttaaaatttccaagaggacccttcccccgtccttgaacctggctttacaattctcttcactctttgggataggggagcgggtagaacctagtttagattgaggtcgttcatttgagcatttcccctttacttattttgggacctttaacgaccaaatgccgagaaacagatccttaattacggttccgggatctcgaaaggcctgtaaaatcctgcttccgcatcttcatcctttcttcgggtattgggatcttttttaaaaatgtgtatttctggcggagggggcatggagtgaggttcagaacagcagagccgggctgacggatgcttctttcgcgggaggcttggcttgcgggactccgggttggggccgcacgggctggcaggcgggctccgggcaacaagggcgcggctgcggactggcgggcggaccccggggaggggcttcacggaggcgccgcggccggagcggagcggagccgcccgggctgggcgcgcagcgctgccgggcgggcggtggcgctgcggaggcggtggccgaggccgacgagcgcggaggaggggcccgaggctggggcggctggtggcagctgcctcagtgacgactgccggcatcgcggcgacctgaggagatcaagccgcaggccccgccgtcgccaccactcccgccagtcttccttctccgctcccggccggggcgtcaggaatgggccccaatcgccgtgggccccgcaccctgcgtcgcccgtaggccccagtagccggaggccgaccggcctcccactacccctcgccctagccaagccgtccccaccccaaatccccgggaaggaagatgagggagacgggcccggcgcttagcagccagagcagcagcagcagcagcagcggtcgggggagggtgtttcgccgtttcctctcagccgccaggacaagatggcagcggccgcggagaggggctgagcccgggctgggtggtgccgcctgctgaagcgcctggctcccggtccccggcacggccctgcgccccaccccggacatgctcagggctgcggccgcccgaagaggagagagcgcgggcctctaggaaggtaagggagtcgagcgaggggcgccgccaccccggggtggggggatcggctccgtctgcgggctccgcggccagcggaccccaagcctgacccgggcctggcccgacacctccggcgcagcccgcactcattgcgcgtcccgtgccccatccgcatccccagcgctctcgtgctcccagtttccgccctagcccctgcagtgtggcccggtatgagccgctccctcgaagccggcgccacgccaggccctgggccgccggacgcgggggccgtagcctccgggaagccgcgcctggccggggcccgggggcctcggccccccctccccctgccaaggttgcgcaacggctcttcccagcaaccgaagttttgtttagtcccacggggagcctctcttccccctccgcagtcctaggccgtaactacggagatccctttcctttcattaaggggaacaaacaaacgcgcaggcacgcagcttgagcaccccagccgatggccgcgtcccgggctttgtggccccgtccccagcgtcgcggagcagcgggtttgcagggtgtcaactctggggacgtgcgtgcgtgtgtgtgattgttggggaggagaaatgtgatccgcggctccgcgtccccagcggcggcgggaggaaggcgtggcggccgcgcggcggggctgttgccggcttctctcgttacggtggctgccgcccgcttcccttcgccgcactgggagaactggcggaaagactttggatgaaaatgtctgtttctctgtcgggagggagacggctgttgtaaaatggtatgtggctctcggggaatcctgttgttcccgtctcatctctgcttgaggaattgcgctgaagagtgtgtgcgtaaattaccttggacttgttacagagtagtcgtaacacgttcaggccttgaaccgtgttttcacaacctcttactgccctgttagggaatttgtttttccacctgtcagttggctgcttctaattataataaggggcttctattagcaacagcaaaaaatttcagtttatcgtccagtttagagggaaagcgcatggttggctctattgtaaactttgttttgatgtctgtctggtacagggccggaaaagttagctggcaaaccagtctgcgtgtgcttttgcgtactttctagtagtttggagatctgctgacactttttccctttttgctattttaggtatttgcttttagctgtagcttctgaagtgggagtacttatattcattcaaaccatctcagttaatttcaaagttttagttgctgggctctttaaaatttttaaagaggtttcctttctgatcaaatttttgatgaaaagtcttgagccgtaacggtggttactgcttacccaactaagacattttaatcctatattatttaatttttcagaagctggtgaagtctcaccatatgtttgataagtctagattctgcttatgtttgcaagtgcagtgctaattttatacaatgagcaatgataaggtttagataggtcatgattaaacttagtattttaagtaaacaaaatatgactgaccttttgtaaaaaaagttttcatagttttattgattatcttatgctttcgtgccacttatcagtaattgcaattttaccagccagatacagttatttagttttaagtcaatg

SEQ ID NO: 55879 - DNA, 613 bp, Homo sapiens
acacacacacacacacacaccactgtgggaaaccacttacgttttgtccaagttcatagacccaaggaacagccccagaggcacagagcacctgctgtactaaaataggtggagacctgtgaactacaggtaagacaagaggtccagctacatttagacagaaggcttatggtccagccagagggggtgttggcttgtcacataaaagggaaaggcttgagtgtttctctgatatttacttcccctacagtaaaagggcaggacaggggaaccaacctagcgacattaaaatcattgtcttctgtggtatgcagattcacctgaccttgaactcactgatgacatggtatcgattgcaccaccacctgcagtcctgcagcagcagctgccagcagaagccatgctaacagaactcacagaggcaagttttgttctagcctgacaagcatgcctggctttgcaagccccccagacgggcaaaggtttctgcaaagctatgtcttgcagggattgcagttttgtcttggggaaaacacagattggcctgaacccgttgggggaggaacagagcgaaagaggttttttcaagctctgcagagctgttataaccaca

SEQ ID NO: 55880 - DNA, 5760 bp, Homo sapiens
atatctcaggtaactggcaacaaccccaggctgggggaattattgtgcgccttttccagatgagaaaaagggcctagagagttaagaatctattttttttttgaaagaacaattggatgaataaatgagtaaacaaaggagtaaatgaatgcaggcttagtttatatgcattgttttcagagttacagaatgtttgtactggattcaggtaaactctgaaatgacagtgataatcctggctgactctgtgaatgagtagatggaataattaacatctattgagtactggctttggactatgcattgttctgagtacttcatacatattaacttacttcaaccttatagcaacctatgaagtgggggtactatataatctcctcattttataaatgacgaaacaaagacacaaaggttaagcagtttgtccaaagtcacacagctggtgtgtgctgggatttcaacccaggcagtatgaccccagatccagcaattatataccacttctcagataaaaagagctgtcttaggcctgtctctgaatcttggtaaagaactcaaggtacatcttgaccccatccccaagcctgtcataaaggcacttggcccagatgagtcccaggatattgcatctagatcatcctttcttatcattttatgcaattgacgtttccaccataagtcaaaccacaaggctgagactgcattttcccctctatccgcagccagcaacgtgctccttaagcacatggagtgtccactttgtgcaaaaccgtgtgctcaggatgacgatgatgacaacacaggccctacccttaagaagatcgcagtcgagctagggagacatactgatgggctattataatccaggtagtaagtcccaggaaaggggatgcccagagtacaaagggagctcagagaagggacacatagcccagactggggactggaatcagggaaggcttcctggaggaagtgacatccatgctgttgggagaggagcacttcccttcagcttccttccaagagcagtacgggagtcctggcctcttcctgcctctttacccgcccaatgcccagtgatggatggggacttgtgattcataatttggggaagaataaactgggcatacttagccacaccctgccattcctcctggcttaagtaaagagagtgactggcaatgggtgtctttgataatgagcaacagaaactaaactaagggaaactaagaaaggtgtcgtccgaacatttagaaggaaaggaatgaggtgttgccactggacaactcagctccaactaccatttcttggggagaaaatatgagagacggagagcagcctgctcgcgatcatgtgtacttggagcctgatgccactcttgtgagttccctgggagccaagttggaaggaagctgactgcaaaaggcaggaggatgcagtgaaaaagagatgggaggggagctgcctgggctcctggtggcttccaggccctggtgccaattgcgcgaggcccatgagggagccatgtatctttggcagccagggtccttcttttgggaagcagctgctccacagttccaagtggttctggtggggatgcaaccacaggaccctggccacctcctccgcaacatggacagagatggaaacgtagcccgagctgggccaatcacattttctaagaactggtagttggagctgagttgtccagtggcagcacctcattcctttgctttccttgttcagatgatgcctttttaaatttcccttagtttagtttctattgcttgtgatccaagaagcccattgccagtcactctctttactcaagtaagtcagtttgagtggcctgtttccccccaaaaccaaagagcacctggaataggtgatacttcagctttgcatcatagattttctggattcctattgtcgattgaaattacagctgtttcaccagaaataacttgataaatgtttattggaagccaaatgtgaggatcgacccaggaagacacaccaacaaagctgggagtgtcctagagtctgttacaagttagaaagcttttatgggaaggtttagaagaggggaggaggactcttcatacaaagagttgtctttttgttattggaaggtataatagagagattagtcactggctacagatgacaacctacaggctaaaatgtctacgggcaagacagcaaagtttcatgattcagaaacaaatcagcaaaacttcatgattcagaagcaaatcagcatccttttccatgtcaggcatgcattaaccactatgtcaacagtttaaggaaatcacgataagattccttactcagaaacaggatgtcctcatgaatcacaaaacttctgctaggtgggaagtctgacaaatgcaagttattactatttagtcactttcatggcagctcggcacagatatgttctcggatatgctcatgcgctggtgtggacagaatgacaggattgggtggtgaccatccacccttccttttggggactgcctacagagaggccatgcccttggccttgtctgttgggtgtgggccatgtgatactgcctgggaggaatgtggttggctccctctagaaaacaaacccctcttccccaaactgcttcccagccatattcaccccctttgtcgctgcttatggggctgagctccagggcctgcgcattgaatgcttctccctccctgtggactgggcctccctccagctcacatctcgtggccaccaccacttccagcaccagtgactcaacaatgagggctgtgtactacacaaacaggaaaataatattaaaatgattcccagtttggggcagtttcacatctgtcattttttgttgttgtccccactcccagcccccatcctgtgaaagcagcgtctccatttgcctgatgtggaaagaggctgtgagaggctgggtaactttcccaaggtcgcagatctggttaatgtcagaatcaggacagagttcaaaggaaaaggccaatattccctgaggcaccaacaaggtatttacctccagtgagaacaaaagccgtaaagcagtaattaaatgtctcttccttctgttcccagctgacttccactgaaccctgcctgaccgctttggcacagagggtgggcacaggtgacttggataaggtagcaggaggtcttcccatcacacttgaagtctatatttctctcaggagtaataagcttatgatgaaaggatcatgatataaagagctggttatctgttctatcaggtttcatgcttcatcttgcccaaacagtcagcactgcagaaggccttcagcctccatctacaggcctctacctcagctttccctctaccctagtttcttgaaagtaaagatcgctaattgatctgactggccagagtccaggacaattcctttgaccccactttcccagtggataggtttactacatcttaaaggtcaggacatgggggccaggtgcagtggctcacacctgtaatcctagtgctttgggacgtcaaggcaggaggattgcttgagcccagaagtacaaaaccagcctggtggtgagacaaagtgagacccccacctctacaaaagaatttaaaaattagccaaagacttgggaggctgaggtgggaagatcacttgagcccaggagttcgagactgcaatgagctaagatcacaccactgcactccagcctgggcgacagaacaagactctgtctctaaaaagcattaaaaagaaaaaataaagtcagcacgttgggctttccttcttccctgagttcatgcaatagtcagacccaggacaagcctgcctccacggacgggtgaatcaggctcttgtctgcctctttcctgtctggcactgagtgggcaaatcaagccagaggaagcagcgagcttcatttataccatcatcccagctttgaatgctccaaaacagctttccttctagctcagccacaaataaagcggggcttttgtttttcatgtcgctggtggcgtgctggtaaactcttttcaaccagctcttctcagtggaggtccgagggagccaaccctgatttgtacatttgccaatttccttgttgtaaatacactccccgtggccagtttaaaaaaaccccacatgacatcattcagaagatatgcacattagcacaccattatgtagtatttcgaccacacagacacaacaggcataaatgagctcaggagtacagatgatagagaactgtagcaaaataattaggaagtgatgaattgtgaatatttgttaccttcgtcttaaatatgatttaattaaaagttgatatggttaaatttttaataatggttgtatttaataaccagctcataacattcctgaaaatttggcaattagttctcgtgagcccatagaaactggctccggcacaccactgcatttatctattattccttgcatgtggtgttctctcaatcaagctctctattgctttcctctgccaagcgcccttttctttgaggaacagcctcttttgtttcattttgttctgaggggctgtcaattacatgacaattacatcccaccaaccgacggtaacaggacctgtgcccaaagttagtccaagccatggggtgactggggaggtggcaggcctgagtgtgggcatttctgggaccttggctgtaatactaccaaactatcaaccccattctctcttgccaagttgtgggaagcaacctagccaacaccaaaaccaccccctaccagtatttacatgtattggaagacctgacctcactgtgctccccatctgtctcttgcaggggctccctccctgcaggggctccccctcagcagggtcactgtgggctacctgtggccctagacaagggtcacacttatgaaggaccctttccacacagccctgtctgttctcaggttctggcaaccactccctcctctcacacctacccgcctagggttagcaacagctcggtgggtgataatccgcattccctgcctgcacctttgtaaacactctgtcttagtccattcagactgatataacaaaataccatagacggggtggtgtctaaacaatagaaatttctcatagttctggatgctgggaagtccgagatcaatatgccagcagattcggtggctggtaagagccagcttcctagttcatagaaggtaggagtggtgaataagcttgctgggcctcttttataaaggcactaatctcattccaccctccaccctcataacctaatcacctctcaaacatcccacctcctaatactattgcacaggggattaggtttcaacatatgaattttggaaggacacaaacattcagtttatagcataatccctttattaaacgctcttcaaattagccaatttgggtgttccacgcatttcctgcaggaacctggtggacctccctctgtactccccacactgctctgttcattatgctcacaggaggctttgtgggcccagcggaccagaacacaagctctggagtcagccctgagtttgaattctacctctcctatttactagctgcaataccagactcacattactttacctctttgtgcctccatgttagtcacctgtaaaatgaggacagcagtccccacctcgaaaggtcattataaggatggagtgagatggtccatgtaaaaaacctaatataatatgtgatacctacaaactgccagtaagtgttgatga

SEQ ID NO: 55881 - DNA, 1882 bp, Homo sapiens
aaggtctccagttctccacaagagctcccaagtgcagatgggagttagtacttgcgatatgaacctatgtatcttctctggcttgggtctgcaggaaatgagaaagttgtcggttgatgtgaatagtgtctagtggtggcagcctggtgcagccatctccagaagacttggtctcagctgccacaggggattcaggacaggagactgtacctactgcaggtgttccccgccccctccacccacaggtgtgtgtgtgagcactgaggggtcaggggcaagcaagtgttgcgtcatcatccccaatggtcctgccctgccacccaccattttaagggcatcaagaggacacctgatagctccaaggggatgagagttcctggaagaaatgctggatgcttcttttttatggctcacctcaagcttctcctgtattggcacctcactgtggaaggagaggttggggtagccttgatagacctgagttctaaacccaaccctgcaacatcctagccatgtgcctgtgggtaagccactttccctctctgagcctctgcttcctcatttgtaaaacatgccaagaacagtatctgtttcaccagctggcagtgagaattaaattattcaactccaccgactcccttagtgcccagcacatggcttgcacttagcagttgggcacttttaaggaatatggcctagggagggctgttgggactctggggaaagaaacaaggccatgccagacatctctgtctccatctgagctctgcacttggttttcctgatgcctggtttgttcccatttattcttattaagattctccacccccaccctgcgcccttcactgccctctggcctggccagcctgaagttttctgggagaacaaaggagcttctctggtagcaaccagcctagggctcaaatctggcttcttcctggggagatattgattcctggaatcaatatctggattccagaagggcctggaatctctgcctggagtaggagggtttctgtgtgtaaagcagaggttaacatgtctggggactttccacctttattttacttggcctgcctagtgttttggaaacatttgaattcattgttaagatttagaaaccagcagctttcacctggccctgtgctcacactgctgccctggcaacaacaagctggagctgggtgtccgctgcccctgtagtgggggcacgagctctgtgacttgccagtttccacctggcttcctggccgctgttccaggtttccagcctgaccttgtaggcatgtgcctctgtgtcctcaagatagaggtagctagacaaacttttgtgtatgtgtacgcaacttctagggttcccacctccccgtttacccatctaccggcatctgcacccccatgccacagatgtaactcctgttactacaaatgagccatctcggctcccctcaaaagccaatctctttactgtaaactagataccccctgctgtggtttgaatgtttttgtcccttccaaaatgcatgtgttgggaacttaatcctcagtgtaacactactgggaggagagacctaagaagaggtgtttagaatctaggcagagccctcatgaataaattcatgtcgctattaaaagcgtgagcttgcagtgagccgagattgcgccactgcactccagcctgggcgacagaccgagactccatctcaaaaaaaaaaaaaaaaaattgcttgctggagtgggttccctcttctctcctgctcttctgccatgagaagacagagctaactgttcctcccctctggaagacatagcattcaaggcgtcatcttggaagcagagacatcacgatccaaactgttggtgctttaatctccaccttact

SEQ ID NO: 55882 - DNA, 5714 bp, Homo sapiens
tcctcccgagtagatgagattacaaatgtgtgccaccaagcccggctcatttttgtattttagtagagacagggttttaccatgttggtcaggctggtcctcaatgatcctcttgttggtcaggctcctgacctcaaatgatccacccgcattggcccccccaaagtgctgagattacaagtgccagccaccacacccggcccctggatttcttaactatgtattcggttaagatttcttaactatgaatacatagtattatgtatgtattcatagttaagaaatccaggacttagcaaagcccagtttttctagggactgtcttccttccatggctatgagaaagggtgcattacagtgtgtctgatgaactgaagaccatttccatggccacacggacctaagcatttaggttatttcatacttcccttctctgtgtggcaggggaagccaacttaagccgttatatacgatagttggaatgatctttttagaactatctgcccttctccagtggtcaaggacaagccttagccaaaacaagtgatgggaaagacaaagtctgcaggacaacctaccgctactgaaagttctactttgcaataggtccttcttggagtacaaggcatttaacaactttaccctccaacagggaggagtcattcagctcgtaggctgagggatcctgcccgcatcagcacacgtggtccagagccctaagacttcagacgtaagaccagatatcagcccaggatcctggtgagagaactaccggcgccaaggccacagagtcccaggggggctgccccccagcattgagaagtggagtgtcccaaagctgccctggaaacggccttgggccttgtggttcttgcacaactcccacctccccctacagacaactgacagtcaccttacttcaccttccccccatggagagccccggtttaggaccgaacattaaagcttagggactgtctgtggtgggtggagctccagagtacagggtaggaggatgactgtgcaggaggattaaagttcaggacggggtggtggcggatggagttccaggtgtggaggctcagagtccagatgacccaaagggtttaggacggagggaggatggagtttgggactaagaggctcatgaagttcagatctgtggtggggggaggagtcggttaagtccaggataagggagtctgggtgctaggggatagattttggatctgggactactgggggctggagtcaaaccaggctacatttcgggtcggggcacggagccaaggagggagctagggcaggctaaggctgggctcggtggccctggcgaggtcacgcacagctctgggagtcgaagccgtccccagtgatggtgagcaactccagctccttaatccggatctccagctcgcagagctcctccgggtgggaggcagaggcgagcctgggggtcgaggggcaggggaccaggggcgaggcaaccacctcaggccccggcggcggtgagtagaagaagcgcagaggctcgtaggggatggaggccaggccggagggccagggcgagggccaggggcgctcgctggagggacccaggccgggtggtggcgggggcgggggcgccggggcggggagcgcctgggacagggaccgggcccccgccgccccgcccactggcgccccgcccgccttcagcggcacgaagagcttcttccagatgttgaagtcgctgagcggggacgaggagatgccgcggtcgtacagggacgggaaatagaggggcggagccgaccgctggctcatggtggggctgtggctgccgcgccgcccctttggcatcgtttgaatgagggtctgcgtgggaggaaccccgcgccgggagacgcgcgctcaggccccgagtcgccggggtttcgaggttccacaagccccgccccgatggagcgcggccccaccctttcgcctcagcccggcccctaacaggcggggttccaaagcccggacgaccacgtcccggaacgcggccccgcccacctcggctggccgcaccccgcagttagaaagccacgccccctggctcgcctcgcctcgcctcccgtccctcgactccgcccaccgcctcgctcttgctctgcgaccccgctggcttccgttgtcatatcccagcataccctcatccagaacaggcagcgggccagggctgcagaagaaagcttacttcaggcttcctctctttctcccatgagggagaaaagtatttcctagaaacctggcccctgcaccagcagacttacctcattgcctcactggccgcgcccacagcaaagaagtctgagaaaatcagtgtctgatttttcatccactactgtgggaggcagacaaaggagaagaggattgattgggaatggctgttagagccaacctatgtatctgccaaacgttagcagtgttgaggaagattctagaaaaggggatcctcatctggtttgtaatagacctgaaggagtgttttcagtgaaatgcagtttagttctcttccaaacacagatatcaccaggagctaacaggcaacgagctaaccaccaaaaggaaatcctgtccgccctacctcaaatacttcacccattgcttatgagcgatttggacattttgtccaaaggacatgacagctcatttatgtgagtaacctgtattagccatagactgaggggaaataactaatacattttcttgagagcctctgcctaatgatcactggtatgactagtgatgggtggagggcagttaaagagtcagtatcagcttcacaagttaaatatatatatgcatatgtatctgcacacacagtgcaaagtgtgtgtgtgtgtgtgtgtgtgtgtgtagcagcaaagtggagagagtcagatattcaagctgggtagccttggacaagttgcttgacttttaagtaggttttccataaaatagaaataagaaaaccaggctgcctcatagggttgtgatcaaacagaagacggaacagtgtgtgtgtgaaacacttgaacttggacactttgtccaaacacaagaggcagctgtccctactaaggggcatgtctgaaactgggaagctttttcttcccacactgagcttcccacacttagttgtcacacgcagtatttgctctctgactttggcagccacccatcattgtttattcatacaagtgatcactaggctgaggctctcaagaaaatgtatttcccctcagtctatggctaatacaggccatgtgcgatagctcagcacccagcctgtaatcccagcactctgggagtctgaggtgggatctcttgaggccaagagtttgagaacagccaggggcaacatagcgagattctgtctctataaaataatttaaaaaattaaccaggtgtggtggcatttgcctggagccactcaggagctgaagtgggaggatttcttgaaccaaggaggctgaggttgaggctgcagtgagccacaatcatagcactgcactccagcctgggtgacaaggcaggaccctgtctcaaaataaataaaataaaataaaataaaaaatacccttatcttccattagtttcccccacatatttaacttcccataatttactgcccaagaagctcaaacctcttttcctttgtcttatcacttttctacaatcgcccattgttaaaattgtatataagctctcaagccacttctttgggttttcactttgtttctgtaagaaccccatgtacctgcgtaataaactttgtcttctgttaatctgtctttgtcagtttaattctcaggccccaggctctgaacctaagagattagaagaaaaattttttcacccctacagaaccacagtaatggtaagaaccagggttttggactcaagacttgggaccaaaccctggatccactatgtatttggctgtgcggctgaacctttctcaacctcattttttcatcaatataatgggaatagtaatggcatctacttgcttaggttggcaagactaagtgagacagtttaagtacctggcaatggcttgtgttcaacattagctcttgttattacatattaaaggcccttagaaggaaaagagattttgcgttatattttttaaatgaagcaatacaatcattttttatgtatatatctagttgaggagaaaaaattacagattttttcccccttactccaagataatctaaacagattttactctggatggcttaattataacataatccatgaagttatagccagggggttaaataagaagttgatgacaaacttggtttctctaacaagtatgcaagaaaactcaagtgccacaatgaacacccataaactgctgtcaggaggcaaagtccctatgaggtaataataaacccacgaggttaaggcaaaaccctacggttgtttctgcaaacaaatgtccaggaaactcaagtttgtgatgaaagaacagtcttgaattcaacttcagcagaacctttccctccctgggctccaaagcactatgtcacctacctctccactcaaatgccccattaagtaccatcctgttggagcttcctaacgcccctgctccctggtttcatttggaaccaactgagagacacaagtccctcttcgttgatcagggtcagttgaaagatgtagctgtcggcctggtagccaggtgggcttgctaatcctgcacctctaccttaagcttacccagcgtgaggccaggttagaaagtcacaggccttggcagcaggcagagagcctttactgtcatagtgaagagcttgccaaggacaggactgattcttcctccagcctcacctatcggggcagtcattgttccgctgtcaggaggagaggggccagaagggtcacactgaagaaatgtgacatgagggtggaggttcctgtccagcattcttcactctctatttaaccgaggctgactcattgcagttggcactaattttccattgccacagccctctccagccaggagggcctggagtacctgaggtgctgtttgccgggttcccttggtcctcagactgctcccttcagagaaagcacagaaagccttctctgtcccaaggagccccccttcccctcccccactccagctctgcatctggacacactgtcagccatcagatcctgaccaggtgctcagcctctttagggatatgtcacaatttgccgtgcccggtggctctgggcagcctttggacatgtagtggttgtgtcttggaatacaagagttgtgcctgaatctgggactctctgtgaccctgggaaaatcacatcagctctctgaaccccaattgtctctgatctataaaatgaagacagtatctacttcataggattgatttgatggacatatgtataagcagtgccagggacaactagtaggtggtcattggagtgtggctacagttattatacagttacacatggattccttgattccccattaagccctggtggatgaatgaggaaaatgcagcagggggtccatcctagaaaacccaacccactccagataatcgcgccagcctcacacctgagaagctgcttctacgacctgctgaggacataatgataaacacacacaagaggctactgtgtcccaggcacttgtcttaactcatttaacttttctaacaaccctaaaccta

SEQ ID NO: 55883 - DNA, 549 bp, Homo sapiens
gttccgctgtcaggaggagaggggccagaagggtcacattgaagaaatgtgacatgagggtggaggttcctgtccagcactcttacactctctatttaacctaggctgactcactgcagttggcactaattttctattgccacagccctctccagccaggagggcctggagtacctggggtgctgtttgcctagtactataaatgtctttacattacagtattgcctttgggtccaggcactcaaccttgtctatggcatgagtcacagcaactttttgcagaaagcaaccccaaagtttaaggccatttatatgacccttgttgatttggacagcttaacagccccatctccccatttagtggcactcagattttgctttagaggactaccttcttcccagtgtagtctggccaaaaagtgggtacatgacacaagatagcagtaagccaatctcatcctagaatctcaatcctgagagaggcttccaaaactgtcgactcctggctttctggagtgtggctgaattccccacccccccgcccccaaa

SEQ ID NO: 55884 - DNA, 2859 bp, Homo sapiens
gtgttgttcccctccctgtgtccaagtgttctcattggtcagctcccacttattaggccagaactctttggaccaaacaaatctgcagcttcccctacaagggcctttcctgcagtttgttccggaatgccaatccctaactctccaaagagtcctatctccgcactcacggcccctcccgtgttaagtacacatgcaaaaccaaggtttagtgaatatgtttcctaagatataggacataagtaaaaagaagtctttgcctttagaaagcctcaagcacttctgggcttggcaatgtctgtggcggtttggctgaggttcttaaagaggtggcccagaattttccatgctctacttttcaagagcttctaccagcagctgtcaaagatgaatgccattaggcaccccactctctcaccctaagatccattttatttaggcttttatctcctaagccactcagctaatgggatgtttttcttacagctaagttcagcaaacagtttctagtttccactgtgaaaatacagaggccacaagttttaggactgtttggcttgtaggggaggcagcctccctttctgcctctccttcataaactgccacgtaaatagccacattttggcaaacgttgccatctccctcaacattcggggctctgtgccttcttcagggaactgggagtaaaccgccaggagtggagaacttgaacaactgctcagggatcgcagggtacctgaaataattagcagccgccgcgtttgtgctgagcgctttccgtcaatcatctcaaccaccctgtgaagtgaagcctattgttttacccatcaagtgctgttaaatacttccagaaatgaccagtgaagagcctgggtatcactaaacggccataaaaggcacactgcttaatgttggttttttttgtttgttctttgtgggttttgttcgtttttgaggcggagtctcgctcttattgcccaggcagtagggcaatggcgcgatctcggctcaccgctacctcagcctcccgggttaatgttgttttttgaaaagtcagcagtcagactctaagaagggtgcggcccgagccgacccaagaaaacaaaacatcacgttgtacttaaaacgtccgtttcggccgggcgcggtggctcacacctgtaatcccaacactttgggaggcggaggcgggcggatcacgaggtcaggaattcaagatcagcctgaccaacatgggaaaaccccgtttctactaaaaatacaaaatttagccaggcatggtggcgcatgcctgtaatcccagctactcaggaggctgtggcaggagaatcgcttgaacccggtacacggaggttgcggtgaacccagatcgcgccactgcactccagcctgggcaacagcgaaactccatctcaaaaaaaaaaaaaagtccgtttcgcccgacacctgcttttcaaaattacacatttagaccgcgaggggagagaggaactgccgtgaccacggagggctggcctttcccccggcgcagtttctctggaccgctagagcttcccttgagacgaaagcgatggcaggggcccgggtgcgaggctgcccccgagggaatggggggcgcgacgggggtaacggggctgcttctgggagagggcgcgctccccgtttctccttcctcgtagataaaatgaagccagcgttcggctaggacaccgggccgcggtgacgggttggaagggccaggcctcgggaggctcgcccggcaggggtcgagtggaaagcgaggacgggggtagcccccacagaccctccgcccgggcccagactgccgccgccacctcggctcggctcacccaaaccccagcaggccttcgggccttcttacctggcggcgcccaagatcctcttccagcctcgagccgcttctgcgctcagcccccgcattctttcgctccagcccgcaaggctccgccccccggccccgcccctcaggatgcccttgccctcccaggctcccggctcccgcaccgcgcagccgcacctcggcaggaacctcctcctctccctccacccccgcgcggagctcagcctcctggcccaggttctgagaaggccgggtggccaggacccaatgagcaccttcaaaaccccagggaactgaaagtttggggcgtcctcctcggatttgctatgggacataaaaacagtaggaaacttccaaagacttctgattttcccttttactttttttttaagtatattaaaatgtttttcaaaacgtttctgtgcgtcttgctggtgccctgggtgccccagggcctggctatcgggctatgcggccctgctgcagtctgaagctgcttcctactgcgaggcttgggcagcatccaaatagccatcagccacagccgcatccgtatccgtgccttgtgacttgtttgagacccaaacaaaatgttatgcgtttaaaagcttactgggctgctcggggaccagtgttttgaatgaacctcttcgagtgtctctatcaacttagctggtagctactgttccccagcagccaccagaggcagggacagaagagcaagaccaggggatccgcctgcatgagtctgtcccttcagggtggcctcgcctcagggactggattgtaggcatggtttcaataacacagcggtgtgaaagtttaagagtttttagtacttacggaccctgggtggtacacagcttgcctagaggacacacacacacacacacacacacacacacacacacacacggagatcagggagaacagggagagggaagggaggaacggacctttgggccagcaactttatccagttaggtttcctctggaga

SEQ ID NO: 55885 - DNA, 1498 bp, Homo sapiens
gggcgactttgcatcctctgcaaatatatacggtagcacaggaaactcacagccatgccaccccctgtcaagggtgtaaacaatcctgacagctggggggcgggctggcagcgccatttcttccaccaccccagacagtcccaagttctgaagaaactgggcattgaaccacccttatcagcaaccggtgtttatttctggaacagatgctagtaatgtgggaaacccaaggtgtccaggagaaaagatagtcaccggtatggcatcaccggaagtcagtaccaaaacataaaatccaacatcgaaccgtaaggagcaatgctgacagcaaaacaattctcacgcactgaagtccgaaagtgagcccggacagcgattctggcgctggggaagtcgcgccaggggagtaaggggttgcctatcttctcctctcgctcacccacctgcccaccccggcgccagactccgcaggccccggacccagcagagaagagcgcctggccgggacaggggcttttacacagcagcagggactgaccccaaccgggcgggcacctgcggggccagcgggggtccgcggagcgcggcggtgcggcacgagggccactacctccttctcttgcaagtgggcctcaccgaggcctgggagagagatatctcgtcgcttctcatacctgggcccaggacaggaggaagactcagggcgaggccctttccgcccccgtctcgccccggtccccggtggctccgcaggatgagggcggccctggcgtcaccttctggtgtcgcggaagctcgggtcctgtcagcggccccgaccccctttccccctgcctcaccgcctcctctccccatgcccccacccctgccatgcgtgtcgtcccattacttgattagatcccgatagtccaaaaaggataagatgaggagcaggggatcggtgggcagcgactctagggtcagcggcgccgtctcggtctccatggccgccatcttgcctggcccggtgcaggtctggccccgccctggccccgcccctgccccgcccccaccagcgcccgaaccgcccccagccgctctcacaggtttgttatgtaaccgccgggccagccccgccctcagggtgggctgaggtgcggctccctggagaccccgcccgctagccgggagccagcggcgcagtgcgagttcagcccgctttcttcgcgctccgcgtcaaatctctccagctctgttctcgcatcccggttcgtaaacttgcccagcccgggacccttttgttgccaaatctgcctcggtctgcccaactcctcctgcgaaattttacactcagtatgcaggaagcctcgctcaaaatctgacactcctccacgcccttggtccccaaatccattccttctctttgttttccaacccgagaacccctcgttttccccgctcagccttccccaccccgcttgtcccccgcacacagcagggccgctccgagacttgtcca

SEQ ID NO: 55886 - DNA, 778 bp, Homo sapiens
agtgacattcaggtatttatacatctccacctcctgggattttggttggggctgtgttcctcggtggagacagctcctgtcagcgccctctttcctacctccagctcactcagctctgatgatactgttccctccctccagctgctagaactgtgcctcttgctttttcagggttggtaacggcttccctcccccaccccattactaatccctgggcacctcactgtcccgcattggttcccttatctggttcataactctcttagtattgtccccactgaattctgtttagttatgttcctttgcatgttttgtctgtttcttgagaggtctctgactgatatcacttgcccttatccaccaaggcaagcagtactgtaacaaactccccaggagtacattgtacattgtcagagagctgaacaaatgctgacaaaatgagaactgctggttggggccaaacattccactctctcgatgacctcaccaccgaatgtactacatgaactccactgcattccagcttagaaaagctgaccaaagatgaatgggcttccaaggaagaagaaacaattcagccacccatcttttttgggggcttcttgtgcgacagtccaaaaagacattctatcctctattaaagtcaaagttctaatcttgtggccactagctgctgttgggatgaatgcctaacctctgattggcctgttttggaaacatcaccctttatacctggaaattccacaacaggctttatatacccaataattaactatat

SEQ ID NO: 55887 - DNA, 1513 bp, Homo sapiens
ctatatacattagagttcccacagacccctcctcaggttcaattaatttgctagagccactcacagaactcagggaaacactttacttatgtttattaacaaataatataataaaggagacaggtgaacagccagatgagagacacatagagtgaggtctggcggggtcccaagctcaagggcttccgtccccatggagggtcagtgcaccattctcctggcacacagatgtgtttgccaacctggtagctttccaaaaccagtccttttggatttttatggaggcttcatttcgtaaatacgactggttaaagccttgctaatggtgatctgctcaatcttcagctcctctcctctcctctccccagagatcagggagtgggcctgaagattttagtcctctaattacatgattggttcccctggcaaccagcccccatcccaaggctatccaggagccccactgagagtcacctcattcgaatgaaagatgctgctactattcaggaaatagcaaatgtcttaggagctctgtgtcaggaactggggtcaaagaccaaatagcagaacaaaagactctcctagcacccctatttacaaaggtcttgggagttctgtgccagaaaatagggaagacgaccaaatgcatatttcacaatatcacacacgtgcacacacctttcccccagagagctggttgttaaacattcaccagcaccgttggccttacgtcatctcaatataccttcctggagttgaaatcttctggaaaagatcaagtttttcaccttcgtagtctgaaactgaaagttaatggaacctgccagggtggacttgggtgacccttacaaagcacttatgataggaaagaccaaaaaaaaaaaaaaaaaaaaaaaacagaaaaactccccatgacgataggaagagcctgaagatcctgaaccagtgggttcacttctgcctcatgctaaggaaactgaaggttctgggtcgtgcctcaatgcccttgaagggaggcttcaagagttgacactgaggagctatgcagagggaatgcagggtgatcttggcttagagcaccttgaggaaatgaccaacagccctagtccaggctgtagcctgccagagtttcagcaggcatagaggccgagtgccagggtgacattgttgagcagaaacttctctttacagaactcagatttcaactgagtgagctggcagcatccaagagcagatgtagcaaactccaggctcaggcacttcagtctggcttccagctccaaagctttgaaagccaagctgtgttaaggccccaagttctagaaggcttttggctctaagtgaagtttctatgttagatgagatttgttttctataagtagcagaagtttaatttttaaaaaggagggggaagaggaagaaaaggaacaggaggaaaagatagtttccttggtctttaaagaccaacattcagggccgggggcggtggctcacacttgtaatcccagcactt

SEQ ID NO: 55888 - DNA, 672 bp, Homo sapiens
ccttctaccgcgatggttctaaccatccaaccagatgtatgaatctagaaagctaagagtcatctgtgactcctctctctcccttactgccctctcatattcaatcaattaccacgttctatttattctacctctaaaatatatgtaattgcatattaaatccattaaaatctctccatatgccctgccagtactttgctcaagccaccatcgcccctatgattatggtggcctcttgtattcttgcatccatatttgcctctctccaatctatttttttgtaaagcagccagagttatcttttaaaaatgcaaatctgattagaccaatatatcctttttcattctcctggggttcaaaatgaggtcacattcctttcaatgttcaaatcagatgacttggagccttcaacttgtctcccttgtgtggtaactttagattccaaaggtacagattgtcttgataagtggaactgggaaatttgctcatattctttttgcctgctgtgactgtcagtaaaatacccaattctatgtgttcttccatcctcatgtagtccttatccattgggtttatgatatgctgtgactaggcacagacgtctaccaaatagcccagggtaatccttattcaaagaaagaaagaattttgattatctaggggcccaacagt

SEQ ID NO: 55889 - DNA, 3783 bp, Homo sapiens
catgtaaatatgttttgttcataatccctagcacttaagagttcccagcacacagtaaggtgcttaataaatatttgaatgaatatataacagactttgcagctaaccaggatatcttgaggtcggaggctgctgttgtttctccaggctccctcaggatgcactgttgccagtcagcgttactcattttattccctagggaacagtgggtttggtagaactctcttctaaatctctttttcatagaatttaaattataaattggtcatttactgttgtcacacaatattgcgttgctgaattttccactgattatattcattttatttcctcccagaacttggtttcttgtttttctgctcactgtccacacccactccaccccaaggctggaataattctcttggagcaaaaaaatcatctttttctttgtatttcattgaacgttctctttacagtgttaggtaaacctaaaaaaaaaggaaacaaaagtctaataattcgtaatactcaggcctactggatgtataacatcatagggtagctgaagactctttgtgaggccagagctttaggatttaaaaagccaccaaccatgaccgtgtccgacacgttctacagagaactcctaggttactgggtgattgtttggtggggaagcggcgagttgtctttttttcaaaagacgttttggggtatggagtttgctcgctctgcatacagaaggaattctagaagctgggatcgcaccacccaccccacgcaccccttacttgcagaaacctttgccccccaacccccacccccaccccaaataagggctcttcaaggggcagttgccagctccagagccagctgcttgacacctattgtccccgtttgggcgtcaaacgatttcgcctgaaggaccctagcgtcgattgctctcaaaactcaaggggcctttccttcggccttgccggggccatccccacctgcgtccaggaggcgccccacagcgccggggccgggggacggcggagaagctagcgggcggcctcttccgggcaggcgttcgcgccgggcagcccgagcggccgcgaaggcccccgctctccgcttctcccgcccctcgcgacccagagggctgctggctggctaagtccctcccgctcccggctctcgcctcactaggagcggctctcggtgcagcgggacagggcgaagcggcctgcgcccacggagcgcgcgacactgcccggaagggaccaccacccttgccccctcagctgcccactcgtgatttccagcggcctccgcgcgcgcacggtgagcgccacccgggaccgagccgctgcaggggaagagggccgctgcgcccgggtgtcctttatctccggacccgctggagcttccgaggggcttgcccccaagtccccccaccccaccccggtcatttcccatgcccttctctgcccccaagccccgacctctctctttcctcccttctccggaagccggcaaaagccggccctccccggtagggaccgttgcagtggccgttggcggccggcgcggcgatgccccgcctccggcgcgagcctcggagcccccgggctggtaggccgagccggcggctccgcgggggaggggcgggtcggggggcggtgcgaggcccagccgggcgccccgctggcgggtcgcgcgcgcgcccgcgcactcttcctgccctcgaggcgcgccgcgccccctcccccacccgctcgcgtaggctaccgctcgctgcgcgttttgtcccgcgtctcgccccgtccgtctcctgactggccgctcttgtccttcctcccgctttttcttctctctccttgcggtctgaagatgccctcggccaccagccacagcgggagcggcagcaagtcgtccggaccgccaccgccgtcgggttcctccgggagtgaggcggccgcgggagccggggccgccgcgccggcttctcagcaccccgcaaccggcaccggcgctgtccagaccgaggccatgaagcagattctcggggtgatcgacaagaaacttcggaacctggagaagaaaaaggtgccaggagttggcggggaagggaggggtggctgcggccgggctctgcggcccctccgaccctggtcgctggagccttcgcttcttttcgtctcgggagcgttactaggtcccctcctcccaccccctggcccacacgccccgtctccacgttcagcgggagcttcgtgcccagaaaacgggctcttggaagaggcacttgtcacctgactcggacgcggcactgtaccccaggcctctttattactcttccgctgtgggtccggctttttggcctttaggagtgggacatgtgagggtgggggcctgtcgtcaggacttcactgtatggtgcccttctttccgtctctgaggcccgatttctctgacgagggcccaaaatgaagaggtccctgcgcggggggctccgggttcaaccgaccgcctcgtggagttggggcggcctgcgtcctgcagccttggggtctgtccgctcggttaccatgcactcgagacctgtcgagcgtcccctcttcttccgtaggagagaagtgtgtttagaatcttaaggtagaactgcctttccggcaggcccattttgaatgggtcttcgatttgctacccccgcgcccatgcgatgggctcccctgcgtttccctctttgtttcaattgtttaggtgtccccccgagcctcaggctcagctcaatcgcgagatgattttctgcagcgactttttgttcctaggggactgtgaaggggcgggggactgccacgatttagattcgttgggggctgggtcctggggagactggagaggatggctgggactcggggcacatggagagagcgtctaacatggcggcggctgcggggagagggaagcgctttactggagctgcattgtgagcacaaagcgaaagcagagggggagggcagagaccaggcagccgccccgactggcctccttaggcccccctctaaaaaaaaaaaaaatcgagccacacccacgattttttggattcaatatttagtccttgtagatcaaactactgaggtatatcttcatctgcaagtcagccttttgttttatgctttcatcgcaggacagtgtaaactcttgtttagaggggcgtgtgtatgtatgtagagaaaaggtctgggcagagtgaataattaaaatgagtaagatcagaggtggaaggggagaaacaaattagtcgtttgtaaaaacgaggtaattacgtctgtgactatcatgttaacttgaattttaccttataaagtaaaatgaagccttgataacttctacttgtctgcctctaggaaaacatatttataacatcttgaatttccaggaaatcattttgcagtgtttatgtggccagacacctaatagtgttacttgaggtgctgatatagtaactggctaaaacttgggctgtgggaaataagttgaagaaaactggtgatgtttaggtcttattaattttacttatatattttacattttgggagagttttaaaacatttagatttgatacttccctgtttcatcttcggtattgaaggttggaagttttacttgaatttcatggacttgggatttcttttttttcccaatcctttattttgataaatgtatgttttattataggtaattggaatagtaaatgtagttacatcaagaaagtaacaaaagtattttaagtgtaaggtagctacattcaaa

SEQ ID NO: 55890 - DNA, 2341 bp, Homo sapiens
tttttcactcatattctcagggctcattctttctaaatttcaggtccttgttccatccagtgtcaccccgtcagaggccttcagtgttcgtttctaaaatagtatccttagtcactttactcactggatacttctgcttaatagcatttaaaacttaacctagaattaaccacgaggggcaggaacattttggacactatcccttgtgagcagaatagtgcgtgggcatattcacattttgctgaatgaactaaaaaatttcatgatggatgttggattaaatgggtagtgctgctgatgacattaaaagtgtatctggggaaggggtttggattcagacatttgcggtatccaggaggaaacatcaagcagttgataatgttttttgaagttcagcgatctgccccaaagtcaagaatgcaacactatgtataggttgtccctgtagtcatgttcttggagttcactggaagcccagggggagtaatttcatttgacgaccatatacaggcctaatgggagcctgcaaagtacagcggccgcagtcatgggtagattacaggattcccatctgtaagatcagtactgtgggggtggagggccaagcgaaaccaataaaataggtctgttggccgagtttcctcaacttaacggggatcggttaaattgaacacaaatcgttggatccgtcgcgtttcgcgtaaccaggctgacgctgaaaaccctggacctacgtgggcaggccctggggtgcggacatctattttgcccttcttagccgaggtactttagctgggatatgaagagtgaagaggcaaaccgcagccaacacccagctaccgcgagcagtgggactaaaatgcgcaaccgcagtggacatctaggcctcagctccgcttctggtggcttacgtcattactcagcgacagccttgaggaaggtcccttctcgctcgccatctctgcgactttaatgcgcttgcgcacgtgctgtctaccagttcctgagagggacgcgtgccgcggagccaggcttactacgtgacccggacaccaggcatacgctaggggcagtcagctgtgccttctctttcggagttgttccgtgctcccacgtgcttccccttctccactggctgggatcccccgggctcggggcgcaggtacccaacgcgggagggccgggtatggatgccaagatcggtgtctgtgttcttcctgggtcgagaggggaccggcctcaggatgaaggctctgcatccggacggatacctggcctacgccgtttgtcctccacccctcttttggggcgctccaagataacagaatcacctctccaatacgcagccgctctcggcgcgtgcttctcgagcgtcctcggggatttgcgtggctcgataaccacctctaagtagtgcctgtaactggggagtcggggtgaatgggtgggtgacaacagttgttttccgtggagcttgcccgcagtgcctggctgcaggtctgggcattatacttagggtaatctgattccagatccttccacgttcttaaatccttcactgtgcacattcctttatactctttattcagcagtcacattcaggacttggttttgtttgccagtgcacctaaaatggtgcctgccacatagatgttatgtgtagatagacgaatgagtgagcgaaaaataatcatctccttcaaggccttccccatccaggccttccatgacagcttcagcccatagtaatctcagcccttccttcatctgaccggtccctcagtatagctattttttttttttttacatctaattttacctgtgttcttgttcctcatctcattctcttaaataccttcttcaagaagaatgcaagcttgaagtcaagggccttgtggtactacttctggggctcccacagtagctagagcaaaaggcagcccccattaattagttgttgattgatttttgcgggatctttatgtggccggcaacacaaggtttacaagttgggaagattggcgaactgggaagagctcaggctttggagtcaggaagacttgagtgtgaattctgtctgtcgtttttctgcctcgggatatttgaattctttatactttctcctttacgtataaattggggtccttgacagtgacttagtgttttatagtaagacatatgctaaaatctgtttggattggaaggttagaagggacagttaaggtatggtaagtttcagtaaatgagctttatgtttataatgcagtaggtaccagagtttctaagtagcatgtcacttttacatctaagtagcatgttacttttacagtgatatttctga

SEQ ID NO: 55891 - DNA, 817 bp, Homo sapiens
aaaaaaaaaagaaagaaaaagagtagcggcttcaagtcccacagggaggaatggtcctagcgggtccgagtatcactaagagcccacaaaagcagggaaaggcggcggcaggcttagagctgcaaactcccggggcgccgctcatgaggcccgctctgtgccaccaggggacgccatgtgcacagcctgtgctgggccctgactgcggctcaggccgcgcccgcccctgccctcggcgagcggctcagattcagctggggggcggggacgcgtttctgtcctctgccagctctggcaaggctccgtgttggagccccctcaggagaccacttcgccgtccaacagacctccccgccaccgaggggcccggatggcagcctgtggcttcatgacttcgtgggacacccacctgctctgcccagaatggacggagctctttccctgctccatcacaggaacaaggcagccctggagccctgtccctcactcatgctgttctctctgatgacagcccaaaagtcagcctcccggctcctgcctgttcccagcccttcccgatgccactcttgtccttccttacaaattaagccagggagcgggcaggcagccaggggcaggcggccaggcctccagccaccccaactccctcggggctcttggagcgtcccgcctgtgcggtcactgtggtctctccccttgacatgcagctaagtgctcccgccagggaaaagatgtccattctctctccttggctaggaagtaagccacctccagggagtcagcctgggctgccctcggaacccctatctcaggtctc

SEQ ID NO: 55892 - DNA, 476 bp, Homo sapiens
atccctctgcccccaggcacaaccagcaagggccacatctaaccagatggttgtcctttctcctccagacctcagaggaaggaggctcccgatctccctgggcaacctggatccctgacaagaggctctttcactttctaagcttgatctccggtgatgacacaccctgcagggcagcagctgtgactaattctgtgttttagactctgccttgtgcctggctggtgcctgggatgcaaagctgccagtgagaaaggcaccctggaagggtgcagggaggctccagctgcagagctttcccaggatagtgagggggtggggctggaatggccccagagaaggtggccccaaaggccagggcccacccagcatgcctcagtgctgtaggatcaggtctcagcagccagctgggaaagccacagcctggcacagggaaaggcaaaggccttgaggtgagagagacctcaggtttgaat

SEQ ID NO: 55893 - DNA, 887 bp, Homo sapiens
ggagcagtgagcatgatcgagtgatcctttgcctccctcttctaaaacagcagcatttctgctcagtgttgtactcgaatgtgctgtggactgtgctgaagcctcaacatttctcaatctctacacagaaccctaatcttccattgctcaacttttctctttctgcttgcccaacccttgaatctcagactcattaccttgttcctcaaagcctccacctcctcttccaccagcccctctgtgagtacagcaccgtggccacccggttgcccaaggagagacctgtgagtcacccttatcagttctctcccttctcatccacctcccatcaaccaccaagccttgctgcttttaccaccaacatatctcaaaaatccttcactgccaccaccccagtcaggctgccatcttcccctgcccccctggacctgcagcagcctcctcacccatcccctgcctccaggcttacccccttccccttactctggtcaccttgctccagctttgtactcttcaatgactctctgttagcctcacaaagaagtccaaactcctttgcacatctaactatcctttaagaatagttagcatcctggctggccgtggtggctcaggcctgtaattccagcactttgggaggcagagacgggtgaatcacttgaggccaggagtttgagacctgcctggccaccgtggtgaaacactatctctactaaaaatacaaaaattagccgggcatggtggtgcacacctgtaatcccagctactcaggaggctgaggtgagggagaattacttgaacctggtggaggttgcagtgatgagaacgtgccactgcactccagcctgggcaacagagtgagcctctgtctccaaaaaaaaactttt

SEQ ID NO: 55894 - DNA, 4010 bp, Homo sapiens
cagaggtgggattcagacccagtgtgtctgatactggagtccacactggctcagtctgaaggaggagaacacgaggctctccccatgcaaactcagagacagcactcttccttcagcactcaccaccccatcagcactgtgctttccttctttttctaaggtcaggaaattaaaagcaaataacaattatcctccacttaacacttcattctggctaagttatcagaacagcactggcaaaaggtggtcttctggtgaagtcaggcccggggcccaggagctcactgttaaacagtaaaataataacacacacttaacaactgcttaagaagctggcggccacagaacccagggggagataaaaggctggcaaagggtgatgtgctcagggccagcaaccccaattttcctaaaaaagagtggtgcaaagtaaacctcactccgaacaccgggctggattcacttcctcttggaatcctttgggcctgctgggggtgcacctgcttgtggagttggtgtggggactgcctctctcccatccagctggctcctccaattctcagaggggctccagcagggttagaatttagaaggatggaggaactactataaaactcgacagccctgaccaggcgcagtggctcacgcctgtaatcccagcactttgggaggccaaggcaggtggatcacttgaggtcaggagttcgagaccagcctggctaacatggtgaaatcccccatctctactaaaaatccaaaaattagccgggcgtggtggcaggtgcctgtagtcccagctgctcaggaggctgaggcaggagaatcacttgaaccagggaggcggaggttgcagtgagccgagatcgctgccactgcactccagcctgggcaagagagcgagacgccatctcaaaaacaaacaaacaaaactagacagccccacaagtgtggcaaatttggaatccccactgggaatgctggctcagtggcactttggtgattcatctatggtaaatatcagttctgacacagacccagaggatgactattaggtgcctgtaagaaaactagcagggatgctacattgctgtttaatttttttgaagcaaaaacttaataaaatgccatctgctcactgccatttctcctctttgcaaaagagtataaaataaagccagtgtaaccaagcagatcaatttcaggaaattaaacctaaaggtgaaccctggaaaaaccagtgcaatagtcacaacattgggcaatgtggggcagaaaactaacattcgagctactgagctttttcctgtggaaaaatatctctgtgttatttagaatactttttaagagattctgggtggcctctctccaaagtattgatgtaacacatgaagaacttagtgacccagggagcatgagtcttggaactactgcctctttgaaaagaacagtccgccacatgaccacggtcctttgtcatacgctgtccttgacccgcagtgggtgagcacactaattcctgtaagccaatgacaacacagagccacttttctattaaggcagcacattcaaaacacacacacacacacacacacacacacacacacacaaagtaaatggagaaattaaggatggagatgaagcagtcgtagactcagtaccttaaatatcagccttcttctcaacagccactaaaagagtggttcgcttgatgctagggtcataaaaatgctttctgccctactatgctttccaaactttttataatgaatatggcttactggcataggaacaatgactgttttgagcaatatgagagaggggatgagatgtaatcagaggcagaggagggtgacaaaatgtttcttctgagcaaagaacacccataatttgaattatggtataacatttgttatctgaaattaaatttttagataaaggaaaaagtgaatgttaaaaataccacttttttttttttttttttttttttaaagtcaggttcttgctctgtctctcaggctggagtgcagtggtgcaatctcagctcactgcaaccttcacctgctgggctcatgccatcctcccacttcagcctcccgaagtgctgggattacaggtgtgggccactgcacccagccaaaactatcgctattatcttgttacctataaagagcctagaatttatttctgcatggtatacttttagatgattcttctcccattattcttcatactttttaacaaaactaatattacaattattatgagctcatggaggttaaaagaaaaaggtacatgaaaggaaaacctggttgttttatagaaattttaccaaaaaatgagggggtactgcttttggaagaaactcagggagaacccattctaaattgctaaccagtagatgagacattgtctgcatgcctcattccaagtatctatcatctggccccttcgcctggccccaggtggtggtgactcaggcactgcatcaccagtgggactttctgtggcatcttgctgatgctctgccctgccgtgtacctactgctctgagcctgtgtgatcattctacagctacagtggccgaatcaccactggtgggatgctgccattgctgggcagggggtgagggagggagaggaggcaaagccagcgcagggagtgacagctgagctgcatccttcccctgctagggatcagtgctgccagggacagaaagagggcagtgggtgtgacctctcagtgccagctcagagaggaagaaagggatcaaaagggcacaaacacaagtctctccttgagagtttaaggaaaagatgcaaacatcacaaggcccagggcagatggccaagatgtttattaacagaacatgagtatattcatcagagaatattcatcagagatttactgcactggagtcctgcttataaacataacctgcttcaatcagcttcggttccaattccaaaagggattgatcattagactcttcagacaattaaagggcatgagtcagagcaatgaggttcaaaacccagctctgccacttactagctgtgtgactctggactagttacttgagctctctgagccacaatttgtttctctggataataggcctaatcatacttcctaattcacaagattgagcattaaaacaggttttgtaaataagcacttagcaaaaggcttggcacacagtaaagcatatagtaaataaaaatatttttattaatagcctgattcctagggctgatggcttcaagacaaagaagtcatcagatactatataaaagttattgtcactattaggaaggagggatagacccaaggccactcgattctgttattttcttaaaggccactaggatccacagtgatttaaaaaaaaattgtgatttactcaccacagatggctcatttattctgcattcattcactcatttattcaacaactgtgtaatgattacctaataatacaccagaagcagctatgctctggggatatgaaagtgaatgggggtccctaccctcatgaagttggcagtctagtggaggagggaagacagtatgccagccaaataaatattggatacaaagggctgtgatgcagtcagcacaaggaatccaaactaaggatctctaagccagactacctaggcttggtggtcaaggaaggcttcctggaagaagggacacctcagttgatgatgagcaggtatcagtctgctctgaaaatcctctgtgctctgcctattcatccctccctgcccaacccctggcaaccactgatctttttactgtctccatagttttgcctttttaagaatgtcatatagttggaatcatactatacatggccctttctgattggcttcctttacttagaaatatacattcaaggccgggtgcagtggctcacacctgtaatcccagaactttgggaggccgagccaggcagatcacttgaggtcaggagttcaagagcagcctggccaacatggtaaaacccc

SEQ ID NO: 55895 - DNA, 1004 bp, Homo sapiens
gagaaacaggaacataatgaaattatttttcacctaatgctgaatcctgtattttgtggacatcttttcaggtcagtgtgtttggatatatatttctttttaagacctacacagtttccagggtcatcgctccctcaaatttgaattgtcagcttgatccctctcagaagactagagaaaccatacatcccagggcacctgaagcagggccaagctgggctgcaggtattttccacagtgctctggcaaggccttctccgtggctcagttagggggtttcccttctcccctcccctcccctgttggggtgggggcaagggtaagagcgtctccctggaggaggtgcctaaagcaggctgtgagtcactcagatgagcttccgggtgaagtcatgctgagaagctatttgcagacaccttactcaaggaggcctaaggaaagcatggggggatgccatctcaagcgagaaatggagaacttttagattctcccctccctggcctttctagagcagaggctgtaaccggaatatcagagacacagtaaattacctgggatttccccatcagggagattcctgggttactctcactgataacaagactaactactcacacccagggtcccagggtgaggctgggcaagggaggcaccagggctggttccactgctcagaggagaaatgcaattctctcctgtgcctcaaagtccagcattgtgagaacacctcggatgccagctctggctccgcctctcacaaaacctaggtaaagtgctttgtgcggaatcttttccttatgaaaaggcagggctaccaggcagtgccaagccctgggacagtcaggtaactaattgcctattgcgactcccagcttacagggtaatgctacctgctcctgcttaacctcagagactgggaatcccagttctgccacagaagagggcccttttagtttccctgaagcacttatacagagattattgtgtttattttatttatttat

SEQ ID NO: 55896 - DNA, 952 bp, Homo sapiens
caaaattaaataaattttaaaaaatatttaaattagcttcaaagccctatattatctcccatactcccagcctctctggctacccacactagctgcctccttgctgttctcaaacatgctagccacagggcctttgaacttactgttccttttcctgaagtattcctttcccctggcatctgcatggctaggtccctcacgaccttcagggcttttcccaaatctctgacctgtatttgcccacttccagctctccctagtcagattctctgcaataacttctccataaaactaaccatcaaatatatgattcattctattattttattgcctgtcttcccaaatactatgtaatctccatgagggcagggcttttgtctgttttattcattgctatattcttagtatctagcacagtacctgggatacagtaggtactcaataaatatttgttgaatggagatgtgccatgacttattcatgtgcatttgaacaaataccaatccggtacctaccacgtgccaagtactcaacatatatgagccattaagtcttgcaacagccactttataaatgatgaaactaagacatggaagcagagtgactggcctgagctcacagcctgagctgggattcaagcctcgctctttcccaagactattctttccttgtgtttgatcccattaatcatcattctttttttttcttttgagtcggagtctcactctgtcgccgaggctggagtgcaatgatgcaatctcggctcactgcaaccttggcctcccgggttcatgccattctcctgcttccgcctcctgagtagctgggactacaggcgcgtgccaccacacctggctgaatttttgtatttttagtagagacggggtttcaccatgttagccaggatggtcttgatctcctaacctaataatctgcctgcttcggcctccca

SEQ ID NO: 55897 - DNA, 3520 bp, Homo sapiens
cccaggaaatcaagaccagcctgggcaagatggcgagacccccatctcaattttcttcagaagttaacaagataatccccatcttgtattcacctttagatagaatgtaaaattggttaccttttcattctaacatgtaaatgtttccccccttcatcatcactgaaccatatcaagaatttagaatctaaggctgagtttaagtcagaaacaggccacagtccccaagagctgctgggaacagctggactcttctgaagggtctgtgaaagttccacacattgattgagcctcctggccccttgtttgcttcaacaaatgaaagaagcaaaatgcagaagctgcgaggagatggctcgggccctgcgttggaaatctctctccatggccactgcccacctcaactgtgctatggagttcccctcacttctggggcccacaacaactgcacagaagagtgggcttttgccttttataaataaagtcaagattcggtcatgcttgtgatgaggccttctgccgcagatctgtgaagtgcctctgggtcacccctgagtcagacctagccacaccctcctgatctaaggccttatcactgaaccaagaaggcaggagggtgggagcaaggggccaggaggacagccagttcccaccacgaggacacccagactactctaggactccggaaatcgtggggtctgagctttacatgagatagtggctgaagggagcttggcacacagtatctgacacgcagccacaggaggggcagggaggttggtgatccagcacttacctcatccttgtcacgcgcccctgtatgtaccaccccactgagctgagtggctgctggaccatggcatttttgcccggcgatggaggggggtggctgaaggagtaggaatgctgtcagaaagttctagaatagttgtaactgcattaactctgagggaagaagaggcattggtatcctaggggagaagaggattgtggggaaaagaatgaccaggtggggtcttcctggtgtaagggtgtatgacagatctaactaatcaccacaggatgatgtctcctgggcacttatgtggcatcaagctaagtggctcatgcgggcattgcctcagctaatcctcaaagtctacaggacaggcacagtccttgtcttcattttccagaacagggagctgaaccttagagaagtccaacaacttaacccagtcacagctaggcgggaggtaacctaatgaggacttcacctcaggccgggcctgaggtaaaccaaagctgggaggaagctgggtgtctcttgtgacaggacctctcccctccacagccctgcccacctcactgacagtccgaatctgggagcctgataaggaggctgaggactccaggaggaaatgcctgccagtggaactttctaccttccaaagatcatcacacccaagataaccatggcttcttaagaacactgtaggtggggagagggttctttatctctacactgaccagcaaagagacgtgtgagaacaagcaacccatttcaaatcttgcttctgcacaaggactagagactagcctgttgacctctggcaaatatatatatatattttagatggagtctcgctctgtcgcccagcctggagtgcagtggcatgatcttagctcacttgaactccgcctcctgggttcaagtgattctcctgcctcagcctcttgagtagctgggattacaggcgtgagccaccacgcccagcctctggcaaatctcttaaccctactaaaccccacattcctcatccataaccctgcccctcctccaacaacagaaatcactgacactgcaagcacccttgctcctgacatcccacttgatatcacctttgatccgcaaggataatcctagaaaatatgtcctagtcttacgcgattttacagatttattatctatctgtgaaaatgggaacaacaatattgattctcttaactttcttgaagagtcaatgagatcatttacggaatgtgcttggcacagactcagtgaaagataaaagcttgaagcctatggttagacctaaggtcagccacccacccagacccaggaccaagccctgaatgtctagagcacggttcttcgcagacacaccccagccctgggtatcagcgtggtgactcagcagagggcattccacaggcttataaaaaagttgtctgggaaagccccacctgactgtggccaagatccctcagtactctagaagagcaggggacctgtctggagaaaggataggaatttgaagctttgtctctgaagtccagaactgcaaaacagccccccgctgaaattcacaaaccactgtttccttcagtgcctgtcccaagctaggccctgtgctagccctggagatagaaaagagacttggttcccttagcagccagcctggactcagcaggccaaaccttccccaggagggggatgctgacctctggagatgttgctgctgaccaagggaggtaattgtttctttaaaaaaaaaaaaatcactttcagttgttaaatgaataaaccactctaaaacacttaggagataagaaggcaatctatcaggactcccctgacctttgaaaactcaaagtgaaaatggaagcaggcccaggctgaccgatagtgggaaaagcagatcagcagcagtttcaccacaatacaaagagactgaaaaccctgcacatttttagcatgtgactagaataatccacatcagggcccctagcacaaaatgcaggacaataaaatacgcagaaaaacagggatatctcattgtaactgaacgagcacttacttgctgcctgcattaagccttttatgaagatcatttcatttaatttcatttactcttccccatggtgaataagagctgggcttagagttgttggcctggattgttctaaatattcactctcccaacccccaatgtactcgctgtttgactttgggcactttgcttaactgctttaggcctcaatgtcctcatctatcaaactgcgattctagggtcccttataagattgttgtaatcccagcactttgggagaccgaggagggtggatcacttgagcccaggagttcgagaccagcttgggttacatggcaaaaccacgtctctaccaaaaatacaaaaattagccaggcttggtagtgtgtgcctgtggttccagctactctggaggctgaagtggatggatcgcctgagcccgggaagtcaaggctggattaagcagagatcacgccagtgcactccagtctggatgacagagtgagaacctgtctcaaaaaattttcaaaaaaagaaaaagattgttttaaacactaaatgaataaatctccataaagcacttgccttaggatctggaacacaagtcctccataaatgctggctactattattataatggctgataacagcctctgactgacacatgcctcatctctgtctcacatacattaaaaccaaaacttcca

SEQ ID NO: 55898 - DNA, 1587 bp, Homo sapiens
ttgcaacaaaagcaaccagcaggataaggcagggtggatggagagaggaggtgtggtttaaacataagttcttttgcaggttctcagcttttaattagcacacctgagtgcagacccctccctcatgcttataaacacaggtctgctcaggctttccttttattgtcacttgtcacaggcccaggtagccaaagcttatctggattggaagtgctaggctcttccctgaggctctcctgcaggtggctgactcattcttgcagaggctgggaagccagccaggtgcagcagtgggttaagagtttccattaccagcccagggactcattccctaggcatgttgtaggcaccctctggggacagagctcaattctaggcacagtagggaaacaaggatgaatgggctgacctacccccaggagccctatctcctagcccacaaagtgacacacgacacacatcaggcatgcgcaagacactgtcctcaggcccgaccccagtcccccactggtatctgccatggaggttgcaatttgtggcacgggagggagaacataaacccatctgctaacaaggctggtgtgtgtgagtactgcaggcccagacggttctccttaacatgctgacgtctttatggagtctgacgtttggctggctttgctctgtgagatcagtggtcttccagggtaagtttcccaatgttttctctaagggaagtaacacaggccttcttactaggcttctccagcaggagaaaaagggcgagagttttagggccatcaggagagtctccaaacacatctgatcttctagaagcagcttggagggaagccctgaatagggagtatagtgagcagtctcgaggccgagagttcaaagcagggtttccctagctctctcggcctcagtttcttcctctgtgagatgggctcttcaattcacaccatccctaggattcaatggcagcacatcaggcacatggcgatgtgtctctgtgctgtggacaggaagaacggtcagaggtctggatacagccagtgtttctgccataacacagaggaagcaagagcagaccaatgcctttggaaatgttgcttcatggcccagatccatgggaatttgcccagctactcgagggagacctttcaaacttgctcagaaaatctgattttctttgactttttgctgccagcaatttagctgagttgggtggttactttgtctacctttttctttcagttttctcccaagctgatcaaagaagcccaaacggagactcaaagccaatataatagtcaactacaatgctctccctgttctgggaccagtggtgggtggcatggactggccacacttcaatccctcctgggacattaaactgttcgaagcgtgtcccacagctagtccagggtgaatgccacatttctgctggcccgagcctgtaatgcctgctggccctggccagacccctcctcatcccgaccccacttcctcatcctcggaacaggggcttggcttcattctcctctaaaactttgagctcaaagatttcacaatatctctcctattcaatgtccttggtcacca

SEQ ID NO: 55899 - DNA, 867 bp, Homo sapiens
tatatatttttttcttttttttaaaggcacacctcagctggataacattaaaaaagaaaagaaaaatacaggtcattttttcttggccaagaagatatcattgtgtctaggtgggaggtatgaggtcagaccaatggttctgcagaaccctgtttcagacctgggatcccattaggcatgcaggtcagccacacagtcttggccgagtgcagtattgcgcaaacgtgccttgagtttccaatctggaaacatttcctgcttttccacttccagccagctctcatcctcaggcagaggttgccagccattccagactaagcgggggtgatgacgtcagtggagagaaccggaccagcagcctggatgctccgactcccgcctggggcctgaatcctggcctctgaaggatgtttctgaggtggtagtgactcacctgggctccaggctggcaaagctgcctcgagagtcctcattcagctccctgcatcttgactatttctgaggtaaactgtggggacctaagcccacaccacattgaatcccttccccaaacccaacaggaaacatcagattccatcatttgtaatctatctggcttggatccatgacagcattccttacgcaagccctgactccaacagggctgaagcctgcaggccgaggctgtgctggggagtctgagttacaggcaccattctcctcccctcctggaatgagccctattaataatggctgaagaaaagcaggtaaatgcccctcctaccccagggaaaaacatccagccctgctgtagaagccacacacacttgactttctccagagatgtttagggcaggggaaatgggggaccatggcatgtcacatgcc

SEQ ID NO: 55900 - DNA, 2437 bp, Homo sapiens
tcctgacctcgtgactgcctgccttggcctcccaaagtgctgggattacaggcgtgagccactgcacccagctagatgactctctaagtcacagcatgatggaatcaaaaggtggattttttggaatcaggaccctttgggcaagttacttcacttctctgtgtctgggcctcctcatctgcaaaacggggataacaacagtagctccgacctcctaggttactgtgaggattacatgtgtggacacatgtgatgagcttggaatacaggatacagggcaagcatgcaatggatgtttgtgattattagtcattgctactatatgtaaatttccagcccatcacctgacacataacaagtcctcaaaacagcctactgactgaaagaagatggctgattttatttctcaggccacagcttgtttaaagcagcaagaaatgacagctaacagcattagaagggcttaaacatttacaacacaaaaagcaggcataaaaacttaagactgcagtgtggggccatttaatattgggaccaacattcgatcacatcttggggtcactccctgagggcacaagcactgtaagaatactcatggatcttgagtcatcaagaacatagtcacatctatgcagctcactcactgtttaagaaaacaggaaactggccaggtgcaatggctcacacctgtaatcccagtactttgagaagccgaggcgggtggatcacctgaggtcaggagttcaagaccagcctggccaacatggtgaaaccctgtctgcactaaaaatacaaaaattagctgggcgtgggtggcaggcgcctgtattcccagctactcaggaggttaaggcaggagaattgcttgaacccaagaggtggaagttgcagtgagctgagatcatgccattgcactccagcttgggcaatgagaggaaactgtctcaaaaaaaaaaaaaaaaaaagaaaagagaaagaaagaaaagcaaagaaaacaggaaactgtgtgaaatgcttttcaaatgctttggtctcgaagaattaaaattttattgcaatgacaatgttttggcacttacaaggcatgaatgtgctgcaatcctgaatgcctctatggtctgataggctgagatttcagcagaggcagatttactacgaagccaaagaagcgtaaacttcaggcagcctctacttatacaggttgcttccaaaacttctggagggggcctggcaatgtgttcacatggacgtgtgtttttttgccaaagtaagattagccactgtcagttgataccattgtctctttccactgcaactgaccacatgttcccatgcattgggtgggcattttggggaccttgttgaaggaaattgagttggggatacagtcagctgggttcagtggttagcagtcacatccacttagagttaatacatcactaacaatcccttatgccaatgacttccagaaggactcctattgcaaaatgtgttatgacacaagggtgcaggtcagaggttatatcaagatatgaacgggcattaccgtgctcaacaccagaggcagtgctgggagcagaggagaaacgaaactcatgacggacagagtcagaagctaggcttgtggaaagttcttccaaatctcactgctcagaaatgaaagaaacgtggccacgatttccccaaatttgacaacaatcctaatacttgacatcaccaataatgagttatgaagttaaaaaaaaaaattttcaaaaccattggagaaaagaaaaacaaacttttggttaactattttaaagggaagtctcaattgttcctttagaaaacagtacagaatcattgtcataggaagaggtgatcagagtcaaaaaaaaaaagatggggaaaaacagtattgtcaaggtgtgtcaggcagttaaagttattgatttgtgatatgtgtgtcagctttaacaaatttttctcattttaaataaatattcacttttatatctcattgtgcatttgtaattttggattcttttccttaactgtattaacttcaggtgtcaggaaacccggatcactcctgacagcggcctagcgatcacttgggcttgaccttgacattgagtaacagtgatagtaacttctattacattgagcaatcgccctgcatctaaaagggggaggagcacagtatgtatgtctcctgctcatcaatgacaggagctcagggaggaaagcactgagagcccaggaagggctcgagaagtaatccctcatccatatgcagatgactttcaaatccttatcttcagatccattatcccattttcactttaccactttattattccacagataccctaaacttggcccctgtcctgtgtctctccctctctcaattaaagctccagcatctaccctgctgtgagtgccagaaatgtgagtc

SEQ ID NO: 55901 - DNA, 3925 bp, Homo sapiens
atcaagtggccagggttgctagaacaaggctaaaaatgccgatgttcctctgcttcactcacactgcagcaaggaaactaacattccagacaccccgtccctgggcaaggaggaggggagacagccctcactgacagcacccaacgtgaggctgtgttttgtggtcagtcccagattctggccatcacagtggcacggatcatacggacactgcaaaagtcgcaaatggctccctttcatcctttctttcaaccatcagcaaactggggctctctggatagacaagaactcctcacagtaggttagcactcgcctttcagcaatgatttcattttaaactcaacttcagatccagcccagctctgactataatcacagtggatgggctgagccttctgctcctctgggaggtaaaagatactcactggatcatttcctgcactctgctcttttgctaccccaaaacccacaggcttgtcagtgaccgagtggcaaacgtgtttgtcgcaaatatttcatcatcaactacaaggctgagcagtgaaaataccaaggccaagttgctgttgccactggtgctgctgaagcccagctttaagataatccatgagccccagaatatgtttttaaaaaaaaatacagtgtgtacttgaatgtgataaaaaccgcaccaataacaactgcacacacagagtttccaagaataaataaagcttggctgagcctgtcctaattgactacattaagggtatacaaaggacctgtgtgtgaccaagacagtggtagcacagaagatatgtgggaagcttgtgatacagttcttaccctggacacactaatgacctcactggggaagcccgggaggcacatgggaaagaacagaaagatctggacgaaacactccagccccatcagtgtctgcttcaaaactactgtgcctgaggtactcagggcggtagaggcacaaagcctgtttgattctgctctgctcataggcaactgactacaaaaccaacagaactagaacaattccaaccagagacacatgcaagaacccttggtacttcatgccataggtttttggatgtttaacaaagacatgacctctcttgtgtaagttaaacatgtcacctgtgccatctgtttatattctagatatgcctgatgagcctggcttaggcaatcttgccctctgattccactgccctctgttcagatctccatcacaatcattagtacagtgtttacaggctttctaccctggagactataatcttcctgggcaagggagttgggggtttgtctcctctcccgcatcttgtatttttcccttgattgcgctctgcccacagactgctcaataagggggcactggcaatgagagtgcgaaaacagtaagagaaacacttggtcaacgaaattaagaatgggccaggcatggtgtcttacacctataatcccagcagtctgggaggctgaagcaggaggatcgcttcagtataggagttcaagaccagcctaggtaacatgacaagactccatctccacaaaaaaatacaaaaattagtcaggtgcctgtagtcccagctacttgagaggatgaggtgggaggatcacttgagcctgggaggcggaggttgcagtgcaccaagatgttgtcaccacattccagcccaggcaacagagcaaaatcctgtctcaaaaaaaaaaaaaaaaaattaataacggctttttaaaaaaatttcagatttggggatacatgtgcatgtttgttgcatgggtattacacacataatggtggggattgggcttctagcatacctatcattcaaatattgaacactttacctaatatgtaatttttcaaccctcacccccactcctcccctccccacgtccccctcccctacctcttttttgagacatagcctcgctctgtcacccaggctggatgaagtacagtggcacaatcttggctcactgcaacctccagctcctgggttcaagtaattctcctgcctcagcctcccaagtagctgggactacacgcatgtgccaccatgcccagctaatttttttgcatttttagtagagacaagctttcgccacattggccaggccagtctcaaactcctgacctcaggtgatccatctgcctcagactcccaaagtgctgggatttataggcatgagtcactgtgcctggctccacgttttttggttcctagtgtctattttttccatctttatgtccatgcatacccattgtttagctcccatttatgagaacatgtgatatttgattttctgcttctgagttcagttaggataatggcctccagctccacccatgttactgcaaaagacatgattccaaggaatgacttattttaaaggcaacccagagaccatctagaaaagtcattctcaacactttcccaaggaggaagcttggggtctgagggaccaagggactggtctaaggacactcagttggctcgtggcagggccaggatggacctgagtctcagctactaaatacacaatgacgtcataataaaaattccaacttagatttctaggcagttgaaagaaggtggttttactagactgtgaatcagccagtaagtacagagtccaagagtccagaggattattttccatttaatgccagctggggagtcagaactcaatgttctgagttgggaggtgacccataatgtgataaggatccagcatgttgctctcaggtcatccttgggcagcttaaccactagtctaagtaatctataaacccccctgtttggagaaacaagatgttttgatggagaaataccaagaagtgtcatctcagggctaaggaaggaagcttgcatgcctttcaaaggaactgcccagttattagcctgagtcagctgtaatgtcaaaggcacctctttccagactgaaatcctggagccagagactggcactgtcttagcaaggatgatggccaaggcccctggagctgggggataacatcttgtcagccccacagagtaataggaacagcgctggagtagacaccacctcagactctacaacagatgacccagggaaaggcaatgaaatgaaataaaatgcttcctggatctgacacacaagaagccttggctcaggccttcttccccacaaccccaccgacttcagatggtcattatacagccaggtgaagaaggtcacagagacctccccctttgtgataaagtcagaagagaccccaaagcttactgggatctcttttggctttatcataaaggggcaggtcccaccaggaccagctgatgcctgcactggccagtatctaggcagcaggggaggagaaacctaggtgtgggatagctccaagccaaggacaggtttgggacaaaaagggaacagccaacatacaccaagtatatgcagtgctgtctgtcacctctgaagtcattaccaaggcgggctgtggagtcagccagacctgagcgtgagcttcccactgtcactcttcacactgtgtggtaagttatttaacccctcccagcctctgttttatcagctggaaaatgagacaccaggactattttattttatatttattttattttatatgaagtctcactttggcacccaggctagagttcagtggcgtgatctctgctcactgcaacctctgcctcccaggttcaagtgattctcctgcctcagcctcccaagtaggttggactacaggcatgcaccaccacgcccagctaatttttgtatttttaatagagatgggtttcaccatgttggccaggctggtctcgaactcctgaccttaggtgatccacccacctcggcctcccaaagggctaggattacaggtgtgagacactgtgcctggcctcgaactcctgacctcagg

SEQ ID NO: 55902 - DNA, 2257 bp, Homo sapiens
ctcccaagtagctggggccacagatgtgcaccattatacctggctagtttttgtatttttttgtagaaacggggtttcaccgtgttgcccggtctgatctcgaactcctggactcaagccatccacctgcctcagcctcctaaggtgctaggattacaggtgtgagtcactgtgcccggcccaacctatttgatatctgtatgtgatttgagacagacaactaaaaccgcactaggatctttggtgcagtcctgcttcttccatacacagctttccccacttcagtcaatggccactccctccttccagggctcagaccatagcaacttggtgtcatccttgattcctctctcatacctcacacatccaagctgttggcaagtgccagtggctggtcccgctgcgtccacacttgatactaaagtcaatttccaacacaatagagagagtgaccttgtggaaatacaaatcagatcaagtcactctgtgcttgagtccctccaatgcttttcagcttactcagaactaaaagccaatgaattattacccaatggcctaccccactaaccaccccaccatttcctctccaaccacatctcctgctacactcgccccagccgcacggaaggagcttctccttggtggctccttgaacccaccaggaatgcttgctattccctctgcctagagctgtcttctccagccaggctggcctcaggtgattcccctcactctgcctcattatccacagggcctgcaccctgccctccttcaggccccttttattcatttgttgcatcaccagctcctggaacagtgcccagcacacagtcctcaataaatatttgttgggtgaacaaacggatgtaacccaaacagaactcctggcctctcccctacacagtcctcagactccccacccccgccatcatcatttgtctcctcaaagaccagtgtggtagaaaacactacttagaatactttacaagcacccactggacaggtgggggacattgcgatgccttctcagaggcagccctacccctgaggccttctcacctgctactgaattgggtcccagcatagtcctggcctgcccagctggtactcaagtggattaagtccagaagaacagctgcaagcaacttgcttccaaattgtgtccccatgtacaactttaattacccggctgctgagatgggctgaagaagaaacaaccaggtccctggctttcacaaaagcaactctttttttgccatatgttctgcctctccagaagatttcatcaattttcaacttgggatttgacgggtagatgggccggttggggaagagaaacaggcaagccaccccatttccccagcctctcatactgacctgcccaagccctattcaagctatgtgactgtgaagtacatcagggttcagagcctgtatacctcggagcatggagctccatgtctcggccttcagcattcctggcagcctgtcatcctcagttactctcattttccctcctctttgaaacaccggccctgccaatggcaacaaacagcatttaaaaatatcctgctggattatacagctctgcctttgaaattcctcacaatgcctgtctctgtcccacatcgtataaagaagggtgtagcatatttaattttttttttctagctgctcccctgctataaatatccaagtctgggtaggcgggcttcaagcacatgctatatgaagtcacctcggagctggatctcaccacagtgccggcctgccaggacctggatgcagctgtcaagcactgaagcatgaggtcggccaaaagcatgtagcactcatctttctggggaaaggggcacaggaaaaccctgagtacagtaatcacaattaatcttaatattaaaaagacagtgtccagccctattaccaagccaggtcttcaaagagctcgtccagcaccatcctgggtgtttctttcccaaggatactaattacagcgctcgaccttaggaaaatgactgcacagtgtccatgtggggtctagaaacactatcagagacagaaaagcccttggggaatctagtctgacctctccacaccacagataaggaaacagagatccaagagatggaatgattcatgccaggtcacagacggggcaagctccaccccagaattttctggatccaaatcctcatagctctgtactggattgttccggatgcttgtgcacgtacacccacttggtgtgtgagcctca

SEQ ID NO: 55903 - DNA, 562 bp, Homo sapiens
atcaaggaagaaactaaggcacggaagtgaaacaacttgcccagggtcacacagctcccaagtgaagttatgaggaattacagccaggcagccccaccccgtgctgtgctctcaccagtaagcctggctgcatctctcacatcccagggcactgagtatgcataaggcacaaccgcatgtgtacaagcctctcattttacagtagaggaaatagaaacatagtgtgacttgcttgaaggcctaggtcagtaagaggcaaatcaatctgggactcaattcagactccaaagtctgggcccttcactgctttgctacatcgctgactcattctctccctgtgctctaaacaccgagatggagtcagcagccggacaccatgggggactcggaggaaatcaaagcccccttcatacaggctcttctgccaactccaggacaggtgcaccaagctccccaagaccagtgacctagactcaaatccctcttggtgccttctctccttcatgtattagcctttgctgagctgacccgcccatcctttagaagagcatcgcagtgtact

SEQ ID NO: 55904 - DNA, 1280 bp, Homo sapiens
tgactctgagcatccggggagctttgttgtctgccacagagaatcctgctctcttgactacccaggattaaggaggattgtttggaaagggggggcaaggaggaggttaaaacatggggtcgtggctgagtgtggtggctcacgcctgtcgcctgtaatcccaacattttgagaggccgaggcaggaggactgctggagcccaggagtttgaaaccagcctgggcaacatagcaaaaccctgtctctatttaaaaaaacaaaaggtggtggtggagctggggggtgggggtgggggggtaggtggtgccaaaagaccaacttataaaggaaatcccaaggaatgctgaccctagataagaaatagttctttggttggaagccctttagcagaagacatctgttttctagcagcttctggccacttcgcatcttcagggtgtcctgggcagggagttggtcttccttatttcaatttgcagttagaaaagctgggagaagcttctcaatgtgctgggcacctgttctgcatgaatatatgtttttgttttgttttgcatttacagttccacccttattcttgtttggcttatagggttaggtcttcagtcttttctcctaggagcctgcctttacttctttgagttcagtttgggcctcctctcagccaaaagtacagaactctttccctcaattatgaccactggagatggaaatcccctggccctccacttcctgccctggagctgctgttcccagtgttgatgccacaaacctggagggtgaggcacaacaagcagctgtgacatcatcaactgagattcaggactgaccttagctctgacctaagaggaagaaaattaagcagcagatgctcttcaattcccagcatctcctttggcagtgccagaatttaaaaacaaaaccaataatgtcaaagtaagccatgcttggtacagagtgtcttcaaaatgggcctaacatgtcaactgttctcgaaaactgggctaatcaaaaaacaaagcataagatctgagagctatagtccagtaagaaaaacaaacaaacaaacaacaacaacaaaccagaaaaacaaagctgtttcttctccaccagcatctagaaccttaaaggggcctacctggattcaaactggattcaaattccagttttgccatttaacatctatgtaatgttgggcagattatttaactgctgggtaccttggtttccttatctgtaaaatgggcatcatactatgcagtaagtacctacctaatag

SEQ ID NO: 55905 - DNA, 4006 bp, Homo sapiens
gacagcttggaaaaatcaggtctcaggagacaatctgtggttacttttctgggaaggggagtcggggtccccaggtttcatcattcctgggcacatataggtaagagcgaaccactacccctccatcccccaagagagcgcctgacagcatccttcagcccagcaaagcacaaggcgcagcaccagatcttgggcttcccacttccctccgcccatcttacttatccaaggttcaggtctttaagttgggaccctttggttgctgctattgagctggggaaaactagggggcagaatcagtcaatctaaccagctgttggggaaagacagcagctagagacctagtcaatcacggtaaagagccacggggcagtaagtttcatttcaagagaggttcaggaatggcttggtcaagagattcaatctcacccaatcaatgaacagcccgcagatagtaacaatgccacgcagaacaggatggagatcattcacaagtttaccctccaaaagtcagacacccttagaacaatctctggcaagtgccatgtaatgaaccctatcctcagaccaaacgttttctcccaaagaactggcacagccaccagctttgtctcaggaaattcactcccccagtagcccagggcgggatttcttgcctacccagtctgccagtccgaggcccgcgcgcttaccattggcgttcttgccgcagatgagatgctcatagggctgcaagacgccccagagctcggcgtcgttgttgatgaccatctccagggcctcagcagacacctccccgcctccggcccctccgccatcagggctgtggctggccatcaccctggcccggatctcctccaccaggttctccatgcaggcggtgagggagatggctgcgtactcgtggatgcgcacggagattcgggtgtccaccatccagcggaaaaagcgacccactgagaaggtgaggccgcagcgcgcggacttgccccggcgcagcccgtcgccggcgctcatgctgtacagggacagcgccttgacggctgccagcgcgcagctctcggccagcgcccagctgtgcaccaggcgcacggcgctctgcacctcaaagcgggtgcacttggcgtgcagcacgctcaggcgctgcgcctcgcgggccacgcggatcagtgccctgcggagcagcccggccaggcgcctcaccgcctcggcggagaactggggcagccgccggccgccagcgcctttgcggagcacccgggccacgtctccttcggtccaggggaactcctccagctcggggagccgcggacagcgcgagaagaggtcggccacttcggggtcctcgggcagcaccgtgttcaccgtgtcccagctgttgtggcggctgttcatggagccggagtagcaccaccaggccgccccgcggtgctgctgcgccgaagagttgagcgcctgcgagttggacttggaggacgagaggctgagcgagcggcacgagtccccggccccatacccggagtccaaggtcaagtcctccagcgtcttcagagtcgagctgtacgtcccggccatggggagcctgccgagggcggcgtcgccgagcgaggggcactcacaactccatgccctctttcccaagtgggcagaaacaagctctaggccctccgggccaccctccttcctctctgcgtcgcggggctcggcggccgcattgcctgcccggaggccgcgggaaggtggccgagatccgtggccagcaggagccccacgctcccggcgtcccgactcgcagctgccactggaaagaaccccgtcgctaccccccggcactcccccttgtccacctctaattcccacaagcagagagtcagtcctccacagagaaggaatcccgggagaacagggcggcggcggcagaaggaggaggcggcggcgcagggcgcagggcgcagcgcgagtccgggaccagccggcgagaaagcgctctgcaaacttctgcgctgcgccggccggcagcacagctgggtacccggctgcgtccgacatgcaaataaccccgggcggcttaccaatcaccggccgcgatgggcggggctgcaccaatgatctccgagggggcggtcactatgcagatttcactctgcctcgggttaaaccccgcggcgaaggaggcggggctggaggccgagggtcgggcacgcggctgggatgggggtggggatggggggggatgggggggatgggggggtgggggaagggcgagccagccaactgggaggtggaggtggagaccggaaagcagcggtcgaaacgatagctccggagctcacgatttaaagaaaaatgcaaaggaaaagctacagggcgctgccaccttcccgccacccaggctttgggcgttcgctgctcgctttcgagccctccgcagccaggcgtcctggggttggggccaggagaatggggagggccccatccaggcgctccacctctcctccaccttccgccaggcccctcccgcaatccgagatgaaacgctggctgtgtttggagggaggagggagtccctgcctctctttccaagtccgtctggttcctttgcgctgccgtctaggctccaataaggacagaatttcttaacctggtatctgatcaatggacgggccccaggaagcctgtgagtgcctccgcccatttgtggtttcacctgcagttttctgagtgccactatggggaaggggcaccaacttttgtcagattctcaagaggatccgtgacttccctgttacctctgtgtgacgataccacttgctgtcaggtgggtcctttttgtccgagatagacagtgttcttacaggaagaatgagaagaaggtggcagagcagtccctcgccctgggctgagctcggaacacctagctggatgcaggtgttcgcctcctaacgcgtgccggtgggcgagccgtatgcccccgcgggacccagttcctccggggtacaatgagtggctgacctccaggcagcgccagtgccaacctgcctccgggcgggtgtcccaaacggtccgccagagcgctgttggttcagcagtcccatgcccggtgcaggcatgtcccgccgctgccctgtggctactcacacgcacgtgcgcaaacggacctgtgccccctccagtggaaccgcaggctcaaggcggggattgtgcattcgctctccccaagtcagcctcccccactcctgaatggctcctttgtgttgcattttacacagttctgaccttgggccgtgagttggatatgaactagaaatgtctggtttgtctctttccttcttaaattaatggcctttacccccggtgaaactgctttttatttggcagtttcgcttaattttgcctttccgcgggtctttatttatgcaacatcgccgcccgatggttagaattgggaacagagtcaaagatggaagtactgtaataccaaagacgcaagtcagcagagatcaaactaacaaaggagaatgcagtcacactttacagacgtgagattagaaattaaagtaggcaatgaggtccaacttgtcaaaaatacaaaagtaaattttatgcaatttaaaactttattggggaaatataatattaaaggcaatgtcgccctctaatggatatattcaaaggaaatgaatttcagaaaggtttccctgtccccccttttcttcgttgtgcgcacccatcaaacctaaagagaattacttaactggaaatttacaacggggaacttactgaatgaaaggttattggaggaatcatctggagtgggaaaaagagcctatgggatttatattaatatattcaaattacttgatgacttaaagtgtagataatcaaacatgcctccaactgaatctgagaatcctgtgaatgttgacctgcaacatgaagatatattatgcaaaattcagccatgggaaatgcttctgaacaaacaactgagtttctttaataaata

SEQ ID NO: 55906 - DNA, 1241 bp, Homo sapiens
gttggcctggctggtctcgaactcctggcctcaagtaatctgcccctcatggcttctcgaagtgctgggattacaggcatgagccaccatgctttgcctctgtttccttttagtgggaactctcagaagtcatttcctctctgaagttttctgtaagcctcccagacccctctgccaactctttggtcccatttctgctgttatcatcgctcatcacagtctaatgtaactattgtttacttgtctgtgtttctccatttgattgtgtgcaccttgaaagcagaggctatttcatttaattttgtatccctggttcctactccgcacaggctctgattcatggaaaatatttaatatttttgttgaatgaaagaatgacatttatcatgtaaagctaataatttgtttcacgggtgtatgtctttctttcctactgttctgtgtttcttgaagacagaaacactctttccccactagagcttagtacactttaaacctagaatagataataaatatttgttggattaaactcagttgagtttaactgaattatgcagtactcattgatcaaaaatagaaagctctattttctttgtagggccacacatattttgcttatgaagattcttggcaaaggatgtgtaaatactcacaaaacaccacaatttgggacatttagaagactttctctcttcaaaacaaggaaaagtcacgatcaggtagttagctagaaaaaggacaggattgcagtgtgggacattatttaggccagcaataagtaaaagtaacctcaaacatttaatctacaataaaaaataacttaatgaagtagctctctcacgtaccttataaccccactataaaggctgtattttccagggagtgaaagaaagagaatcaatgttctttattcctgggcattattcgtgtgacattctgtaaagtgatgactcaggctatggctgttttagcaaacattctgactcttaatgacaagagcaaatgccacgtgactcatcccatgagtctggttatagcctgctttctgaaattcttgagaagcagttgatgaaataatactgatgatgcaactctgtctctgctgtcatttgctttttcaaggtgttgaagagaggaaaacaactgctccttgttcagacttagcctggaaactggtgactaaaggggtgtagtgaaacttttggggtataattttttgttgttgttgtctattttttttt

SEQ ID NO: 55907 - DNA, 622 bp, Homo sapiens
gccttagcttcctgaggagctaagactaaaggtatgagccactacacctaacttctttttttgttttttggtagagacggggtctccctatattgcctaggttggtctcaaactcctgggctcaagtgattcgcctgccttggcctcccagaatgctgggattacatgcatgaacctctgtgcccaatctttttagtcatttttttaaacattgctttcaattgtctttgtgaatttttttggccgctgagggctcatatattgagcaatcatgttatctaatttttggtgcaatggttaacctgggtaatagcttgaattcagctccccttacgactttatgccctgtgattgtctagcacttttctttttgataagtgctagatagctggctaactggtatctaggtgcaatgtacaaagaaacctaataggtattaggtacaaatgtgagagcattgctgtcattttgacatgaggatgtgccgacctaatagcaaccaaacatgtttgtcagcacattagaagttaagcactgttaccactagtataaataaacatgagtacaaagcctatactgaaactttgttgcattacttggctattcaaaataagcttccatt

SEQ ID NO: 55908 - DNA, 1071 bp, Homo sapiens
tctccccctccaccctcccatctctccacttctctctctctccaccctcccatctctccacttctctctccctccaccatcccatctccacacttctctctctctccacccctcccatctctccacttctctctccctctaccctcccatttctccacttctccctcttcacccttcccctcaccccaaacacactttcctggtattgcctaaattccttatgagcattcaatgctttctattgatagtgttttccttgggtcttctttttttaaaaagaaatccttttgagacaaccagaatattgactacttgatgattttctcatgaattcaactgctctacctggtacatttactaaaggacattgagttcactggatccctgaaaggagaagaaggaaaaaaaaaaagggaaattcagccttttttcctactcctaaatatatctcacaatgttgtcttagcctagcacattttaaaaaaatctttggtacagaagttcttttagtaatctgataagccaactttaaaggaatatttcatgcatatgaaaggtaagatttgatgaggctttcttgacatatataaaagaatagagattaaagccataatttaatatttgccctttaagtatgtccatcaaatacaattttatgtgaaatactttccacgagttcggctttctagtggactttgctttcagaaatagagaaagtttcatgaaaaacaaatttatgtcaccactgtgttctagtagttggtaaatatactagacaacgtattgcttttgccagagtcaataatcattgactcctgcatgtgtcagcagacatttaccagtgtaaggactctacatgggaaattaagctttttttgggagtaggtagaaaggagggcagagtatcaacaaacagggaaggtctgggagtcagtagacctgggttctagtcctctcttttaattagttttgaaccctatatacacagatataacctattcagagttatttttaaattgataaatggaggggattgggcagttcattccagctcagtcaattgggaacagt

SEQ ID NO: 55909 - DNA, 811 bp, Homo sapiens
caggtgaagagtgctggggagatattggtcaaaggacacaaaatttcagttcatcaggaagaaaagttcaataaatctattgtacgatatggagactatagttaatgtattcttgagtattgctaaaagagtagattttaaatgttctcacaacaaaaaaatgataagtatgtgaggccacacacaggttaattagtcgatttagccatcccacaatgtccacgtatttcaaaacacatcatcttttacccaataaatatatacaattatttgtgtcaattaaaaaaaaagactcacagagtacagattagaatggaggaggatggagattaaatctggaggagcaagcagaaaatgtccagttgtcaagtgaagtaagctaagcgatgacctggagacacactgtaattgatccaactcacagtggaagctggaaaggatcaaaggtcctggcagggagcaacagaggctgggagaaagaaggggctttaacctaaggagaggtgcagcagtgtatgcaggagataggggtttacataagagccactggagaaacatcgtccattattggatccctgaatgttccctgaatgttctctgtgggctctgtttgtttctttcttactttctgtttcttctttagggttctctaacaggtctgctgacttggcaaaaatgtctggtagccctagctagctccttccacttatatttaaacttgaaatattcattctcatgaaaatgatgatataagcaatagatttccagatctacccataaaattcccttttcattcaaatgtgactggagt

SEQ ID NO: 55910 - DNA, 1127 bp, Homo sapiens
gttcagttctctcagttggacatgaatgttgctcttgttgctctacatggttggatgaattactgctgaatgatgtttgattatcccaatatagaatgatagaaaaggaaagagtaactacaataaaaataatttaaactcatttggaaaaagggaatataggaaacattacacagtggccaccattttatagcacataatcttaatgaagaggagtaataagattcccttttcttgccagaaatgttagctctggggtcagccaatctagtttacttaaggcgtatttacaggagggcataccttgttgattgacaaatgtggccacgtctaaaaagggatttggggagaaagctatcatgggggctgtaacaattacaagtctgtttcataattcattggtttaggagtcgatggattgccttaatggacaaataatcatgggttcttgtagtttgccaagcatgagtttctctagaaatatacatttcttaaaacaaaatgaatttcaacctatttctgtttactgaactccagtgccaaataaccaatgactagttaatcattgactctataatccagcctgaaactttctctctcctaaaaataggacagggctttgtccattgtccagccctcagttgaacttggattctgcctccacattctattacatgccgaaaagggtgagctttccgaggcaaagaggtatcttcttcagtctgtactttcacaaggaccagttccaacttaagcttttctatttcttattgaaataaccaaggttagacgatccattctaacatcctgtgtgtttcctatcaaaaatagtagtagtgtagtttaggtgggttgaatgtattccacatcacctcagttcagctaattctacatcttagaacctgtcatttaaaaatgccctacttctgggcatttctgtatcacttgagacttttacagttgcaagtgaccagaagtcccagctcaaattagcttaaagaagaaaatgcactggataatataaataataaatccaggctgaatatctaggtagataggatgaaactagactgaggactgaaaacacatcatcagcatgtcttagtttcttcccagctcttggcttt

SEQ ID NO: 55911 - DNA, 1552 bp, Homo sapiens
tttccttctaggccttccttcacagccaggtccccacagtgaaatctgtccttagcccgactgtgccatctggggctctctcagggagacactggttttgcactccaggtcattgtttcttttaggtgcataatagcataacatgatagcacatctgcatttaattatgattccgtcttcctggctccacgttcacaaatttctaagcctttggagagaaggaatatttgctacaaacattggctgcagtgatgatgttgtcatctgcttttgatttcctagatgtagccataaacagatgcaaagtttggctaaatggttgggagtggagtgtttggaccatctgacagggtgtagataggactctccacatgtctgcagtcataattttgtccattttttttaagttttttgtctttaaaaatatgcctcatcacttctttttcttcctacactgaactggcacagaataaatagaaccttgactttggtttcacaatgtatgtggtggatttcatagacttttgtgtttcataacacaaaaatgtttgacctttgcaaatgatttcttttcatctttaggtcacagagctttcgtgttgatatatttgagaggggcagagagtaataacacagggtaatatgatgtaaggaggacaaatgcctttttctgttacaaaccacacacctcctctgcctccagccagtgcaatgcttttgaccataaacttcgttgaatctgtccatgtagcctagagtcagccactgctgaatcattctcccaactacaatgctccctggagcgttcattacagcactcaagagttttgatgactggcacttttggcatcttttttttttttttttttttttttttttttttgtcgtgggcttcagctgccccagctcctttccaacaccctactttcccttgctcaagggttactttagggttgatgattactgaggacactcaacagaagctcagatgtttgaggaatgcaagttgttataagataaggtgctttcttgcacttagttaacttcagacatcaagacttgtgttgctagggttcttgctaacagaacaatacacagaataatctgtaaacttaatagcgcaagagatggcatgttccaaacatcaccaaaggcagccataaaatcagggcctattttgaaaattgtgactgatatttattaaactaatgtcaaccaattatactgtcataaaaaagtcagaaacgatgttcattgtcaagtaattccttatctcaggataataaaaggcaagcttagggtacattttgtcagatgacttcagggttttataagtattaacacattaaatctcataatgtataagggttaagaaaatagtttggtcatttctctgtgtagcctgtctggttaactgtttatatattcctactttttaacttacttatttatttattgagacagggtcttgctgtcttgcccaggttggagtgcagtgagctatcatcagtggactgatcaacctctacctcctgggctcaactgatcctcc

SEQ ID NO: 55912 - DNA, 1961 bp, Homo sapiens
gcatccatccatcctttggttgcaaataatacttacattagcgtatggcaaaatttaattttgtacagagtaatttaacccaggattgctgactttttaagagctgagaaagcatagctatggagcgcaaggccccacccagcagggtctaagtattccgtctgcaaaactggcaggccaccaacggccgcgtcccagggcggcctgaaggatgctgataaccgggagccccgccctgggttcggctatcccgggcaccccgggccggcggggcgaggctctccaattgctgggccagagcgggacccttcctttccgcaccctcctgggtatctccggtcttcaggcctccttcggagagccctgctccgagcccattgggcttccaatcttggcctgcctagcgccgagcagccaatcagaaggcagtcctcccgagggggcgggacgagggggtggtgctgattggctgagcctgaagtcgccacggactcggggcaacaggcagatttgcctgctgagggtggagacccacgagccgaggcctcctgcagtgttctgcacagcaaaccgcacgctatggctgacagccgggatcccgccagcgaccagatgcagcactggaaggagcagcgggccgcgcaggtacactctgtgctccccgagcgggcccgaaggtccgtttagaaagcgggggcgtcggcaagtaaaggcccggcttcccccggggcggcgcttggagggactgtaccgcggctcactgggcaggggggatccccttcggtgcagacggacttttacattcgccgaagcaggggaggggggtccgggtagtggggcgcgggactgcaggctttgttgtccgcgacaggctcgggtggttgcttcagaattttgcacttttgccaactgggacagaggtcgcagcttgaggacagattgagggctcatggggaaagaggcagagagctgcagctgcaaggaagtcagtgaggggagaagtggaaccaggctctaatggtgcccttcttgaaatactgtttacacgctttcatagttgtggggtcccagcagggcagggattgtgttttacaatcttgaggtctccagcaccagtcacagtgactggtacgtactatgcacattattaaacgactaaataaaagaacttttacattcattgtctcatttgcacttcaaaatgtcaagcctagcattttagagctggggggtgacattagggattgattaatgcgtttattctattctttgagcacctgtaggtgctaggcactgttcggggcaaggtgtacaaattccagtgcggcaagaacaacacccttgagaagctgagagtctagtctgggagacgagacacataaacagatgattacactccagcgtggtgagggctctaatagaggttatctgtagaatgtagagggagtgaccaggtgggccggacaaagcaggtgacatttgaacaggaatttttttaaatgagtaggattttaacttggtggtgggggaggcattcctggcctgtgcccacggctgcagagtctcagagggcatctatgaggaggttggattagatgagaccacatctggtctgagtctactgttggcagattggcccagggagtctaaaggtcttgccctgttccctggctgctggttaatggtagacagaggactgcagccctgttttccctattctgcctagtgctcttgctcaaaactcaggttcgtgaactggggtattaatgctaagtgctcatggattgctttaatggttccctgtttgggaaaaggctgccattctcctccaagggcctggaaaatctcccctcttggccctgttctttgttatataccattaggttggttcatgagctcttaaagtaaaccagagagaggtagagtcttagtaaaggatgtgccactacttactggcagag

SEQ ID NO: 55913 - DNA, 1165 bp, Homo sapiens
aaggaaagaattccagaaagaaagtagtggcaaggccagggtactcaatgactactggagggttggctactggaactcgactggagaaaccatcttttaaaaatatcatatgcatgtgaactacatgcagcctcccccccaaccaactctcccgcccacttggatacattttccagtagtcatcgttctttactttgaaaaagccacaggcaaggcagggtaagttcatgaaattctagagtattttgcaatctggactgtccaacctcctgcctgcagtgcagccaagcagaagtcctgcttcaaagagcaggtcagaatcctttgtggttaccacaccagggcacagattcagcggcactctgctcaagccatttgaagggtttttgagaacagctggttttcctaaataggctgagtattccacccttccctctcctagacatcatttgtctagaaggcacatcatttttttttctccttttccttcccttccctcaggtctcaaatatctaagctgttaaaaattctgaactgagaagcttgagatggagttttgttgttatttttgttcaatatggacaatgaagagaggagagggaaggctgtttttccacccaacagggagtggtgaggagttcttggctagggtgagcacttcccaagtgccaggcacgtgactaaacacttcgtacacaaaatatcattcaatctccccaactccaggaggcagaggaaagcatatctcaaaaaactggctgcaggtcacatggctggtaagtggcagtgcctgcccatgaacctgggtgaacaggaagctgccactgcaacaatctttaggagggcccagaattccagatagtatttcctgggaggtgggtaaggacctcaggagaggtatctcagagcctgctggccatggagcagggaaagttggctgagcagtgcccagaggcaaagctggctgtctcctgacccacccctgccagagggggcttttgtagaaactccaaatggctgcacctctctgggtggcaacgtccttgttgataaaagacagaaggcccctcctgctaatcctcccacctgtggaggagagcaggggctacaaggctcacccggtgcccaggcagctccaagagaggtgtttactccaggtgaacat

SEQ ID NO: 55914 - DNA, 893 bp, Homo sapiens
gaggtggttgctccaacgtatgggggctgtctgtaagtgtaggtgttatctgatgaaagctgccccgggtgagggtttgtacagaaagcccctggtggtggggagataatgtcaagcttctctctctctcccagatcctggttgtatcctctgtccctctccacccccacccactcacccacagacttccaaggaaccggcgcctgcagacatgcctctctgatgccctcccagtaacccctggcaggcagcacagcgccaaacctcttggccttaccccactgggcccatgacccagtggctgtgcctctgggtcctccctgtcctgcaaagagaactgggccctcagtcaggttcttctgctccaacccagtggccacctgtgctcttggggagctcgggggaggctgggaaactttcaaagagcagttaatcactaactagctggagataagagagagagaatgaaacaattgagaaaatgcccaacccagaggttagtgcttccctgcctgcacacgccagaacctggcccgcgcagagaaactggcgatcaaactgagtttgttcactggagagagctgacatacagtctctaaggggctgcagtatcccaggctgaggtccagtggcagccgctgcccctttcctcctagggccctttccttcagccatgcctcagccctgaagacaaacaggagcagttttcaaggagcccttcccttatctctaaggtctgggcctggaattcagcttggcccatttactatgccagctctgtgcagggtgcagagatccaagataaatcagacagggtctctgctgtcagtgtgctcaaggaaagaggcttttaggggaaacaaatctaaacgactgccagctggaacttcaac

SEQ ID NO: 55915 - DNA, 1720 bp, Homo sapiens
catgagccactgcgcccggccaaaaagagatattcaaaagctccctctgactgtgtgtgctgaaggctgagtgctgatgccattgcttaattaatgttgttcatgatctccatttgggcgatttgtttagctccttgtggccctttttggacttagcttatcatgtgacattgacaaattaatgagaagtgagcatgtgatgatgcttggattaggacagaaatcacatctaggacatctcaggccctttccacctgggacctgaggcctcaaatctcttggcaggagatgagtgggtctacacagcccgattttgaggtaggtgtggctagcctcatttatgcgatgggaaaactgtggtccgggaaccaggggttttcaaattatgctttttgcccagggctggatgtaggatgtctgggggagaggcttgactgagatctgggtacactgagcctccactttaggaggtaacctagagactacacctactccctaaactgtattgacttttggaagtcaaccatttagaagagtgtggttttggtttcgatcgtatcccagcagtcttttctctgcccttgttaatctgattcatgatctgaacctgggctggctggaggctggccatgtcactttgcagaccatggacacccctgagtgccctcacagaaccagccaatggaaaagtacaacgtcttctggcttctcagccttgccatctccctctggcctatttgatacccccttttatattgagggagtgaaaatgtagcatccaaactgaaaacgcaggtttttctttggtttttataggaaaaacaaattggcatgaacactcagtcaaaccagctcaggctgtttgggcagatgcctttctttgcttttttctgtttattttcctacaaatcaatgcttaactgcgttgttatcggagcagagcaacaggtgcaaaaaaataactctgctgccaactcaaatgaaaaggtagggcttataccctctgggaggtattcagaagataacagaagcccctgccagcaactgaattaacagctctgtttacggtgggttttatgttaacaacctgctcctgaccctcctacacataaacacaccattgtctcagagagagacattcagccatccagacaacccactgctttattctgccctgagtggagattggttttggctcaggctgctttgtgaaactcagaagcattatcctctctgccaactccacgtcctagtcagagttttctgtgaaggcaagggcatggggttgccggagagaagaggattggtcctgcttttaagcctagctgaaattcttttcaaggttggtcattctcaaatgccagagagggttgcccggctctctctgctcttgccccattccattcacaacaggaggtggggaatgagctcagatgactttggaaggagccactattattttggaagccgtgtccttgtgaatagtccatcagggtagggcagcgtctatgttttgttaactattgtatcgccagcacctagcaaagtgcccagcatctagtagacacttggtaaatatgtatgaattacagagggtctgagacaatattgtaatggccggataagcatttcttggtaatagtttctttctgctgaaagctgagagactaattgtcttctgtatgagggcttaagtccagggtaattaagtaatcttttg

SEQ ID NO: 55916 - DNA, 1287 bp, Homo sapiens
gcccagttggaaatgctgaccttctttgcttacaagcccaggtgagctcaagcgaactctgactcactaagggttaagccacacaaactcttttatgagtggaaaccacttaatgtgccctgtaaaaaagggcccctcaccatgctggctgctttcccttggaaagggagtgccagcagggagcagggctatgcacaggccatctttttgcaggaggatggtgatggggcagctgccaccctgtagtcttaaaggcatctctgggggttgggagaagttctggatgtttccagaaggtcatggtggaaaatgacgtcggccctgaggagaggggcttgtgggcatttggccacaggtggagaactggcccatattgttctgcaacatttattaaattctttttttttttttcactacttgccaagctctctatgtgcatgacctcatttgattcttacagccctttgagtttggtgttgttcccatttatcaggtacagaaagtgaggaacagaatgtttgcggctagacagatttggcactggttcagggtcacccacagtaagcaggggaactggaatctgagcctgcatctctccagctccaaagcctgggtgcacagcctccacgccaccctgctttctgcttgtcaggaagcatagctggcccaggcaggtgctgccactgaaatgaccactttgaaacaaccctgcaggcaaatccttgtgaaagaatttgagagaagcctttccctgcctgtcctccctaagcctggaaggccaatccctccatgcaaatgggctgggctctgagcttcagccctttcagggttaaacagtaacctttccactgcttgtggttgagcaaatgctagcaaggaacaagcccagccttgagcaaacaagacactgggccctgggcccccctccttccaccagccacccggtctggggacttagagattttctttcgtcttgaagttcccaatctgatttcttagctttagggcaattgctctacaaagttggatgggaaaatacccagttattatgaaaaaggaaagaaggtttgacttgaggttgttttctttctctgagggtgagaatcaaagagcttttcagaaaaggaacttatgatcagtatagtcaccatctgtaaattttcaagtggggaaactgaggcccagcatcatttctggttcaggctatccacagagctagtgacgctcctcatgataacacctgacgtgtattcgtgccctactttgtgccaggtgctcgaggtacag

SEQ ID NO: 55917 - DNA, 3191 bp, Homo sapiens
tgcgacttcctacagtgtcatctcccacatccttccatccttccatccttccatccttccatccttccatccttccatccttccacttgggtctttgacttacggcaaaaaattccaactaagaataaagctgaaccaaccacttcctgagcctcaggggctagtaggtcttgaggcacccgggaaacaaaaacatcatagttacagctctgctgccctgacagctgggccatcctcttttctacatcttgacttacaccttctagaatctcaaaatcaataggggccttagaggccagtttctgcttttgcatttgcagtagcaaggaactcgctctctcctgagtccaccgattgtatttttcaatagtccttcttaagatgggctcaggaatcttctctccttacccttctgatccttgtttgctgcagctccccatttctatcctgtgattgtaacccaggctggaaaatgagatcaatcacccaggccctaaagaatcaatgcagtctctggggttggtgtattcattggggtaatagcccttcagtaggatagttaattacagccttatatgggtcagtttctttcagaatagtttatagtctctactgcatggaagcagaaccccggaaaaaccttggtcatttgcctgagtctttatttttcgagctcccatgtaattgaatgcagtgaaatatctttctatgttttaatgctagttaccagctgagctaaggcgaggcccagcgtaaactgatgccctctgtgataaacgcaggtggggaaataggctttgttttgatttctctgtcatctgcccatttcataaaatgcccgctgccggtgtcctgttctgctcgacagtcctccagcctgtcatgccagctcgggcttgatgtgtttatccactgacttgttgagcctaaagctagggtggcacggtctattagaacactgaaatttgtatatcccgtaaagaaatggctcacagctgaatcatatgcaaatgcttctaatctttgcttcttgcgaagcagcttagctgaagtcacgctctctcacttgcatcacaaacctgtggcttgttgctgcccctgcctggactggataggaccttggcctggagtgcctgggagccaagcaagagaaagccaggctggacaacttctccagggcaagccattattttataagaatgaatcacttaaccacatggctaacttcaaaggtcttgacttttatcctagggcagaagaaggacacatattaaagagaggttaaagatcaaaagatatcagtggtaaagcaggccagtgattccacggcttacccctgcacactgcaacaggcagagaggtctggaagaaattaggttcttcttttgcctttgactgcttattcccctttatgatgatggaaagatttttatttggggattaaaaaaagaacgttcctagctgggtggagcctagcttgggtaaacggctgacaactcaaagaatatttcctcatggtttatctagtgtagaggttttagagtccatggactgctgcatgggccacagccccctgaaattgttgacaaaatttcatgtgtacatatatgtgcatttttttctgaggagagggtccaaggttttcgtcttattcacaaaggcacctgaactctgaagtaactgattctagatcaactaggaacccacaaacaataattgaggccaatatactgagagactcttgtatttttctgaattcaactcctggctctgaaataatggccctgcatccctcctggatgtcatttgaaaatgagctttgcttgtggcctgctgggtaaatgccactctttgtctgcagtacaacgtggccctgtcagagtgatgtatcacttggaaaccggggtggatgccagacctgtcgcaatattgtcacatcctgatgggatgttgcaacctcaccctgcaacctacagggagggagagtgaagtctccttgcatttcctgtgaatttgtcctctcggatttcagagaaacccaagtcaggtgcaggccctgctagtgacaatgccaggagagaaattcttaaccaggatgagaggtttcttgtttactgaggtcttattaaatccctctctccatcctgccatgacgtttcgagaaattgctgggaacactgagtcttgattagctgggtgataagatggttgaaagggcccatgaacgttgggaaatatagaattgtcagattgaaattatcttttctactaacaagagcattacagaagtgaacctgattcttggcaagaaaggcttgtgtgaaatctgttatgtgcaaagggagattatgtgccggccaccatttctggaaatgacatagaatcatggttatgagtaaagcttctggattcaaactgtttgtgttcatatcctggctccacattccagctgtgtgactctagtcaagtcatttgacccctctgtttctcagatcctccacagctgaaaactgtggatcatattagtacctgtgtcatagagttattgtgtgaattaaataaagtgattcatttaaagtgcttagtacagtgcctggtacatagtaagtgctcaataaacagtagcttttttttcttaaccaatttaattaggagctaatggctggcagttcatagcttttttgaataataggcttctcctgataattgaatggatgctgtgaaccctctcccttcatatatggtttcagtcagtccaggggcccttgaaggccacactgggtcagtggaccctagtttaggaagggcacatgaaagagatcagttttactggcccaatttcttaaaataattggcttgtatttagggactactttgtattaaaattggctgatttttgagtgtgagagtctttgtaagatctactttggtcctcccaatacacacacacacacacacacacacatatacacacacacactcacactcacacacacacggctagatcatttagttttctttctgagaagaatttttatttcccaggtccgcctccatcatctcctctttggtaatagtcgcagaggttgccataatgagtcatttgttaaactaatctgtgtttccatagtccactgtggccctctgtattgagcttgggccactcaatggcgcctttgtcaggctgatta

SEQ ID NO: 55918 - DNA, 779 bp, Homo sapiens
cacatcaaccaacaatttgaaaggctgtcctagagccgcctcccatccctccttctgagtatgtggaaggacacaatctcctctttgcttcggccttttcataggtaaacatccctttgtaaactacccattatgggggaacagatgcctgctatcttctagtggagtttcaaaggcccgaatacctccacctgcagccaacacagcacattttgcaggtactttgcagtaatatgagcctctggttatttcctgagatggattctttaattttcatgcttaaacacaaatatagctttggtccctgtaaacaaacacagtgacaaagctacatgactcacctaccagtcatttccagtggctttccaaagcatgggcatggcatggtactgaccacgcattctgtctccctggaaactggttcttaggacatgcctgagaaaattagttcacttgtcagccacctgcactgtgccattctgttaaggtagattaaggaggtgaggaatgaggtctgagagcaaggggaatcatggctttgcttggaaagaaagaagtctcttttgggctaggagcaatcaatcatttgacaatcaattgatttagagtgtgttgagagccaggtgcctggaatataaaaagagatgagttcagggagcctggaggcaaaaccaaggttggaacatgtttcctgaccagcacaagcggtagagtatttaacattattgactatttaggaaaatctggactttcaccataagcttaagacatggtaccct

SEQ ID NO: 55919 - DNA, 789 bp, Homo sapiens
atcaagttccttgaaaacaatccagctggaattttagttggtattgccttgattttacaggtccttacctgaagcccaaggtgatttttggccgctggcgaccttgtgaccgttggcagtgggtcagatgtggcactcagaattaggggaaggattggtgatgccagaacatctggtgaagccggcacttcaaggcactcctcaagcctggaaagcctcaccaataggtatgactcatggtttcgtgaaaagctgctgatctcattagtttcagaaatgattgcatggctgggcagggactctcgggtagatgcagcgctgactgggtgcccccgggaagaatacctcgcatttctcctgaggtggtgaaataggcggaaactggttcccatccaaatcctggaaaccaccatgggtgaggtcatgtccacacatgtcaaggccttgatgagatagttatctgcatagtccagaaaaatcacttttccaccaaacattctaaatgattgatggagaaacaaattttccaattacgctaactttcattgttattactaaagaattaagtgctacaccacacacacacacacacacacacacacacacacagtcacacaatattcagataaaaagaaagcctaattattttatattcagaaaaaaatgaattggcctttctgaacaaccacaacgatgaaaaaggaaaagaaatctgttaaaactttaattttagttttccttttagattttaaaataattgtgaaatatttcaaacatagaaaatatata

SEQ ID NO: 55920 - DNA, 2143 bp, Homo sapiens
ttatgaataaaattaatttatacatgtaaagtatttagaacagtgtccagcacaaactcagcattcagtaggtataattatttttatattagaattcaacaaagtagaaatgtttgttctaagtctctaatgttaatagcaaatggaatatccttttcatgattttttaaaaataaagcaaacactctatccccaatgctttctgctgcatatacgtttatttctttagattcaggtcactttgtccttgcttagtcttgatctctgctgtatcctgtcactagagaaggcaagcttctaggtaaacatacagagaaactaagtgtgtaggcaaaaatggcttctttcggttatgagggttgaggacatcgatcagtgacctataaataaatgttgataaaaaggaagtctccatattttgtttaccaacctcagggcacagtaggaaccagatagtaaaatggaggcaagtgccctgtgttaaatgaactgaatgaacccttctctcttctcaacttcagcttttgctctgtgtcttcctggctgcttaggttctctggtaccatgtgaatccttctttatacaccaaggggctctgttagggctggaggtgtcctttctttcactatgactcctccatcaaaagcaaacatagtaagatatcaagttggcaaagcttcaccttcaaccaccactttaaaagttagcaaattgattcacagatgtgatctttgccaagtcactcagaagtagatgggaacagagatgaggtacttagggagggacccaaaggcctttaatattgatcaaaagggttgcccaacagacagagactcccagtgtgaagtgcccaagactcaggaatggggtggagagtgtcgtgacaggctttgtggccattaagaagaaagaactgcttctctgaagcaaaacaaagggagttggctcagagtgatgctgggtgcacagatcatgggactgtttggggcatgacctcagtgcctcctgtgtgactatctcatatcaggttagtgggagtccgaagggtgaaactgaggtcaatccatgtttgccttgcacttgtttgtcctgtttgggctcctgtccatctcctacagccataggtggtctcctctgcagaaagtaaggagcgggagtagaaagggacaggttttatctcagtcaggattactctgtatagcctgtgtgtgctgtggaggtaaggaaggtaagggaagatgactcaataactcatttgcttatgtgtacatatttgcagggcactgggctaggtactggatataacaataacaataacaaaataatgactatatgtgtcaggactgtgtcaagtaccttccttgatgagtttatttaaatttcacaacaatcttataaggtaggtgcattattcacattatacaactgagaaatttgaggtttggagaggtcaagtaaccagcccaaagtcacacacctggcgagcacagaaatagaattgaaatccaactttgtctctgtgctttcaaccatcgtaaatatttgggtaaatttcaacattcaagaggttcaaagtctagtgggaaaaacagacaaacatgtgagaggtgtggtaattgctaaagggttgatcagttttagccacagtacagcaattggcatagcatgaaaattatcctctgaagctttgaattataattaagtcccttttatatcctctaaagcaaggtttttaaaccttgggactattgacattttaggacagataattattgtggggggctagccagtgcattgtggaatgtttagcagaatctgcttattaggtgcaagtggcactggaccccagtagttagtgataaccaaaaatgtctccagacattgccaaaggtcagcagggggccaaaatagccctgagttgaaaaccaccactttgcaagaatgaaacaactttaaaaggcaagaattatatcttaattatcatttcattccttcaccttgcaccccaacatacacatatgtatagaacactccacccaacagcagtaaagtacacattctttataaacacccttagaacattctccaggatagaccatattctacaccatttaaaagtctcaacaaatgtaaaagaatcaaa

SEQ ID NO: 55921 - DNA, 647 bp, Homo sapiens
tgagctctagtggaggaactgggcttcttgcctttcatgaaatgagagaagctgggttcacattccagcagattggtaggttttgtggtaggaaggtgaggaagttcattacctaatgacttctattgtcttcagtataaacaaagtcatcagctgagtatggcaacagggtatgagaggcttgacaagagaataaaaggtataaaacagtcatctttgggagtggaacaccgaactactagagaaacaaagatgggctgttgggcagcagtaagtgacgatttgaggttgaaatcatgaagcaaggccagacaacaaagttgtgcaatattctccagcaatgttcagctgctcaatgccagcccaaagaaatgggtggcagggttcatcctggctaaaggtttggctaggccaactccatatgtaaattaggtcaaccacgaccttaagtaacaactgtttcaatagactgggtgtggaagcaagatcgcagtgagcttcactcactttcatttagaagtaaatgaaacttggaggcatggagttctaatgactctttcaatagtgttgctataaagaagggctagacagggaaaaagaagggaaaaactggttaattaagacagttttctgttacatgctaacgg

SEQ ID NO: 55922 - DNA, 2622 bp, Homo sapiens
aaggctctctttgatgctcattctgatgacattacactaagatttactgattgagggtacggacacttctccatacacacttgcccaggaacgatctccagttacctgtcctgtctccaagatcttctctctctcatccaatcttgcctatgcagcattctattttcagagtcgtctttgctaatttggggaagtcacttattcaaacaagaaagtggttgacaaatgtttagcaatgaaatctcccgcgagttactactttttaattaggattttcaaccctaagaaagatatagataggaggaataagatagggggaataaggaaactaattttgaggggtttccctgcctcttaggtggggtttatcatattgtgctgaaactgcttattcgtctagttctccagaccctgggccatttatcttacgtatccctatctctgagcgtgtagaaggcgctccataaaactgttggtttgtgtaaatgaccgaaaactacatgcagcgtgagggtggatttccctttgacttcggcttaaggaagaatcgttcccatgatcatcccacaattcatctaaacggagataggcaaggagcaactgctcaaaggcaaagcgctggcagctgaggcacagctccggttcggcaaacgtctcccgagtgccaaacgtccccccaaacgcctaactggtcgtcagggcgcagaaaagaagcttggggggcgcggtcttcgccccagctccacttcggtgcttcacgattccttctctggcctgccttcctgataaatacccggtgaggtcacctaaacgctctcctctctcagttatttgcttctttccaacgtttggcgcccagctcccgccatcggagcgccccgcccgagaccactgatctcctggggcctcgcagccttgcttccgaacgccaaggtcgcggtgcgccggggtagcgaacggccaggcccgaaaccccgccccgcagctaaacgcccggcccgctaccctgcgcccagctccagccgccgggtcccgcctgggcctctcctcctgggaataccgggcaccggtggccccgcccctacctgcgcgccgcatctccgggaacaacagtctccctcccgagcatcacagccagacatggcccagaccagggacccgcgcggcctccaatctccgcacggctttgcgcgcggcgcttagcctgggatacggcagcgaggccgcaaatgcaatcaggcggcgctgagggcagcccgggggcggggcgaacggggcgggggccggggtctggtaaggccccgccggctgagatatccagcggcgcacctgacttcccgggaggcaaggccaacgtggttggaggcggggctgggttggggggcgggggttcaagtctgagagacctaaaggcaccgctagcgtctgggggcgtggccaaccatgcgggaggcggggccttgatgctggacatcaggctgtgctgcgggcagccagtgagaaggccgtcaagatggcggcctcctggaggctgggctgtgatccgcggctgctgcgttatcttgtgggcttccccggccgccgaagcgtagggctggtgaagggggctcttgggtggtctgtaagccgcggagctaattggagatggtttcacagcacgcagtggcttcggggtgagtggccggggctcgctcagcttctctgtgtagctgagtgatgggcctgggacaggggcagttatgattgagggcctgcttttgggtgtgaaggtgcgcgggctccttattccctttcctctttctccggttggggtccgccgacttggcctaatgcatgctgtgaagggctttcttggcagctgagagaactcgactctgccctaggccccctggtttgtatggctttgtgaccttgccttggaatttgggttatttgtgaggcgcagagagggttcccaaactctcctccctcagccccctttccaatcaaggctcaggtttctttagggttgtcaaacgtctcggacgagaaaaagctgcccaaggttgccgagattgaaaagccactgttgggagttcttacttattctctaggcctctctctgttaggaggtgttttcattgaggccagtcgagttttaccccacgccatgactcgtggaagacttaaatttgtaaattcctacggcatcacgatagacaaaggtccaggagaatgtttcaagcaaatattcgcttgaaagagcaaacatttaggagataaatcataccaaaaatttattatagaaaattgttgtttagtaatgatattgatgcagttaacacaattcttgcagtatttaacagtatgcaaaatggcaggccgggtattatttttccttattttgggagaaggttggagggaggcggggatggagaataggactgacgttttttagtgtgacgtattacctgccaatcatcgttcctggcactctacagaatgaattttaatttaaataggtctagtagacgttgccttcatattctgagctaccttaggctcagaaaaaaaaaatcacacaaagtcatatggtaagatgagtgtattggggttcctaaaggttccttaatgggaacaatt

SEQ ID NO: 55923 - DNA, 923 bp, Homo sapiens
tacaagaattctgcatgttcaaggtggggaaaaggcttataaggatatttgattagacatatgaagaatgctcacatggatctgatatgtctggtttgctatatttggatttctgagtgaatataagctatcaataaccattaattaattgatgatccatatttgtaaggaacattgagatgtaaagttagcacagctttgagagtttagcatgaagattcgcatcctgtaatcagtctggattgtggttttctcattgatgaaatgggcgtgtttgacttggactttggtttgggctgtgtcatttttggggcattaggagtgataattctacttttccagccttcttagaatttggtgccagttgagagagagaaagggtaagacagatagagatcaaatgctgatagttacattggattggagaatgtgacttagatctgtggccttctaagactgggcttcttagtacaaccccactttagactttgaactttctgttttagagggagactgtgtgtgtacaaagcaaacacgcatatccgaattgctgcctcatacctggtgggccctgatggcaagaacacagagaggtggggcctgtggagctgcttttgaaaggcagcgccgtgtgtgtctagcacgtggatggaggagctgataggaaactgcaggttgtctatgatcaggaagttcttaaaataaggaagagagtgaggcaggtatgcatgcttgcattctttctccagaccttcagagtgaaggaaaagtggagaggtacagaaactttctcttaaatacttcaaagaggtggaagcgcctttatcacgaagccataggaaatctccatttgaaaatgcagtacaagttattcagcttcccaagagaaatatttattctcatttaacattagtgctcaattt

SEQ ID NO: 55924 - DNA, 585 bp, Homo sapiens
attgctattaacttacagtggctggagacagattatttcagaatctgaagctccccatgaagaaagcccttcaattttagttgaaaggtttttgctttcaaagcaaggctaacaagcagggagtccaggaagctaataactggcattcgttgattaaatcttggccatctaggttgtggctgtaggttaaccaaagttgggcatccacccaaggctttgatcgtcacctccaggaagttgtcttgccccacccctatccaggatgagctcattttcccctctgtgggtataactcttaccttgtccatatgtcattgtagttcttactttgcaatttcattaatccgcccatgaacctgtctgttctactatatgatgaggtgtgagggtacggagaaattcattatggtcccccaaaccaggtaagtagaaagtggtagaaccagggatagagctcagctctctccaaagtctctggcttaacatgcctgaattgtctattgtcagaagtttggtaaactgaatttgctgaagttaagacatcatctccaaatgttgcaaaccaggtcagtattccagagctcc

SEQ ID NO: 55925 - DNA, 2877 bp, Homo sapiens
aagtatgagccatcttctctttcctcctcttctccacacctaacctgctcaatttggcagtcctaatttccagtccctccctattatatccagtttcctatggtgtccagttatgcctaaagtcttaacccatactcagtaaattttagcattataatttgattctcttataacaaaattccttctctctgaacctttgactttactctttccctagtcatctaacccactaacctctttacaccaagcacatatcaacccagattgtctaactaccctttgctggatcctttctatcttcagcaaaaagaatccatcacttgcacttggggttactaatacttcacatttagtatctcctctttttgctctcagctagaaagcttgacaaatgacttcacaagtaagttattggtctggaaagacaaaggcttagggaagattagatccaggacagagggaactagttccgcagtaatgtacaaaatcaatttcaggccattcccaagtccttctctcaagcccatggagaggagtctgctacgtgggaggtcaaagagaatcaatctgaatattctggctgagaatagctcatattacttggttaatttcatttgaaattaagagaaaatgcccgaggtatcaaggtcccaaagaactggaataaaaaaagctccattcagtgtcagcagaaactggccatatctatgagagataggtttttaaaggaacagttggagttgatttaagcagttgggagagggtggagaccagaattgtttctggaggttttttaggagagaaatggttccttaaagaagtgggaggcaagagctggggttgtatcttcacttattgcaagtgcttaatcctcgggactttccaaagccaaaaaacagaaagacagcaaaacaaacaaataaaaaagccactatctccaccctcagaagaccgtggaaagaaccttatttcagccatgatttgtaaatgggaagtttctcaacagtctaacttcccttggctttccagagccttgatctgcacttggatggaaaccgtattcagcttgtaatttttctttgtaaacattgcctaattgaaattgctcactggaacgggggtgttgcatctgaacaaaaccctcttggacttggccgctggggttacagagtagtgagttgtgttgaaactccccagtagagccaaaggtcctgtgacttcccagaatccaccaagactctggaaacaaccaggaaagtctttgaatgattcactccaaagccctggccccattgttcatggcctcaagctcctcctgagtatggagaagactgaggaacactttgacaaaagggggttgggtgttttaagttatgacccaccagaaaagaccatgggggagttaggaaggacctgaaaggaacatagatagctggacagtgagggagaagagctgctcggtggtgggtgctggggatatttgcaaaatctccccagaggaactctccttcctactcctcgctccttccacctctcacctcccactggttgttaaacaatgtttattgatcttccattgcccagcaacctagtcagctcatctcttccctcactctcactcatccaacctgcttcctgccaagccaaacaaaaaagatctgcttctgcttctcagtgactgtgcaattctgctccctctctctcctctttctctctaccattctagatggctaaggagtaggcttaccaaatttggaacaaacaaacaaacatgacactcaattactttttgaatttcaggtaaaaaatgaatactttttttttagtattattatgtcccatgcaatatttgtgacttacactaaaaaactatttgctttttatctaaaattcaaatttatccaggcattctgtattttatctgacaacccaactaaggagacaaggccatgtgatctttcagatgacaacgtgaaaggactactgagctcattcatctctaagtagctgtcatccaaacctttagaaattgtgcttggataaataaacatacttcatccatccagattcaccatttctcccaggttttggccaaatgcccctatttcctgtctcggggacaccattctagtgatggatggaggttacggaagggagtggacccactgagtgggaggggagcaaactgggcagactagagccgctcacatggtaataaacctctgtccctcatggaggtattttcttactgaactcctcagctctccacccactttgaataatgatcacagctcatacggagagagcacatggcatgtgctactgtgccctatatgcacaatcacatttcatcctcacagtaatctacaaaatagatgccaatcctatttccattttacaaatgaggctcagagaaatggagtaacttgcccagggtcagataaccagtaagtggcccatactggatccaaacccaggtctgcccaactgcagagcccaaaaacctctaggatggcatgctaagaaggtactgggctaggagaaagggctcactgggatcccagaaagtaaaacaagataacaagataatctgtaaagctcccttggtacctactccaacactttacaatcctggtagcattgcatttgtttgcagactaagggctgtggtggtccagcccccgcacctagcacagcaccagtacatgggggcagcttttaaaaaatgcttaagaaacgaaagcaatggatgtgtcacttaataacacagagagtcagagaaagtgactttctaacaccacacagagagtcagggaatgtgcccaatgacggtgagctccctccttttttcccatacccagcttcttgctgccctgt

SEQ ID NO: 55926 - DNA, 4740 bp, Homo sapiens
agtgcaacaaaccgctatggcacaggtttacctatgtaacaaacctgcacatcctgcacatgtaccccacaactaaaattaaaattaaaattaaaaagagaaggaaaaaaggtttcttgatgatctctatctagaaccctttgaaggtgacccaatcagctcattaattgtttgctcttgaatacttgctttcacccaatgggctttgatattaataacagtattgattatactctcaacatttatggaacatactagctctgagataagtggtttcctttgtttgatcctcacaacaacaattctataagcaagtaggaggaaggaacaaacagatagagtgctattattatcctcattttatagacaaggaactaaggccaccaatgtgcctaaaatgacctagtaagcatcagaatcacatagctaaacctacattggcccaaatccaagactttagtttgtaggactatgctcaagtaactaggcagccaattcaaatactccatcctccaattttatatttataaattacaagcactcacagccggggtcagcaactcatggctttccatatggcccatgaagcctaaaatatttactctttagccctttacagaaaaatgttttctgacccttggcctagaacagtaaaccaaatcccaaattttccattcagtgtactgaggtctctgtagtacttgggaccagcagattccacaacattttttaactcaagaaaaatatttatttgcattgatttatgtaaatgaccctgagtgatgaaagttggaaataaatttggggaaaaaaagagctaaagagttgtggttgtaaaatatccacctcctaaactactgcagagctgctggttaaccaaaatccagggagggttttgccagaatcatgaagaattttatgaatgggtctacactgagtacagagaaaagtgcccacaggcctctctgtatccatgttgatgggggattaaagaagactcctcctaccaacatccagccaaacagaagactagctgtttaaatggctgccagcatgctaagcgaatagaaatagtgacaaagagggtagtcagaaaggcagtgagtaactattcattgttttcaaacgtggcgagaggtgtttggtaatctttgtgtaaaacagacatctgagtcatctcagcagcagggagttctcatgagtcatataacacatgctagtcacaaatcaggtctttccaccagttcaggaatattaccaacagtatcaccacactactcagtatggatccaaaactcaaggaatatctatctaactacacctgcatgttcaaatgtactagatgtaccatggtataacaggtgtaccatgggtgtaccagtaggtgtaaacagactctacctatagggtagagtcctttaaggttgcagaagaaacagctgcaaactccaaaactgccccagcttgctgtgtgaacttgtgcatgtgctgcctcttatctgagcctaagactcatctataaaatgagatgtttgagttggatgcctctcccctgccttccagctctatgagtatgtggaggggaagctccaccaacagtttagaaacagtcctggaatacactgctgacttatgactcataattcatcatatctcattatctaattagtattataattaccatcaacattatcattgttattatccttagtatagcataaataataacaatataataataactagcatttcttaagtgctttgcatgtgccagatcttatttgttcaggtctctagaatatgtgggacaagaagattgtagtatctgcatagatcaggagttggcaaactacagccatgggccaaatccagtcaacagcccatttttataaacaaggttttattagaacacagcgaagcctattgtttacctattgtctacggttacttttgcactccaagagcagagttgagtaattgcaacagaaaccctaaaatatttatctgaccctttacagaaaacacttgttgacccccttcttttagaccctacataacaaatctgttgttttttgcctccctagtgtctgcttgctactcttttggttctatcctctcgacttctcagggcaattccccttctaactcccgtccctatggtttggatggaactgacccatgcccatctcaggactggtgaatcaggatactctatcctcataaccacatagatttgtgggtgatcatgtggaccaagttggtccagtgagatatagtcctaagactttggctagaaaaagtgggaaggaggagctcttctttgctgaggtttcttagctgctaggatgtgtccagagctgccgggagcttataagggaatgacctgcctttgtttgaggacaaggagatatggaaagagaatcagtcctaataataagattttagctcctagatccagatacacctaaagttatctctagactctttggttaacaagctgatatattctctagttcacttaagtcagactaaggtaggcttccctcacttgcaactaaaacaaaacagtcctttgaaatagacacaattactttacccactaagatacacctgatcaagatcacataaccagtaagtggcagaggctaggacccaggtctccactgagcttttcaagatgaaggggtcagcatctagagctctctagaagatctggctagaagcagggacacaaccaacgggtgattttcctgtctttgaattgctctctaaagggcaattctttgggggatcatcttgttttctacttatgactgtcccatggcaagacccagtagagtactggcttctcatgcagtaatttggggcaagttatgacaaagagtgatgtcatagccatttgtcagctcttcattcttgccatttaactgggaaaaatttttgctggggagaaacttgacctccctctgttgggatatttagtcattcagcaagaaacatggaatcagggaatctcaatgcggtgaacaagattgtgggtcagggcccttctgtgtcaaggagtcagtcaggacagattttgctgaagaagagatttcataaaatcaaacctaactggaactatccgttccacagggcatcttcttatactctgctttgaaggggacagactccagaaggaaacatgcagtgcagggtatggaaacagaatctctcagggagatgtttggttagtgtgtggctcaatgttacacctttaccagctggaggaccttatcatgaggactgggtttcagatagggatcctggtgactcacaggaccctctgtcaggggtccactggtctcaacacaccacatcaaatgagagaatggattcaagcattttttaatgattttcaaccatgagagttgagcataagttggatgggcagatggatggatggagggatggatattggacacacagaagattgataagcacaaatatatacatgtataattgtatatatagagattacaagtaatatttctggaaagatcacagaatattgctgagagtagcagcttctagggagaactgagaaaatgggtatctcaaatgagagggtgactcacagatcactgtattctccttagctctgtttaaatgttttcctatgtgcatttattgctttttcaatgttaggattaaaaataagagggaattatcaaaaatatatttaacgacaaagccctcttggcttcatccctcaatgaccctaaaatttaaatgaccaaaaccccatttcctcaggctttcttgttaagcttttttccttgaggctttgtaataccagccatgcagacacactgacatgagctctctgctcacgtgtcacttctctgagcagagagaagaagcaacgggacccagctcatgtcaggaaaagatgttacatgagacctgttcctttggtgtctgccccaactcagtgccaagccagaggtaaagggcaaagggtgataggaaggagtccaaaatacaggccacaaaggcctctagtccatctgggcactgctggagccagggcagggcaacgctggcacagagataaaagggctgtccacagtctggcctctaagggacttgaagtccatggaatgatctgagctccctatctgctttagtatagtcagtggacaatgtctatcacttcaaaagaataggacatgaaacagagctgtcctgcacaattctgaatcacacacatattctgtaggaagaacctgtgtctggctttaaagcctacttctacccctttctagctgtatgatcctcagccactcactttagtccctgagagcttcagtttccttgtccatacaaaggaaaaagattgtagcgtaaattagatgggatcacttccattaagtgccaactacaaagaagcaatcagtattggcctggttcccccctcccctttggcatctcagaagtaaagggaatgcttttttaaagaatttattgattgaaagagacaacagaaaactaaatgaactttcttagaaaactgtgcagacactgaagtgagacccagcttctctggactcttatgtaacaagttacataagggtcatcttattcccccagtgtgccccctgggattatggtgtggaggctaaggtcaaaaggaaattatgtaagcataatcctgagaaattgacaaacaaagcagtgaccagttcaaggagcaaacca

SEQ ID NO: 55927 - DNA, 917 bp, Homo sapiens
aaccaaggctagaaaagaatttaaaataagaattttatagtatattaaaatggtttaagttctttttctttaaaaaaaggggggaaaggcagtgtgccatggctcatgcctgtaatcccagcggtttgggaggccaaggtgtgcagatcaccaggtcaagagattgagaccatcctggccaacgtggtaaaaccccgtctctaccaaaaatacaaaaattagctgggtgtggtggcaggtggctatagccccagctacttgggaggctaaggcagtagaatcgctcaaacccaagaggcaaaggttacagtgagtcgagattgtgtcactgtactccagcctggcaacagagcaagactccgtctaaaaaaaaaaagggaggtgggggaagcctagaaaacagatataaagtatgtaacatgatctcaaatagtattgatgtatgttatgactagaaggggaatacaacatttcaacagtgattatctctagttgaagaaattgcaggtgatttttttcccttatgcatacatttatatgttttaatactgctctgcaatgagcatgtagaacttttatgatcataatattaatcatgtttttaaaagctgaaactataaacaaatgaacttcaaggaattcattttaaacaggagaaataggccaaaatgtgaacagaataagtaatttatattattgtagcaaggaaaattaccaggttcttcacaactttgtatcatccacactgccaagcaaatacagaaagcccttgctcaaatccaatttttccagactttctcaatgttttctggtttcctgagtaactgctatttgcaatttctgtttcatttgacttctttattttatttttttatcatcatcttggacttctgaaaagagaaactaacatgtgaaag

SEQ ID NO: 55928 - DNA, 1785 bp, Homo sapiens
tttactttagatctttggacccaagactttgacagcagggtaaactgcttgacaataaaatcttagttaaagccacttgcacttgctagtggaaatacagctatcacacaacagggaaatggcagagctgcaattcatgaattttcatttgtgtcaatttcttcacagtgatggctgaagacactaacattagaacctgtagaaagaacatgaggctgaaagtagaggacatattcattaaggactgcgtcacacacttttgggttcttcaattcttcaagatccaatcatggatgatgattttgatttaaaaaaatacagcttttccaagtcaccacttacctgctatactgcagagaaaaagctgtcagctgctttaaagttttcctagccagtgttttgacctcaaagacatcaaaaactgtcctatcgactgctgtcatttggctcaggagcccaaggtcactgtttgtttggatgttgtgtaatcatgagagtaaagtcatcatcagtatcatgtaattaatatattatttaagcagtcatttcaaggggaataatttgatgtggaaagataaaaataactctggttcttccattaattcattaattcattcagcgtaccaagtacttggctcactgccaggcactggcatgcagagacctgtgcattttattcagcatcctaagatgtttcagaaaccaattgtttttcctgaaaatcagattatatttcccaactcttactcctttctctgagcctcaatgttcctaaggaagatctcattcacaggagcgaaatcacattatttcagcccctgggaaaagcaagtgtctttgccaaataccaaaataggctctcatgagtgtcttataataacctatttttctgccttttcatttctcctccctctccaggaatgcaaactgattcctcccttctcatcacccctcacaacccacccttaacccatccaagatttctgacctgaccattctctcggctccaggaacgtgctggtcacgtagtgctggagtgagctgtgccttccatcacagtcctgctatactatagaggaaaagctgtcgggggctttaaagtttacctacccagtgttttgatgacaaagacgtcacaaactgtcctactgacttttgtcatttggttcgagagcccaaggtcactgtttgtttggacattgtgtaattatgggagttaaagtcatcatcagtgtcatctttggcctttgatgtcccttttctctccttaggcaagaaccatggctgtttccctcccacgttttgtgaatttctacttggttatcccagcagcctgtgggtaagcccctgagcctgtcagtagctctgacaccagatgaccttccctgggtgcctaccttcacttctctaacaccacccttccaaccccagtgaccattaaccatttcatccttggaagacttgctctttgacatttaaccctgacccagtaaagtcattagtctttaacttctaaatcccagtgtagaagaaactagctcattttaaggcccagagatgccccagcttctgatcttttcttgatgcttaaattctaaatgttccatagcttaatttactcctggattttgtggaaggacctctctttgttttctaattaaatgtaaaatgaaaggtcaagctgttgttttgaggtaggtttggactctagtctccatgtcaccttccatggcttccataaaccataacaccatttctcagatgtgcctctcagaacactaatca

SEQ ID NO: 55929 - DNA, 1397 bp, Homo sapiens
tctctccaggctgtcaaattccaggatacaagttcccccagggacatctctaacacatctggcttggtctcaaaatgacagaggaactagcacttagagcactttctgtcagccagttgctttatactgagttcttccagcaactctctgcacggaattattattatgtccatcttcttgatgaggcaaagagagagaaaataacttgctccaggacacgtggctgacaaggtctggagctaggacctgagccaaagaaagaaggaagaaaatgatatctgggtgtagtacttggtactcaataggtgttttgaacaggaggggcatcataccttttcctcactgattggttctcattcaagcatctacaaaggaccaggacacggaggtgtacaaggcaggctaggtctgtacctgcactgagtggtatttcctgttccaccaaagacaagagcttagcaggtggcaggggcaccggcagaaagaggatgaccctcagacccaggaccctgcactgttttccattgctgccatcccatgcacagaggctggattgaaaagcagctcttggaacagagtctgcttgctctgacactaagaacaccatatgtgtccctgccacaaagggagagaagacactccctgctgttctggaggtggtgtccaggagctggcaagcagcctcttggcattttatttcaatagctgagggtgggggctgtggggagagttaagcaatggaaagttttcctttgtgctgccctcacaaggcatttctggaaagggtcagtttggggtgattcatcatctacccatgtagactcacactgagaagccagctcagatactgtgattaaaaatacatttcttctcacctactttcttattaatattctgtaagtgtactaaaggggcctcagtcaatagtaagaaaagttcatttacccagtagtagctacactggctctaatcatttggtgaatgtaactatctacctaaagacttgattttcttttcaaagagctatggtaaaatgccaagcactaaacaatccagcaaagcaattacttgctcaacagtctgctgaagtttgaataccactcactaactacacacattaggtaagtgatcagatttccctgagccttagtttcttcatatgtaaaatggagataatcaggatacctattgtagtcataggttaatacatacacacccccatgatggtgcctggaacatcacctgcactcaatacaagttagctatcattatgcacactcaacctatttcttaatatttatggtcatttattctcttactgtgtgtgccaggtgcagggctgagggcttatagacatcacacaattcagtcctcaagacaaccctgtgaggtgggta

SEQ ID NO: 55930 - DNA, 1166 bp, Homo sapiens
gaacttgtttagcacatggtagtttgggatgcaagcccaggcagcctggctggggcatctggcttctgcccactgctcacagcatgatcagagattcaggcctatgtacaacccagggatccacatttcagaagcacgacacaccagagcagggcatgagccatgtgtggggcactggggcaccttctctcagagatggtgacttgataaagcctggaggagcagggcccagtcacaggaagaggcaagggcgtgtgagatggtggccacccctgctcctgctcactgtcccttctgcaggagcagctgccctttcagctcctttctccattcaacaccttctttcagacctcaagacccatgaccaagtgctgctgtttccatagccaggttgggccccctcatgaatgggacaaacccggtagggatgccagtcatgatcttctgcccctagactgtgccaaacaacaggtcccaggaaccaagcaaagggctggggagcagctggtctagggaggggctgaggtcaggctgtgggtgagagcagaaggtagaaacaagggtgagagaagcagaaacaaaggttgaggtacaaggtgaaactaagtgggaacgcaggaaagaccccagaaaatgagtagatgtgaaacagggagagggctgcaggctgtgctgcaacaaggtgaggggctgtgggtgccccatctgctgggcaggaagtggtagggctaatgcagcatgggcaaggggcatacttgtctgagaactgggcaaggagccattgccatgatacagagcactgggtcaatgattaacacagcatcccagagtcatatacaccaggaggcagaggaaacagaaatcagatcatgggattaatatagctcaagttcaaagtattaactctgagccaggcactttgctaagtactccatgcagattaccttatttaaccctcacatgtagtacctaagaacgtcggctccaaagccaggttgagtttgaatgctgactcctccgtgtcttagctgtgtgatcttgagcaagttacttaaactctgtgtttctcagcttcctcatctgtgaagtgggattatgttagtagatatgtcatacatttgtgatgaagattaaataaaataatagaggtgacatttaaagtagtg

SEQ ID NO: 55931 - DNA, 1884 bp, Homo sapiens
gtacaggcatcagcccccacacccagctaatttttgtatttttagtagagaaagggtttctccatgttggccaggctggtctggaactcctgacctcaagtgatctgcccgcctcggcctccgatggtgctgagcttacaggtgtgagccaccacgcccgggcataaaatctattcttaaaactaatttcacctgtttctctttccttttatagtgtggctacaagaaaatctagtattctatctgtggcctctgctatatttctgttggatggggatgatcacgagcagggtcagtcaaccatggtccacaggtcaaatccagcttgccatctatttttgtaaataaacttttattggaacacagccttgctcgcttatttacatactgtccgtggctgcttttgtgatgcaatggcagagttgactcattatgatacagactgtatggctcacaaagcctacaatatgcactatctggctctttgcagaaaaactttgtgaacccctaaaagagcattgggtgcttataatctgccagtcacaattctgtgagagttttatgaccctgttttaccaatgaggctctgggcgattaagtaatttgcctgaggccacccacctgggcaagaagtcacagagctgggatttgaaccattgccagtctgaccacaaagcctgtgctatcatctctaccctgtgtgtaccttcccatacaccctccaaaacccttcttacctaggtacagcgctgaattctaccactgtagcagggagaaccaatcagcccacctgaccgtcaaccagtctagaaggaaatgggaacaggtttggttggggaagaagggatctcctcagggaatttaaaggttgttaactgctgttttagttttaggacaaattacctgccttctaactgccatgcaaacaaataccgctcaggtgtgaccaaaatttaagcatcttaagtctccgctctcttcagttaggaattttcattaaaacagcttgcctttcactttcaaccctcaaacctaaggacttcaaatactagatttggtaactctggatatccaaagtcactttgggggaaaaaggagcgtaggaaagattgcaaatatttagcagggctatttttgaatctcttgatttaggctagaagtccaatgcgctatccattgcaccacagagcctgcttgcaagcagggctatttttaagtgaaaaagctaataacaaaatagtttgcagaatgataccttatcttgataaataaataaaaatcacccttatcgtcccattccatgtgtttgtgcacgtgtgtgtgtgtgttttgaatattattctcacagggtatttggaattctttttgcttacacatacttttaagtgtttgtacaattaaaaaaatgcattgcttgcgtaagtttttgtttcctggtttaaggtgcacatttttggttttattttctaagtacattgctgagctttcgctgatttctacataggaagacacagagaatgtgaactcacccagatacagaggaaaatcagggtctttcaggactcggacggggagggcatccagcaaaagtagggctgcagcgcccccatgtgtccagggcggtggaagtcaccaggagtaggcggaggaagccggcttctgacatttgggggaaggggacctgccttctctattgcgaatactattgggaattcccagagtcaatcagcagttaaatgcttactgagtttcttattcatactccatcttgccagaccagaaatctgagagagctggagctcccaaggcccaccctttggctgcctaaattaagactcccggggttcccacactctttttcccaatggcagtggagggtcttgg

SEQ ID NO: 55932 - DNA, 2981 bp, Homo sapiens
gaatgggagatggcctaggtgttcaaggggcacgtgcacagcgaggcttcattccctgggagtccgttgggaaaggcagagcggccaatactgattggtgctgatgtgcgagctcggaaaagggagtgtcggttcaaagttgttggctacagcgggttcctctttccgctggaatcacatcctctgtggctcggagacattcccagagatttacataaagcagcgtgaatcacccagacagaaactgagaaagcaaagggaccctgcctgatcctagcctggcggagctcggaaagaggtggaaatctgtctgaagtttgcaggagacccgcgctgcctaggcaaagggacccggcgaccaagacacccccgcgagggcccagggcgcgtccctcccgccaggccccagactccggctctgcgccaccccctcctacgccccggcgcgggcgcagccagtccggcttcctccaggcccccaagtcccggaccgagtgtggggccgcctctccctctcggaaggagccatcgccgctttaagtggaagaggagaggaagggggcgggggagcggggggcggggagcggaggcggaggagggggagggggatccccctggctcccacgtggtccgggcgcctgtgaatcgcgcccaccggagggtctcacagcgaaatacaaaagcagctgggaagcggcggggactcgagttcccagcgccgggcggagcgccggacagagccccgcagcgccccgcggccgcgatggggccgaagcgcccgaagccccggagcccacaaactgccgggcccgcctcgccgccgggacccgggtgcctgggctcggcttgaagcggcggcggcgcaccggcacagccgcgggagcatgggcaggaggatgcggggcgccgccgccaccgcggggctctggctgctggcgctgggctcgctgctggcgctgtggggagggctcctgccgccgcggaccgagctgcccgcctcccggccgcccgaagaccgactcccacggcgcccggcccggagcggcggccccgcgcccgcgcctcgcttccctctgcccccgcccctggcgtgggacgcccgcggcggctccctgaaaactttccgggcgctgctcaccctggcggccggcgcggacggcccgccccggcagtcccggagcgagcccaggtggcacgtgtcagccaggcagccccggccggaggagagcgccgcggtgcacgggggcgtcttctggagccgcggcctggaggagcaggtgcccccgggcttttcggaggcccaggcggcggcgtggctggaggcggctcgcggcgcccggatggtggccctggagcgcgggggttgcgggcgcagctccaaccgactggcccgttttgccgacggcacccgcgcctgcgtgcgctacggcatcaacccggagcagattcagggcgaggccctgtcttactatctggcgcgcctgctgggcctccagcgccacgtgccgccgctggcactggctcgggtggaggctcggggcgcgcagtgggcgcaggtgcaggaggagctgcgcgctgcgcactggaccgagggcagcgtggtgagcctgacacgctggctgcccaacctcacggacgtggtggtgcccgcgccctggcgctcggaggacggccgtctgcgccccctccgggatgccgggggtgagctggccaacctcagccaggcggagctggtggacctagtacaatggaccgacttaatccttttcgactacctgacggccaacttcgaccggctcgtaagcaacctcttcagcctgcagtgggacccgcgcgtcatgcagcgtgccaccagcaacctgcaccgcggtccgggcggggcgctggtctttctggacaatgaggcgggcttggtgcacggctaccgggtagcaggcatgtgggacaagtataacgagccgctgttgcagtcagtgtgcgtgttccgcgagcggaccgcgcggcgcgtcctggagctgcaccgcggacaggacgccgcggcccggctgctgcgcctctaccggcgccacgagcctcgcttccccgagctggccgcccttgcagacccccacgctcagctgctacagcgccgcctcgacttcctcgccaagcacattttgcactgtaaggccaagtacggccgccggtctgggacttagtgtcaccgggaggaaaagagagagatctggggctggggtatggatgatggggggaagggcggtcgcctctgccactgtcagggaccagccggccaacgcccacccgcaaaggtgtctaaaaacttcagcttttcacccacctgcccctttctttcaatcccacgctgtttcctttcaaagttctgggaggacgaactcaccgaggcgagaagtgtaacattctctccacccagcttataaaaggattctttactgtgccagcacggggattggatccgaagaaactggctactggggtttggcccccgagtggccgtccctgtgggagatgcaccccattcttgggccccccctcattccctttccgaaaaaggaaaacttgcgtttgagccgttgagctaattctgcaattttctaccaaacagagcgctggtggccccggagcagggctgtgacattggctggtggagcccccttcctgtgttctccctttgttccagcgccgcgatggtgagatcactgttccaagcagggggacggctcgcgataggacaaagagagcaggacctccagactctggggagccctgcagaccttgacaatttgcctgactcattcctgacctcttgtcattttggcctgaaggctacaaattcagggtcagctgtatgcactaagtcaaataatgaatttcttcctccctctcgcaaccgaccaaaattttgacaacgatgatgttcaccagaaggaaaaaaaaaaatcagttttatgcactttattttg

SEQ ID NO: 55933 - DNA, 1962 bp, Homo sapiens
gccctatttggttattcagagagatttccccacaatggagacatttactttaataggatttgacctgaaataatccataaaacaagttgttgtttgttattgacctgggagtcaataacaaattctgttctgtttgccaccagcaagtttgagatatatgccaggaaaatgattaaaaggaaagacaaaaggaaaagattgggaacaagggaaaaggggaaggaacgttaaaaagaatcacatgtggtagagtggcaaagaagcagcctttgcctctggtacagatagccctcacgttgaccttcaatcagcatcagagccagcaaaatgatgccacattgcaggggaaagagctagtgcctctgcaggttacatttaggattaaagaaaggtcaagttactccagggaaaattacttttcatttgcagtcagcatcctgcctgtgctacagctcccaactatgcgaagtccagccatcaccacttgatctttggccccttgacgctgaagagcacattctgccaacctttcaaaaaagaaaggctttgccatcacacatgaatctcaaccttgcccttccagaggcagcacattcaatttcattatttagtgagcctatctctagtgacctattagcgaaatcaaaaatgctaatgaaaaaacaggttaagcatctttgacttctcaaggcattgagctaataaaagatgcccagaaaacattgctgtgtggctcccttctcctccacctgtttataattgggacccatccaaagtctctctgcaatataacattcgtgacccaactccacataagtgtctgtcttttctgatactatgatgctggatgcatgactcatgccataaaaattattgtaatgactctggacttagcaattcagaagttggtgctccatgcgaaatccctcgtgggctgttttcaagtgattactcatggcccaggtatgtgctgcatgtatgagtatagttacgttggttattagactatcgaaatacttccagctcagttgataaatgtctactctgcggccccagagtgactcttccatgtttctgaacaatccccactaccatcccatgatcctgcaactaacaggttaacacctggagtagcagagagttcttgaaccagtaacccggcactaaggccaacagtaagttctgacttcaccttatgtaatttgaatagtatttcctgggtataagatgtaaaggttcaaatccatggaacaacagaggtatcatcctaagccctatctttagttctcctgttttaaagcctcaatttacttggcaaacagacactgagcatctgctcattgcattcatgtttcctggctgctaactttgggtcagacactgtgttaggtggtaggaacaggtcagttaactggagtgatatggtttctgatcttctgtagtgtagagtctggtagaggagacagacattaagcaaattattactgtaataaatgggatgacaggaaaatacatggccctatgagagtgttaataggggacaacctcacattggaggttgaaggatctggcatttaagcagagaccagagcaatgagcagaagtcagccagcatagaggagaaaagaaggagtggagagcatttcaattggaaggaattgcatttgagagcttgagagaaggagcttgctgtacagaaatgaaaggctggtatgattgaagagtactgccctagaaggggattgcatagttcgaggctgcagaggtaagcaggcacctattaagtgccaggcacagagggcaggagatggatatatcataatcctcacccctgagggaggccctatctcatagtggtaagggctgaattacagagggggactctctaggttcaaaccctggctcctccattttctggctctgagaccttaggcaggttacttatgctctctgaccctgagt

SEQ ID NO: 55934 - DNA, 2939 bp, Homo sapiens
tatgtttgaggaaagcatctggaaattctaactcaaaatcatctaagggaatcaatgtaaaacagacaccattccatcccctttcatccttcttaatacacctcagcctctcccttgactagataaaaacgtaattttccctctcccaaatacagtgcaaaacaaaaactcttctgtgaatggagagacatggatatggggtagaggtggagacttgcctacattaccagcagccagccgaaaatgccctgtgtgtgtaaaatatgttccttcaaaggggcattgtgagcactaaatataatttgtgccaaaaataataatgaaagcttagtgaatactctacagtgcaggcatcgttacatttaatccacaaaactaccccatgaggtagatatttaccgttcttttcacttaacatcttttttaaaaagcggaaaacagaatgatgaattaacttgtccatggtcataaaactgataggtagtggcaccaggatttggggaccatcgggcagaggatcttccaaaaccggcttttaaagagccacaaaaagatgtagccgggttcttggcactacagtactgctttataaacaacagttcccttcttttctcttagagcccagtgggaatctagagggacaccttacataaaggaaaatgactgcaacctggacctgtcactcgacaaatactgcctctccccacctcacttcacctgacgtctctgcccaaccgaaggcagctctcagaaaaccgcacagaggttaccaccccagaaattctgagatcctaggaggtagcaatgcaaatagacaaagcacagtattgctttggatcgaaaatatttgtttgctcatcctaactccaattcccctagcctagaacaaacatagcccttccgcactcaggaaatcccaagaggtcaggttcagtctggtaaacaacactgtccgggcaccttgcagaacactggggactgtgacgggcggcgacaaattggcacaagagagactgaaatgcacagggacaccagcctagtggccgtgaaaactcaagttgacacttccagggagggaatgggggaggtggagcccaattcctgcttctggagagagtaagagacttcctccatcctccttctccctcctcctcctccaaggcacgctgagatttggagcggaggagctgagccccgcgggaaaagcagaaaagggtcattgccactttaaatgactcaggaagtaaaaggaggcctcctgacggggaaagggaaagtggaaccggggcggcgcgggggccggcggctgccgcgatctctccctggtagcgggaggctgagcgggcggcgcgacgcgggggccgacgggggcgccgggtggccgcgccggaagtgccttgcgcggcagaggaagcgcagggacagagcggagcaggccgagccggcggaaagggtctttgctgctgcgcccgggcaggggctgccgcggccccaggtcccgcttcgagacgcggcgcggtccaggcgggaggcgactccctaggaagggacccggggcgggaggaggaagtgaggccgcgcggaaggaaggcggcgagccccggggccccgaggccttggccgcgtcacagcacccacatggcctctggagtgggcgcggccttcgaggaactgcctcacgacggcacgtgtgacgagtgcgagcccgacgaggctccgggggccgaggaagtgtgccgagaatgcggcttctgctactgccgccgccatgccgaggcgcacaggcagaagttcctcagtcaccatctggccgaatacgtccacggctcccaggcctggaccccgccagctgacggagagggggcggggaaggaagaagcggaggtcaaggtggagcaggagagggagatagaaagcgaggcaggggaagagagtgagtcggaggaagagagcgagtcagaggaagagagcgagacagaggaagagagtgaggatgagagcgatgaggagagtgaagaagacagcgaggaagaaatggaggatgagcaagaaagcgaggccgaagaagacaaccaagaagaaggggaatccgaggcggagggagaaactgaggcagaaagtgaatttgacccagaaatagaaatggaagcagagagagtggccaagaggaagtgtccggaccatgggcttgatttgagtacctattgccaggaagataggcagctcatctgtgtcctgtgtccagtcattggggctcaccagggccaccaactctccaccctagacgaagcctttgaagaattaagagtaagtattgggccttcagagcataaacctaggggtcaggacacctgggtttcaactcaggtggcctggctgtgaccacattcgctttcactgtgtccctaagaagctagtctttccaactttttgggagcagttcttattcaccgtttttggttgaactcttttgagaatctgatgaaagttctggactctgacctgagaaaatacacacaaaatctagtatacaatttctagaaaattgcaagtttctggtctgtggatcccaggtaaagcatttcttgggagttttgaccccacttaggccaatttccacagcatcactattgttgaaactggtgctttgtgctagggctcttgataaggcaatctttttgcctacttgaaaacatgggaaataggattttgccacatgaatccaagcaagtgatacgtctgcattgaaaagactaacaaaatagttttaatagtaacttcatatgtgccccgagttcattttagattcttcgtgtttgaaacttagtagaaaaggagggtaagaagatggaggccaaattggggtgggagtggaagttcccatgtcctctgtctggatctttgtctgtcgtggaccttactggtcccccagaacagtg

SEQ ID NO: 55935 - DNA, 702 bp, Homo sapiens
ttcaatggctaaaaagaaggatataaaagatacgctgacaccaaaaggatgaatgaggtcccttgggaaaggcttgagagttatttgaaaaatctaatttgatcacagaaggaagctcaaaggaatctgctgtgatcacttctgataaagttaggttgagagaatgccatacctggaaaaataatgttaacacattgtttttgaaaagtgggcaagaaaaagagaagagccattgtttgatggaagaatgatgtggatcatcaaatgccagaactaaccacttacggaggagaagaccaaagtccagattaattaatgtttgcccaaggacacataactaataagtaacagagcttggactagaatcccaatttcttgagtcccagttcagtgccctttataccacagtgttctttatattagaattgcagtgttcatgtttgatgaaaaatgctagaacaaggcagaaatgagtctttgaaggaaacagtttgatgtttttggaactggctagcttttgtctaagacgtgcctctattttgggtttctcactttgctaagaactaaatactgccagccatacaaataaaaaggcaaggcaattatttaggcctcctaggtctgtgcattcacttctctgctctgcttgtcagggcaaattatcaggtcatctccactgggcagtttgaacataggattata

SEQ ID NO: 55936 - DNA, 548 bp, Homo sapiens
attgtgaatggtctctcctccacatttgaggggcatatatttattctgtgtctgctcaactcacattaaaggatcggcagcctactaaaacattcatgtcacttgtagctgtaaatggaaatctcccaatgcagagctttctagatatattagactaaacactattttagctctcagtttgctcttctaaactagggttccatggtccagtaagtttccaaaggccaccttcttggagctccacaagtttcatgatgcaataaagactttgagcagccttgtgataatgaaatatgtttagtttgtttaacctgacattcccacacttattgaccgtaagactcttaaccccatcacataaatgtaagtctttagaagtggtgttcctcaagatatactatgatgcatgctgctttttctccactagatgttgggacttgttgctaatgactgacatgcagaaagagggtataaagaaaatgtagagtcattatcttagttgaaatcatctcttcaccatactttgggacttctaggacatttctctg

SEQ ID NO: 55937 - DNA, 1289 bp, Homo sapiens
tctgtcctttgtgagggcagtatgtagcttttttatctttgtagccatcttatttaggaacagaatgggggacaagtttgctgatcgcggttcccagcttgacttttccctttggcttagtgattttggggtcccgagatttattttcctttcatagttcattggcaacaaatataccatgctaatgtatgatgttcatagtaggggagactaagtatgggaatcctctgtactatctttgcaattttttggtaaatctaaagctgttctaaaaattaaagcttataaaacaaatgcaaacatgcctttggacccaggaggaaactcctgggaatttttctttggaaataactaaggatgattcatccacaatgatgtgtgtcacagagatgtgggtaatagtgaaaaggtagaaataatttaaatgcccaatattaggtatgataaatccatacaaatcaatcatgatcataatcttacagaaatatatttcttgatatgacattcatgattgataactgagtggaaaaagcagactgtgaaggagactgtcaagtatgagctgattttataaaagataacttatttttatatatgtatagaaggtgtatggggaaatatatttcactgtgataatggtgattatctgtggtggtaacataatggaattttttttcttttttatggaaccaatacttgtgtgttacagaaagtaaaaagcaacaaaaaagaaaaagttactctttgaattaaaaaaataaggctgtaaatgattctattctaaatccagcagcagtaaaggactcagtcctaaagaagggaattctgagagcagatgggacactggcaacctacaagcctgcctgttacttccgttcagtcacctccctattgcagggcactgcctgggcaggcctgctggctccttttaatcttccatagaagtaggccatccccacacaggttctgccaagtgcaagaaaggtagctacctataaaaacagtaaataggctgcaaggtacatggagatcaattcaaacttggcactgtggtcagagtgtgggcctgaggtcatgctggagacccaaggctctctcagaggtccctaaataggtctggagagacagagtcagctgtgagggctgagacaaactcaggtctgtatttcttcttcttctatagtaatcctactcatctctggcattttttcatcttaaaaaagcacgtgcttgtatcttccatctcttcatggtaggtgttaatatcccattttttcaggtgaaaacat

SEQ ID NO: 55938 - DNA, 1400 bp, Homo sapiens
ctccagcctgactgacggagtgagactccatctcaaaaaaaaaaaaaagtacatttgatggaaccactccgtcgtttggttatgtttattgtgtttgtctagaagtgaaggttatcagggaaattatcccttcttgaatgcctgcatgttattattctctccagtgttcagaggaggaaactgagtcttctaatgataaagttcgttgtccagcgtcaccagctggttagtagctaaaccaggatttaaacccaggttttccctgaagccgagctctgttttacaccaaaatagctcttctgggcaccaaggcaggcacaacggagttccctgctgccagcattaatgtgggtataaatgagttaacactgaacactgcttctggggcatgcgatgtagccgattagattctccgcggactctgagtccagaggctaggagtctttgttttgtcactgataaatgatctgcgggctcttaatcctgattctatattcctcatttgtaaagctgttggcatatttgcactgagcagatcgctctctctgccagcttagcttcacgtggcaatttgggatttttttttttctttaagattttataacgccgagagtaaaatgggaatgttttcataaatgcttaagcatctttagtgaagctaatttatagaatttaaatgttcctctccggcagttttaaactcaaatttctcagcggtggttggggggttggggccaagaaacaggaaactgctctgtttcactgttcatactcaacaataaaaaattaaacggcctaaaaagtgcaagctagagagaatttttttcagacgtaccctcctctgaattggagtgatggtgataaaggcaaaaatgggattcttctcttttccgggtcccccggccctccttggcaggggcctggcggccacaccttaaatttctggggtgactcagcccctgtggcacagtgctaggcatgacacccagcaccttactcaagtcacctttgccagcggcttgcctcccagcccctcccttgggagcatgctttggcaatggcgtgactgggtgatgaagaacctaaactggattgtgcaaccttgcgaggttgtgtaaccaccacggctgcacttattgcacagtcggctagagagcttagcgcacagccagagtctgcagtgaggttcccatggtaagatttttttgggagccactttctgcttctattttacatcccgtccttgttttagcacctgtttttgttgccagaagatgagatggcatgaagtctgtcttcctctctcttcttatatggaaccaggtggtgtatacataagtagatatttaatatatcaaaaggggaggcctttctcctcacttctcgtttatggctttggg

SEQ ID NO: 55939 - DNA, 1227 bp, Homo sapiens
accggtggctcccggatcatcagccttggaatcagccaccatgttgttaaaaatgcagaatctcaggctccacgccagatctactgaaccagagtcagtattttaacaagatcgtcaagtgtgccggatgcatattaaagtttgagaagcactggtattccacactcgctactaaaaatatactacaattttctcataagatttgaccctttattttaactttttctctctcggtagtaaactcactttgtagtttgagtaaagaactcaagttttggtctgggcgctgcatctcgctgggtgtggaagcaaaggcagaaatgagagggacaaaaggaagcagagaacagagcccaggctgttagaagatcctcgcggccagacctgggaggctgaaaggctgagagaccgaaaggctgaaccctccgccgcgctcggcggcccctcggagtcaggacacccagggtaacatgcgggtggccacgcgcagcccaggcgcttgcaaaacttagcggagccgggccggggccgggcccggggaaggcgggagggaggagggccaggcgggagggcggggacggcgcggcgaggggcggggtcagcgccgaggccgcgggggcagcaacgacgccgggcagcgggagcggcggccgcgccatgtggctgctggggccgctgtgcctgctgctgagcagcgccgcgggtgagtcggggggcggccggcgaacttcccgcggggcgcggggcgcggggcgcggggcgcagcggccgggtgcgatcgcgtcctctcccgggcgcgggccgctctccgggcgtgggtgagcgcggagggcggaccccggcgccgggctggcccggaccctgccgaggggccgccgcggggtgcgagccgtcctattgtgtgggcgtgcgcgccgggtcgtgttgtgctgtgtgcgcgggcggggctctgtgtgcagtccgggtctggggagcccggcggctgccccgattgggcgtagctcgagtgtggctgtgtgtgtgttgtgtgtgttgaggaacggaggcggggaaaggaaaggagaggagaggagagaactcttccctggtctcatcttcccagacgcctggtcgcgcgcggctgcgttagcctcctctgggcctcttcccgagtctctggcgtgcactccgtgcctcagtttccccacctgcaccgcggagggagtagcaaagctgcttcctttcatt

SEQ ID NO: 55940 - DNA, 3836 bp, Homo sapiens
ataggcacccaccaccagcctcggctaatggttgtattgttagtagagacggggtttcaccatgttggccaggctggtcttgaactcctgacctcagtgatctgcccacctcggcctcccaaaatgctgggattacaggcgtgagccaccacacctggccagattgttttcattgtttctgtttttcttattaaataaatgttatatatctagcatagggattttagaaaaggagcccagtgatggtcctctccttggttctcaaccctgtgatctttgtgttttaacccctgccctgtcactttagggatctggaagcgggaaggagacatctgcgagtgctcagatgactatctcgatacactcagggtgtattttctggggtgactgtaggggcatctcggttcatttggtggcaaatccaacttttctattccctaacgaggactttgctgcctttatgatttttctctcactgcctgcttttggaaaaatcttctgacagttatatttaccagtagaactagaagggaatgcttcagtctatcctgtgtttagagtcatggagttggaggaggtttgggtgggaatctgagtgacagccaaggagaaggagatagggccgtcttggggttttctgcagtctcagactctgggtctttgtatgacccttgggaacatgaagcagccagggaatggagccaggaccactttaccccagcaagactcccaagctatatcttcaaaggtctgagggacatggtgcattcacttgtcttctgctacccacagatgaccagctctgtgaaggaggcatcccctggcttgggtaggcagaaagtgttggaaaggaattgaagtaacatttcagtttgaaggttttgtaacagatggtggtggcagctgctctaggagagacaaatgaagttagtgaaatggtccttcattcagtctaccttgtgcatccatccatttagccaactgtgttgatacgtatgatgaaccaggccccatgtcgcacactgggatgataaagagagaacacctggccacagcgtctggaaactccttatctaagaagagggacagactcatgcccacatgatgagttctgttgagtaccaaggtagcagaaaaggggagctttgaactccatttgggagtagccagggaagatggcctttctgcaagattcttgagggaatgatcaggcactcaggcctgggaggggagaagacatcagacgtcaggggatggtcagatgcctgtgcagaaggtaaaatgaaatctgtcagataaaatctacaaaagaatagcggttggagagttgtgggcacaacaaatgcaaagaccatcctggataaagttaagttggcaggaagcaagagaaaaaggggaaagaaagtatcagtatgcagtcgctagaaaggataggacaaaataacccaacttggaaggccccagaaagacaaatgattcaagaagcaccgtctgtgtctgagacgctgtccctgcacagcagtgttgtccagctggtgagagatgaggatgagagggagtttgaatctgttcgctgctcctatctacctgttgaaaatgtcagagctgtgagtctgcttctgggctggtggccagggtctgtggctcccagcgctgtagtgtcctgccacgtttgtctcagttggtaattgggtagaaaaccatctcctggggcttggtgaccagggtatgagggcactgaacacagtgccagagcttccagaagtgctggggcaggtgcatcccttgctgacttggggccccattgaggctctgcgtctgttcctcatgactcatgaatgtgttcctcatgactgttcctcatgactcatgttcctcatgactcatgactcatgaatgtggctgaattgagggctaaagccctgggtctctcttacagcattgctttggcattcaccaggccagggcaggcgtgaacggtggaatagggagtgtggtaggatgaggtggaaggtggggtgtcctttttcattccccaaaacagctttcttgaactatccaccaggctgcagggggtatcgtttacctggggactgtgtggtgtcccatctctagggaagaacaatgttgcctcctagtggctgtgtctgtcttggacaccggtatctgagaactgagaacaatatttgttccataaatgaggcatgaatattactctttaaagattccctgttgaaggcaggcacagtggctcacacgtgtaatctcaacactttgggaggctgaggcagcaggatcacttggggccaggagtttgagaacagccagggcaacaaagtgagacctcatctctacaaaaaaattaaaaattagccaggcgtggtaccacacgcctgtagtcccagctacccaggaggctgaggtgggaggatcacttgcacccaggagtcccaggctgccgtgtgttataattgtaccagtgcactccagcgtgggtggtagagcgagaccttgtctctttaaaaaaaaataaaaaaggcaagaccatcctggctaacacagtgaaaccccatctctactaaaaatacaaaaaaaattagccgggcgtggtggcgggcgcctgtagtcccagctacttgggaggctgaggcaggagaatggtgtgaacccaggaggcagaggttgccgtgagccaagattgagccactgcactccagcctgggcaacagagcaagactctgtttcaaaaaaataaataaataaaaaattaaaaaggaaagaaagaaagaaagatcccttgttgaagctgaatgcccatgcccaaattctggccttctctctacctcctgcttttgcagtagctttctaatgagccttcctgacctccagtccttgtcactgaaagcccagtcctgcttgtcttgctgtctgtgttcaaacacacaatagcccctcattgccagtagcataaagctgaatctcttactggacatggaaagttctccgaggtctgatctgttcaccacatgcacccataggcacctctgaacaatccttggtttcccacctttcaggcacacttttctgtctgtctagaacgccctcaccagtctagccaggccagaggtttccagttgttcaaattgtaattcacatggtgctgtttcagtgaatcatgctcatatctgggaatgacctgaattctatcccagctctgatgtacccacatggtaacattagagacagtcataatagcagctactgtgtattgagcacttactacacaatacacagtattgtgtagtaagatgggccaggggtgcacatcgcaaaacttcagggggtgccatttacatcgaatacagaagagaggcactgctggccactgtgccaagaccttcatatagataatctcagccctaacagttggactctgttaccgccattttacgaagaaggaaactaaggctacaaatgttaagtttcttgcccagggccacatagctagtaaacaattgggctgggctgtagtcaactcaggtctctttccaaagcccatggtctttccatggcactccgctccctccttaatagatgctaagttccgtgagggcgggatcccactttgaattgtttttagtcttccacctcctccattgagcttgataaatgtatattggtcaaaatccccagtcctgtctagtgccagttacacatcagtgtctgtagtagagaccctggcgctagcatgaattctaccaagcaggctagactttacaatcaatcaatagaataaaaggaaggaaaataaacagttcctcccagcccactgagta

SEQ ID NO: 55941 - DNA, 1856 bp, Homo sapiens
aaagtactttccatctctcccttttagagatgagaaactgagacttagctctaagcagacctaaatttgaatcctggctccaccacctgtccaggtgtagaaagttccactgtggactgactgtgggacttgcatggttgccatgagcaaaacctgatctggaagagttgtatctaatgggccctaatggtggcatttcagaagcaccgaggagaccctgggggcttctgcagctgggtctggggagcagggttgaatgggtgccctgggtgggcctgcgctgcctgctctgtcttctgccttctctgcctatgttgcccagggcctgagcaggagagttctgttaggtgaagggtctgggcctgaggttttcttttgcaggaagcgtctccccttgcggggttctaggagaggcctgcccactaccccaccttccctcagcttccctggtctttgttccgattttaggccagggtgggaagataaggaggacgactgcgccatctgctgggcatcttgggcaagctccagctgcgcccaggtgaggtttggcttttgcgcatgagaaccttgggtcaccaaacagggtatggccccttgaccaataatgtcttttatagaagtagccccagggatacacttccagttcagctggtgccaggaaactctcggtacccacagaagctgcccattatctgtgcgctcaggtgtggggaacagaaaggtgaacagtgtgtgggggaaggcacagacacagaccattaaaatgcagtgtgctgaggaatgatggagaaaacgcaggtggggaagacaggccagttaatttgacttcctgggcccctgttaggtgctgctcctgaatccagaaggatgaataggaattaggccaggattaagggaaggcattccagagagagggcatggcggggcaaagccctggtgaccatgctgccacctctgctcaggcccagggctagtgcctctttcctgccctcctccagcagttggagactttgctgaccccttggaagtgctggtccctgaactctacagtggcaggagctcagaagatccacgtctgcccctccacttaccacctcagcagcagctccttcctaccctcatccagagttcccaatccctacctcttcctacccaagccaaatagtgtggctgggagactgctatgaacaaatctcccacgctcacagactcaaaaccaataaaggccagaaatcaatgctggagaatgaaagcaagctggagaatgatgaaatcacctagttggtgaattagggcccagctgaggtcgatttaggacgagcaattcaagtgagcgtgaattctgtcagtctgccattctattgcattcaatctaattcaggcatggtttactacacaggtcaaatcctgtgagtttgtggaagaagtgggatgcaaagggacatttatggggcaatctactgtgcgccagtcacagtggaagatatcatggataccgagtgaatgagacatggtctctgtcctcaagaagcacccacatcaccacctgctcctccccaccactgcatagttcctttctgttcttttctcttcctgcagaaaagctgcttccaggaaagcaactgataaattaagccacactgagctgtagtcagctgagtgggtgtttatgaccgtacctgtgaattgtctctcactatctgctctatttcagtaaaatacagaaacccactagctcattctcctgccctcccccaccccaatgtgttagctacacacaagaccacccagcagagactgtatttcccaacctatcttgcagctaagtatagatcatgtgattgaggccagtg

SEQ ID NO: 55942 - DNA, 1316 bp, Homo sapiens
ggcttggtggcgggcgcctgtaatcccagctactcggaaggctgaggcatagaattgcttgaactcggggggcggaggttgcagtgagccgagattgcgccactgctctccagcctggacaacagagctagactccgtctcaaataataataatacttcatttgagctttacaaagccctatgaagtaggtccctttcaacctcacaacttttcaaatgattatcaggagtatgtcctgcccctttcgcaggtcaaagagagtagggaaaatctggacctcaagggaacattgaacgcacaggtcattcggagggctgggcagacgcagtaggagataatttcttaattgtgcaatgcaggaggggctacgggatgaaatggggaactgacaacgtgggtctagcaattaccacttcaatgcaccaataccgaaaaccaatcccaaagactaatagcaggaggttgtactgcgccttcatgcccattattttatttttttttatcttacgttcctgtcaaaacgatattttgttcttactttttaaaagctcagaaagacgcaacgatttgcctgggatcacacagagaacaagcagcagagttgtggctccaaaccagggtcaatttgttcccaattcctgctccgtctaaagtctcggagacaaagggccacctcacgctgtccccaccccttcgacttaccttgagcaggctctggagtgctgcaaaatgctccgctgtcagggcagccatcttgccgaagtcacatgaccgtggcacccagggaagcgaggtcacgtggctgtcgctgttgtcgcggggcctgccgggggctgtagtccttcagagtgggggaaggcgtttcggttgtggtgctgcggcagtgagcgcggatcaagacggacgcggcggctggatgactaaaccccgagactctagaaccaaaggactagggggaccagggcggaggatggtttactcggggaggaaattggcttgacttgtctacttaccaagtcagggaaacaggttttcccttgacccatgtgggtgggctggcgcacttggggaatgcacctgcaagcttggcaggcgccttggaaacgtagttgttcaggagtgatcggcgtaccagtgtttggaatgaaaatgaggctgtgcatatcgggcttcttggaattgacacacacacatgcacacatcctgtcttgaatgtaaaattacttctgcgtatatagtttttcagcctatgtagtaggttggagctggtattattagtattatccagattgggaaataatcatttagggttttt

SEQ ID NO: 55943 - DNA, 1517 bp, Homo sapiens
aactttggagactaacaaattgccaggacagacttataatgaattcactaatataactagatggctatttattgaagaacataaaatctgccccccttcatccaattttttgtcctgtataggactccttagttacctacaaaattcccatgtacttttgaattatagtaaaatgtatctatttccatggaaattgcaagtactttcattcagttaaagcaaccatgatttactgatcatctactatgggtcaggcactatttccagaacttgggaaaaatcaagaaataaaacagatctaatactttgctctcaaggagcttatcatccagtggggcagacaataaacacataaattatttggtgctttagaaggcagaaagtgctaagggaaaaaagaaaattagggccaggtggagagattgggattgttcggcaagaaaggtggaaccacgctgtggtataaatacggtggtgaggggacctatgagaaggtgagatttgagccaaagtggaagagttaaggggttagctgtggcaagagtgttacaaacagaagagctaaagccaccactcaccaaggcaggagcatgcctgacatgttcaagggatagcaaagagggaatgaatgggtagaaggacaaagagtgcagcagaaaagaggtcaggaaatgaatcatgggcctatcacacagggtcttataaggattttagcttttactcccagataccctgctacaatggtctgagcagagatgacatcatcttacttattttactaggtccactcccgctgctgtattgagaacagcctggaagacaagaatagaaagcaggaggcctgttagagagctggtggtgagtcacaacagggtggtagcagagggaggaagtgagaagggactggattttggatatattatgaaggtagagccttcagttaatactttctttaaaaatactggtaattttacagttgaccatacactttaggtaataaacaagatttaacatgcctaaaatcacaataactgatcacttacagagtcagtattctttgtgtggttgagattatccttatctagtagcatcataatttaaggtacatttaaaaaatactattttctttaaagcatagagtcactccccagtctgcattagaattgctttaagtaaaagtagcaaattatttacttatttatccaagggtcaagagaggaggagattcaagtcacttttcacacaacagtggaaactgggataagaatctaactttctcaattttctgtccattgttcttttttcctaagtagctttttatgtgtaagactacttttgggatgttccatgttctatgtaacaatgttctctgcatctggttctgttataggacaccattttttcttatgctcacgtaccttattgattttatgatgcaggctttgcagaacctatggccgcatggcgtttgcactgcttctcgtaatgccatcaagcagatggggcattcatacttg

SEQ ID NO: 55944 - DNA, 2482 bp, Homo sapiens
accatgtaaagaaaatatgagaaattatctttaatgtgctactagctttagaaacagaaactgtttaccagcttcttaaatttctaaagtgtgaagacctacaaatgtactccaatggccaagagatgctgcaaaatactcaactgttgtgccttaactttgaatccaaattcaaggggcattccccttcctgggcactatttactctgctccaggaggcaaggatttgaacttctctccaaatctaagtgtccaaaagtttaccggcatcacatgcccaaatttatcacagagaagagctcatgttacaattctgaaatattgtggtgcatgcaggctgaaactctgatgtgatcctgtacccaccacatgccggactccttcctagagtcacaaaagaggccacattgttcctgcctatacactcaacctcaaaatttgaaaagcccctctcccttccctagtaatcaaaggagaatgaatgaaatgatagcggccaagttcacaaggccaacacagaatttctttaccagtttttctcgtttctacatggaacctgtgtaacaagacattcagtaatagtaatctgctctcagagaaagaaacaattaaataccatacagcgaagctgctaatactttatttaggtgctttctgttcacattcaagacagtcctaactcagctggagttccccttaagccaaatactaggaacagctttatcaacccggcgtctggaacaatcgctcgaactaccgagtttaggggcgggggagaaaacattcgtgtcatctgagcctttttttttttttaaactcgctgcctgagacttctatagagttcaacagggaatccaaaaatagctttcccatgacagtgacagccggagtcgccaggaacgtaaaggattttttaaaaatttaagcaggtgtttgctccaaggagcggacaactgcaggaggcaatttccttatctgggaaggggaaaaagcggagttgaggggagcgaggttgagtaaggcgacgcggggttttttagggggtggaatgagcgaggaagaggaggcctggggagcagaggtcaggggacagggaacggtgtccccgacctgtgggaagcgtggggacagaggctgcgtcccgacctgcaggaagcgaggggcagggaacggtgtcctcgaccagcgggaagcgagaggacaggggcggcgtccccgacccgtgggaagcaagcgggtaggggcggcgtccctgacctgtgaaaagcgaagggacaggggaggcgtccccgactggtgggaagcgaggggacagggactgcgtccccgacctgccgagagcgaaggggcggggggcggcgtccctgaccgctgggaagcgaggcggcggccgccaggaggaggcgcctgaaggagactcaccgttctagtgcgcggggaggccgaaccaggagggcagggctcccccaccaaccgcacgactccgctcagccaaggcgctggtagaggacggacacagacactgcgcgccgagacgaggctgcttggacggcaaactctggatccagtgggagccttcgccaccttcgctggccgcccgcaggccaagccccagctgcggacgccactgcttccgccttctctgctggctgcggggagcgaggggcagggagcgcgccggggaggagacagagcggccgagttcggagagagtgccccctggcggtgatcctccaggcggactgtggcgcgggccgggcggcgcccccagccccgcagcctggctttcttcctgctcgggtgtcccacctgggaattcgttgcaccgcacagccgaacccgagtgtgtcaatgggtgtgtgttggaatgaggatggcgacgagaagatccctcccggaataacttaatttggtgagcagtggcgacagtagtaatcccaaactgcgcttttatagcacccctctccaagcaggagaaaaccccagctgggctagatcgcttgaccttcaggaattcttaaacccctccccagctccaccctccttgcccaggaagtttctgcgatccatagaaccctctattattacctgctcttccccttcatccggtccaagggagtcagcccttgccttaaatatttctttgaatttcctgccaagaacaccagcgctttgtctttctctgtcatgggaaaactattttaaattccctgtttaactggtcataaacgtctagagaatgtaccacgcgttttgctggagaagcacaaaagagtttcatccacctctgcatatttggttcatcgtccacctcttaggggaggttttccaggatagtagtcatgcgtatgtatcctgaagccagaatgcttggttccaatccggtttttcctacaataaatgtgtgattcaggtaaaatacttaatctgtacttgtttcagttttctcatctcgtattaacatggggataataatagtatc

SEQ ID NO: 55945 - DNA, 1086 bp, Homo sapiens
ttctgatggtacgtagatttttgtctgaaagaattataaaataaaatgacttagagatcgcttcatataatcatcgtatttagattccttcacatgtgaatagcatttttttaagtcctcccacacgcttgcagtgggactgaatgaggaaaatccaaggagttaggtcagtaaagagccacagaacctttactgccattccatccaaggagctgggacatgttttagccacggactatatgctccctaggatttctgggaattgtagtccttttccgtaaagagtcaccatgcgtcagctgaaagaaccacatttcccaagaatccgttctctctgggatgtgtagctttggaaatctgtctttgttgctctgggagaggggactcctggaatgtgtctgtgaataaagactagccgaaggtgcgaagtgactagacgggagcaaaggaggaaaactagggaatgggaggtgagagtggctgacaccgacccaacgtccgggttgccggaaggctgcagcgcccggagcggtgtcgggcaaaccgctaccctggtattgctggagcctctcctggggacttttgaacaggtgacccgataggaagcacaactgcttctgttggagtgcggttacctggagaccgcagtctgaagggactcccggcagagatgtcgttacggtgtcctgcctgtctggatgcttaggagcgcgactcaaaactacacccctgacgaccctggaggtgcttggggcgggaggttgaagggggcaccgaggttacaaaagccgtgactgtcttacagaaccgaaagatggatctttgaatccctagagtgcaggggagacattgcctgttaaagatgtttaccacttctacatttagtaatagaaatacagttattaggttttaacgagtgcactttgaaggtcctttgttttcttcactgtttttactcctgtttttagggttcttttagggaagcagagaaggttcctaaacacatcttcttttcatcttcattctaggaaaatagagttagtggctttttcacatctttccagtccaagaacttttgggtaattc

SEQ ID NO: 55946 - DNA, 580 bp, Homo sapiens
caatcgtgtaaacttggtgcctagagaaatatttttcagacttgcctgacagccacctgcaccagaatcccacagggtaaactgtgggatttaaaaatgtaattttgagggcctcattttagacctattcagtcacagttttagaatgcaccagccagggtttggtataaaaataaacaaataaataaacaaaacctcaggagattcaggtgagagtggtttgtatatattctcaggtttgagaaccactgcattagatttttgagattattagaatgctttggagggagccaggttatgcagagcttagtttgccacggtcagcaatgtggactttgtcctgtgggctgtaaaaatctatggcaaaggtctcaacagataaagattttcaccaaatttgccttttgaaagatcactgagctaggcatgccaatggacagctggaggtttttctcaggcttttggtccttcgatgtgtctgtttccttttgtgtttttttttctatattaaaaaaatgcacaatgttcaaatatatattcattttataataaaatactaaatgaaaactttgtgctaaat

SEQ ID NO: 55947 - DNA, 905 bp, Homo sapiens
tacctggttccatatagttgaaaataatgtcttttattctaagtgttagactacttcttaacagtgcagtggttcaaaccccagatttccctgctgtctacatcatgagtaataccacattttgataaatcagtatcgataagtgaaaaatgaggagcctttctgttgttttaaaatacataataaaagagccaaatcatcttcacaggaaactattaggttgatttcctgacctgattttacatttctgatatgcagagctgctccttggttcactggtgctatgcctgaatcagtcctccgccgagtctttgctaccaaaagtgaaagttgtcaaggcagtttagtaagtgccattataacgaacaagcagtctctggactctgtgctttaaaaatccaataaacagagtttgcactattttaactctctgttaattaaagtaaggaccatttgatggaaacgagaggtggattatggaggcaactataattttgttttctttttccctctccctttcctgctccaacctatgtgaagggtagataggctataattgtaacagggatctgggccacttaataaatgtttaattacattcagatctgttcactaagctcgtgagttattgtcagccagttaatagaacattaattaaaaagcatattcatagaggtaaggatcattttcacgtgacaagtttctacctgcttttagaaccctaatggagagtcttagcgaattagcatcatttcacaaaataccagacctttgtgtcatttaataaaatacatctcatgacagcagcatagaatgtaaaggaacagttgtgtaggggtggcatccagattgattgtgtggctggaagttaagaaagaatgaagttatagaagaaagttttaaag

SEQ ID NO: 55948 - DNA, 6570 bp, Homo sapiens
ttggcctctcaaagtgctaggattataggcatgagccactgcacccagcccggtttcccaatttttacaaaatgttattaaaaatagtataactaacctctaggatgggagcatggattttaaaaggcatttagaatgatatctgtacaatgtgaacacttaagaaatattgtttctttgatataaaccatcacctgaaatagctattaaatggattagacagtcttgtctctaattgcattgcgcatgaaacgttttgcaatgaagcattctgagcattgcttaactgattttaaaatgttgacaaactcagacagagctctaaatacagatttaaaaacttgacaaaatccacaaattgcttttcacagattctcatcatacattgctttgcctaggttttatgattgaaactgtctgtgtagtatttagacaacaaattctttctgtttagagaatctgagagatatttaatcagtgtggtaagcagaacaatgggtgcccagagatattcatgctgtaatcaatggactttgtgattatgtcataaggcaaatatataatcaaggtaaggtaatataatcaagataatagaaaattccatatatatacttatcaaattccatatatatatatttgccttatgacatgtatacatatatatgtgtatatatacacacacacacacacacacacacacatatgcatgcagaagcaattaaacttacagagtttaaaatagggggattgccctaggttatttggatgagctcattgcagtaatgtgtgcccttaaaggtggaagacaggaacagatgagtcagtcagtgagataagatgaaggtagagtcagcaagatttgaaccgtgaaaggagttagattagctgttgctggctttgcagacagggaaaggagacaccaatcaaggcatgtataaggcctcttaaggctggatgtggctctcagttgagagccggcaagaaaacagggatcttaattctgctgccacaagaagttgaattttgccaacaacccgaaagagtagggaatcagattctcttctagagcctccagaaagaaactcaacttcgctaccgtcttgatattaccccagtgaggctggtattattttgatctacagaacgttaaaagaagaaaatgtgtattcttttaagctgctatatttttgataatttgttgtggcagcagtagaaaggtagataatagaaaatgcatttaaaatctgacaaggcaaaagccctcaactttttaatatgctattgctatgttatcatgacagaaaaatataggtcttatcaattaagatcctagttagaatttaacttgataaaaatattgagctgaatataagaccatattcacattctgagggaaagttcataatgtatttttgatgatgtataaattgataaaaaagaatgctgattaatgttccctctgatgacaaaagcagtgtcattcttgacaagatcaaataataataaacaaggtcaaataatgttttaatgtacatcacaatttgatcccaattctagattatgaactaaatatacaagaggtaactgacccttacttcgtgataactaacttctgagttggagagaaatgtcctctaatctgatcagttgatttctttccattatcatttaaagaacccatgacattttggtatgcctacaaaattattttaattgagtctaaaaaaataaacctttaatgttttattctttacaaatagagttattttacatatgtaaaaacaaaattgctaatattaaaaatttttgcatgactagtaggtgcaaggtgtaaacattttaatttgaatgaaccatataatcctcgctacaactacatgaagtggacactcttgcccatttcaaaaattacagattgactattacatcagaagtgtttcattggttgtttcgctcatattatcagaattacatcatgataattttcttagaaaaatacccatgaatttcatgagtaaaacagaagacaaaaacatagaaaaacacaggaaaaatgagaatttccctggaaaaactaagatttctagtgtttggaattgggagcgttggtagagtgagggtggaagtgtgaatattcatgggcataagtttctctcccatattgtgacaccagagaaacaaaattttctatcactatttcataggagatgtcctaaattaattccctgaaacagaagaaatcctcaaatataagtcagtaaagccagctttataaaatttgacatgtcattttactcgtcaacatcataagaatttcctgtctaattgagatgttaccatcctgactcccaactccatttacatgaatcttaatttcttaaggtctttcatggtatgccgagaataaattcaacataggacaaaatgattaacattttatatctgtatctccaatacgactgtcctagcattccatgaaactgagatcaggttttcatttgcactttcagcaaatgttatgtttacatatttattgctgtaggtatgcttctaaaggatatgtggcttgtaggatttgctcaaattgaaattgaaagtaaattgtccaattgcaatgtttgtaagaatcttcttgctattctgcttgtcatttcttgctatttgctttagtgatttcacaacccttgaaaaatatttcattttaatatgattaattgacttttttttatcgactaaggatttttgagaggcaaaatcagaggccatggtgtaaagacagatgcaaaataattttataggagtgaattagaagcagatggcattaagtaggtctaattgttcatgagggtatatggagaatgggaaaagaggatattaagttatgacatgaaatgatggctgtgtgcctatacctatcgagcattgttgcagcaataggagggttttgattcacctttatggagatcatgtttttgtagtatttcagagggtttttttttttttttttttgaggaaggtagctaccattcagtccagggagttgtaatttctttgaattcacatagcttttaagtaatagagttgggattcaaacccatgtttttctgatctcaaacttttatctcctgcaccacactatcaagagaatgatagggccagataagagcattcagctaaaatctcatgtgctatattacagagtcatcctgggaagatgtaaaaccacatgactctgactattgtagtgggtaatagtggaaacttactcttcttattttttcttctgatctagagccttgtacttgcactaatttttaatcattgaaactctattgaaaggtatccgtatcagacagtgatctgggcttctgaagatcattttttatacccaaatgatattttctcataaggtagataggatagatatcaataaagtatgtggtttcatttgaatgggatccagtgttcctaatgtgaaacaaatgaggattgttcttgtataggaagccacagcccaaattcaagagacagagactgtacaccaacaatgtgaagatgctcaggattaatgttatgaccagtgtttgcacaaggagccaagtaagcgaaaagaagcagcagatctggaacctgtgagaaaggccccaccctatctttgaaatttagggtgacatatcagggtgctgtgaatttcaactgagcggcttgttaactgtggggccccatgtctcagaaactcatttccttcacccagggacaataattggtcttgcttcattgggttgttgtagggaataaatgtgtgactataaaacattacctagtttctactacacattaatagtatatgctaaatgttggcatcctctgctagccactttctgttccacaagtgaaaatgggggaagaaacaagtagtattgcataaatataaatgttggcttttagactcagagttcagtaaccccgtatctttggtttcattgtgttgctctaccaaatgtaatcactacaatatatcagtatgttgaccttcaatgaaagccattattataagcctttctggttcatttcctgctgacatctatagcacaagtgacagtatcataggggatggagacaatttaaagcagagatgtgaatgcagtgggaaagtgcctgcaatccagacttttggagggaaatacatgcagctttggggtttcatcttacaataaccacattcatttggtaacatccttatcaaaatcaggggcattttgtgtcttcattaatctataaagtcttagcacaactattaggctttggaagtaacaacgacagcatgtggacctcatcacatccttactagaccccaagcggtaaccactgctctaaagttagtaacagctgattcataatcaaataagctgaggttgaaagtgagaggaagcactatttttgctctggcaacctggagtaaagaatgtggccctctatgtttgatgattgttccactgactgagtgtggcaataagtaatgactcagagctgcctccttccttgccctcagagctgaaagcatccctattaaattgaagaccagtgctttgctttcattacagtggggactgctcttgccaaaagggaattttccttaattaatgagaaaggactcttttcaagcgctacacaatgaggtcattgcaatgcaactttctcagcaaagagcagtctgtctctgaatactggactttgtagctgaggtggagaggcactttagtgtaattgttaagatgataggctttggagtcagaacaactggctagcaaatattggctgtcagcgaatttttcagtaatcttgagcatgttatttcacttctctaagccttggtttccttctcagcaactgcagatatatcatttcttatctcatagaattgttattgagattaaacaagataagaagagtaaagcacttatcacagtgtttgggacatactgggtaattattaagtggtatctattttatctcaacattgttgttagtctctttttttggactcattaatggaaggtatatattttcataaaatatgtgcccaggagaaaaaggatcaaaggcactctttattattcgtcatgagttaatgtcaaacccttattacttcctgcatagatttctaaattatagcttcataaaaactacagcctaagtagttatgacaaattagttttttctcatggaatgttgagaaggaatctgagacaagacctatgctcactgaaaccgagggctatgattcataatgatatcagctgtgggggaaaaaaatgggacctgagggaacgcacgccacccaccctctatctatggctaagataagcaaacagccatcatcttattggaatgaagcaaactgaaacctggatctatttagtgttaatgttatgtagcagttctctctgataattgccaagtcaccagtattgggtcttgcccttttagttttgaggaaattatttcagatgattgctgtgtgtggtataagctaagtctgtgattttcagtttcagaaatatattttaaaattattcaaccaatatttcttaactgcttttttaacacaccttgagtaattacctttttaaaatgctgagaaaatggtgataaatttatacttgttgtgcagcatctcaatattgtaaaccaaaaataaaattctaagactcccaaccaattgaatggatcccgcctctcagccaaggacattccaaagtaaacctgaaaaactagttcaggccgtgatggaaatgagggattagacatgcctcattataccttctccccatggaagttcaggcacaactaatcagcattcacattaaaacagaggtctcaggactgaccaaacggactctttgtgacaatacggtatatcacaaaatgacagatagcaggccctggaagaaatcaaagtattttatcctaaaatgtatttctttgatgtattttaaaatagccctgcaaagctgtctcctgtgggagaaatctgtattctatagggaatccccttccctttccaaatattttcctgatccaggagagattaactaagattctggtacctttataagcctgataagaaatatttaccatctaatctctttgaagcctactacttggaggattcatttctgcataacaagaacactggtctccacagccccttatcttaatccagaaattcctttctattgattccaggccttcagatagtaacttaacactttcaagcaattgccaatcagaaaatctttaaacccacctatgacatggaagccccacctatgaccacgttgagttatccttcctttctggaccaaaccaatgtacaccttacatatatcaattgatgtctttggaacttctgtctcccaaaaatgtataaaacaaagctgtaatccaaccactttgggcacatgttctcacaacctcctgaagctgtgtcactgacatgtccttaatcttggcaaaataaacttccaaattgattgaaacttgtctcacttactttttgttttacaa

SEQ ID NO: 55949 - DNA, 2031 bp, Homo sapiens
ttttatttcaaaataaagagaccacatcattactatcacctgaagtaaaaagaaatcaagagatgaattgcctaaaagaacatattcacatcattatcagttcaatggtacagtataatacttccacacattgtgtgttttttttcatatttgcctttagctgttggagacaactaaagttgttgacaagttgcatgtatattttaatccacgtcatcatactctttctgggacttctctaaggcagacaagaatagtcaaccattggaataagtcttactggattaatatttaataattgaggtattgtacatttcctgaggatttatgagcaggtttaaaaattagtaatctcacaagtacttgagtggtatcactttgtaattttcccccagagaataactttgataatcatttctgtcataatttaaaaatgaaagagaagtgattatcagtttaaatacagaatattttatgggttacttgcatttggagtgctcagagactagtggtttccatttagacaattcataaatgtgaaaaaggtaactggataatagcagcatgagtggggtaatccccaaaactttctgcactaaatatattaaatagcttcttttcaaagacatattaatatattttaatgattttatgatgccacctgagtaactcaaaaagaacaaacactaccacaaataaaagtttatctgtctgtgggggaaaactgagacctctgtggtgagccaaaaagtaggcttagtgcaaatagaccgtgagtgagtgacaaaatgctactctttataagtggggctgattctgtgctccatacactctcattatgtattctgctaatagcacaaggatgtgaaaataacagttagttctgtaaagagctgggtgcaacattaagatttaattaaaccttgttttacttgggcaagctagtcatgcagtgatgtcacaggagaacagaacccaacagtctgatgactagcagcaaaaagacatgtagctgaaatgccagtgcacatagctaatgtaaacaagttgaggggagcaacggaaacagtgctgtaaactggaaacatgccacgtgagtcatgctggaaggatgtgagggtgttgagtctgtagaaagcaaacagactttgagacgactgggcaggaatcagggtttctgggttattctggaaaagtgtgattcaaactcctttgtgtacctcgtggtatagaacaggaaccaaaggtagggttgacaggaaacaggaaatgtaatttcagctcaacataaaaaaattctacctgtcaaaactatccaagagtagaatagactgtcgttgaaggtaatcagtttataattatttgaggtattcaagtattgattgcataaccacttggtagttactttcttactttctttttcttttttttttttttttttttttgagatggagtctcaatctgtcgcccaggctggagtgcagtggtgcagtcttggctcgctgcaacatctgcctcctgggttcaagcgattctcctgcctcagcctctcgagtagctgcgactacaggcatttgccaacacacccggctaattttttgtatttttggtagagatggggtttcactgtgttagccaggatggtctctatctcctgacctcgtgatccacccacttcggcctcccaaagtgctgggattacaggcgtgagccaccatgcctggctggtagttactttctaactaggtacagtgtcattctcagaatccaatgagtcataccagtcgggtgttaaattaatgacgaagaggtagtcaaattatgaatctataaaaattacaattacttacgtagtagaatttgaggtggtgtgatgctcattttatctgtcaacttgactgggttaaatgatacccagatagctggtaaaacattatttctgggtgtgtctgtgaggatgtttctggggaaagttagcattaaaaatgtagctatctcacttataaaaatattatttttaattaacatata

SEQ ID NO: 55950 - DNA, 603 bp, Homo sapiens
tatgagagactctttgaaagaaggtaaacaaatgaaatgatctctatgattattctgactgaccatttggagaaaaattccaggctacaataacagagccttctccttgagtttagaagacagtatttagaaaggcaaagaaggctagaatttgaaaggcagaatatcagagaggggcaagtagcaaagagtgatacagagatctgctgagatttctctgccaatcattacatgagtactgattacacaagaggtccgggaaactaccaagtctggaaaacggatcaatagaaagtagcaggtggaaaacactctgctgcgtgcacagaaacaggaaaagtttacattctcaccaactatttcttaacaaatggggcattgaatagggacctcagagggtcttgcctcaatagtgaggtctaatgaactctagactgtgcaagttgcagatacgaggatgaagtcattctaatcagtctcagtcacattgaggccaggagagcacaaaggggaggagctcatccttgcatatctgaagataaaaactgtttcctcctactgaaactattccagaaaattgaaaaggagggactcctccctaac

SEQ ID NO: 55951 - DNA, 2440 bp, Homo sapiens
atatgatttaatttgcagttaataatgatgcaatttattatctgatggtatttgagatgacttggatgtcgtaatttggatatttttgttacaaaataaaattctgcattcgattgtaggatggaattgagagttggagaaattatatagaattattccttttttattcttattttctcttctaactttcctcatatttattttcatatcagtttatatatactggtatataatgcatttagaatacaaccattaatattacttaaaaagacaatgatttctgatctgggatttgaatgggttaccactcccaataacattatccttatttcttgataggttactcattaaaagaagtaaataatttgattcagatacccacagatgtttggggacatttgtccctttcttcgggcacttttgtagcaggaattaggaagcagtaacctgaggataaatgcagtcataggtttccttcactctacgcacagtacccatgactaactcttcaagggaaaaaataattttttataaagggttcatttacttttttccttatattgtttcaatttctaactccttctttaccctttaatagagagtcaagtctgatgatttctgtagacactgaagcaaacctaggatcatttattgacatgaaggtgacactttcctgagggatctgatcatatttgtatcaaaagagacagtgcacatgtcagaaaaggatagtgacttttatggttccaacagtagtagtccaggttaatgaataaactctctttttacctcagttactttgtaaatggttaaggtaatatttgcatttgttgtcctctttgaatgctgaccttcaaacctgaagttggactgacttgctgttggcagcattttgttttttaaaggctcttttgaggctgggttaatttccacagagattttcttttgcctcaaacattccatcttattttacctcctgtgcttggtgctcattacagtatgattgactcaaggatgaaatatagaagctcgtaaaaatattttttatcccctaataaacctcctcaacccttgatctgatttttcatatgtagtaaaatatgtattgagaaaagtagcccacaaactatctgcttctacctgttactgacttatttaaccttcgtttggaaagagaggctgtttttcccaattagacattttccctttataaaaaggggcaaaaagatgaggcccggataagatgaattatcaggttacttgtctcttgcttcaatggtaattccttgagacctgtcaaaatgtgacacctctttcaaagaagagattatgtcaatatcaattgccttgttttattgagctcaggatactcataagtacaccataaaagtgtcatctggtgatggggccagccacaaaaactattacctgggccaagaagttagacattcaggttgcgcttggagggatgaaaaattttgaagacattcttcctgatagcccttcccaaaccttacaaactctcatttggaattacaggggatgctaaacatcttgtggagaaaagaacttactgggatcctgatgccattgctggcaaattttatggttgagtgacacagcatcatcgtgtgagtaaggaatgagtcaaggaacatccagataccaaattccaatgcctgcattttattaacacactcatggtaatctgctaactgagctagatggaaggaatcctgaattgatcctagaaagttgtacaaattggtcaaataagtttagtgtgcacactgaatcaaatgagactgttacttatgccatcaagtctcatctctgtgtttttgtcattgggtcaattctgtctgtattcagatattccctgaagttcagaggacgaggtactgcaaaatggagacatcagccttctccccatttttaggagaccaagagttcaatgtgtttattttgtaatattagtcacgtgttcacttgttttgcgttcattctagtgatgtccttcaatttcttagggtataaagaaggagaagagctgaagattgttgtcattttttccttgaaatatactttgagtactgtactggatgcataggaaaggagaaaggaaaaatgggccatttattatttagtaaaccaaagctatacaggggagaatttgaagctgcaggaggaattttgaaaggagatataaatcagagatcccagcaggcacattaaacttgggagaagttactggagccactaaaaaacaaagtgatagagatatcttagggcaaaatggaaaagcattctgtgccactaagaaagagcagggcattgttaatttcatacccaaccccattcatacatcgctgtaacttgcttcaggtacacggcgtgggttagttgtcaagaactcgtaaagatattactacagggcaaa

SEQ ID NO: 55952 - DNA, 1288 bp, Homo sapiens
tgctataatatggatgatttaaacaaaataatttacactgtcccatatagctcttaagccatatcatatgattctattattgctccatgacctctactctgcaccacaagatgagtggttatgatagcctgtggccccacagcaactgatatcataattatgcaggattaaaacaccaattttagataaaccaagttagttagtcaaagctttatagtaaaatttactaaatagtccacaaattatatcctagaaaataatcttctttcatatgtttctccaagttgtgcaaaatgcaaagaacacatttcaaagctgtcatttatatagtttgtctgaaaattgaaagcaagaccgaatgagatcatttatgtggtgactaatgctgacacactaatttctataaacaaacattaacataaggacaaggtggtctatgaaaattggacaatcagtgacaaattgtggaatcacagattattagaacagaaagactcaaccaaatagacttttgctacttcaattttttttctgttccttgttgaaggaaaccatatctgacagtctgagcttcaaaatggttttttgtttataccaccagaaacaaaatactaatcaattagcatcctaaatctcagagagaaaaagaacattggagttgaccaggctcattctctacaagcagaaaatgaagttcaaggaggtgaagtgatagtcaacactaaacagatttgactcctagaaagatgtgacacacttccactgtccaaaattcaagtccagtgcaattttttcactccactgaattcagtttcctacatcaagataatagattatttcaataatgacccataaggttttcatggctccctcctgcactgtctaggcatggccatgtgccttgtctcatgtttgcttaatgagatcaaagtaagcatgacatacacagaaactttaaaagtgcttgttcgtagtggcagttttactctttctgctcttgaatctgctggcatcatgttattaagtccaagctaacctgctggctgatggaagaactttggccaaggtgcccttgtcataccatgtttacagccagtcactcccagaatcctagctgacccacagatggactaagatgcaagattctggctgagaccagcaggaggcaactcagctgagccccgtccaattgacccacacaataaagagctaaataaaggtttgttattttaagccactagattttgtggcgatctctaaaatagtgcataatatatgcatataatca

SEQ ID NO: 55953 - DNA, 753 bp, Homo sapiens
ggacccagtcagggtaaccaggcagccaaccagcagcatatgctcctcacactgtggctgccttgattccacttgcagagtcagtgccgaggcagacattaccctgtgcccaaccatttaaactgttatagcgccaaacacttgatcaaactcctgagtcttgagatgttaattttacctgcttcacaaatagacaggtaaaactttttgaattgctattgatggttcttaagagagctctgaagaaaagatggggaggagtgatgggaggattatccatattgctccatctgcattgatttattagatattcctcagttcaaatcttttccattggctctccattgctagtagggtaaagtccaaatcttcactggaagagcaatggtgaggactttggcctctacttcaaataaaactggaagggattagggaattctgagtagagaaggcacaggctctgacataaaatttacaaagattaccctggctgcttagtggaaaaacagattggaggggcagacataatgagaacagataaaaatatcagcaattataatatttatatgcaaaacaatatgcaactattaacccgagtgttgttttagctcataccagttaatgctgggatcctataggggaatgaggtgactgagaagggggaggatggaaaaaacatccatgaatatttggcttcaccttgcttgtttattcttatctttctgtgctcctctgagctagctgctactcttc

SEQ ID NO: 55954 - DNA, 584 bp, Homo sapiens
accttaaactctcagttctctcagagaatcttcacttccactatgaatcctcttggaattgctactaaggcaaatagtaatatgttcttttttctttcttttattttcttgaaactcaggccctaaagcattcttatcaatttacctattccagcaaaactatgtgatccttacagtagagtgacaaagacctgggttcaaacccttgtttggttgggtaaaattgcatacgttcatgaacctcttctaacttcaatacttttatttaataacaaaattaagaggttaatagtacatgtccaaagtgttgcaataagtcaataagatgatgcatgcaaagggcttagcacagtgcactacaccctagtggtaaagtgatgttgtttggagccaaatcattcttggctcaattcccagctctataatttattagctctatggccttgagcaagttatttgctgtgttgaagcattttttttcttatttgtaaaatgcatataaacatatcattttctggtgtttttatgaggattacttgaaaaaagccatacaaagtacttaatagagtaacgggcatgtagtc

SEQ ID NO: 55955 - DNA, 480 bp, Homo sapiens
ctgcaagcaactggactaaatgattactaatatacattctatctctgaaattatgttttctccttaccatatttaacaaggttctgaacacaggtattttttggttgattgggtgatttctctccttacccatagttgcatttggaacttatgtaacaatttagtcggctaactcatttacttattctttcatgcgttcatttagaaaacatttgctgattgtgcaatgcattcaaagtaaagattatttgaaggacgagagggcactggacttgaagccagtagaaaggttgcacccagcttagacagttattttctgtgaacttcaagcaattctgttaacctctccactttgttgcctcatacctaaaaataattacaatgattacaaatactgaggactattaagggcttacagtgaactagacatttttttatgagtttttcacgtactttattaactgatttaattctatgtgg

SEQ ID NO: 55956 - DNA, 1111 bp, Homo sapiens
gagctgggtggtagatacatgagtttttgtagtcttggtattcttcatagtttacacatgttataaatattcttttatatctacttggtgttaaaaaataataaatattttttaaaaatcttatcagtttcatattgagattggtaataaatcagtttttcatgctggtaattcttattgcagcttccataaaaacaacaacaacaacaataacaaaataaccaaaaacaattgcttcacttttgggcctctgggcaggaggtcatagcaaatatttgctatgtgctgaagggaagttggaggtatgtcaagaacagtacttacgacattgctcccactctcacagagatactaaagtcagcatataaagaaaagcagtaatatgctgtacctaagaagtcatagattcctgaaaatctcaatacctcattttataactgccttaaaaccatactgaaaaatcatcactcctctgctcacatctttctgcaaatttgtcaaacccattacccttattattctaaagggaatgacccctctatggacctagaaagccaaaaggagagtgacagatgctggtggggagctgcattttacagggtttcagggaggtgaccattagaataagaatgaggattctgaagcttggctgtgtctgccaacagtgaagtagggaatcggagctgccacacttgaaggttgctgccaatcatactgagaaaggaaacatcatgttgccctttttctgcaggactaagccttttagcagttttgttctcaccctggaagattccaactcattcacagcctctgtattttgattataggcatcacgaggttctcttttgtcctccatgggcttacaacctttataaattccttggcattctcaggcatgggatatttggtgagggcaaattccgtttatttgtctttctgaatggtttactaatcataaatgaacaggaccttgcattttcagtgtgcttcgggatttttaagttttttcaaatgtatgtgtattttttttttttttcaagaaaatgaaggctctaagatgttaacaattttggagatttttacaccaaataataatcagaactggaagtca

SEQ ID NO: 55957 - DNA, 1057 bp, Homo sapiens
aacaaaatactggcaaatcaaatccagcagcacatcaaaaagctaatccactatgatcaagtaggttttatctctgggatgaaaggttggttcaacatacacaaatcaataaatgtgatttatcacatatacagaaatatagacaaaaaccacgtgattatgtcaatagaggcaaaaaggctttcaagaattttaacatcatttcatgttacaaactctctataaaccagatattaaagaaacataactcaaaataataagagctatctatgacaaacccacagtgaacatcacactaaataggcaaaagctaggagcagttctcttgaatcagcacaagacagaatgccctctctcaccaattctattctacatagtattggaatttctggccagagcagtcagccaagataaataaataaagggtatccaaataggaagaaaggatgtcaaactatctctctttgtagatgacataattctgtatctggaaaaccccatagtctgagtgcaaaagcttcttcagctgataaacaacttgagcaaagtctcgggataccccctcccaaaaaaaagtacaaaaatcactagtattcctatgcaacaaccatagccaagccaagagccaaatcagaaatgcaaccccattcacaattgctacaaaaaacaaaacaaaacaaaacaaaacaaaaatccacctaggaatacagttaaccaggaaagtgaaagaactctataatgagaaattttaaaacattgctcaaagaaatcagagatgatgcaaacaaatggaaaaatgtttcatgctcatggagagggagaatcagtatcattaaaatagctggctgggtgcggtggctcacgactgtaattacaacactttgggaggcccgaggtgggtggatcctgaggtcaggagttcaagaccagattggccaatatagtgaaaccctgtctctactaaaaatacaaaaaagtagctgggagtggtggcaggtgcctgtaatcccagctgctcatgaggctgagacagaagaattgcttgaactcatgaggt

SEQ ID NO: 55958 - DNA, 542 bp, Homo sapiens
gaatataatcaagtggagaatttaatgtgagtcaacataatagcaagtggatgtgtgtttataatgaggctcttcattaacctgaacattttctctggccctgtcaggatcagatcacaggagggggttagaacacattgccataggaggactgtccacatgctagaggataaaataaaagggatgaccctgagaaaaggagatgttagctgaatcatagagcaaatattgtcagcttggataaaggaagcacagatcaagcctaggcagatcaataatttccagttctaaacaacaaattccaggagagtctgcctgaggactaaatgcagaggtgttgtcatcattagcagtacaaaaaaaaaatctcatctagaaaaatccacacaaatggtaggggaatgacatgatcataagctgggataaataaagaaaaatgtagaataacgtcaaatttgtggtacatataataaacatctcattgctcctaggaaacactgctgggaagctggagagatgcaaaagcaaaaatatatataaaa

SEQ ID NO: 55959 - DNA, 959 bp, Homo sapiens
caggaaaaaaacaacgataaccgatagatatttgaggtagataagcgtgttgctaaatgttttcaatcacattttttttcccatggcatggtacagaatcatttcacaagacagaactgaatctcagggaaaagtgttattatgcagaatttctccacttagaaaacatagatgatccttcaaatacacaatattgaaactggcagttttcagagccacctgaaaagcactgaaatgttttactcgttatgggtatttttgccttggtgtggcctactggggaccaaacaactattacagtcaaggacaataatctgatgccactcagtccctttactgtaacagtgactttccagcagctttccagctttttctcattggagagcaccgtaccaatagaaaaggcaaagctggatgcgccaggaggcaatcgccctcttgaactgtgtagtaatcactttcccttatatttaatccgggttaatattgaggctcctttgttaatgtttaactccatgttagtgcttcagaaaggcgggcagtgggggtagcacaaaagagagaaaaacaattgtttgacttgcgactttcttggatctgcagaaatgtacttaattaccactgaggcaatttatattaaaataagagtggggaagcaataaaaaaaaagcagtaagcaaagaggtagggcaaggggcaaaaggccagtaggactttaatcaaagagaaacagatgcagcattctactaagagataaagaacatgggaatgaagaaaaggcaaaaataggcacaaagtgccaggagaaatgaaaagttttacaatgtaaattattttatttccatttcacatttttttcttttgtctctgaagactaaaatgccaatgacactgaaaatagccctgttccacaaggtattgcattaattttgtgatttcttaagggtttctcctttaga

SEQ ID NO: 55960 - DNA, 603 bp, Homo sapiens
gggttttatgcctcacagatctgcattacacaatagagtcatacatattcagcagatttggtgaaaaagctaaacatacttatgaggaaagcagagtgcacatgcaatgggtaagcatacaatgcaacatacatcttaggttcaccttagggcagggttttagcattaaaatgaggtggaatgtgactctatatcaaaaggcgaactacaggacaccaagacagcttgtgcacagcctctataagctggccgaaactggcttaaggtctgcaattgcttatcagaaaagaatgttggcaaggccagtcatctgtccaatcagagttgttgttttctgggttgtgaatcagagttaggataatttgcctgatagctcctattgttagtgaaagtgtagtttttcttgtatgaatttaggaatttgccatgacagctgggcctggaaccctggacctatagacaactttttgtttctttaatcttaaggtcaatcttagttgtggaagcggtactattttggcctctcatatcacaaactaaaaaacttggccacaattttgtgccataatgtaggtggtcagaattaaaatattgtatgtagag

SEQ ID NO: 55961 - DNA, 1353 bp, Homo sapiens
tccagcaggccaaatttgaccccgcacttgatgagcgtggtggacacagagggttttttaatagcataggaatgttttttgcttcccaccggacccactagcctctagtgccaccgattaatattaccttccttgaatcaggaggaaaccatttgtgacttctcatatgtaagatcttctaagggcagaaacgcaattgtctttgtattcacttccccgcccacccacaccccttccatggagagcctgcagccaagctcaagctttcaaaaaggcgtgagctaattcaatcatccttgccgcttttttgctcctccaggctgtagagggcgacaaaaaccgcggaggcgcattggggtggggggtgtctactgaaggccgctcccgacgtgcgcgtctttacgtagacgtcgggggcgcagccgcgctgtgcgcggtgactggcggctgcactggcggcagctggaggtgtaatagtgcgggtagtgggtttggagaagttccgaggcggcggtggcgccggtcaggacaaggatagcggaaccgggccctgggcttgtcgctcaccatgccgacagtagaggagctttaccgcaattatggcatcctggccgatgccacggagcaagtgggccaggtgagttgagtccccgggcggcctgcagggcctggcgctccgcggcctttcgaaagcgcttcccgccgcactccccgggccgagcgggggctgcggcttcatcctcccggggcctcctagcctcctcaggccgtctcgtcggggtgggcctctctgggagtgtagactctggtttcaccagggagaccgcggtccccagggttccaggcttccttgcctcccttgcccagccttttctcaccgtggcgtaacctaactcagcccgttcaggctcacgttaattcttctcacggagcttttctctacaggattctcttaagcctttctccttttcggtggagctcagtgcttccaagattagatcgggagttttcttcatgaggtcaagatgtgttttttttgggggggaggcaaaattctgctactaattgaagaagagtgtttaggagacagaagtttgtgagaaacagaagagggactctttggtccagactttgatgagagctcacggtttcatttattcagtgcatttttttgagtgccgagcgctggagatacagatggaaaggtccgcgctctcccagaatgtacagttaggagggagtgtagtaagaaagataggcattgtgaggcccggcttggtggctcacgcctgtaatccgagcactttgggaggccgaggcgggcggatcacgaggtcaggagttcgagaccag

SEQ ID NO: 55962 - DNA, 1955 bp, Homo sapiens
tatgactagataagctgtcagtgtaacatgccgatttccaagacttagttaaaaaaaaaaaaactaaactatctcaatgatttgtacagaccacattgaattaatattttgtgtactttgagttaaataaaatgtactagtagggttacttccctctatattttacattccacacgtggctcgcattatagtgctactggacagcggtgccctaaactaacaaccgtctccattctgaagcttccactattgtgagactttaagaataaaagcaacacctctcttcccataggtggttcgaaagcacaccttttgttccccaactatctaccagaaataaaacgaaaaaacaaagatttaaaaaacaataaaattgagtcctttcacttctgcttaagcgccacctaagccactgcttttgtctccctccggttcccacgctccgagatcgtatcacccacagaaaaacaataactaaaaagcggtctccatccctgaagccaagctgggagagtagccgaaggtcgcgcttcctggccgccaaaaccgaggtggaggaaacttggtagtcagcgagctacgccctctcggctcctcctcctgctcctcctccagggccgacctcttcaagatggcgggcgccggagactagcttccgcttccggtgtgagcggcccggccgggggggcaagatggcggcggcagtaggggttcgtggccggtacgagctgccgccttgctccggcccaggctggctcctcagcctttccgccttgctgagtgtggcggcacgaggggccttcgccaccacgcactgggtcgtcacggaggacgggaaaatccagcagcaggtagcggccggggcgtccctcttctcccgtgcccgccctcgccccggggggattaccctgcttggcccctggctgttgggctccgcgcggccccgcccccagcctaccctcacagggaggtggcaccgcgacctcggactccctgcattcggaccaggcaggcacttcccgctccccacttgtctcctggtcctcgtttggccccctagaagttctcacccttccacctcgcgggccgcgcgccgcgtggggaagagtcgcccagctgcgggagacgggccctacggacctttttttagctcggggtttagaaatcacagatttcaggattcctgcctttggtgcctctcgggttcacgcgtcaccggccctccccgaggaaatagaaagcaggtggcagctccagggtgtgcgcgagtcccatggtatgacagcttctggacccctagcctgtggaccattcgtgctgctcccctagtctcgtctaccacatggtggatttcgtttctggttgtgttggtttcagcttgtaccgttactcaggtcagcagtggctcattagaaacaacatagaaacactccccttcagaaggaatgcttgaagatgccgctggtggcgttgcctgcatcttttcagctgttactgccctcgtttcccagtgcactttgctttgtttctttacctagttcttgtgacccagcctcgcatggaggatatgcgatttcctggattcttgtatgcctgaactaattcctcagaggcgagactgcttttcttatataactttatgattgcctgcgttttgtaaatgctgctgatgcctaacgagtgcgtgtgtgtgttccgctacagaatattggtaaacttactgacttcgaacacttgaggacaatcttgaagtgtctagcaaacatttagaaagtgaattgtgtgccccatgcaatttagcccactgatctaaaacgttttaactagtgtggtgggaaattactggtcctttggattgtgtgtaatgaatcatgataggaacacattccaacgtttaaggtgaggtttagatttagatttgccgtgtaatgtaattgcaaattctatctcaagta

SEQ ID NO: 55963 - DNA, 1779 bp, Homo sapiens
ggactttttgatggtctcaagaccgatcatttgaaggagtgtagcttccaatagtctatattcataaaattgtatcaccactatatagtgaaagaatccattcctgttcacaaagacctagagctacaaattcgtcatattcattccttttccttttgtctttcctaccccatcccatccccagtcccattctcattatctagcaaggtttcagaaatacacaagcatctttgtaagtatatccaacattgttccaccttgctttgaaggaaggctgtatatgtttgtgttctctcatctaggttaccctttcaccctcaaaacttttctttgtaattgattgcacaacagtctgtaatccttaagtgatagttatagaacccttaagaatactttcttaagttccctcgcctctacccacacacggcacaccaattttagagtggtgagcattttagtgtaggaagaaaaggggaataatgaaccagatttctcaattagctaattattaacctaaagagactaaatcataaaaatgaagcaaagggacaggaaaacgacctatgccatttttctcatactccaatggcaaagttattgaaagttgttaactatgtattatccatgaaagaatatcgttggggcatagttcttaaaagatccaattgctttattactgagctactttctgattttctactaattttgaatattcactcgcttttttggtgtgagttaaattataatcacaactccttttccactttcaatttgattgaactttttgtttcattttctagtttggtgaggattcatcaacctccagtatgatgtctgtgaactttgatgttcaatcaaatcagagtgatatcaatgattcggtcaagtcttctcccgtagcccattctattctctggatttggggcagggactctgatgcatatagggtaagttaatagaggatgacgaagcagttttctcaaactggcaagatccattaaagcagtggccctcaacctcactgattaatatggcctctatgactgttcagattagttcagcaaacgtgtagtacatttctattaaatggaagctattctgctaggtagtgaatgagtaagatgcaatttctgccttgagtttttcccagtcaagtagagcagatagacaccctgatttcagttcaaagctttatcctctgagtattattaccaaccttaacaagtttctaaacttgacccaagcgtatgtttttatatacttcacttaatcggcattcttttattgaactcccacctgtgtgccaggctaatgctggcagtataatagataagcccccttgctcttctggagcctacattctggtagatgatacagacaataaacaagttagtacatgtgcctgtctagactagctaagaaagaattgtaggttagctgaggcggataccaaggtatgaggacagagactgtgtgctttttattcaccattaaattttcagaatttaatcaagggtttaacagaattaaacagccacttagatttaattatatttaatataaatccctcaaagtttgatagcttgaagatttaagtttagtaagcctctggtacatcttatttatttttagagaaaattaacattttacaaatcataaaacaattgttaaactttggcattggcaaagaaaagaccttagttcagggaaaagtagtgttcaatgccaggttttataggcttatgtatgctttcaggtacaagtcataagctccacctc

SEQ ID NO: 55964 - DNA, 1605 bp, Homo sapiens
tgattatctatcaagagagtgaaagggaaaccaaagtatattgacacaacccaggttttcccctaaaaaaaactaacttcaaattgaaaaaatatattgcccatatttaatatttcttattaggacttacttggagtcgcataatttttttgagacaatatattggaggaaatttgtcttataaaatggagagatgtagaacattgtgggcagttataggatagtctttctctcttgttgcttcccagaagttagaaaacagattttaaattaatagtgttgagtacacgaatctctggagtataataacttagaaaaatgttggaaaatgataaagtcgaaggggaagattaattgaagttaagtgtccccttttcaaatgggaagcatttgacactatgaggagtgctctagagattaacaaatgtttctctgtcaaggataattttctgagcagttgaggttgtttgtgtgataagggaaggcggctagatagcgtaactataggtgtttgagaaaatttccgaagttactttcagattgaaagggtgaaagtaggtgcaacaattggccgttgggaggggaaagggtgcagggctcgccagcccggcgccactacagggttaaccgcggcggcgcccggtgcacactgggagttgtaggccgcgggcattgtgggagttgtcgtaaaagcctgctttcttgccgtgatggccgccgccgaggcagggagttgagggtttctgcctttcggagggtttggggggctgtcggtcccgttagaaggccaccaacagccccccaggttgccaagggcctgttagttgtgttcctggaaggtgggcaagcagcctgatgggttaacattgggatttgccgtcgttatagcggtcaaggggcctgtagcggctgcagggtcggtgagggttcccagccggccggaccttggtcgtctggcattctgcctttgaaatatctgggtggccggcgcctaggcatatggggttgtgctttctgtgttgtggtttgtagcttgcatcctccactgttcttagcgcatttggctctgtccatatggctgttggtactcatggccctatttggggttggactgggctctttttcttgggtctggtgggatttaagcaagaactggaattttgtaagatgtacagcagtgtcctgggtgttgtctgtctggtgtggggtgtgagcagttgcaggagttatgaacgtgtccatgatcgtgtggttggctttcccttgcatgtggtgaactttcccctcgtttgctaatgctgaaaggcagtgtcaggcagttcctacttgtgaaatgccttcttattaacttggatgtgttcctaaatcttgggagctttgcaattgcttgtagaaagatatgtgtgcaaaactgaatttaaaacgagcaccagggttgcaggtacctttagttctagggagccagctcccccaggcttccctggtgctgtgaagttgtttgagtttatttatggaaattaggtttgctttgagctgtgttaccttactcttggctcagagtttctctgcatgttgggaccctgatctttgatattgggtactgtt

SEQ ID NO: 55965 - DNA, 2003 bp, Homo sapiens
cgtgattctcctgcctcagcctcccgagtagctgagattacaggcgcacgccaccacgcccggctaatttttgtatttttagtagagacggggttcggatgttggccaggctggtctcggactcctaagctcaagcgattcgcccgcctcggcctcccaaagtgctgggattacaggtgttagccaccgcgccctgcctacgcccacttcttactataatctttccattcactagcggcttctctgatcccatttcctcttcgaacctgagctcaaaccagcctgggtctgaccggccaatccgagcgcagtcttccgcagtcgcgagtacggctgcagccaatgagagaccggggcgcctcggtggggtgagacagggcgctcactggcggaaccccgggggacgcggtgatgggaggagtgtgggaggggcagtggaactggagtcagctaatggctgacgcactacgcgcagagggaaagacgggtcaccaatagcgacacggatatggccccgcgggcggggtttaggcccaaagtggtgtcggagcagcgcctattagtgtcatcctcaccgtcacggccggcgcctcctcctggattcattcactcgctcttttcattcacgaaggtagtgaggcctagtggaaagccatggagagcgctctccccgccgccggcttcctgtactgggtcggcgcgggcaccgtggcctacctagccctgcgtatttcgtactcgctcttcacggccctccgggtctggggagtggggaatgaggcgggggtcggcccggggctcggagaatgggcaggtgagtcggatgcagcgccgcgtcctcgctcccgcggcggcccggaccaggcctgggccgtgatgactagttctggggtctgctcctggccttcccctccccagctctcctctttctcaggctcctgtgccccgcgggcccctcctggctcccttggctgtcttctgcttgcttagactacttgcagagttttaaggtacgaaatacactgctcgctcaatcctgggaatctaagctcagcttagggtgtaggagaaaactgccttaagtctctggggcttgtgccctttaagccattccgtgttcatggagccagtcagtcgccctgctgcctcctcagtcacacgctgtcctccttggttcgccccttgtaagtgtttttaaaataaagtttttcgctcggtttgaatattggccctgtgctaaggatgcagagcattctgttaacatgtttgggcagaggatggaaaggggtgtagggacacaatttcagaaggctttttgcactgcggaatcgtacctccccagttacgattaagatagtaatcgtatctggatttggcctatttcatacaattacaaagcccctttaaaaggaattctcgctaaactgttctggagtcctaacgagtagcaagaactattgcttctgtaaaatgataactcatcatgttaaaatcagatttttttttttttttcacaaggacgtttgtaggaaaaagtatacccgtaaagagtgaaccaaacacatggaacttgtagtcggaggatttttaaaatggaggacgaaggtcaggttgaggaaatagggaaaattatctgcagggaagttttgctccccccccccttttttttttctttttcaacctattttgtttccttctttgctttatttttcgtctcttggccttttttccctttaaaccgagtgattacttatgatatgcttgtggtcctaccctgagatgattatttattttgatgttttataatcgaatgtgcacttcctaagcattttattgaattttggggtggttaggcattgcctgcagactgggctcaggtaagatacactaataatgttactccatgttctttgtttatttagaaacatttaaacaacctagtaggaaagacatatgttaaccttttgggtttatgttaacattaagagaaaacatcttagcag

SEQ ID NO: 55966 - DNA, 1444 bp, Homo sapiens
taacatatattcttttctgagaatgcattttgggaaatgtagattttcactgtaaatccttcattgtttgaagaactctgtgccagtattacatttcaggcaagactaattttagccaggttcattaaagtattccctgtgttctctccagtaatttcagctggttcctttttatgccctcttgacacagtcacattctacagtgtacagaaaataacctgctgtctgtagaagtggtgaatggtttcatgattcccttctttttagtgtgggtgagttttcttcactctttttctgttgcctgcatccttggccatcatgaatgttttgctttctctcttgcagatgacacaattggtactgcctggcatggtggaaaggtgagtcacaagctcacatacaaacactgtggaagcagagctcatgattatttagagggagaatccttgctttgaaaaaatcactgaagtgactaatgaaccaagcctccatgtcttagccacagagtgatgtaccaggcgagtcacagtagagcatgagtcatcggtggtggaggccttttccactcgattccctttttatttctctctctagggttgtagtggttcctttagatcaggatgaaaaagcctgcctgagtcaccatcactaactcaattgcctactattctgagggggcggatagagttcctgggatattcccgggaataccttcttaaagctgtattctctcaaagccaaaatcagtggagttggatgaagcaagacctcttcctctggtttttcactttttactgggagaatggctgttatataaagtgattataagatgtcaaaccaacccttggaggaaaaggcaatgtccactcgccccatctttgttccagtttgaattggttctgctagtacatgccgaatgtcttcattttgattgagaaatatgttgtagatttctgttatctgaaatagcatgaagtgtagaattgtaattaagctgtttcttccttggaaaaatctgaatgatgtctaggccttcaaagaaaagctgctaaaaagatttgggcttgcatcctgagctagctcgatcatttgctgaatttagggcatcgtagtcatctttttttctgcaaaataactatgagtttggaagagacccagaggaatcacagctttgaaaagggaagacccaaggaccctacttctgttaggaaacctctatgacctactccaggcagggattacagcttatgtttattgagtatatagtaagtgccaggaacttagtaagtgttaactcatttaactttgatagcctcccaccattgtacagatgaggaaactgaggttaggaatccatttgttgagcatctacagggactagttaagaaacagtttctcagcaaagctccttgtaatcccattttatatacactattttgtgtat

SEQ ID NO: 55967 - DNA, 563 bp, Homo sapiens
atgatgtccaagtgacatcattctatgagatggaaaataagggggagcggggagagtgagtgtttaatgtttaccgtatgcttcctgccctatgtgaattaacgtttactacacttggtctcagtcaaaaggccgagaagcaattaaattaacttttactgtttagtgcctcttaacaccttcatgatgtggcttctttttaccccatctcatgactcatttcctcactctctactcccacagaacccactttcagtttctcactgactgtggtagattgattgcaaaaatgactctctctactctactctgctcttcccagtatttgtgccctctgcgatgtgatgttgcaacaactgcaagcaagagataaagtcaatttccccactccttgaacctgagctggcttgctttggccaataaatgaagtggaagtgatttcatacaatttccacacctgggcttcaaaagtccttgtgtgcttgcattcaggaccccctcctctacccccttctctctctctgccactgctattagaacatgcctggtgagcttgttcaaag

SEQ ID NO: 55968 - DNA, 1280 bp, Homo sapiens
ggtttttaggataaaatgcaaatccttttgcctaacacattataaccaggtcccccaaactcctctccctttatctagtcccacagggacccggtcactctttctgccacaaagatgccgatgcttggacatctccagtttcgaggaactcacgtaggagacacgccttcacttccacctttgccaaaccccgaccccttcacaccgctcccctgcactctcaatccctgtccgctgcaacacatatcccctcatcagcaccttcggtgattaggccctccaggcgcgggggatgtgggactacccggactgaggactgcgcaccggaagtagtggcggcgctgcgtaacgtcgagaggaagtgcctgatgccgcggcctgtgattgggagttgctggagtcggtgcttcactcttaaggttccgatcacagactgcggagtgggtcaggggctgcgagggctgccccaagtcctaccgggtttgcacgggcgcgcccggctccgcccgcaagtgcgccttcctgacttactgctgggtgcgcggggctgggggtgcgagtaccacccctgaagtctcttcctgggcgacctccggggcctcattctaggcctccttaaagagaaggatctaaattaggaaaaggaagtgcccttatccacgaccaagctcttccacctgcggagctcgcttagtctgcacctcaaccgtgcggaaagtgactgccctgtttactgaggaaaaactggggctcagaaaggtgaagtcatttgccatgggccatgcagctgggaagtgacagatctggattcaaagcgagttctggctggcgccagagtccttgtattttacagcactggttctcaagctttatgtgcattaagaattcctgggttgagggtggcgttagttaacaaattctgggactctacaaattgagtagatctgggatggggctctggaatctattttcaacaattgttccctggcaaataacatatggctccccagtgaatggagcaagaaggtgagcaagtcgtatcctctgcggggactgtaggtaattgtgttacgcttttagggcctcaattgagagaacatgtcaaacgggagctcctgggattggagaattggtatttgattgtcattaactcttctgggcagatggcagcctctgcgtctctccacctattaaatgaaatgaattacatgcttatcatctgggggaacttgttaaacacacagattcctgggcctggctcagctctactgaatcagaag

SEQ ID NO: 55969 - DNA, 2255 bp, Homo sapiens
ctggcatagcacagtggggctggggatggaaatttgtttcaaagaagggacctttctccacaagacttcaaagagcttactactcatttaagggggatgagatggaaatatttctgcattctcatgaataagttttaagtcgctttgaactaaaagtgtgtatgtgtgtatttatgtcagagttatgtgtatttccatttagcatcgagtgcccaaagaataccactctagagaaccgagagtgaacctgacctttcggacagtctatccagaccctcgaggggcaccctggtgacgtcagagctttgagagagaagcttcactgaaacggagcaaaccttccactgagaagccacttcaagaggctggtgctgctagatctcatgatgtggctgttgggaagatggtggggtttgtttgccagcttggagtcctattaaatgaaagccagcaactcatgttggtaataggtctactgtgggaacagttatccctaaccacagctcaaaatcgctatcatctttaggcaaattaaaatctatgtggcagtgctcatggatgattttgttctaagcagttttcctcctgccctcccccgccccccacacgccccgccttcatttgaagaaatatcaatggacttgtgcctctggggaaaagaaaatctcacgtgtttgttccttgtgacttcagtgaagtggagatataaatatgcgtcagggactctggagccttccgtaggcagacagctgctgaaacccaaacagaggtggtttcatcttggcttgcatactattgtaatggaaagctacatattcagggaacactgtaactgagtcttcctgcaacacactcaagacaggttacaggcctccaaataaagagtggtggcagtatgctctcgtctagccaccttcaagtagtcacctgtaatacaagagaaaactgtccccttaaagggaggaatcactgaatgatgtcacgggaagtagcaggctgaaattgaggctgaagagcagcagaaggcctgctcatgacagctgttccacatagattattttcccctcgggaatcacttgagtcatctagacccaagtcagatagaagtgggagcagccctgcagggaatgcactcaattgcctaatagttctcgtcaccttgtgtttcagtagccctatgactaacgctctcttctgactcaatgttttcttacatacaaggtcccaaggtacaagggttagtctgtgatgtcactgaggttcccaaaacaaaacagagtggctgcccattgttgcatcataaaaccacgtgtcttcttgacctcttgactcaggagccgtgtaccagattcattccaaaccaagatacagaaaacctgagagaaaggaaatgaatttaaatggatgaaaatagggcgggagagttagagtttctctgtctgccagtgggggaaaggtacagtgccttcttgctttttatcctgtttccattccaggctgtaagattgatgctgtccatgatcataggaaaatgccaaaggctgggcatgctctgactcggcactcagatggagcaccatgcctggccaggctgttctctgacaagctctctggctcctggcattgtagtccccctgcccttttaaaaaacaaaaaacaaacaaacaaaaaatgagcacggcttgtttctctaagaaatatgaaatactttctaaaatttgagcaccacaccaagctttcctgtgagggaggttcaaatcaccataggaataaaataaagcctcttttcaatgcttagctgttctcctattaatgcaaataatacctggccaggtgatacagccagctttggtgatcagtttgatgcatgacactaggaaatttatcttccattccttactaatgaaagaactggcagatggttccaagtcttccagcgtccctctttcttaatggagggtcatgatctccccgtgtggcagctgtgcatttgatctcttcacttgtcacacccatgtcttccagggaaacatttctactctacagcagatggagtgggccaccacctgggtttcttggtctgagagcagcaaatcttcagttttgtttttcttgctgtcactccagataccacatgccagaactgcccttttctttaccattaagataatgtcccttctgaaatggcaagtaggtacttgccatagagtaaaactacagggtgtaggcatggacaggaattccagaccatggca

SEQ ID NO: 55970 - DNA, 993 bp, Homo sapiens
cacatatgcttgacaatgacctagccgggctctgaatccaggaatgctgggaccagacactgcaaccaggctcagaataaattagcagtgacccagagtttgtggcgtccgaaaggacatttctctgtggatcttgccaagatgttcatttcaaagaaagccctggcttcttcaggctgcctttcccgttggccacatgcttcccctcgtaggacaatgttgcacaattggtttcccaaacaggggtcaggtcctgtccctttcctgtcacagccttgcccagcagaggggaaattgttctaagggtctagatgcggagagcaggtggcatgtgtctgctggacggagcagaggctgctgggaaatggccaggggctcttcgaggccaccagaggagtggccctgggcaggggcagtatgccagggagggctggggaaggggaccttcatatcacagcctttagatcctcctgggtagagttcagagctggatcccagggaccttcgagttggagggaaactcggagaactgcagggctaaaaggggcacttagcaaatccacgagaggcagggtggcaggagacccaggttccctcctggctgcaccagtacctggagtgctttctccctttctcagagcctcttttcctgtcctgagcattggacgctgcctccgcccccctcccagtgtggtttcaaggaccattcaagataatggaaggcaaagtgttttgagaagggaagtgtacctccagtgtgagaggtgatgttagttaatgattaatacctgggggctgtgtttcctggcaggaagctggcaggcagacagggagaggagaccaaagagagagatgggagagccgaggccatgggctgacgttcccagaaacccagcctggaccattttcttaggcaggatctgttgctgtggtaggaggagctgttcttccttctcagtctgcacagtggcttctgcccattcagttgtttat

SEQ ID NO: 55971 - DNA, 785 bp, Homo sapiens
cccctgccaccaacccactctggtagctttggacaggtctctgcctccttctgggcctccgtttgttcctttggaaagtgggagtgtctggaccagatggaggaatttccagactcctcctttcagaaacggcagcttccgtggcccaggtgggaaggtgtggcgggggacggggctgcagggtggctgactcagagcctagggaagccccagtcgctgcttctagcaagaagttggcgctaggtatcctttggcctgtggtcagtgtccagctgcagctgctgtctgggaatggagggaagcaggacaggaagtggaatctgggtcaccagtcccccaagcctcccccacagcacctcccccactccctggctggctctgcctccctctgagccacagcggtcatccaggccaggtccagtgactgtttctacccggtgaaaggaggaggaggcatcacagagccggagacctggccgacttcccaacacagcccgaatctcttcccagtataatccagcgctcgggggggtcaaggccaaggcagggtggaatcccgacagaagttggtctgtggctgggatgtggtgggaacaataatgtgcgtttggcaggcagagaagatttttcctttcgggcatttcagacaatgcttcttcccccacccccccgcagggaattttcctgggccaagaactgacagaccctgaaagaatctgcatggaaaatggtttcagtcccaggggttagagctgctttttcccacccccacaggaaggatgaat

SEQ ID NO: 55972 - DNA, 1652 bp, Homo sapiens
cattaacaagcttgactaactggcctttgtcttttttttttttttttttttttgccttctcacaagttgcctcctggagagactcaaagccctatttctttgtcttgtaacttaaaaaaattactgttctttgttgaagatgctataaaaactggaattcaaagtcacctcttccagaacgactcattccctccagatttctcatgtataaatgaaatacacatgtcagtaaatttctgtctgtttttctcttgttaatttgtcttttgtaacaggagtctcccccaactaagaacctatgagggctacagaaaatcccctacaaatgaaaggggcagaaatgacaaactgcgatgaaaggccataaggatgctcacacccgaatctaaaaagccctttgtgtgggccgcagccaagcatactttggcaagaaatttctgtggctctaacctcctttgaaaactggagaaccaaggccaggaggcagaaggaggtggcagacccggcccggcggcggcccagcacgcgcaggccacccagagtggaggtgggaaacggcattacgcccctttcccttttcctggtcccgcggtgctacctcgtgtgccacccttaaagcgtagtccccgccgagaccgcccccgcctgagtggcaaggggacgaactgcgccctgaacaggcctggaagcccaacccggtgcggaccgccctcagtctcctagtccgggcgcgctgagcgcaggggggcgctgtcctcacccacgcgtaagtcgccgcagggcgtttccgggcggagaaaacctacacgtgatgggcgcccaccgagtgccagcaccgcctcctccagctccgccaagtaggtgggatccactactttgcagaggaggaagccgttcaggcctccctctgtgcactttgcaaaagcctctgcccttccatctcgaatcccttggcgccgatcacacttcctctgcctggaaacctggagccgtctctcgcgagacgtcctccgccctgtagaaggccgtttcggttcttcgtgcgcggtagccgccccacttgcgggattccaaggcctcatcgagtgcgggtatctggctgtggattcgccgccgtcctgctggacgcctggaggctcgaaccccgccgcccccctaccccaggctttactcccaccccggcttccgcccactgtgctgcccttcctcggacctgggctgtcgggagagctggaggtgagcgctcttgggagagcccagccaatttaaagagtacccctgagaagactttgcggaggaaaatttaactgcgggtacccgctgagtttatggtgcgcccagtgttaccagagcttgtgttgtgcatcaggactgggaaaattggcaaggagttacgctataatgactcatattttattgaactttggtcatcagccaggatttgttctaagtactttattgtcactaacatatatatttatgtcttcacggccaccccgaggtggttactgttatatccactgtgcagatgaggaaactaaactggcttagagaagtgaaggagttcacacccgcgggcaggagtagaccaccctctccttggtgtccacacctcgtttcttcaggactgaagaggcaggccctggagctct

SEQ ID NO: 55973 - DNA, 1575 bp, Homo sapiens
tatacgctcaccagaactgattataataaaacgtctacatatttgttagttttataagcaacgcgtggtgtctcgtttgggtttaaggattctttaattatgaatgaggctgtctgagcatttcactgcggagcctgagcgcgcctgcctgggaaaacactgcagcggtgctcggactcctcctgtccagcaggaggcgcggcccggcagctcccgcatgcgcagtgcgctcggtgtcagacggcccggatcccggttaccggcccctcgctcgctgctcgccagcccagactcggccctggcagtggcggctggcgattcggaccgatccgacctgggcggaggtggcccgcgccccgcggcatgagccggtgaccaagctcggggccgagcgggaggcagccgtggccgaggtaagcgcggctctccagggcggcggccgggcgggcgctgaagcgagggctcgggcctccgggggccgctgctgggtcgggacaagggccgagggagcgcggccgcgcggaggctccgtggaggcccgtgggctgcgagaggccacccccagccccgccggggctgtgacaatgactgcccgcttttggagcgctccgatttccactcctgcttctccttctcctccggcggcggccgcgctttcagcatcttggtacccacctgttctcctagccaaccttcgcccccagtccgctccttcctttcctcctgcgacccgccctccgccctccgccgtgacccctcccttcctgctgccaccttcccgccagccacagggatctgattcctcccagggggatgtcctgcgcctcagggtccggtggtggcctgcggcatcccttgcggtgccagaagccgtgggacgaggtagggaaggggccaggggcatgttatgccggggactgggtggtcgggggcgtgttaggccggggactgggtgaccgggaactagatggccgggggcgtgttaggccggggactgggtggccggggtcatgttgggccaggcactaggtggctgggggcgtgttaggcaggggactgggtggccgggggcctgtcaggacggggcaggagtatgttagactgcggactagattgctggtggcatgttaggccagggactaggtggcccgggggtgtgtcgggccggggccaggggcatgttagtctcgggactaggtggccagaagcacactggctctgggcttcaacttgaagtccagaggtgtttggggctttgttacattcggtgggaaccagatctaaacacacaattttgagaatcaaagaattgcttggtgttactgattgggcaatgctaatctagaaaggttcttgacttatttatgtgaagatatggtcttgaaatatgtacatttaaattcttgtaagtcttaacttcttgtaagtcaggtaagtgctctatgtactttaactggacttagtttgtaactttcagaactcaaaggctattcactgtaataaaatagatgattcagtttccatcattcactttccccgacttcctggttgcatgtgagggtatgaatggataat

SEQ ID NO: 55974 - DNA, 690 bp, Homo sapiens
tgttggttgaatgaatgaagtgtttattgtttgaaatttggccctgtcacctttttttttttttttttttttttttgcctttcatcattttgtgagcaagatctctcctctgccttttaaacttcagtaaactgaagctcagatccaagtagttttttttctttccatcctttgccttctcttagctggcagagatggggttaagaattgttggcagctaatccaccttggtttgaggccctctcacactgagctggaggaatgactggaatttgagggggaggggaaaagatactctgacctttgcaggcccgtggcctccaagcagcatctcctgttcacgttctcccactgaactaatagtccaagtacccccagttcaccgcttttttccacacctgtcaacctttttaagaacctgggagcagactgtggctacttgagctttttttgttgatgttgaacattatgtattttgctgttatctctcaacctcttgaacatactatcttttctccctgcccccatccttctcattctgctcaaacccctcctccccacctcctctccaaatcccacaggtcagagtgcatcaacaagtttgcttcagtcttcgggaccatgcctctcaaggtggtggaacaccgagctgaccctgtcctgtacaaagatgactttcctgagaagctg

SEQ ID NO: 55975 - DNA, 1117 bp, Homo sapiens
tctttatcgagatggtcgtcctaactaacagtgtacacatacataacaattcttccaactttcctcctcagagctaagcacttcactatatgtaaattataataaagaaaagattgtgcaagatcatgcaagtcgattgacttaaaatattgagttttaatccaggccctctgtttttctatttaacaacttttgtgtttggaccagactggtgaagcaggctatggaaattaacaaagtaaaaaattaaaagcatcttccttcgccatccctccctccaaaattaaacaacagtcgccccttcctgagcaggcttcagtcccaggctcgagttttcctgcgatcaccccacagtcacccacagcagctgttgctgcttctgtcgggttttcgtttctgccttctttgggtcgtctcttgtatacaaaacacaccccagttctctaactaaattcaaatacgaccccggcagaatttacacatttcgtggtgcatggattgtgtcggtgcaggggaaataaataccctctggtatttaaccactgagtctaattcgaaaaatcgggactgggcccctaggcggcaccccaggggctccaacctggcccgcgcctccccagaccttggcgctgagagcgctgcttttgcgggtgggtggacggagaggtaacaatctgctttcaacaaaaacctgtcgccaccgaatcgaaagcgaaagggaagggagaagaggggcagcttcccgcagcggccccgcgtctcgggacaggtagactaggaccagtacgcgccggctgcagctccggcggtcggatccggagtttgggggcgaggcgccggagtccctgccctgagtacagggaggctctctgcgtcgctgagaaacgtcggatctccaacccgacatgtctcctgtggcccaggcggcccgccctggactcgggcaaggaattcaggaggccaaagagcggacccagagtctggaggggagaatggtgaagtcttgggttgcaacagaagagggctcggtgggggctctttcgtaaaaacgcggtctccgcacccaaaggacactgcggagccgccttaatcgtcgttcttttagcacatttgggga

SEQ ID NO: 55976 - DNA, 2072 bp, Homo sapiens
ctcattttattattattccctgtttaagggctcatcccagaggttaagtatcttgccttgtcctgggtttaaaacgcaaccaggaagctacctaggtctgtgtgattctcagaccaccctgacttctttacagtttgctcaacagtggttcatgcttgaatgtgattcagaatcacctggaggccttattaaaaccaattgtcccacagttttccattcagtaagttgggatggggcttcaaaatacgcactcctaacaagttcccagatgatgttgctcctggttcaaggaccacgctgtgagaactacagtgctgggctgggatccagctcccgcccttactccactcgtacaaagcgctcataatcataccctcccacaacggtgtgttgtgagaggacattgtgataatggaagtgaaagagctttgtcagctgcacaggtgaatgcccctggtcattaaccaggtaatctgcctgaggctagtcctctggagcctgggagggcagagggctgggacgcagggtgggcaccgcagccacctagagagctcttgcagcccacctcaattttgggccactttttcttcagggagaaagccagctttgagggcttaggcccacagcccctcctgccactattctcatcaacccacacctcctccctcacctcaggcagctgctgggcactgccccagcactggttgttctgggctacttccccaggggccagtccaggcaagctggggcagctcaagcctgtgactcaggacctgaggctggatcccgctcacgcccgcctccatgagattcagagccctcgacttcccttctctgagccttaaactgcgcattagtaaaataggcgcaacgagagtacccatgagttgtgggaattcaagggctagaactgtattcagcgcttggcatagagcctggcccctggcaaggattcaatcaatggtagtcagtattttcaaaaagttcctgggcccaggccgcctcctgatagaggccccgacttaggacacaaaccgctcccacgccgttccccggcggcacccggatacacccgccctggaatgccagcgtgggggccccagggctacccgcccgagatgagaggggcagggcagggcaggattaggaaggcgctgagcccaggctggtgcggggaggggcgtggcctcaccctactagggccgggggatggggtgggctcgaaggagaaagtgaaggaggcgggggcgctgggagggcccgggaggagaccgggaggacgaggtaggcgggagctgggcgggaccgttaggcagcgccgtgagtggacagggctggagcggggcgggcttaatccccagtgtaacctgggggcggggctgccgggatagaggagagactccgtagcggggcggggcctcagctccagctgggcccgggggcgaggctggttggggtacggccatagtgggcggggcctggccggcgggagcgcaccgccttcccaaagggctcgggggcggggccggcggagggggcgtgtcttctgggggcggggcctgccgagtccgcggcgttccccggctgcagccgggagggggccgaggagtgactgagccccgggctgtgcagtccgacgccgactgaggcacgagcgggtgacgctgggcctgcagcgcggagcagaaagcagaacccgcaggtgagcaagggggcagcgggccggggtagcctgccggacaaccataggcaaagttagttttagcccccgcttctgcggtccggctcggacaactttcctcggaactagtgacaggtcggggcagctggtgggtgaaaaggagctttagccaccagtcctgaacccccagttctcacactcggccgtgcacagctgcgtgatcctgggtccgtccctctacctggctctggacctcccgggttccagcaggaggaagtgaaccaggtgaattccacgctcccgttgccctttctcacttaaaacgccggaaggtgagagctggcaggtgagagcaggctgcaggtcgccacaggtgttcccatcgcgttgc

SEQ ID NO: 55977 - DNA, 1611 bp, Homo sapiens
gaaagtcagtctgtaccagatgtgctggggtggaggatccagcggtcaagggataatgaaccaatggctgcagtgactgggaagaaggggtctgggtggctttggggatgtctgcaactgggagtgaaggaagagacaccagccacagggagagcaaaggcaccattggaggggtgggaggggactgttccagcacatttgcacttctttctcctccctatcctgtctggtacatagcagggtctcaggaaggtggctggattgggtgagtggcggggttgctgggagggtgatgaatgctacagaggggtttgcccatgaaggggaggcatctgggccgaaaggtgggagcctgtgccagccagcagtaagtttgggggtcgggggcgggatggttagaagaagtgcctgctgatccctccctcccatcccagcccagggaggataggggtgagaggtcagccatgtgctatctctggcagtgggtgagcagtcagggcacaagtttcccacagtagggggactggggcaggattttggcttccctgggctcctctgaagtttccgctatgtgggggcggccccctctgtcttgaggcctcacgctttagagccacagcctggaagctcccaccggccatccccttccaccctggggacccaaacctgttcccctaaggaccagacagtcctccctcaacccatggctgagcagccccaagttctgagtgttgtttcagattcggagcatctggggccagctggcacccctgattctggcttgaccttggccttggccttctgctccaaaccgttatacccacttcctctgccccatgggaagctcacagggggcggttatgacttaatcaagaacatcaaacggccaggagctggctctgtgagaggtgggaagggagggaagagcctggactgtttggcctgggcccctctgtgggacaggacccgtttaatctcagcaggaactgccctacccacccgcttcccctccactaagccggggtctgaggagctgggaggggaagcccagaggtaaacatggagtgagtggtgtgggatgtgttgctcccctcgcccctgatgctgccctaagaagaggcagacaaccacagacccggggcctctgcaacaggcccagctggtgtctctcggaggctggctggttcctgactcacccccgggcttccccttccactgtggttttcctgtcagcagctgattcactgtgctgacatggacaggcagctgatggaggaaagagacctgtgttctggtccttggagttggctgctgctctgctgtgtgtatgttgtgtgaccttagataagttccttctctctgggattccttccctgacttgctgatgccccattctttccttggctctcggggagttctgggacctgggatctatcctttgcaaagtagggcatgtctgtgaacacccacccatactcaggcatgcgcacacacacaaatacaaccccaacacagaggagctgggcagctcccctcaaagagcacttgatcctacctccctatttttaccttgtttcccccacctgaagcacctttatcttctttctgcct

SEQ ID NO: 55978 - DNA, 1036 bp, Homo sapiens
tgcaacctctgcttcccgggttcaagcagttctcctgccttagcctcctgggtagctgagattacaggcacccgccaccatgcccagctaattttttgcatttttagcagagatggagtttcaccatattggccaggctggtctctaactcctgacctcaggtgatctgcccgcctcggcctcccaaagtgctgggattacaggtgtgagccactgtgcctgggccaaaccctaggtcttaaaggaaacctgaggccctcgtcctgcttatgctcactcttctcctgtcacccagagtagcagctatttttttttttctggtgggtgggggttaatatcaacaataagagtaagaccagagattgaaaaataagatagtgagaggtcaaaaagccaggccctggtcctggtgtcagcagggatttcaggaaacacatcacctgtcaaacatgaaaacaaacacagccgtctgtgcccagcctcttcccgtgggtgatcaggacaaagtccagaggaccagagagctggtggccaagaaccagcttgcaggtggagtgcctgcagatgggctggcatccagggcacaatagcccggccaggctttctcactccactttctgcccgactgggcagaccgagctcccacgggatcggatgcccaactcaccaaactggctggacctctgagtctcaagcagttcccagtggcacagcctggaggctagaggcagaggctcctccttccttaggcagcccagcctggtcctacttctcccccagccccttacccaggagcagcagtggtcatcttctggcacggagcctctccaggatgggcacatggctagagactggatcaggcctcagagggcttcagactgttggtcaggaaagcaacaacttttccagatcatcatcatcatcatcatagttggtaacatttatctgacatttactgggtgccaggaactttatagatacaaactctttaagcctgaccacaacccattattaagttcattttacaggtgggaaa

SEQ ID NO: 55979 - DNA, 1173 bp, Homo sapiens
aattttctctcttctttcgcttgaccctgggtgtttataagaggtggcatcaggttcagagggtagcccagggtctcacggatgtggacagagatttggcccatccttcatggctcctccaagcatcagtcatgtaaatcagtcaggcagtccatctgccagtgacgggactcaacggtcaggcggtcagacagttgggcattgatcaggggatggctggccgccagccttgccagtcagatggacagacagtccgaggatcactctgcactcaatctgatacagacaccgctttgcagggtcccctcccagcacaccaagagtgtctctcctctcccagagtcccccccttcccaggaggcctggtctggggtgctcctggcagggtgcccgtccctgatcaccgacttggcagcctcctggatgctggctccagcgatgcccctcctccttcccctccctcccaaggtgggagcttcaggctctgccaaagcattactaagcccggcggtgacgtcaccctccctggtcccaccccgcccccggccggcttacccttcacccctggctgcccctgtgagaatgacacatcctgggtgggggaggggctgtgccctgggaccaacatgaagatcctccccccaccccaggcttcctggtgggtgggatctggtctgatgcttccccagctggaggctgctcagctcgagcagttatagtcctggagacccagccagacgtaccccaatgcacactgaggctcttcccctcaccagcagggtggccctggacaagggactttatctctttcagcttcatctcggatgataataggacctgcctccgggggcgagtgagcgggtgtgaggcttcaaagacaccatgcaccgcaagcccctgctccacttacaaggggaccttcagtccatctcggttgcctgtggggtgttcactccgaattcctcaaggtccatttcaaaactaaatggctggtcctttgctgtcagggttagctgaaagacaaggacttttcaccaatgctgtcaagctgtgaggtcaacacccatttcctgggatcacagcagccatcccgcggtgtggggggccacgtgggagtgggccttggaccttgctgcccgtggaaattctaagcactcctcctcactttgattg

SEQ ID NO: 55980 - DNA, 1034 bp, Homo sapiens
ctttaacgttgagtcactaccagcttcctgcttggtagagttctgttttccaagaatcccattcacaccccttgcacagaacatgcttttgaaaaaggtcagtctagagaatgggaatgctggggagaatccttccaggaccttcagaacaaacccatgcagacgatgcgacttcctgcccagaggggcacagagatagctgagaacagaaagggagggactccagacttgaagtttcaaaagggcaggaagtactcaggtacctggatgatagatctggggattgcgtgtgggtagatggataaagaatgatctccacccacacctccagccagaaggaattattcagactgtggagggggagaagggagaggatgtggccagggagaggggtcagggagcccagaggatgcagcaggactggctgtaaggattcaatgctggaaatggaaagcactgtatgaattttaagcagcaaatgaattaaaactgaaaattagatggttgcaaaactgtgggagggctggagaagggcagtcaggggcagcccctggactttggtttggaaggtcatgcctgttgatatgactcagatgtgcggaagctgctgctgccactggaattgccacatacctgtgaacctggtgagcagatgctagggccgctccagctgcagctcggtggctaccacctctcttcctccttccccacctcatgggggcatgtttacctatagaacctcattcatagcccagatcctagctgcaaaggagtctgggaaagatgactgcttagctttccaacttccctctgacagaataagattcttaacctgggagtgagtgtcccagaggccaggagagcactcagggcccctccaagaacctgcctcgacattcaacagtaggccaaaccctaggggcttgcttgtattagtctgttttcatgctgctgataaagatatacctgagactgggtaatttatttaaaaaataaaaaagaagtttaatggactcactgttccatgtgcctgg

SEQ ID NO: 55981 - DNA, 638 bp, Homo sapiens
tgtcagaggaggagctagagaagaaaatgtgagctggagttcatgcaggggaagggagatgggctgtgtggtgtgctcctcttagcagagggcttgaaaatctccagcaggactcggcctgtgtcccctggactttggtatccttggcagtgccttggacctcactgggtactggaacccactggtctgtctttcccactagactgtgattgtctcaggggtaggcaatgtgtggcttcctccctgagcctcaggcctagcccagtgccaggactcatcaatattgtttgaactggctgagctccaagcaggtgggtttggaggttttcactctttgtttgttttctaggttggtcttatttaacaaggcaggcagcctggggtcagacccaaattcttgcctgcccagtttcagtcctgcctggagaatgagatgggcctgactccctcaggctggagcccagatgagttcctgggtgcaacagaggaggcagttggagcaatggggactgcccagtgggagggaggcggagccagtcttattgttgagagggcagagggcagaagggactcctcttggcagttggtccagctctgggctaccttgtccatcctgagccctaggaaagaaaacaaaa

SEQ ID NO: 55982 - DNA, 761 bp, Homo sapiens
tcagcccagttctagtgtgagtcatcaccaagtagctgatggcagctgtggaacaagagcaggtacaggatgggggccccagttgggagagaagagtggaagaggcatgtttggggtgagagctggaggcatgaaaaggtggagggacgtggagggtacgtgctccttacaacagcaactgcagccagtcagcctgagcacagggccctgggagtttgggaatggaagacacagggctgagtgagaaggtggaggtgagcttcctcattacaggggccaggaaatgctgacgaataaacagccattgtttactgagccgttgctgcatgccgggcgcatagccaggccttcacacacaacaacaatggcatttgctaggtgctgggcacattctgagcacgtcacggcactcactcacgtggctctcacaaatcagagggcggaacagaccacagagaggttaagtggctagtcagaggtcagccaggatcaggactcctgaccccctgacccctgccaactacagcttctccagatatgactgcccggtagatattctccccactttatggacgaagaaactgaggctcggagggattaactgagcagggaaggagcgctctcattgtgccaggctccgtgctaatcacgctcccatatgttattccctccattctggccacagctatatgaggtggagattatgatccccaggttacagaggagaaaacagggggcggggaaaggagggataagtcatt

SEQ ID NO: 55983 - DNA, 626 bp, Homo sapiens
cataatatgttcctttatggagattccactgcctgcagggaggggaagatggatgaggctaaagcaaggagagcaggccggatgctactgcaaagcactggggaagagccaatgggccctaaaatggcagtggctgtgagatggagggaatgcaggatatgggagatgaggtaaggtgaggtcggggaacccagccagagtgactaggcccctcctcagctggaaccacttcagtacataggaatggctcacagactttgagccatctgagggcagatttccatcctttttgtacccagcccacagcctgtggcctggaacatattaatgctaaaaatatttgttagatgagtgagttactcaatccatcattccccagctggcctccaaggccagggctgtgacctggcccagttcctccctggctttctccccagccctctttcacgtcctactccctgccctccagcaggctggattccctgaaattgcctggattcattccatttctctgcctggctcatttgattgtgtcctagaacactctcctctcattttcacatgcccaagtcctacccactcgtcaagatccagttccagtgccccctcctacatgcagccctacc

SEQ ID NO: 55984 - DNA, 2201 bp, Homo sapiens
tccaggcgctcaggaaagcatgtcaagcactcaagcactctgtgacaattccacccccggcccagtctttccctcttcaccccctctctgtgatgtcgaatcccatttcacagatggagaaactgaggaatcgagcaagtgaatgccgcttaaacatcttttccaagccagccagggaccagcccctccagttctcagaatctctctccctctgtaacatattttgacttgaagaacatgtgcgattcgtgactacaaaaccgcaaccccacataaagagttaatatttttaacgaaccccaagcccctcaccctcagccttcgcgggacgcctgcgtctcgcaacttcagtttgtatctccaaactgctgagcattcaaagggttaaatgggaccgggagggggccagccgcggagccctgaaagggttaaaaatccaaacgcgtcgactccccccgactatttggttccaaatggacagccacgcgaccgggagagccagggagcccccctcacaatgactttattaaaatttgagaacttttacttctgaccccaaaaaagtatcccagttcgaaagttctctcttaaccttttctttttttcatctatttttttctcgatttctccacgggctggattataaaacgctccctctccctttgggtttggagagccgggttcccccctccgggcagggcgcgggcctaaggggccccgggagttttctccggggccgggtcgggacgcggctggtgagtcccggctccggcccctgaattggggggtccgcgtctgccccaaacgccgctttcttccgttttccatgtcatttcctgtactaataagatggtggtcaaagcaggggaggagagcagcagcgagtcgccgccgccgccgcgccgaggctggcgctgaaactttgcctcgccggggaccagcgcgcccgcagcgcggccgctccctccgcgggggccgccagccgaggccgcgccgcctccgccgagccgcccgccgggccgctctcgccgcccgggccccgcggctgccgcagcattcccgggaaggtgagtcagccccggtagccaatgtggccattgaaaatggcttcggagagcgctcggcagtttgccagcgagcgcgggggccgccggtgcgggggccgggagcggcggctgggggcgggggcggccgggggtctcggcgcgggcgcggggcgggggtccggacggcgccggcgcggggtggggggcggcccgccgtggccgcgaggtgggtgaaccctcggcaggtagctgccgccgccgcgggagccgggggccgccctccgcctccttcctcccagctcgctcgctcctcgccttgttacaatgtagccttttctctccgcaagcggcgcgcccgctgacggacgtggccgccgaccaatgggagtggcggcccgggccgagcgctcggaatgagaacgcggtgacacggacggggcggggcgcggacgccgacgccagagggctcgccgcggccgccggcctagttctcgcggacgccctcggccccgcgccgggggctgctgcggggtgctcggggatgaaggtgggaggcgtcctttgggatgcgacgaagccttctccatcgcggttcgcgattgcccgcgaagcgtggccgagccggagggcatttctggaatgcgttttaagtgtcagttgcggtgtagactcttcgggaaacctctccggagcgtagcctccaccccccactcgcagtccccaaggtactctcctatgcagaaactgcagaaacttagcggccaatgacctctctccggtcaaggccagcgtgctctaggcgagtcgctgcaaagagaataccaatgtcttgggcgatgctggtgaaaaattgctggtgtgtgtctagagcccagttgggagatgggggcttagaaccccccaggctgggctgggatttaggggagaaaaatgtgaaacgtctcctctttcctagacgtttgcttcgtgtggagaaaggctgtgctgtataatttagagtggctgtaaggaaacacacccagccctttgtgcgtggggccaggaggcaatgatgagagattgctcttggtacctggaaaccctataaactttgggggtttggggacagaagaattttctgtggagcatgatgcctgtagcaaccaagctggtcct

SEQ ID NO: 55985 - DNA, 1783 bp, Homo sapiens
ggtggggggtactgcccatcccagtgagagttcctcagggcagcaggtgttcagggatccttcacaaatccacagggccttgctcccacctggcagctggacttctgagctgggacctgaacccacttaagggtgatcccagcgattgttcggtagaggactggactgaggatactgcatggtgaagccaacttgaaacacttgaatctgggggttcagccagtttccaatttactaagcagccatcgggtgtggtctgcatgaccttcggcaagtcgcttgacatcttccaggccccaattcctgcgccctcacaggaggcagggggccatcccacaggctttgaggtcggtcgagcacccagcggggagtccctggcataacgcagccaggaggcagtagagtggcaggcgccccaggcggtgcaggtgcggccgcggctgagcgagcgggtgtccggtgtccgcacgggtggcagcgcaggccctgtcgtcgccgccacaccaaggcagctcggaggctggggacacccgcccggcctccgcggcgctgtcgcccagccctggcaccccccgggccgagtgcgcatcgggccccgtgggaggccctggaatgcgtccaccgcctgacccggagcgaccccccgcggcgccctctcccaccgccccgcccgggcgcccgcttcctcccgctccctgcgcgcccccctcccggccgccagccaactgcgtgcccccagggccggcaagaagccacatgcccccgcaaggaatgccgggcctggcgggcggggggcgggcgctgggcagggccgggcgggccgggccgggcagggagctccccgccgggaaggctggcgagagggggagagcccgcccgcgcccgccccggccgcagcctacaccggcccgagacggggcggccacggggcagggggcggcgcgcccggcctgggcagccctccccttccccaccgcgcgcccccggccctgctggctcggaggagggggcaggccgtcacgtttccccgcacccctcccagtcgccgccgccggctttggggccccggtggggagcagggggctgattagccgaggagcaggggtgtggccagcggggccccgggtagtgagtcacacacgccgctcgcccagtcccagggcccagcgccgtcccagccccaggctgcgtgccaccctcgccccgaagagtgtccccgggcttggcatgaggaccccggggtgccgagggaggggctgaagcccggcgcggtggtggagggcggtaagcggcgggctggggagtgtccccttgagagagtcgggtggggctggagccctggctggccctcgccagcgcccccaggccctgcctgtacctgctctgagctggcaaaggggcctggctgcgctcccggcagtcccagggtgaggggctgccctgccaggcgctgagggcccgttcggtctgcccactaccccttggcccaagttgggcttgagttgtgaaccctcccttctcccctttgcagttttgcgcccaggctcatgtgggatcctcctgccctttgccctttggtctaggggtccaggctatgcttcccagcgcggcctcctggcctgagctgctctaggctcctgaccccatggggctggtggctccagtcgtccccaggaccagcccgggatagaaacggcatttcctcttggccgggctacagctgtttttgttgtctgtgttctcaagtgcttcctctggggatggcagggagggtaaccagact

SEQ ID NO: 55986 - DNA, 492 bp, Homo sapiens
gagaggggagtgtgctcttgggtgtattctgtcctcccctttagcctctcagggcacttctgcccctttcgggtaggtccaggtggggcagcaggatgctaaatccccatccagtccagaagtcagcctctcaccttgtgacctcctttggtaggagaactctccagtctgtttatccatcctgaccttcaacccatcgaaagcaaaatatttggtttttagaaactgcctgtttgcttttctgcttccggaggcagccagagctttgagagacccatccagatgtgggcttggagcagtcaacccccaacctttgaggactgagtctctcagaggggaggcggccgtccctggggcctgagtcccagagtgggctaggcttgcttctcctgagagtagacaggaggcaggaatcctggggatgcttagccctgctggcccatctgaggatgggagcagtgggccccaggaacatgtctttcctgccggcaa

SEQ ID NO: 55987 - DNA, 1109 bp, Homo sapiens
tgccaggcccggagagccatggattattctggatgtatagccatggttcattctctgagggagttgagacagcagaggaaaaaaaatactgcaccagaagcaagaacacagattctgcgaggggacaacagtgggaggggtggtctttgtgtgtgtcgggggcaggggagacggggtggaggcagaactaaggagaccctcccctgcaccacgctttggctggatcttgagggacacgtggacattgatggggaacagaggactccgaagggcgctgccgggggtggagaaggtctgccgaaaggcatggaggtgcagaagggcagggcacagccgaactgcaaggtgtagaaggccagctgggaagggttctgataccaaaggattttggactttgtcccacaggcactagggatgcagagacagatcctaggaaggaggagcgtcagagtgagccagaaagatccctctagaaaagcttttcccactgtagtgaggctgatggaggcaggaggccggccaggaggctttggcatgcccacgaggaagggaatgagagtgtctgacctcaggcactggttgtgggcacagagggtagagggtagtggatgtggggagtgaggaaggcgggtttcctggctgcctctgaggttccagcataaggagaacccagacaggcaggggcagtgttaactttagtccttcctgacctccggcctggtccacctttgctgaaccacccggtctctctaaagcctgagcaatgtaaacacccagctgggcaggttccagtccccgctccccaacccctagctgcgcaacttcggacaagtcactccccatctctgaccttctgggctttagtttccttatctggaaatgggatgacctggaagcagggctaacatgaggattataaactctgtgtttgtttcagattggtcctggcaggaaacaagctcattcaaattgggtaattggaagggagtttttaaaaggactatttccaaagatctgggtgggtgtagaaaaatctcaagggacaattcggtgcccagggctggtgacagtcatcccagtgaccacccggaagcctatatggggagggc

SEQ ID NO: 55988 - DNA, 2137 bp, Homo sapiens
caggccattctgttcttaatccttaccttggagttgatgtgaaaaggtgttggcttcacacttggatagtcctgggactgggcccagtattcccttgttgtatgttctggagcattgctgtgagaagccattattttttgcttatgtccctggggctttatttacttcacctcgtgtttaatcttcccagcaaccctatgagggaagtatattacctcatttcaagggtaaggagattagtctcaaaaagaaacacacactccaaataacagatgggattcaaaccttggcctgcccaattccagagatctgctctaatatggttttgctgtgtccctacccaaatctcatcttgaattcccacttgttgtgggagtgacacggtgggaagtaactgaatcatggggacaggtctttcccaggctattctgatgatagtgaataagtatcatgagatctgatggtttttaaaaggggagtttccctgcacaagctcttcttctcttgtctgctgccatgtgagatgtgactttcacctttcaccacaattgtgaggcttccccagccacgtggaactgtaagtccattaaacctctttcttttgtaaattgctcagtctcgcatatgtctttatcagcagtgtgaaaacggactaacaaatactcttccctgtacaccgcttctatcagttacatactgccataataattctgtgaaataaataatcacaaaacctaggtggtatggaatagtaaggctttattgatcacaggtctgggatggttggctaggtggttgtgctgatcatggctgggctcactaacatgcttagggcttggttgccatcgactgacctaggctggcctcaactgggacagctgggatgactcagctctgctccaagtgtctctaatcctagcccaggcatgttctcatggcaatggcacaggtacaagagagaaggcaaacatgattagttgcacaagtatttctcaagcttttgcttacatcacatttgctgttgttatcctgttggccagagcaagttatattgctgagcccagaatcagaaaaggacattgcagatgaatggcaaaaggtgtgcgtacagggaagggtagggatttggaaccagttttgcaatctaccacatgatcttgggtaagttacagtcccctctcagagcctctgctcctgcattttttaataggatggtatctacttcatagggcagctgagatcattaaataagacaagctgtgtgaaacactagcaaattgagaactacccttcctactgatgtatttcaagtgtacaagcctgggggtgtttgtacacattaacagagatacatgaaaacctccatgtctatttccagagtccacagaattctacccaagtctcagaggtgagatggtccaatcactgagatgataaacaagaattgtagaaagagaataaatcaaggaagaaaacaataagtaaatgatgtaattaaagttactgttgaataacctatcaaggagagaatgagtcagtggcaagttgaagcgatgaatcaggcacaatgtcatgtttctagaattcttgtctatttcaagaaagcctgatgtcccagttaaaagagcaccttgagcctgtagcaacaacatctggaaggaaacactcttgtaattttaattcctcctgggtgccaccactaacgacaggagcagcacccgggtagcacagttaggcactccataaaatctctcgtgggaggagctgaaaactacaacattacctcaaatgtattcaaggggattttattttttatttttatttttgctggatttatttatttatttttttttttaatttatttttttattgataattcttgggtgtttctcacagagggggatttggcagggtcatgggacaatagtggagggaaggtcagcagataaacaagtgaacaaaggtctctggttttcctaggcagaggaccctgcggccttccgcagtgtttgtgtccctgattacttgagattagggattggtgatgactcttaacgagcatgctgccttcaagcatctgtttaacaaagcacatcttgcaccgcccttaatccatttaaccctgagtggacacagc

SEQ ID NO: 55989 - DNA, 1367 bp, Homo sapiens
cacacacatggacatggacatgtgtgtgcctgtgcccatataaacaaacattagtgcacacacacactcacacacacacaggctcgggcagtatgtgctcacacacaaccatacacacagatacgcacagaggtacattcacacacagaccaacacacacaggcacacagatgcatgcacgcatgcacgtgcgcgcacacacacacacacgtgcacccaccctcagtgataaccttccaatccactggcctctccgaaattagcacagaccattttcccacgaccctttctcgctgagcgtgtgattccaaaactgtccacaagaaggtgctcgggagccagaattcaggcgttcccggcccgcggacgcttagagaggggagcttcggagttatggggggacccacccttccatttaataactgagaaagccacgggaggggacttgctgggctcacagccagtgatccctgccctgtttccttatggggactgcggtcagaaatggggagtggggcagaaactgtcactgtcacggtcctgtttagagaggaaggtcggagaaaccagtgccgtggaaggctctggggcgttgacaggcgctgtccccagctcaccggctctatgaccctgggtaagttacctggcttctctgttcctcagttttctcgtcttccctgacccaggctttcccgactcctctaggggccccttcccctctccatgaacaccttcagatctcggactgttttctccactcaagtggcatctcagctatcccctcccgggttaggcctccctggcccctatttaacggtgtccccacccccaccactatcttgtttgtaccaacacttgctgcctgacaatgcacacttgttcatttgttcacgtttattttgtcttctccagaagaatggaaacttcgtcagagcagggacgtgagggtgaactgctcacccgggcaccgctggcgaccggaacccagctccctccgggctccgggagaggcggcctcagctgtgtgctggtgctgccctccagcggcgctgggtccccatggcacctggctttctcctgctccccaggggccttttcttctcccgcccacctgtcaccagccgccagggcaagtctctgtgtgactctagggtgaaggtggagggaccttgcctccgaggattcatcccacccggattccgatgagtgagggaccctctctggcacctggtgtttgaatggccagcctcacagttaataaagacaagtttggtatcagctgtgggatccgtccagaaaaagacacctttggggcagaaatataatggtgcctgtctcgacatagtctaataaggaaagaaagacaa

SEQ ID NO: 55990 - DNA, 966 bp, Homo sapiens
ataaaatcattctttatccattgtgtacaatatttttccatttttgtagtcctctttcagactttgacattttttttttaatttcatatcctaatctattttcagttcattacccctgccctatttgtttggcaatgtttctgtgaactgtcaatcttgtcttcctctctaagagactagaaatattcatggaatttgtgaaaacatagccaaataggtaaagtggacatggatgactgaaaatgaatttttttaaatgaaacaacctagaaagaagacaaaattgctttcaaaatgcatgcaaaaattgcaaaatctccccagggtgcaatgaccttatcaagacaggaactaatggctgtaaacattcatttccaactgaatttctttcagttgattcacttggaacccagaaaaactttaaaatttgtaataacttcatcagatgaatgcataattgctgggaaattatttagcaattaaaagcccagaagtctgaaggtggggttggtgtatagagctaaaatgcactttagaagctatcctcattgtacataaaaattaataatacttgataaaacaggggccagaaatactgtttcaaccaaatttttttggcgtcagttttattgaagcataactagatacaataaaatgcaaagatttgtaagtgtagcgttataacaaccgtataatcaagatattgattgactgcttttgtttgttttagagacaaagtttcactctgttgcccaggctggagtgcacgggtgtgatcatagctcactgtaaccttgcactcctgggatcaagcgatcctcctgcttcagcctcccagtatctaggactacaggcgtgtcccaccacgctgggctcatttttctaacttgtacagagagggtctcgctctgttgcccacactggtcttgaactcccggcctcaagcgatcttcttacctcggcctc

SEQ ID NO: 55991 - DNA, 788 bp, Homo sapiens
actattttatcctggaataatatatgtgtattcaccaactgagagaaataatttcaacatataaagcatgaaaggagatttttcagttcaagtgacttttaaaatatttacctatgtctgaaaatgaatgtccagatattaatgataaatccaaatgagctgccttgtttgtattcctgatgtaattacactggttaaatattatgttcctttctcaatcacaagaccattgatttgcaaaatttcagagatgtcagaatgacaccaaaataagcattcaactatttaccttccaaaggccaaaacccaggtgaaacagaagaatttggctgagttggaaggctgaaaccaaacttcaatgcctactgactcacaaaggttctcatctagattaggaatgatcaggcaactggctcccaagccagggacagctccacagtccagctcttcattgactcagtcaacaaatgttcattgaacacctactatgcgccaagcttggtgctaggcacaaagaatccagcagtaaaaaaaaacagagtctggttggagagagagaagtaaacaattagtagactatagtgtatcagatagatttcaatgcattaatagtcccaactattgtcctacctgtattcaatacaggtagatatgctgtcctgtaagtttgtaccctcctcacactctgactctgctctgcctaggggtgtgctttggccagtagaataaataaggcagaagtgatgttgtaccaattctgagcataagtttcaagaggccctgctact

SEQ ID NO: 55992 - DNA, 1271 bp, Homo sapiens
gcagaaggtaaagagaaatcagtcacgtctcacatggctggagagggaggaagagagcaaagcagaaggtgctacacacttttaaacaaccagatcttgggagaactctgtcatgagacagcactagggagatgatgctaaaccatctgaaaccatccctgtgatccgatcacctccctccaggccccacctccaacactggggattacagttcaacacaggatttgggtggggacacagagccagaccatatcactactctacatctcaacagatccaaaaaggccaacaccgtccaaagtcagccactgcccaggagccagaccaggaatgcaaggtgacgcctcgtaagtgtcattgtgaaagcggagccagctccgtgccaatcccctgcctatttcccgttcttgcctgaagaatcccctccccccgtttctggccacacatctcatgctttgggatttgtttgtccttgttctgactctcccactcccaatccttgtctggcaagtgggccctgcctttggaattctccaccccacctttagctcatcagcatgggttcactccctgacaagtgaatcctccacattgctgccccagacccagaaactacgcagtcccgagccttcctggaaccttcaacatgagttccagcaacactgaattgctcaatagagcactgtttacattaggactttcctccacagccaaaaccagaataccatcctggagcggtttaaactgataggggttattcatctcctacagtaaggcttaggcagcccagagctgagagggcagcttagccaagctctaaaggactcaggacagctcccagctgtcctgccatccttagttctgccatccttagttttcctcttcgtagcttttgcctcatggccacaagatggctgccgcctttccagacatcagttccacattataggcagaacaaaggaggggaaaaaaaaaaaaaaaaaaaaaaacagcaaataagtctatacctatcgcaaaaagcaaaaactttcccagaaatcctcagcttactactcattggccaaaattatgtcacatggtcacctctagctgcaagtaaccagtttgaggtgaaacatgttgacatgttgacttacaaacaaaatatgggtaatgttagtaagaaagaagaatttatttatttatttatttatttatttatttatttattttgagacagagtctcactctgttgcccaagctggagtacagtggcacaatctcagctcact

SEQ ID NO: 55993 - DNA, 2012 bp, Homo sapiens
cttatagatgcatttggtttccaggttatgggaagaggaagaaaaagcatggaggaacacactcctaaagttttaaagacctagaaagtagcatatctcacgtgttgctatagactggaggtatccctccaaaatttatatactccaatggacccctaagccccaatatgatggtatttggggatgggtctttggaaggtaattaggtcatgagagtggagccctcatggtgggattagtgctcttataagaaaagacatgagatcctccccccactccacccccatctatgtgccaggtgaagacagaaggagaaagcagccttctacaagctggaagcagccccttgccagacaccagatccacctgggccttgatcttggacctcccagcctccagactgtgagaaataaatgcttactgtttaagctgctcaatctatggtatttttgttatagcaggctgaactcaccaagacacttcccttcaccatccactaagtcacatggttcatctacttagaaggaaggctgggaaatgtagtctttggctgggcaaccataagactagctacaatccaattattttggatgaatgggggagtgaattttggtagacaactaggagtgtctatcacatagggtaggctcatgagtccttgttgaactcagagtgagacagtcaacatctgtgtgttcccagaagttctcaagccgcacaggtacagatccactgacccctgaacctgggaagttagttctgttcactgtgactggcagaaataatttcctgctgacattattagtggctcccagccaaggcaagaaaatgagactacacccataaaggaactattacagcccttcagctgccacgttgatgatcttatgctctacctcacaccaaattcacaccctggataatcactgttggcaagacctaaaatttcaccctttgtggatggtttaaacaattaacattccttaaagaaaattcaaaagcaaaccatttatgcaaggtacacaattcccaggggccttagaccccctaagaaacatccccacccctcctttccctcataagggataaaatgattagaatccaggaaacttgctgtactggcctgttaacaaccttaatccaagggagtgacactaatgacagaatttcaggtatgatgtgagagattggagacaggggtatactttggcctccatagagagcccacactgtcccccacacacgcagcactgactgcccctgggcctctctcagcgaagtgcatctggcctatatacaagatatatctcttccctccagttcaaggtggcagcagtcatcagacaagttcctgctaatgtgctaaggagaaggcccttccagatcaccagggcctctcagggacaagtttgccctgtctgtcactaaattgtttgtcatggtgaactctcgggcataagagaggagagactggaacagatacgaattgctcttaatgaaccaaaacccacagcttcaaaggaaaatcccagaggtagactctccaggtggggttgaggagaccagctcagtccctcttgagtctttctttccccaaagggatattttagttccaaaagtgacaaggtaaccagatggtatcctccaggtggagaacagcccacaactaggaagcagagtctcattccttgaggaggaagaggggagtgctagtacccggggctagtggaagagggtagggtgtgggcccggctcgttgtggggcagctgtttacttcactgcagcctgcagccctcccatttccctacagcccacccagggctgcgctcagctccagtgaaggtttgtgcagttaggatctgagagtttaagcgtactatataggttttacctttttattctggaaatttgcaaatgtacacaaaagtaaggaaactcttataatgggtccttgtgtatctacgcctagctacaactatcaatggcttatcttatttaatctatcaacctt

SEQ ID NO: 55994 - DNA, 2704 bp, Homo sapiens
gagactccgtcccaaaaagaataaataaataaaaataaaaaatatttttggtaagtattcttagtattttaaaacaaatcccagccatgacatcatcttacccgttaattaaatggcactaattaaatggtgcttgaaatattacaaacatctatgttcgaccataccacctagagttctgggcaagaaggttgggacccacaggtcaagcctagccccttagttttaccatgaagataactcaggccgtcggagaaagtggcctgcccaacgcaggtgctagagcgcgaaccaagagaagtcgatcctcctggtctccccggctgcctggtgagtggcagaccacaggctagacttcccaggccccggccctggaaggggcggggaaccctccccctcactgccagctggaagaatccgagcggtccccgcacgcacttctggaagtgcaagccggtagcgcggcgggccagggatacagccaagtcccgggacgtgccagctgcggtaactgaagccgggtcccgggcgggcgggggtaccagggacaggagtagccttggaaagaggagagggcctcctcccacgaccgtccggatcaccgcctctccgccggcacccccggggcccatgccgcgaacaggccggcgaggctggcaaggtgcccgggcccggggcggaaagcaggaagtcgatcccgcgggcgcggcccagggtgcggcgctgcagatgcagcacggggtcgcggggcgggcgcccagtgcaccggaggaggtgagcgccaggtcgccttcgcggcccggggacacaggcagggacgcgggagctgatgcggctggaccggccggggaaacagtattttctggaaggggtaagagatgctgtcttgagcctttggaatctcggatccgggccgcccagaggacctcgacaggagcacagggaggacaaactgaagtccgagagaggcggcgtggcctccggcctcggggagcgctgccgggggtctcgggcttgggagagggcctgggggcggtgaaaatggggggaaaggaggggaccacaacattgttatggaagagtgagctcggattggcagagggacgcggggctgcaacgcgagtctccggaggtggaggggtccaggctgatgtagcgccgcccgggtcctgggtcggggttccgggaagtggacctgcgagccaagcctagccaagtcgggggacggaggctccggggcggacggagctgagggtgggcaggcgaggttgatggagcccttccaggaagcagggcgaggctcaagcacccagaaaaacctgtggctgccgaggtcccccgccagcagcgggcagcggagcgcaggggcggggctggggactggcgaactccgcctctctggggctgtcgctttaagggcaaggcggggcgtgcgggccctttaaggccacgtgggggcgtgtcaggaagtgagtccagggcccgcctcccggggagtcggcctcggatgtccggaggctcctgggctgagccggcgacagagcccgggaaggcagcgagacgtgggcgccggcccagccccctcccgcgtccttcagccccaagccccgagcccctctgacccttccgcagccctccctccagccgcgcccggcctccggcagctccctgtacgcctccctccccctgcccgcccctccctcccacagccgcccatgacgccctctcggcacctcttcccactctgccacgcgtccttttcctgcaccttcgccccgcgtacctactcctgccccgccctgccattcctctcccctcccttctctctgcgacccctccctgttaggccccagcctcttctcccctcacaggtcttctctgtcctggcctcaccgccttatcctattcctctcccttgccctgtgtcttgtctcagagccccctcggggtgggagtaggttgtggagcagcacaactgggctcaccccaaagcagaacttctcaatccatgaggacaatggggaggcctttaggccagcccacatgtgacaatggagggctgcggcttccttgcggagagcacaagtgagctcactgccctggactccagggaatcagagttctggccgcggggtgacccagctcctctgctaccatgaatagggcccctctgaagcggtccaggatcctgcacatggcgctgaccggggcctcagacccctctgcagaggcagaggccaacggggagaagccctttctgctgcgggcattgcagatcgcgctggtggtctccctctactgggtcacctccatctccatggtgttccttaataagtacctgctggacagcccctccctgcggctggacacccccatcttcgtcaccttctaccagtgcctggtgaccacgctgctgtgcaaaggcctcagcgctctggccgcctgctgccctggtgccgtggacttccccagcttgcgcctggacctcagggtggcccgcagcgtcctgcccctgtcggtggtcttcatcggcatgatcaccttcaataacctctgcctcaagtacgtcggtgtggccttctacaatgtgggccgctcactcaccaccgtcttcaacgtgctgctctcctacctgctgctcaagcagaccacctccttctatgccctgctcacctgcggtatcatcatcggtgagtggcagctg

SEQ ID NO: 55995 - DNA, 1351 bp, Homo sapiens
gaacccagggagtttagttttacggtctgtgctctcaataagctttactgcttctcaagcttaacagttccaagaacaaacattttacgtcactacatcaaaataggcttttgcgtgaagccttgggaacaggcatgccacctctgcaccctggattggtcctggtgttccccgcccagccgcaaaccgaaccgccgctgtcccagtcctaccactagagggcgcggataacttaaactggccggggacttccctcccgccgcgcctggttaccttcagccaatcatcaaatatttacccaaagcgcagttcaaagccaaagtagaaagttgtctaatccagtctccatgcaggacattaacaaaaagagacaaaacaggactgatctatctgcgtaagtatcttcgggggagaaagacgccactcagttcctggctaattcatctcatccttaaagcaccttatcctaagtctctccaatctttcactcttcctagtgtaaactaggttgtttggcatcctcatgacaaccactctttggaggtactttttacaaggtgtacactagagtgcattattatgagatcaaaaattagcttttatttctctcgaagagacaatagtaccccattacatttcacttccttagcaatgtacaggtttctttggtctctgtccaatttctctgtgtcccttttaaagtgtaaaaacccaaagtggactttgcactctagtattctatctagtgtcagatttacttcccgattcttttttttttttttccgaagtctcacttcgtcactcagactgaagtctggtggcgtgatcttggttcactgtaatctccacctcccgggttcaagtaattctgctgcctcagcctcctgagtagctgggattacaggcacgcgccaccacacctggctactttttgtatttttagtagagacggggcttcaccatgttggccaatcaattcctgacctcaaatgatcctcctgcctcggcctcccaaagtgctgggattacaggcgtgagccaccgcacccaccctacttcccgattcttgaatgttacactgttaatatactgaagcaatatgcaattattcaatgaagtattaatagttcatctttatcaacttgacaacacaaaccacaaaaaaacacaaaagtaatgatgcagcaatatacaacatgcttaatattttaagttttaaaaaagctgggccgggtgcaatggctcatgcctataatcccagcactttgggagcccaaagagggaggatcgattgaggctaggagttgattgcttcaagaccagcctgggcaacatagcaagacccctgttt

SEQ ID NO: 55996 - DNA, 2592 bp, Homo sapiens
tttcactggggttcgctaaatgaatgtaactgggctgagttgagaatagtaaatgagaccgtctacgtaaggagatgatcatgtctcttgccatataaagtgcacttaataaatggcagctgtagtagaatgatgtagatggtgatggtgacgatgttggtgataataggaaggtcagctgtcagtcttgcaagtcactggctgtagtcacagcaacccctaccagcccaggcagcttcttctagaagcaggccctgaacaggacgtgggtaagagatccgctgtcccttgagacttggcctactcccggcactccgcggacagccccagcctgcggacagccccagcctgcgtcacttgtccgcatgccagctccacccgggcggacccacacatggtaggaacgtgagggggcgggcctgttccggcgcctctgggccaatcgccaggtggaaggcactcagccaatggcagaggggctctggggccctgtgggcggggactaagggtggagttgcggcgtcataggtcactgggcgggctatgggcggggtccacgtcgcctaccggggcggagcgggggtggctggagcagtctggacagtcatggcggcgactgtggcgacggcggcagctgtggccccggcgccagcgcccggcacggacagcgcctcttcggtgcactggttccgcaaagggctgcgactccacgacaacccggcgttgctggcggccgtgcgcggggcgcgctgcgtgcgctgcgtttacattctcgacccgtggttcgcggcctcctcctcagtcgggatcaaccgatggaggtgaggggacccggggctgggtggcggggacgcagccaggaccctgaccctggggtgaccggcgaacagcacgatccccccaaccccgccacggctggaaggccagaggggagaagccgagaccggggaagtaattcgtcatggtcctaacgcgccggtgggccagggttcagcctctgacaaagcgcgttcgcactgttacccctttgagcctcacaactgcctgtggaacggagatcatgatccccgttgtacagatgagacccttgagccctggagacccaaagtcgacctgcccaaggacttgtagccagtgagtggcagaacaggggctcctggtctagggctcttacggtctactcagggaggggcggaagggagataacgtagtgtgagggcgggacgggtttttgctcgcattcttcaagagcccgttgctgggctcggggagatcactccgaagcctctggctcgtttgaatccgccctaccacccatcctggctaccctgcacccagaccgtcctgcctctaggggtgtcaagtgaccctggcttagcattaaataaggtcttctcccctatattataaataaagaagccaaaggcgtcttcaggtggagtcgctttatgttcaaagctccagagaatccaggggattctccaaaatgttttaagccctgctctggagctttgacctcgatagaaaaatttaaaagaatccaaagtgtcaccccgtcatcctcttgtcatgattttagaggacagtagagccattagagatgagacttttatgaactgttgtggtaaggttagggagcaggaaagccatgatatcaagggcccctctgatgaccccccaggagatggagtcgacatgatcatggaaaaagatgaacaggtcgttagtgtattttcactgtaaacagtattcaaactaaagagttttgagacataatgtacccatcgctcttcagaacacctagtggcagtcgctcggtttgtttgcattgttctggggaatgtttgcttgtggccttgttgcatcgatggacagggttatttccaggataccgtggctctcggcacaccattcttttctctccaaggtgtgtgccctgctaagagagtgagtgctgctagcagtgggcctgttcagtgtcccctcctgcccagaaggaacaactaaggagtcctgtggagagcctgcccacagttttcaggctgccttattgctctgtctctgctccagttttctacagataggaggttgggtttgacaagcatcatcaaatgaccatccctagtgtgcacattaagccaagcctcagactttgccctgcaccagtcggagccaggcaaatggaatccgactaccttcttgttacattgtcacagagtttcttcttttattgggttttgggggacattgcatagtactgcctactcttttttgatagggaagattaaaaatcaacaataaaattcctgttgattaaactccagtttgctaggaaccaggtgtttatggatttttgtgggtcatcattttgtgatcgtgctatcaatctagtgaagaagaaaaggaatgtggctcagatgcctgagtcaaatcctgaagtcagaggctgtgtaagaatgcagatattaattgatcacttaataagtgcctaatatctgccaggtactgctctagatgttgctagggatacagcagtgaataagcagatgtgtctgtgctccagaactcctggagcctacattttaccaacaa

SEQ ID NO: 55997 - DNA, 631 bp, Homo sapiens
tatcatcatcgttgttagataaccttgccttgaagcagaggaacttggtcaaggacagcctggacccaaaagaattcactgttatcctccctccccccattaacaacaaataaataaaatattcctcaacacaggatcagccattcctagagaaggccttccctaaatatgagtacttaatcaaaggatctgcttgttttattctaaaaggctagccttgtagagtccctgagttatagtgtcctctctatatttttggaaatcccagtctggttttctccagttctgcctgcctctggctccagagcacttacataataatgtaattcagttgcacatgttgtctaatccaaagggtaagctttgctctcccaggaccatgtgctctgaattttggccatgtgagctcagctaagagctgccaagggtgaagtgccagcccccaacaccaccatctccaatgcccaggccagtttccttcagagtcccctcattggagtaaagagaaattggagtaaagaggagggttctaagggaccacagaaggcccaaggttctctctggtgaaagaatgcatatacctgcccactgagcctttgcccagtcgcagcactgctccaaatgtgaggga

SEQ ID NO: 55998 - DNA, 2560 bp, Homo sapiens
ctgactctctcagggctggaacctattagctctgtttgctattggcctcaggagtgttgctgtggaaacaattaagacacttcacatagcacaactctgccaagaaaactaggccacaagtctgcagggctgtgaggagctctgggaaaagcttgctgagcaggcagaaggctgtggtcctgtcccacctgtgagtcagtgccactctctgggactgggggtttcccaggagcgttgtatttatggcctcctgctgcattctcctacctcaaggacacagcaagtgcacaaggctgcctacctctctcccaactccactgttgctgtgctgttggcttcgccacactgcctgccctcctcaaactttctgaacctcagcttgtttgctttccagatcaaatccctgttcctagttttttctgctgcccatcagataggtctctagactagctctgttctctcccaggaaggaactgagagtccagcttccccctcctccccaaacacagtgttgagcataacagatcctctccccacaggaatggggagtgacccgcttgacctttgaatatgactctgaaccctttgggaaagaacgggatgcagccatcatgaagatggccaaggaggctggtgtggaagtagtgacggagaattctcataccctctatgacctggacaggtaagagatggggcccagggatcaggttaccaattgtgagagttagtaatttgggcccctgctgagcggaactcagagaggttcagcattagggctacctgacccaggaggcatggcatcttctagaagctggaggagaataggccagagtcaggacctgtagaacaggtcacaaagagctttaccccattgaggtggcagagaggcttgttaggcccaaagcatggaagcagtgaggacccacactcagggtatttacaaatctgctcctagtatgcccgagtcccacctgtgcctcatattcccacttccatcctgctcaacagctgccctctgacctcagtggaccctgtctgttacccctccaacagacctctgttcacacaggtccagtttttgtacctaagatgagttcctaggctgggcatgctggctcatgcctgtaatcccagcactttgagaggatcacatgagtccatgagttcaagatcagcctgggcaacatagtgagacccccgtctctactaaaaataaatatattagccatgcatggtgggacatgcctgtagtcccaattactgaagaggctgaggttggaggatcacttgagcccaggggcttgaggctgccatgagctgtgatcatgccacgtcactccagcctgggtgacagagcaagatcctgtgtcaaaaaaaaaaaaaaaagagttcccaggttctatgactatctgggtttccaggccatgttgcttggtggcggggagggctctagagatccctgcagggagctgctaactacagaggagcctcctcccctggtgacagcctctgtgctttcagagattctaggaggaaatcctctcctccccttccctgccatgccagagctgtcaccctcctgctgctgctgctgctgttgctgctgctgccaagccagcagccgccgccgctccccacccccacttcccaacccagtgctggctgccaagaagccaggtcacacagctgtgcacgtgagccgggccctcaggaggagaggctgggtgtggagatcctcctcctgctgcgtgccagaggagagggaggcatagcagaggcagcagccgaccatatatctccactaacgtggggagagcaaactgagaaatgaactcacccagccagatgggccttgcgtaagctacttcttggccaagaagagccccgggaatgtggctccataccatcccaattcatccttatataaacagcctccgttctcttcttcgccctctgatactccttccttcttgcatgagtgcagttatgttttccctggtcatgaaaaatactttgtaaactacaagactctctttaagtatcagttgtggctatgaactctagctccagtctctgaatttgggaggataagctgtcttccacctctctgttcaatgttctaataaatggaggctaagaaggggatgattttccaagaaaggaacatgtctgctattccttatgatgttagagttaaaaaaaaaaaaaaaaaaaacatgtcttcagctcttatcaaagaactttctccagggcttacatgggtggtagaggcctatggggattcccttagcttggacagataggccaagtgccaagcaggctagtagggatttttctgtgattagagattttgtcagtctctgtctttaggcggctctgcgtcaacaccagggagcccggaattgagtcccagctctggccctgccttgctccattactgaggcacctgcttcagctctctgggctttattttccctctcggtaaaatggagatgcggcctcccttgccccctcctttccactcaggcatgggacctgtgagtggatgaggaaagccacc

SEQ ID NO: 55999 - DNA, 953 bp, Homo sapiens
gagtgtttctgggtctcaggcaacacatttgtgttacgttacattctcacaacaaccatgagagggactgctattgtcccatttcacagataagaagaccaaaccttagtgctctgaagtcactaatgcaaggccccactgcccagtcacttgtggagccagtgaattcacaccacctgactccaaacctgtacactttaagagcccactgacatcctctcctttctctgccttcctccacgaccctccttttccgcctgccttcttggtctctgctgcggggggccaacctggaccttggggtccagtgtcctgccattagtcatctgatacccgggcactaagcccaaccggagggacaaagcccacaccggccacggggtggaggagagtcgatgtcggatttagggcggggctgaaccaagcccagggccgcgggggccgtggcttcagcaccgcggagagcgccatctccgggggcggggctggcggggtgggggcggggcctgggcggggcgcgcgagaccccggccgggtcccgggggcgcgcgcggggcgctctcgccagtcccgcgggccgtgcgcggtgctgtgccgcgccctgccagacacaggtgcgcccgcctagcccgaactccgcggcggcggctgccctctcgccgcgcctccgcctccttcgcagccgccgcctcctccgcgccgcgctccgcccggatggccagggctgtgcccgagaatggcggagcgagaaagcggcggcctgggagggggggccgcgtccccgcccgccgcctccccgttcctggggctgcacatcgcttcgcctcccaatttcaggtgagagtccccggccgccgcgcgcctcgcccttcagcggggactgatccgcattggctgccctgcccgccccccaccccagaacctcgggaacccgggaacgaaagggctgcgtg

SEQ ID NO: 56000 - DNA, 817 bp, Homo sapiens
atctagggctggaggggccccgggccagctggcttagggcgcggctgccaccgccttggttcctggcccccgctcgcccctccccctcggcgtctccttcccatccctctcaggtctccgccgttccttgcttggctgagcctcagtttttccagttttcctcaagaccccttcaaatactatttccccaacccccatcccttgcccaccccaccccgaactccttggcgaccactgagtccccatagcaacagcggtgacttcactctgggctcggcttacaaccccggtgaggtcaccggccgttgccaggggaacgggagggcgcaaggagtccggggtggggactgtggggaggtgctggccgtcagaggcacggctggatcggggaggcggcggcctcgcgcttcctcgcggcggacgggcgagagcgccccagtctccggcggcccctgctcggctcccctcgtgcccccttcgcgccacagaatggactcgcccgggcggggggcggtgcaagcggcctcggccccgccccggccccgccccctgacgcccctccgtgcgctgtgcagcccccgcgcgccgggctgctctctgcgggcggcggcggcgcggggagccggttgcaggccgagatgctgcagatggacctgatcgacgcgacgggggacactcccggggccgaggacgacgaggaggacgacgacgaggagcgcgcggcccggcggccgggagcggggccgcccaaggccgagtccggccaggagccggcgtcccgcggccagggccagagccaaggccagagccagggccc

SEQ ID NO: 56001 - DNA, 725 bp, Homo sapiens
ggcctctctcaggctgggagctctggaccctcgcaggtgactgagtgggggctgggccaggcagggaaggccaggggagatcctgggtttgggatctagctctaccactggctagctgggtgtctttaagttgcccaacctccttgaacctccaggtcctcctctgagaagtgaggataagccaaactatttggcaggaagaagtggaaatgagctagaggccatgggcgcccgccctgtcgccatccctgtgggccacctggcaatgccctcagccctgccctcagtgcctctcctgccaaccaatgtttaagttcctgctcaagtggcctgatggcccagagagctctgcgggcgggactgggctggcatctggtgactgccacccggacaacacacagtgcttggtgaaccctggatgaggcgtggggaagggaaggcgccagcagggaccggagcaccagtgcccgcttgccagccctctccctggctcagggtgtcctgggtgcttactcggagaagcggtcatagaaaggagagcgcagcaggtagtagagcagcaggatggtccggcgccgcagctcccgccgctccctccgggtcaggccctttctgtcactcaggaggctcaggctgggaggcagggaggacatggtcagggccaggggcatgatctaggcccacggaaggggaggagccatgggctgggtgtccagaggggcagc

SEQ ID NO: 56002 - DNA, 2090 bp, Homo sapiens
gggtttcaccatgttggccaggctggtctcgaactcctgacctcacgtgatccacctgcctctgcctcccaaagtgctgggattacaagtgtgagccactgcacctggcctcacctctgcttttcaaaacccagtgcattctttcaggactgtgacagcagtcactgggcaaacactcttgaggtagttacaatctgggaatcctggaatctgggagatctagacttgaatcttggttctgggaccatcagtgactgttctctaacctcactgagcttcttccttaaatggacagtgatgacaataagtaccacttaatatgactgtagggaggattaacaagtaaaggtaagaaaggcacttagtccagcgcctggccagtagtgaatactcagataaggtccccagacgtgtctcttgacttagggacatggagggcccaggacaatgaacaacagaccttgtgccgattcagtcatagcacaaggtgtctaacgggcagcccaggtcctcgggctggggtgctcaccctctctggggaactcaccaggggccaggcagccgatcccccatcccccacccccagagcccggctcacccagctctgacagctcgtgcgaatcggcgaatcgacctggggagagggtacagaaggaggtgtgagtgagcatctgcctcacatttcgtcttcgggtcccggaaatcccctccctacgccctttgggaacctggacgggtcttctcaagcacagcgatcactaccctgactccgcagggaagggggccactggggtcataggtcagggcccagaaggaactgatcaaaggtcagggtggcacctgccagcaggtaactgaagccccgcactgctgtctccagctgggccgtggcggccgggtgacgagtcacgtactcctggtagcggaggcccaggagccgcagcttctccatcctgccctcggcaccgacagacccacagaaggaccgtacgacaggctgcggcgccctgcttcctgcgccctccttcctgcttccggtcttaggcccgcctcttggttgcttaacttccgcgggccagaaggctgaggacttgaagaaccggtgaaccacccttcaccccatctcttgaaccgcttcccactcgggtagcccttagcaactgagggcccaaacccggccccctactccctcaagtcattggttagcacgctctccgcccctgacccgcccagcgccgtcagcacccagctcttccgtttaccgggttggctgcccttgcgcctgcgcagttaaagctccggtaaagccgggcggcagtcagagcagttcattctagagaagggagctggagccccgagtctttccaatggaacgccgagagactcgaacggcagggccggattttaaagggctgagagatagcgggtgcttgaaaaaaggagcctcgatcagatttggggaggtgcggggcgtctaaatacagttgcactgtgtctcagcaggcgcgcgttcggccagtatccccatctccgtttcctcaacaaaggtagtgctggggaaactgaggcagtaaggagtccagccctctagtgccgtctcgatcccctagacagcacagttagtgctccggcttcggcctcagctcccgtatggactgtgccccccaaagggctcgcgcctgcattcccacatacgcgaagaaagccctggcccgggcttctctcggctcggtggcccttgggcgggagtatcccttctctgggtctcggatttcccgatctgtaaaatggtttgagggcagacttgatccttgaactcagaatcgatctcagctttctggccctcggacgcacctcgcagtcctcagctgcgcccccaagggaaggggagacccctggggagtatcttcccaaaccaagcagcctccctggaacgggtggcaccgggagatctgcggcgagtggtggagggaacgggcgctctggggaggtagcgctgattggctgcggggaaaggggcgtgacatgggtggagccgtgggccagtggcctgagggagcgggccagcggatttatggtaccctgagaat

SEQ ID NO: 56003 - DNA, 4177 bp, Homo sapiens
atatataaatgttcttccctctctaactttcccagctcgagcatctacattcctgacaccgactattagcaaaaatgcacaactccttccccagctatggggcaaatctttgaaatctgaaacacagccacaaagttcactgtcaaggccaggtgatgaggcccacacatgcccggaccttcactcagatttgaaattctagaaatccagactcccagagacatcattttaaaaacaacacaatgtggacgtgcagagtgagatcctctacttccagacctaaacaaagaatatttcaacatatgaccggaatatgatgacaccagattcaccaatgaaaacaaaacctgccgaccattagcagtcgtaccctcatcacaacaactcaactacttagaaatcactctcggcacatctgcacccgacaaccggcctgtggccttctccgggggtgcaagccacagacaaagttgaaagaaggcgttctcctccggtgcccaatctcgataccaacccctcccctaccagggccaccttgctgctacccaccatcgcgaacgtggtcaggggaaaaaaaaaaaaaagaaatcctaacagcaccgctcagcagaataaagagaccaaagagaggatgacgagaagtgttgggaactgcgtgcacgacggggctggaccaaacggaaagagtcccactccgcgcgcccctccccccggcgggggcgcgggcgggggaggggcggccgcggcccctctcggagcggcctgtccgccccggcccgctcggggtcccgggggcgccccgcggccgccggcggcgggggcgaatgcgggagggccggccccggggtgaggggtgcaggcagactctccggaataacaagttgcagaagaagaagaataagcggaatttccccaacgctgctccggccacccaagacaaatgcaccaacacactcacactcacacacacacaaacacacacactggggcccggcagcgtcagcagccgcagcttttttttttttaaaccagatccctcagtcaacaaacaagatggttttccaaaaaaaaattttttttaattaaataaataatcataataaaaacttccccccgacagcatcccggggtggggtgggggggatggaggagccccagctacctccccggccgagggacagccgagggggggcgggcgaggctccgtgccccccgcccccgcccgcagcccccggccggccccccgccgggacaatgtgacgccccctccccgccgcccccggcacgccgcctctgtcaccggctccggccctgcactctgcgcccaggcttccgaggctgctcataaacttacttccaatttatcctggggaggggtggagggcagaggggaggggggggagccaaggttttcccattgtcttttttttcgggggggaggtatgggaagggcacgcaggggggcgccccgaaggggaagttattgctcaaatctcaagttgactgaggggtcctgacgagaacacccccctttccctcctccctcccacacacccctcccctccccctacctccccccacaacaaactccaagcaggcagcccctgatcctcccagagacaaacaccagcgacaagacagagggagagaggagagaggcagagggggaagggggagggaggggaaatagagctactccagaaaaaaagagagagaggagagtgagaagaagagagaatggaaaagctgggatactgcaccctcctgctgctggctggctgtcccccctggcagctggaggcaggaactctgagcaggagaagcaggaggaggaggaggagggaactcttcttcatggggagggagggaagaagctggagctgctgctgctgcttctgctgctgctctgggcctctcgcactttttagatattagtgtgttaagatggtaggttgttcccttctccctcctcctcctcctcctctcctctcctctctctctcactcactctctctctctctctctctctgggctgtttctttcctcctcttccccaggcaagggggggtggggaggagggggttggggggaggaactggatcctcctcctcctccaggagggacacacacaggccccgggccggaatcgggaggggggaatcagagcagcaggagagaaactgtaggagacaaacaagcccaactcttcatcctcctcctcctctcagcagcagcagcgagcaccaccagcccattcaccacccggccccgggccgcagcacctccgccgcctcagcccggggatccctccgcccaggcccagacacactcgcccgcgcgggagcccgccgcgcggccccgccggcccgccgccgccgccgccgtgcgcgcccccgccgctcccgagagccgggcgagagggactggggctgggaaagcggggacgagggcgaggggagaggaggcgccgggggagagcgggccgcggcggggagggagggggccgccgggcggagtggtacggcggccggcccgggcccccgcgcctcggcccgcggctcccgggacgctcgggtccccccaccgggggcggtggggcgtcggcggggggggcgacgggggcccgcggcggcgctcgggcgggcggactacttgacgtgtcggtgcggcgaatttatttcactttgcctaaggaacggggtgtgctgcggcacccattgcctagggaaaaaacccggatgtaaagtgagtgaaactaaactagagtgaagtagggcagcggcagccaaactccagtgcagcggcggcggcggcggcggtgatggggccgagcaccgagcggcggcgaaggcagccaaactccggggcccgtgcagcgccgcagctcggctcccgtgcagccgcagccgaggcgaggccggagcccgcggcggcccccccaactccgcggcccgagcccaactcccccctcccgccggcgggagctgcaaaggggctccagagcggccccaactccctccagtgcaacagcagtttgaagggggggggggaaagccgtgaggggcaggagcgaggagaagtgatggggaagcactgcaatgggggagcgtggtccaggcaacaggagaaagatgcaacctcaagtcgaatgcaacatgcaatccccggccgccgctcgcccgctccctcccctcgccaccccgccccctttccaaataactacccttgaaccactttattagcagtacttagtccagcactcgctcccgggaggggcgggggacgggggccttcgctcacctttatttattgctgctttctcccccctctccatgttttttattcctaagttcttttgttctaagggggatgatggcatttacttttctgctttgtgtagcagggcaatcactgggaatcggccacgtataatccggcggtttgtcatattttattagtgaaagtattttatgcctattctacctccaaggactgtaacatggagaattgcagggaggagaaaaacatcagaagaattcttgttttgagagatttcttggcggggcgggggagggcctttttttttttttttggagggggtttatttagattttcgaatcgatagttttcaacttgaagcttaacgtttttgtatggatgtattaccggattctaaacccccaaccacaataaattttttaaaagtaaaaaatcttagattaaaaaaaacccctactggacagtgatattatctgatctgtgcagcactctggacttaacatagtgttggccttcgaatgttaaataacaataaaccccaacctcaactgaatacaaatgggggggtggggggttttgtttttaaagctcagcacttttgtagcaactgccactacgcattttccaggcattgattagccatgcaactcccataggcatgaaatccagtttttgcagataaagagcaacagtggtgagatgatttgcccaaagtcaaagtgagtcattcgcagaaccagaaatagccttggactttactagtcacatcttttccattaaataatatttctattaccttgttatgtattttcacaagaggtgctttgagatcattggatatgaaggtatttttttactttcgtgacctgcaaaattaagtttagtttctcaagaaaaa

SEQ ID NO: 56004 - DNA, 1893 bp, Homo sapiens
taataatgaaggggaaggaagacattaggcctgttttagttctcagaattattcacagggaatagactttcaccatcaacaccctaaagatgcagaatgctcaaggtaaattgccagtttttgtctttctggaaaatccattaatactgaatgatcttggtcttgacccattccaaaaaaaaaaaaaaaaaagaggattgagccatgggattcagattatgtccttgaaaatccctttaaaaactagattccaaatcagtgctctcattcttcttgaatatcccacccaccagcttagcttgtcctatcccttctagatacagcattattttctctctttgaggaagaatggcccagaggccggaagagtgagggaacgtaagaacgacttttccactgacctgagttgctaaagccatttggacccagagaactcattgtatatgtgtgctgctcaatatatatgtgtgcatgaatttgtggttgtgcattttctggctaatatccaaagtcttcataacaaggggcctgagatacgacaaaaggaagacctatgtgtcaaggacgtgtgtccacccaccaagaagttctggatgcccaaaggggctcctagctcagggtctgtgtgtccagctgctggggtaaagagatttggaaaccactgaacatttctgctgggatccttccaaacccttttgggaaccggcaatagcacttgtcaggggaaattagttctgcactttcacagagtgagaaattcctcagggggcattcttgtacttgggaagagaaatcgaacccagctgattccttcagggcccttgccattaataaagcagacgaagtccagttcagttagtcccgcctgggtcagggcgtggagtgaggacaggagcaatggcgttcagggaatttcacctgtggctatggccctcctctgatgggtgcaagcttgatattttaggggatcgcgttaccggcatgtaaacaccgtgagtgacagccaaagctcccaggcgaccacagaggatctcaaacccttcctatcttcctagaaaccctggcagcccgaccggctgcttgctgtctgatgcaacagtttgcaacgctgttctgggagttgagtcctgctgcggggcgccgggaaccgggccgacgcgcatgcgcgggctgcggccccgccccaaagggcggagggggagcttttcaccagatgtgcggggggcggggccggtcggccagggagacctctggcagctcgcgcctgcgatctgagcttaattaaacttctcccgaggcattggctgactgattgacccagtgatccaaaaaaatcagagaggcccaaatctccccaaacgcaccggcagagcgaagttgggaagttggcttcggtttccagacttgggcctttggattcggcgtccctctcctgcgcccccgatccgcagcactgtccaggatccacagctcggaagcacagtcaagcctcgcgggtctgggccctcacaccacacactttcttaagaagggaggcattgtggctacggggcggaaaggaggcaagattttgatacctcctttgtcagtatctcctctgcctcgctcatctgttttaggttttatgagcaggagacgtcaccgattattttccaaaattttcagctgttcggatattgccttcacggtttgcttccatgtccacattccaccactattatatattttaatagacttttattttattaactttttctttaactttaaaccgtttcccttttttagatagctttgccctaagcaataacattagcaaagctacaggctgaaaataaattcaaaactattaaaataaaaaatatatatatgggctggtccgagtgcagtggtgtt

SEQ ID NO: 56005 - DNA, 1194 bp, Homo sapiens
tttcagaaacccaaagaagtctgtcttggaccaagctcaggacagtgggaaggcgttttctcctctcacccccaaaacttgcatttcctgtactccttctctaggtttgtagcgcaggcatgtacactcaggatcatatttaaccatatttaaaccaccaccccctccattctcagtcaaccccccttagtcacccagttaccaagttctgtcattctcccaccaaaatctctctgcaaactgtctccttgtctccttgtctcctttcccaccaccaaagccctgatctgatgcgggctctttattactcagccgaatttgtgaaatagcttcctaacgagtcatcctccagtccctccctcagagaaagacacagatctgatcatgtcttcccaggcctaaaacccctccatggcttccagaggcctgtgggacaggctgcttccttctcatggccttcagatgcccttctttacctgatcccaacgtacccccagttctccactctgagatcacgagccacaccccataggcctccatacttttgccattctctttgtctgaaatgcccttcctcaaccaaaaccattgggaaattcccatacctattttaaaacccagccaaaatgaactcatgattctcttccattccttctaagaagcctcctcttaattcttccctctgttttcactgggctttatatattgttgtgagtttaccagttgtcatgttgaccatagttatctatttaaacccatctcttccctcagcatctcaggacctcaagggcagataatgtagtggacactgctggctggctacccaacatccattctcccccttccagcttcctaagagaagccaaggtgacgcaaggcgcagtgcagtatttagagtatgagctaagctgctgtgacagacccaaagtatagagactgaagaagcaagcccatggggctctgtggaaactgacccttcccaataattgattcaggaacctggccctaactaatctgagtgcagcagagacctttctggtttactcatatgcaccatcccctttttaaataacagaactcctgatttttggcgagcagatggctgcctcgttaaagactacatttcccaacctcccttgctgttcaatgtggccaggagtctacgtgctcccccagtgaacagtgagcagacat

SEQ ID NO: 56006 - DNA, 855 bp, Homo sapiens
ataaaaagtatttagtgcctggcacaaagcaagtactaataaatgtccggtatttttatggttcagggttgggtggaaagggatcacaggccaaaggggtggaaaggagagccctaaactaagtgagagctggggttctgaaacccaccctgctcctggtagagtgccacctcaggctccatgtccagccccagtggggggcacagggaaagcagccatgcagcccaatttagggagctgctagagaacagagggccccgtctgcaccccggaagtcagtctaatctccaggatgaatatgttttcatttctcagaagttcctgttagagtgtgccaaagcatttttccctttacaacccaggcaaacaagacaagtttactttgggtgaccttattatcaccacccagggcctgcctgctgagtgtaaacaccagcttgcaccctcctggaggctctgggcagaagcctggataatcaaagtaccaggcctcctgagcggggaggcccttcacactcccccgacccctacccctgctccccaggccctgtcctggaaagggcacattggaagatccttggagaggatgaaaccctagagggcatcaacacctcgcccatttcatagctatggaaacggagacccaacgaagggcagtgactctacacacacacacacacacacacacacacacacacacacacacacaccccattctactcacagctcagcctggcaggagcctctctctctgcctgatcctcagtgtctggaacaggcaagaagcttatctctgtcctctttctcctgtgcgtcattgactgcgttgggatgcctttatgcatgaagcttttg

SEQ ID NO: 56007 - DNA, 1254 bp, Homo sapiens
gggccgggccgggctgggggcagggctttctgctgccccgcccattcgtcgccccgcccctcggaccgccccagcgggctgcagcgcagcgggcgtccggcagagggcgctgcgggcccggtgccaccgtgcggccgagggggcgtgctcggcggcgggcaggcagcggcccggccagctatgcggggtcctgcggccgcggctggcggcacttcctggagcggcggcggcagcggcttcccgggcacctgggcgtggggagcgggggcgcgcggcgcggggcgggcggagcgagcgcgcgccatggaggtggcgggcggcgcggagcgggcgtgctgagccccggccgccggcccggcatgggcgtctcccgcgggccctccgccggccggggctagggccggatggagccgcgggacggtagccccgaggcccggagcagcgactccgagtcggcttccgcctcgtccagcggctccgagcgcgacgccggtcccgagccggacaaggcgccgcggcgactcaacaagcggcgcttcccggggctgcggctcttcgggcacaggtgagcggggcggcggcggggcaggcaccgaggcaccggcaggttaccgctccctcaccgggggacattcctcggccactgggggtccgggccacttcggtactgacactgagtcggggagaggctggcaccggcggcacgagccgtcttggcgtgggcacccactgggagtcatcccccagggccgggacacgggcgggatcggtcggcttggcactgtcaccgggtgggggtcattccctggcaccggcagtctagtgcgcctcatgtgtagtaccgtgggaggatcggctcccaaccctccagcaggaagatggaatcaccccagcccccggcacaagcaggttgggcccccaggactggtcacccacgccttcttggcactgatagaacagggcctctctgagcctcctggcaccactgaggtggggatcacaccgccctttggactttcgtgggaccaggttgcctaccatcactgcgtggcatctgcagaacgtagccccgttgataccgtcaccacacatggcttgtccccaagctctggtcactggtttaattgtttaacatgttaagcttctccttggggttgggggtgcctgatcatctgccctaccttgctcttaattagcagagagaccccagcccatccctctgctaggcaggcagcatgtctccctctaccctct

SEQ ID NO: 56008 - DNA, 1554 bp, Homo sapiens
actcagcgcctgctgcacttgcctgccctgccttgcttggcacccgctccggcgaccctccccgctcccctgtcatttcatcgcggactgtgcggcctgggggtggggggcgggactctcacggtgacatgtttacagctgggtgtgactcagtaaagtggatttttttttcttttctgcttttcttcttttgcgggggaggtctaacaagcagcgggggctgcggggttgtcctcggggtgggggactggacgctgtcgacagcaccttcctggggccccggctcccgtttggtggttggtcccagggcctgcccggttcctgacctctgcccggcggccgcgctcgtcggggccgggggcggggccgatccctccggcttcccgcttcccgcggagaacaacaatgaaagtgaaagaggggtggggcgggggcgagcccgggttctgtggcccatttgccctgtggccttgagcaagcccctcccccaggcctcgggggctctcccggtttgggggaaccgggcgaggcaatgccacaggcccagggttagagggggtgggcacttgcagctgccgatgtggctggatctggaacttctcagacggctcctgtcagcgccaagtttcaccaaatccaggcctgcgggctcctcccccaggacccccactcgcagtccctcaagcctgtgctcccggaaaggcactgggcgaccgcacccgtggctttctctgggcgaccgggtcccagactccccccagcacagcagagcgcttccctgcccacccgcggaaaccgccccaggtgggccgcgccccctccccagcagccagcagggcgccagggctgagccggccgtggaggggagcgggtcccgcgggttatacaggcgccggggctccgcggcaggcaagagaagctgaggcctgagaacggcccgggccttggcgtacggcaggggacgacctgggatgggggcagcgggcggcggcgcagggagtgggccgggggccggtgtgcgcgggcgggacggggcccggggtcgggagaccaccgctcggaagatggggccgggagaggccgccgtcgcagcgcagagggcaccggcggggagacgcgaggacgcggggccgggaacacggacgccggagtagaagcgcggggggcgcgggctggagcgggggcggggacgccggggtcgggggcggtgcgggtttgaggggagggggcggggcgggtccttccctgggggggtggggagagggggcgggggcccatgtgaccggctcagaccggttctggagacaaaaggggccgcggcggccggagcgggacgggcccggcgcgggagggagcgaagcagcgcgggcagcgagcgagtgagcgcgcggcggcccctggtccgcccggccgcggccgatctaggggctgggggctggaggcgggggtgggggtctgagctgcgtcctgggctcgaggcgtcccccggggagtcgcctcttagcggtgcgtccgggctagcggcgaggggccgccccaagtcttcccaccgcc

SEQ ID NO: 56009 - DNA, 490 bp, Homo sapiens
tttaaagtcatcaatccttatgttccctgatccttaagtttgtcatttctagggtgtggaaaaggaactaagaggataatgaagaatctttgcaccagtatctcagaaagaatgctcagtgtcatgacataactgtggcaacaataaaagcacttaatattcctggaatcaacttggtctaaaggtttttccaggcagacctgaaagtcctaatctagagcaaagttcattttgctttacctaacctacactgctaacctgccaaccccacaactgtaaattacccttttcttttggcaaagcctcctaatgtgctctagtattgcttaaataatgtgcctttttagatcacgaacagaatccgtaaatctggctgtgacaaccccaaggggctgctctctgcagatgaatgttatccattaatatcccacccttggtccttagttatcaccatcagtgaagggcaggccttgaactcattgaaataact

SEQ ID NO: 56010 - DNA, 2315 bp, Homo sapiens
actacaggcgcctgccaccacacccggctaatttttgtatttttagtagagatagggtttcaccatattggtcaggctggtctcgaactcctgacctcaggtgatccacccgcctcagcctcccaaagtgctgggattacaagcgtgagccaccacgcccggccaccattcacttttttaaaaagtaataactatttattgtaaaaagccaaacaataattggctctttacatttcacaaaaggctgcaatctaaagagtacacaaccagatgtatccaaatacagacagaaaaaaacattaacagcctgtgttgaaggagttctctcactggagtactaagatgtaaaagtcagaaagatttcacagcaagaaaacaccaagtttggccaggtgcagtggctcacacctgtaatcccagcactttgggaggccaaggcgggcagatcacaaggtcagaagttcgagaccagcctggccaacatagtgaaaccctgtctctactaaaaatacaaaaattagccaggcgtggtagctcatgcctgtagtcccagctacttgggaagctaagttgggagaatcgcttggacctggaaggtggaactttcagtgagctgagaccgtgccattgtacttcagcctgggtgacagagtgagactccatctcaaaaaaaaaacacaaaaacaaaaacaaaaaaactcaccaagttcctagtcctacacagcacagagttacctaaggagtgacaaagaaacaaattctagcctgtatcctcatgatacagctctcatcacttattagtgcataaatatgtactgaaaatatcaacattttcaggccaacttcctgaataggctaaggatgaactaactggaaggaaatcatctccttagtaaccctgacaactcatagattaggatcagaaatctagacctgaacccagggtagcccttcggtcaaactgccacataagtgattaattactaaccaggaaagtgccaaaaatacagttcctattagtttaccttaaccctctactgcaattcttttacccaatataaaaaagttcagaagaaacatcttgagagtcctttgtcttaacagtgcaatataaaggcactttcaaagaaatacacttaaaccatttataatcttacaaggtgtggtggaaacagcagcagtccaattcctaaaaataaaaaataaaaaaaaccgaccttccgacctcctgttactcaagaggaacaataaaatacaggtcacaagtactgtatgactcagaaaactgtgatgcaacctcagattcctacaggattcagaaaggggaaagagtagctacaaatatcaataccaagaaaaaaatcaaaggatcaggattaccaaacaacatttctatcaatttccagggacctaaacacactaacagctcaaacaagagaaagctttactgatgggaagaagtcagagggagtaaaacaattacacaatctctctttcatctgaagaaaaatatttgctgttgctttaaaaggataagggacttctctcctgatatgctcttaccagccacctgagaagagattttactctgttccctgtaaagaacaaagggagctaagtcaaactgaagtcacacagggctgctgatgaggagaaaatgccagtcaattgtgtttttcattcctcttttaaaaaggaagaagaaacaagtttcccaatctgtcccttaaagtaaagcagactgagacaaaggttaccaacaatagtctttgtgataccgtcacacagtccccaaaatcaattctcaatcaccaaaagcttatccaagtagaagcaaaagacatggctaggatatgtacataagacaaatgccggtcaggcatggtgggaggccaaggtgggaaggttgcttgagtccaggaggtcaagactacagtgagccatgattgcaccgctgcactcttcagcccaggtaatagagtgagaccctgtcttaaaaaaacaaacaaacaaacaaaaagacaaatgccaagattccatcccatttccacacacacatactcccactcccaataacatgactgagtactctccaaaggtgagaaggcaatcacctttccagattttctctatttaattctaagagacaattatatttaacaactactcataaaaaccatctagagagtatgccacaacccagtgggaattagaagttagatttagaggttccttgtgcaatctgattatcttatgccaggaattttactccaccttctagctatacgactttggggatacttaacctctttgag

SEQ ID NO: 56011 - DNA, 1912 bp, Homo sapiens
atcaggaaacaaagtagacaacaaggttatcaggaaacaaagtagacaacaaggttatcaagaaacaaaaagaaactgtcattgctacactagttaaaatgatacagactttgaaaagcaaaacagccaagaaaccacatggttcctttacttctgaagcctcttgtgacaggatctatattcctaacagtctatattcctaggaaaattgggatcacagacgatcaaacaataactcactgttttcataacttgactggtaagtggggggaagggaattggtaaacgacaaaaagtgacttacagtgaatttaatgatctgttggggatatgtggggaagtcacgtcccagacatcagcctcagtttacccacccagaaaaaggcgagaacataacacttcgctcagaagagccagagggccttgttccataagcctccacctactcaaaggtcccttcaaaggctggactcagtaggggtccccagtgcaattgaggcatgacacccggagacttcggggtggggggaaaaggagaaaggaaggagggtcaaagtgcgcaaagctctatcggttcctggaaagccattttcgccacacactgggggtgccctagacccaacatctcctccctaaagaaccacaccgggaagccccagcaactctccctcctttcggcttctccctcggttccgggctgcccctccggccgcgcccctcaacgcagtccggtagcccctcctctggcagtgtcacggcggccggccagcctgcccacccgccggcgccaaggtcttctcaaccccgcggcggaaggatgccgggctgggcctcccaggctcctcctgggcctacctgcaaggcagacgggagctcggtttgcagtccagcgaacgggctgagccacagggaaaaagaaagaggagacaggaataaaggaaggggtccgttctaccgaccggcaggagaaggcggcttgagcgcggggcctcgcggacaactcagccctcgacccggcgccgccgccgctcaggagacatcaagcaagaagacggcgcaaaagatcaccgaatacaagaacgccccagacatcaaaggaggaacgcccaagcaatcgttcaaggaaccacagccgagcgccgaaaaacagctcaactcctactcaaggtccggctcctgtctgaggcgtaaataaacaaacccagatcataagccacgggttaaaaaagagcctgcacttctgccattttctgtgggtcgccggctgttaaagttctttagagaactggagtttctcgtgaatgtgttgaagatcaaatcatagcgcaataacacttgttgtgtaactatagtcccccaactgttctatggactcccaacactctttatcccaattgagcaaattagttaacctcatttgacccttagtttcctaacagagcagtgaggggaattaaaaatcatagagacagaaaacgagagagaattcaagctgaggaacaaaatgaacagtctacgtaaaagctccagtttagtccccacaaagcatgaccaagagaagctgggaaaacccagaattatgtagcctgaccttaaggcagggggaaaaaaagcacacggattgcttttctcttttattttcttccaaaggcctagagccacaggtgtgcttcttacataataagcaaaagtctctttgggttcagaacctgataaagtgttgacattttcatcaccacaacaatggcttttttctgtagtctcttagttgataaatgaatatgctcagcacaaatatggattaatatgtacatcctagatgtgattcaataaatcacaaagatcactgcaagtatggttaccaattgtgagcaatcatagtctaccttacctgctcctagggaggtttaca

SEQ ID NO: 56012 - DNA, 2345 bp, Homo sapiens
ccatttataatcttctctctgtaaatgttaaaagaaaaaacattaggaacctaccaaagactttaaagtgactcaaaggctggagcagctccttttctacaaatttccattttgttgaggcaaaacgtactgtacttacaactccggatttttctccactaactcatggctgcacgacaggcttgctctgattcaaggataatgggaattcaatctttgtggctcatttaatgcttggcatttcaattgagaacaccaaaagaataatggaggtgatgacataattattcacaaggtaaaagaggtcggcttctaactatataggccaagaagcagctgacatatgtcataaccaccttgggtaagaattggtcacgggtttcattatccaaagacttctggtttcacctgacaaatacaggacagatgctggggtgttcaaaccagtctaacaagaaaagaaggggcaaaaaaaaaaaaaaaaaaaaaaaaaaaaaaacaaccaaagtccacaacccagccttatggacgtacactgtgtgctgtaacaaaaggcttttccctcactccaagaactccaaatcgtgaacctgagggccaggaagtacggaagaccagacacattggaagtcgggagcgaaaaagaggctggccgaaccaggtttgggaagcgactctgccacttttaaagggcaccctaaaaacggatgtcaaagtctgattgcgccggccactcagttagcccaggcccgtcacccacctctccgcggctgccaggttaccagccacacttcccacccacccagccgggttgggccctcctccggaaccggcgactgcacagaggccgccacggcgcgcaacagcggcaccgccccttccgcgtcagcgcccgccccgcgccgcgccctcactgccgctgccgcggctacctgcggttcatctccgcacattccacacgcggcccaaacggtctctctctctctctctcaaacaccgcctttccgtctttgttttatcttgagtagcttagaaagattggagaagaaagcttacgtggaatgaaaatcaacttttatggatattttgaggactaaaagaataaatagggcgtccgtactgtagcgaaagtgcgactaaggttaggcatctggatttcccccgtagccctctttcaccccccccccccggccattaccgaagcggatgaaaacaaacactaacgatggcggcgccgggaagcgaccggctgctgggcttaaggcgggagtgaccgcttaaccagtgagggaagcactgaagagcgccagtcgacgtgggtgcgacaactcgcggagtcttaggagcaaaacgtctggggcctgcgagccaggacccttctgaagccttaggtgtctatcggcgacgtgtacggtcactgcagctccggagcgcggaaccctcagccaggaggcgcggctggtcggtcccaggtcccggcctccgtaatgagagcccggaaccactctttgtgccgcagcttcgcaggtactaacttttgcgggggataccccaagatctctcagcgcccccgggtgggaggctgtggatctgcggccccttggctgctgcttcgtggaagtagaagggattagccacggttcaatcccctgggcccctgagttttctgtgggaagttgagttggtctaggccccgttggcccctgcttgtttggcagagaatcccctccaccccagagctttcctctccactttttcagctccttgggttaggtcgtcaggcgttttggaggtaatttggggggccataactccggggttgggtgccaatatgagtgaggtaggttttcattcaatcaagatttgctgagtgccaaatatgtactccgcgtgtaggtgagggtgactgttgactagtgaaaaaagggacccatggttcacgactgtcttcttactggcagtggaacgacctgtggaaacctgtgatccattctcattaaataaatctctgggtaagtggctaagcaccttcttgagctcatcactaattcttcccagttttcacttttccagtgagttcccagttagcctggtcaattcagcgtagcatttcacttttggtatttcttcgttctctggccaccccgcagccaaaaagaaaaaagagattttaaaaaattacctattttctcattacacttagtttaaaactcatctcctaaggtgatagaatttattggacacctttagtgggagatgtattataataagaaacaacaagctcttcctttacactaaattagcttccagattttgtgtgttgttttatgactgttagtcctttt

SEQ ID NO: 56013 - DNA, 649 bp, Homo sapiens
accgtgcctggccaaaaattttttttaattagctgcacatggtgttgcgagtttatagtcccagctactcgagaggcttaagtgggaggattgcttgaggccaggagttccaggttacggtgagctatgattgcgccactacactccagcctgggtaacggtgtgagaccctgtttccaaaaaatatatttatatgctatataaacagtctcttttaacttgtgttgtccccaaaaccttgattgaattaataaaattagtttcttttacttcattaagaccacaaataaatgaaagcaattttttagtttcctaagcctgaatattgaaatcctggactttggtacaggatcaccttttgccactttcagtgactagactctttgctgaaagtgtcagcaggcctctgatcgcctttttgaagtcacataacctattttctcagctgagtttgcctgggattttttttttctttttttttgagatggagtcttgctctatcgccaggctagagttcagtggcacgatctcagctcactgcaatctccacctcccaggttcaagagattctcctgtctcagcctcctcagtagctgggattacaggcatgcaccgccacacccagctaacgtttttttgcatttttaat

SEQ ID NO: 56014 - DNA, 2291 bp, Homo sapiens
tctgaggcagcaatctttggcatctacaggtggcagcagcctttcaccagggctccatctgtgaagagtctcagccatgactttgagctgagcttgggagaagtaaagcaactgttaaggccagcccttgcccctcagacctgccatgaaaggaatgagccctagactgactcctgcagcacccccgggacaggctgggaccagctgtttgtctccaggtgtcagagtccctcctcctcctccaacctctccaacctactttgtttggaaataccgagctacacttcaaaatgtattcaagggatttccaataaatttttttctgtactttacagcctcctgtcctgtaggttgtctgaagacctcgtaaccccttccccacccctgccccagtgcaggtctgggaaaggggagagtggtgcgttgtgaagcgcagaaagacctcaagtgtctgggcaagcctgttttgagtcgggtgtggcctcttaggggctgtataccctggggtttcctgggtcaggaaacttcttagtatttctctttccctggtcccctatcaggggcttgaatttgaatattcagttggagaatgcatttaaaatacacccatagtaaaatctccataaaatgcaggccaccgttatcagctctttattgctcttacataacaactcaccctggagggaaaaacaacagtgcaaggcagggagtgcagggctccccaagccatctgggggatttgtggctgagcaagcagaagagaagtagcaggaagttaaaggtccatgcaagtttgttagctgccttgatctgactggcggtgcttgagcagccaggaagagtagaagagccccggggtatgcgtcctgtctggctcctggggcctggggctgcaggcctctcaacccggccagggccagccccgcctcctaattctcctagtttgtgaccatagttaggggagggagctgattggtggagacaacatcccggaggtagggatggttctagaggcaaaagagaactgacagaactggacagctgctgtctgggttgcttccccacccgccttcaggctgaagctaggcccaggattaaaagggctggttagaaaagtccaaatccagcctattcctggagccaggagctcctgattattagtaaaccaggtgacactgatcatgtggccagccaggacagttgcccaatacctgagtcagaagtgacgaaaaggctgttctggtgttcccccttcaatcaggaacccccaataacaaagttttcagttgccccatgcccagcaatggtgtcctacctctttaaagcatctccctacactctacccctggaggccatcgttgttaaggccttggtaaattggcatttgagtcactcagcagaggccctgccaggagcccaacccaagtaaacagtttcctcgctcctgtttccctgggtcactgcctctctattccagccactcagctctagctgagcagatccagagagagaggaggcccccagtgcctggaggaaggccaccattgtggaatgggacttgcttcttggggctgaggcccaatgtttgtaatcaccatctgtaaccacagcctgatcctgcagctctggccctgctcccccagcccggacaagcaaggaggagaaaaaccaggcccaactggggccgctatagcctcctgattgccattagcaagcaagcagcagacacctggaacctgaccactatgggaggtgaaattctggcctaccttctcaccaacaaacctgtcaaaaaaaaatgcggtaaataatcatcttaacttttaaagcaaagcaaaacttgcttaagagaggataggagaactggatctgtcacagcctccgtgtgggcctggcaggtggaaatggcctggcctcaggctgaggggtgggcaggaagggaggactcgggctgagggaccctctcccagctgctgttgcatgaggctggggctatcacaccattcacccatgaccactgcacactcgcggtgttagatacggtctacatttttttttttttttttttgaggtggggtcttgttctgtcacccaggctggagtgcagtggtgcagtcacggctcactgcaaccttgacctccagggctcaagcaatcctcccacctcagccgcctcagtagctggaaccacaggcatgtgccatcatgctcggctaatatttttttttattttatttttggtagacaggatcttactatgtgagatctaactatgtccaggctggtctcga

SEQ ID NO: 56015 - DNA, 385 bp, Homo sapiens
aggtgtgagccaccacacccggctcttttttctactttttattttgtagagacaggtctcactatgttgcccaggctggtcttgagttcctggcctcaagcaatcctcccacctcagcctcccaaagtgctgggagattacaggcatgagtcactgcacctggccgaaagcctgcattcttgaccatgggacagctttgccttctacacatgaactccagtgccggcggtaaaacactgtgcccatgagaggggatggggtggccagagagtcacctgctccagtcactgggcctttagtggaccaaagagccccaattcctctggttccctattatgctcatgacacgctatctaccagctcagcacaaacatatacacacctg

SEQ ID NO: 56016 - DNA, 966 bp, Homo sapiens
tttggagtcatctgaggaacacagcagggtcaggggacaagccagggggctggcaccatgctctgccccacaggcatgctgtctggcccttcccccagtaaggcccatgctcccagcccaaacctgggactggtctgccccatcctgccctcctggcgtctcccttcagcagaaggagtgcttccccctctaaagcgcctgtagctgcctgagaccagacacaagcccacctgacttggggaagtcaggcatttcatccgagggccagttcttctcatcgatggaggccagcttcagctggttcagagcctcgctggtgtcatccaaggtcagatcatcctgcagctctgagagcggatccatggccaagcctgtcccagacagccttgccctgcagaaccttaagagaaacctgggagagaggaagacaggtggcaggtcagtgacctgctcttttcaccttctgcgacctccaccgcgtgccctcctgcccccaccattccctctcccaggctccctgtccctattcctcaacactcctcatccccgccaagagctccacgtagctctgggttctcctggctccgtggctcaggcgtgttgccagaaaaggcagctggggcagaggatggcacagctcagcgcctccctccaggccctgcagctggggagggaagagctgtgccaggtcctgtgccgcccgccacccagctggctcagtgatgcagtcccagctgtagagggcagaggtccacgcccctcgcctcaggagacctggacacagaagcctcccaggctctagcagttacaggggtagaaatgttgtaagaatctaaggaacatgctgggcaccgtggctcacgcctgtaatcccagcactttgggaggccgaggcaggcggatcacctgaggtcaggagttcaagactagcctggccagcatggtgaaaccccatctctactaaaa

SEQ ID NO: 56017 - DNA, 2466 bp, Homo sapiens
gagccgagatcacgccactgcactccagcctgggcgacagagtgagactccgtctaaaaaaaaaaaaagaaaagaaatcatattctcaacgttggaatcggcctcccagttgcaaatcccaccacaatacaacagcaattacaactctcaactacaattatgtttgcatagagcttcacggtttacaaagcccaggttacgttttgcaattatcctgtttcacagattaagaagttgaactgaggccgggcgcagtggctcacgtctataatcccagcactttgggaggcgggggcgggaggatcacgaggtcaggagttcgagaccagcctggccaacatggtgaaaccctgtctctactaaaaatacaaaaattagccgggcgtggtggcggacgcctgtaatcccagctactcaggaggctgaggcaggagaatcgcttgaatccgggaggcggaggttgcagtgaaccgagactccagcctgggcaataagagtgaaactccgtcttaaaaaaataaataagttgaactgaaagcgtggcctaataagtggcaaggaggaacacttcccccaaatttcttcttcttagtgctttgccagatcagatctgggagatttccccctcccgccggcttgctggatgacagcgatccggcctggactctgccctggggaaggcaggaagaaggtagtgaaaatgattaagtcctcttattgcaggcgccaaaatggggcagaaaccctgcaggaaggccaggcctctgagcccagttccacccccgttcccctcctcggatctgctccggtcctccccatccggaccccatcccttcggacgacctggccagctcctttcctttccccatccccacccggggagaccccgcgcccagcagctcaccgcgctcgggcactgctccctctgccacgcctgtcaaggctcggcaaacatccggctccgcggtggaacgggaaccgccccctcccgctctcttctatccccaaccatttccgccacacctccaacccacttccggccccaaacatggcctttccaggagccccgcccacttcctgcacatgcccgcctaagttcctgcctcggggaggtaacagcataactgtccgactcgtcgctcccaaagagatggctggaacaattagttccgctttcccagctagtcgaatcactggtgcacctccggaatccgaggttcgcattgctctcggacagagttctgcctccccagtactcccaaactcccagtcctgtgcaccaatgaggtccagctctgaggcttctttcctgagaaaaaaatttggaagtccgtgactgtttcctggaggagctgagaagaggaagctcacttccggcgtagggaggctttctgacccggaatggaggaggcggaggagctgctcttggaggggaagaaggcgctgcaactcggtgagtgacctgcgatgtccgcgaccctcaaccttggcccaggtggatctgacgctctgtggtcagctttctcctcagtcttctctcctccggatcccaggatcctccagtgccctcagagtcgctgggggcttctgaagagcccttgagcctcctcaaaactttcagggccctccttagagccctcacctgtccctcgggctccgcaggcccacctggacctgcggtttcctcccacacttttccccacctcccaccttcttgggtggctccctcactgtcttcccttctctctgcagcccgcgagccgcgcctgggcctggacttaggatggaacccttccggagaaggctgtacgcagggcctcaaagacgtcccacccgagccgacccgagacatcctcgctttaaagagccttccccggggcttggcccttggcccctcactcgccaaggaacagcgcttgggggtctggtgtgtcggggaccccctgcagcccggcctgctgtgggggccgctggaagaggagtctgcctccaaggagaagggcgagggagtaaagccacggcaggaggaggtattgaaggatagagcgacttccctccgcccttgaaaatgtaggggaggtttggacattgctagacagcttttcaatttgaagaaagagagtatttcaagagataggagatagtcttgtcccttctcttcaggactgtctcctctcagcagcagtagttaaagaatcgaggtttgaaaagttgttgaaagctggaatcatacagtgtcagcagtgagtgaggaaggtcaagagctaaggtttttggaattaagaaagcatgggatcaaattccagctttgtcacctagctggttaaattacgtgccgcatttaattcatctgtgaaacaaagcagtggctctcttgggattatatggaggagctgatgaaatagtgaagataaaaggtttcactgcacaataagtaccattttattttatttatttttctttttt

SEQ ID NO: 56018 - DNA, 2031 bp, Homo sapiens
ggtggcgcatgcctgaaatcccagctacttggaaggctgaggcaggagaatcgcttgaacccggggggcagaggttgcggcgaggcaagatcacgccactgcactccagcctgcgccaaaagagcaaaattctgtctcaaaaaaaaaaaaaaagaaactgaggctcagagaggatgacaagatcacaccatcagtaagaggcaaagccaggattcttcttttttttttgagacagaatctcactctgtcacccagcctgaactgcagtgttgcggtctctgctaactctactccgctaactttacctcctcttcccgggttcaagcgattctcctgcttcagcctcccaagtagctgggattaaaggtgtgtgccaacatgcccggctaatttttgtagttttagtagagatggagttttgccatattggccaggctggtctcaaacccctgacctcaagtgatccacctgcctcagcctcccaaagtgctgggattacaggcgtgagccaccgtgcccggccaaaagccaggattctaatgtgggtggttttctggcttcccagcacttgaccacgatgtcaccggcagccccgtgcctcctggtttgccactgacattaacccagttgcctgcccaatctgaaaaacttggcaaagcataaacctaaaattgtccaaggggcgggaggacagcaggaaatcgtggtgatctgtgaagagaaaggccacactgtccaaagcctgagaaacagctgctaagattagttttgagtcagcctaccctgtgacttggaacctgctcaatttcttttccagctcctgactcaggcaggcccacttcaactcaggggactgctcagcagtgtctgcctagcgttttaggcatcctggggacacgctccttgcttgacattgaactgtgcaggacgtggggatgctctgggctgtccgggaggcctgttgacaccccacagcatccccaggccaacagctgagatgcccacactccctttccacattccccacacagattggagaatttttcctccattaaagccgtccctggtacatggtacatggagcagggtcggagcagggtcaggacagagccaacggattggaaggcaggtgatttgggagtctctgctctggcaacacgcatggctcaagtgagaatgggtgttacacagcatctcccaagatcctcatgttacagttacccatgagaaaacagaggccacaacacaagtcacttgccagggtcagaagaccagtcagtagcagaaccaggacagaattccggccttctgattcctaatttagtgctcttccagctcaaataaaaggcagaccattcttggaaagactaatcactggaatattttttttcactgagaaaatattttcagaatttcaaggctacagtgagctgtgattttaccactgcattctagcctgggcagcacaacaagaccctgtctgaaaaatatatatatatatatatatatattttattttttttttcctctgatttcaatataattttcattttatttattttttgagatggattttttgtttgagatggagtcttgctctatcgcccaggctaaagtgcagtggcactgcctcagttcactgcgacctctgcctcctgggttcaagcaattctcctgcctcagcctcctgagtagctgagattacaggtacctgccaccacgcccggctaatttttgtatttttagtagagacgaggttttaccatgttgaccagcctggtctcgaactcctgacctcaggtgatccacccaccttggcctcccaaagtgctgggattacaggggtgagccaccatgcccagactgttttttgtgttcttagtagacacagggtttcaccatggttggccaggctggttttgaacttctgtcctcaagtgatccactcacctcagcctcccaaagtgttaggattacaggcatgagccaccatgcctagtctatttatttatttattattatttttgagac

SEQ ID NO: 56019 - DNA, 3283 bp, Homo sapiens
gtattttagtagagacggggtttcaccatgttgcccaggatggtcttgaactcctgagctcaggtgatctgcccaccttggcctcccaaattgctgggattataggcgtgagccactgcgcctgaccacatataatttttattaattataatgttgaaagtccctttattccacacctctcctctcattcactcctgataggtcatttttaatgatttgatgtatatactgaatttggatgcttcttgctacagggcaaagacgctaataagattttgctggagccttttcacagatgcaagtcaatccaggcagtgtctatagctgctgaacccaaaatcagaaagcgagggctatcaaagctcttctgtcctgatttgcaactttagtagtgcaagaaaaaaaatcttagaataaaaaatgggtaccgttcagagacctttagagattgcaaggcatcacagatgataaaaagctccatctctagacgtgttcaggagtgggttggggctttgaccttgactagctgcatcaacttggacaagtcacttcgcttccctgtgcctcagtttcctcatccataaaatggggataagtatagtacctacctcataagtcctgcctacctggcacatggtgagcaattactaaattgtaggcctagtccctataatcccagcacttttggagaacaaggtaggggaatcgcttgaagccaggagttccagaccagcctggccaacatagtgagactgtgtttctataaaataaaaaaaaaaaatacccaagcttggtggtgcaggcctgtagtcccggctacttgggagtctgagtcaggaggattgcttgagcccaggagttcaaggttgtagtaagctatgattgcaccactgcactccagcctggcgacagagcatgaccctgtctctaaaaatataaaattaggccaggcacagtggttcatgcctgtaattccaacattttgggaggccaaggcaggtggatcactgtgagctcagcagttcgagaccagcctgggcaacaaggcaaaatcctgtctctactaaaattacaaaaattagccaggagaggtggtacacgcctgtaatcccagttactggggaagctgaagcaggagaattgcttgaacccgggaggcgaaggttgcagtgagccaagatcgtgccattgcactgcagcctaggagacagagcgagactcgatctcaataaataaataaattaattaattaataaaaaaataagttgggcatggtggcacctgcctgtagtccaagctactcaggaggctgaggtgggaggatcacttgagccaggagttctaggctgcagtgagctattatcacgccaccatactccagcctgctgtatgtactccagcctgggcaacagagtgacaccctgtctcaaagtaaagtaaaataaaaattaaaaaacaaattactaaattgtacttaacagtattgtcatcagtcttcctaaataggaggacaggcaaaattaagggacttaacatgtgccctcaggtatagtagtttggggcaggccagcatcacccgcacagtagttctgtactgtaggtgcgtgttctctgggtcaactttatggcccagtgaggccgtactctaccagaatgtcaggggacaagggttgggagaggcaaaagtgctggtctgaagcaggagtctgggtttccatcctagctctaccaccaattctgtatgaccgtgccccctccatttcctccatgaccacatagagacatggggcagttggatgaaatcaatgattcccagtcttggctctatcatggaaccatttgctaacttctttttttctcttatggatcccatatttttaaagatttttactaaatagaaattgacttatacttttccaagctggagtgtggtggcatgatttcagctcactgcaacctccgcctcccgggttcaagtgattctcctgcctcagcctcctgagtagctgggattataggtgctcaccaggcccggctaatttttttgtatttttagtagagacagaatttcaccatgttggccaggctgatttcaaactcctgacctcaagtgatctgctcacctcagcctcccaaagtgctgggattacaggcgtgagtcactatgcccagccgcttactcacattttctagtcaaaatagaaaactgcttaagtcactgtctgcagaagagcaaaaaaaaaaaaagaaataaaaaattgaaaactgctgatcagattgagaaaaacataagattattcaccacctaaagagaaaaaatttcagtcgaaagggaaaaaaattcatttttgtcttaataaggcaaattcacaatttttgaggttttaacaaaatatatgcagaaagacaaggccaccccgtagaacgtgcacacagccctaggcttggaaatggctggatttaataatatctggtctttctttgagccctgaaattctctaacactatgtcttggaacataattttactgttttcagtggttatagagatttgctttacaatttagcattggtctttacccatgattttgtttgacgccaacttgttgggcaggaatgcaccccctgccccccgctttgttatggccttgctcctatagggcaagaatatctgctttaaggccgggtgtggtggctcaggcctgtaatcccagcactttgaggggccaaggcgggcagatcacctgaggtcaggagtttgagaccagcctggccagtatggtgaaatcctgtctctactaaaaataacaaaaattagctgggtgtggtggcacacacctgtaatcccagctatttgggaggccgaaacaagagaaccacttgaacccaggaggcggaggttgcggtgagccgagattatgccactgcactccagcctgggaaacagagcaagattccgtctcacacacaaaaaatatatatatgtctgctttaagtatgcaggccgtgtttgtgctgaacggcaggaatgccaaacttggctgcatggtaccaactagggacctcagagttccaaggagaacaaacagttggttcctggaggctgggggcttgtatcagaccctgaagactaagcatgtgctgggtccattgttgtcctgcacccatggtagtgcactaaacacctaacctatatttaagtgtttttgtttgtccaaaaaatgtcttttttttttgggagtcaagagtcttgctctgttgcccaggctggagtgcagtgacac

SEQ ID NO: 56020 - DNA, 4405 bp, Homo sapiens
acttgggatactgagtcaggagaatcacttgaacagggagatggaaattgcagtgagccgagattgttccactgcactccagcctgggtgacagggcgagactccgtctcaaaaaaaaaaaaaaaaaagaaagaaagaaagaaagaaagaaacaggatcttactctgttacccaggctggagtacagtggtgcaatcatagctcactgcagcctggaactcctgggctcaagtgatcctcctgcctcagcctcctcagtagctcagactgcaggcatgcaccaccattcccagctaatttttaatttttttttggtagagatgagggtcttgctatgttgcccaggctggtctcaaactcctggcctcaagcgatcctgccatgtcggcctcccaaagtgttgggattacaagtgtgagccactatgcctggcctaaaaatatatatatgaaaatatataagaaatgggcctcccaggaattaaggtgtttgcgggagtcctggtccccagtttttctgccaacactccctgttcccacacatgacctggtccagaccccaaacagccaggcccaaaggacaggtgaggcgaggcgagaacttgtgcctccccgtgttcctgctctttgtccctctgtcctacttagactaatatttgccttgggtactgcaaacaggaaatgggggagggacaggagtagggcggagggtagggtaggaccagaagcctctctaggcctgccatggggcaggcagccagggagaaggagggcccctcagtggagacccagggatttcagtagcccctgttccgggacaggcgcaggtcctgggaggtgacagaagatagactaaaggcccaagagtccctggacctgactcctcccaggcagctgccacacacaaacacacctccaggcaccctggacaggaaggaggagaaatgggcccctcctccagtggctgagaagctggggcaaatgttggctgttcctatccctggtgcatcccatggcgaggggcaacttccatcaggccacaccttttatctttgtctctatttttgatatctgtgtattatgattatacaaacccccacattggcctatatgtgcagatctgattaagaacttacgatattccatggacattccattcctaatctcctttagtcctcacaacaaagtattattcccattgtatagatgaggaaactgaggcacacagagatgacaagcaaccaccgctatatgttaggattcgaaggagctccaggaaagtctcatagccccactggccagaatgggctaaatctcagagggggagggtgggagatgggggtgacagtgaccttttttgtgactcctcctagaccatccatccctgctcccaggaggacctgtcctcccagatggtggagatggacaggaggactatctacccacccgtccccacggccctgaccctctgacctcaccctctccgctgatttcttcatgttagttcaacattaacccagaggggtcaggacagacaattcctcagtgacccaggagctgacacactatggcgcacgtccgaggcttgcagctgcctggctgcctggccctggctgccctgtgtagccttgtgcacagccagcatggtaagggagtgcttgcaggctggaacaggctggaggactggggtgtgggcccatgggctggggtctcctggctggacagagcacacagagctggcccctaagtaggtctcagccccaggcggccagcttagggaagaagtcaggagctcagggctggaaagagaatggctgcttctctcttccaatatagggagcaggctgggggcaaggggcagtgtaggaggggcacagggggccacatttagcagccttccaggcacttccaccagcccagacagcctctctcagaagccagcaggggagggtgggcttgcttcatgcccccagaatggccaagactgcctgttcctgaggccgctgtcccatgacccccccaccgccttacagtgttcctggctcctcagcaagcacggtcgctgctccagcgggtccggcgagccaacaccttcttggaggaggtgcgcaagggcaacctggagcgagagtgcgtggaggagacgtgcagctacgaggaggccttcgaggctctggagtcctccacggctacggtgagcctgggctgctcggacggtgccggggcctcagaccgggcccaactctagacacttccacagagaagcaagcgaggaacgccacagccccttcgctgctcacagcctcatttcaactctgagcccctcctcacagggctggcaagaggagcggcctcagcctttcctgggggtctctgtgcctggactgtgtccctgtgcagctccatgacatggggaggcctccacagtcttcagacatccacctgccctggagctctgtgtccacatggcctcctcagcggcagactcccacaccacccttgaggggtgggactctggggaggccaccacaagcccccgggctcaagactcagtgttcctggagctctgtgtcgcctttcctgtctgtagggctctgccagggtcccactgccccctctcctcccatctcccccagcctctttcagtctcggtgtgtgtgttggaggaactcccctatcctcaaatattcttctccttttggaaacaaaagtaggaaactctgccacaaacctccccagagcctgccccctgcgtgaccagggtaaaggaaagtgtgaggaggagacataacatttactaaaacaacacaaaacaggagctgccgtagcctcactcccagcccttgtttttcaggatgtgttctgggccaagtacacaggtgagcaccgggaaggatttgccccaggaagggaggcctggggaccccagtgagagaattctacccagagaatcttctgctgcacctagccatccacccatccaccccttccccactccttccttggtccctcccatctgttcatccatctttctgtttctcaccaacatcccatccaccctgactccagctcatcctggccataccccaatcccaaaggtaaacacctgggtcttttccagcttgtgagacagcgaggacgcctcgagataagcttgctgcatgtctggaaggtgagcaactgacacgggtttggggagcaggacatggaggggagcctgggagaagagctcaggggtgggtttggagtgtggctggtggaggccgaggcagtccccagcatctgacattgctcccattcctggggtcaagatgtctctttgtacctggctctgtgtctggcatgcgaacgaatgaatgaatgaatggactaatgaattaatgtttttttttttgagacagagtctcgctctgttgcccaggctggagtgcagtggcacgatcttggctcactgtaaactccgcctcccgggttcaagcaattctctgcctcaacctcccaagtagctgggattacaggtgctcgccaccacgcctggctaatttttgtatttttagtagagacggggtttcaccatgttggccaggctggtcttgaactcctgacctcgtgatccacccacctcggcctcaaagtgctgggattatagaagtgagccaccgcgcctggccatgaattcatgtttaaggcttcattctcctttgcctgacccgagtctctgcccccacctagtcagagctttgatgatgtcacattccccttctagctttaggtgtcactgaaccaaacaggaacccaaacccccagctgctctgacaccaaggacttccctaagcatgccaaggtgtttctagcacctggccttgcatatgttgtcaatttcctctggagcgaccatcacatctactgaacactttcctatccttcaaggactgcttcaaatgtcaccacttttgctgagacttcagggagcaccctccctcctgcactgtgttctgaaggcacctttagcacgacaaaaatggaactctttgtttatttataagagacagggtctcccttttttgcccaggctgatcttgaactcctgggctcaggcaattctcccatctcagtctcccaaaggagtaggattataagtgtgagccaccatgcctggctgccatactttcatttttttttttttttttttgaggtggagtctcactctgtcgcctaggctggagtgcagcagcgcgatctcggctcgctgcaacctccgcctagcggattcaagtgattctcctgccttagcctcctgagtagctgggattacaggcacacactaccatgcccagctaattttttgtattttttagtagagacggggtttcaccatgttggccaggctggtcacaaactcctga

SEQ ID NO: 56021 - DNA, 741 bp, Homo sapiens
aaaaacccgaggaccttaaatgtttggaagaattagattaagtttggaccaatgtcacataggagaaactcatttgaacctgtgaaggaagcaaggtgtccaaggctatggtgtattcatggggaagagaaggtgtccaacaattatctaaagagggcatagaactggagtgtctgtaaccctaccactaagatcaatattctggcaggagagaggaaaaccaaaacaacaaaaaatccatcacacttcctaaatttctgagaatgaacaatgatacaatgcgggcctttaaaatatttcacttggtatcaatgcaaatgcattccacaggccccaaaggtaaggtactgggaggaaacactgccttatggtaaatagaaaagtagaaaggttactccagggaaaaaggactcctttaatgtaaagatgaggagaatcctctgagggggtgaaaaatgaatgaagaattatgtaaaagccagcaatatgagatgtctgaatactctaaggcacaaaatcaatttaataatcagtgggaatacatgcttgggttgcaaatgtgctgtttaggccaaaattatcacacgttgaacatccccaaaaagggctttggaaacaaggataggatgcctgccctgatcaaaccatggtatgtttacatgtggcatactgttggacattctgcacaccacactttaactcctaagaggtctttttcattaaagaccagcctgggcaaca

SEQ ID NO: 56022 - DNA, 877 bp, Homo sapiens
ggttaactggactcttcctaagagatgttcactgtcaacatatccaaaaggggtacgggataccaccaacacaggcctctggagagacagctaaacctggctgtgaattaggacaacttggagttactgctcgactgtaccaaggtagctgaaaacctaatgcttactcatcccaaagctaccaaggtcttcaaataccagggtaaggatccaaggcccagagagagagattcagctccacccattcagctcaaatgggttatactctggtaaaagcaaccctctcctcaccccaagtaagaaccaggtgggggcaaagccaggtcgtgggcactgctcacccactgcatgcccaaacaagcaccctacggctgctgtcaccacccagaagtagagcagataccctggctttagctcactggagccggcattgtttacgctctttcgccgccttagcctctgataggccagcaaagtccccagtactgtccaccaggacttgcagcacggtcgcgggatgcttgccctttgcccgtggtttgacacttacgctccccgggcagggagaggtcagggaagctaaggtccgagcaggatcagcaggaatacccggcaggcggcggcggcggcggcagcagcattggtgctgcggtccgctgggaaacgcctcctccgagggcggggcccggagcgccactgtcagagtgcccgccccaccctcagctcccctctccgcacactctgaaagcttaaaggggccgcagtgtatcttcgcccagaggtttgcaggcctcaggcgctgcttctaggtcctaggctttcccaggcaagaggcaaatgatggaccaactaggaagactactgcagttgggtggac

SEQ ID NO: 56023 - DNA, 925 bp, Homo sapiens
ccaacccacactgctggctattgtattggttccccaacacctccagggctggaaggacaccagaacgctcccgacacgttgagagagagaaagccagtcgttaagggcggggtggtggatgatcggaatcgttcacatcgcagcaagccagcagggacacaggtgtgcggccaggccccggtgccgctgtccttgctccagggcgacaaggcccttcgcaaccaccacagccctcgtaggcgcttacttattcattcacttgacaattacgcgagaggcactctagcagggccggctctcggggcccccgccctagtcttggtaaatcgctgccgccaggcgcggccctgcaccgcccgcgccccgcggacgctgccacccgcgccacgctgcggcgcgctctggccacctggagcccaaccccggcctccgccgcacacgagcgcccacgcccccggccctgcccgccgcaggtcccccggcctccggctcgcttcgccgcctcagacctgccgggttcgtggggcaagtggggcgcgcgtctggagacctccagccgcccaggattcaggggctcctctgcgcgcgcgatgcctgcactcgagggcctcgcgggtggggcaggcccaccgaccactcacctcagctgggtcagaaccaagcggcctgctctaagccgtttgaaaccgcttgggccgccgcacaccccgcagtgtcctcgttctttattggtcctcgacggaccgcccatcggacttttattggtccatttgaaaggcctgtgggcacgcgccgcccgcagccttaaaggggccgcgcgcagccgtgtttccctctggaccagacgccgcctgcacgggtggggacgctggtcgctgccgggggcaagtctgccgactccagaaagaaaggcgaaagaatgtgt

SEQ ID NO: 56024 - DNA, 990 bp, Homo sapiens
ttatgggggccaaagggcgggggctattactgagttaggataaacagtgtataaaagcagggatagttatgaaattcagaaactgcgtatatgggcggctgacagtaattcttcgacactgggaaacataacggattcaaaagaattcttcatctcagattcctctaaaaccaagtcttcaagaatgggagtccaaagaaacctggaccatcgtgaagcgactgcccccggaacttgagtggccagctccactttgcgacacggagactgtttgtgtgacacctcctccagctcccgtcccccttccgccgcgtgggtgccatggcaacggagagagacggcaacctgggttccggaagccggagagctggagctttgaagccaccccggtcaaaggatgctgagtccggagcgcctagccctaccggactacgagtatctgggtaggaaccccctttaactttggggagggaaagacgtgcagacgaattaggccagggtctgggaggaggcgggggcggggtctgagtgggatcgggtccgggtggtatggggaggggcggagaggcgggggttccagggcctgagcctgtaaggccgagcaggaaggaaaaaagcacctgggaagtaaagaatgtttgaagtgtaggggctggaactcaggcaatgtggattgtgttcaaatgggtcaggttggcgttgaggatttggggccctgttggggtattattgatatgctggtagtggagtaagaataaccttggaacctcaagtgccaaatcagtcagcgaacatttcgagcttttctttttcattaggcactgtgctaagcatttttcatgcatcattcttcatttgaatttctcaacagccctaggaggaattaccgtgttttcttccagttttgcaggtggagaaactggggctgaagaggtaacttgcgttaagttaggccacacagctagaaaatggtagcgctaggatcagaac

SEQ ID NO: 56025 - DNA, 610 bp, Homo sapiens
aaagcttttctatctttgttttctttgcatatgccattttctcacttcctgtctttaccccctttcctctagatacagaattttaaaactcaaggtgtagtgggagacttgagtcagtcaactctatccaacttgtgttgttcccactcttagctctagcagtacagtgatgggctcagggtaatgaaaagcagactttctctgctgaggtcattgctcctcatgctggcagcctgctccaggaagctgtttatctatgcttgcagagccaagctccagcctctgaacagttggaatgtattgagaaaccacagagcccaaagagagaacattacacaggcagttccaggcagggagagtatatttacaccagacaaactgcagcttacatgtgtggggataattgttcatctgcacactctcatactttaccttctatgcaatctatataccctctcaagaaggtttaaccaggagaacttgtactgctatgtccaaattaccctgaacatcccctaaaatgtcataaggaaaaagagatactacagaaaattgatgtaaaaactttttaagatagtggtttttttgtttttctgagtcaaattttatg

SEQ ID NO: 56026 - DNA, 606 bp, Homo sapiens
aaatgccttcttactcttccttctgaattttcccatttagtccctggcacaaatgaagactcgctcttcttggcagcatccatggctgctaagagaaactttgccccactgcctttgatgtggtgaaacaaagcctttaccagagtggttggaggatctgtcaccctggagactcctagggacccccacccacaacctctttgggaagttcttttcctaaagttgtattcagatttataccaatatgcagaggagacgtctttcttataaaaagcttgcttttcctctcaaagctgtgaagaagctagtgaaggggaagttgaactgggtataatattgacaaatgttttgagcacttcagataaaaatgtttgataagtgcagtcctgtttgtattgccttattacactgctcattggagaaagtgttttctttggtcacctgccaatgaaaaagattagccttttcctgtatttaggattgtttctttgactagttatgttggtagaacaagatagacaaatgctgctgaaattagcaaatcagtattggaacacagtgatactcatttctcctcactgccctttccaattcattgacagttgc

SEQ ID NO: 56027 - DNA, 2579 bp, Homo sapiens
ggaaggtgagggaagtagaaggagctttaccgcattggcattcccgccgacctgcatacacctcagctggaaccagttccagttggaatccaactctgtggacctgtgtacaagggctgcgtctcacccactagcagataccagcaggatttccctggcaacccggatacctgtcacttggcctcaggctgctgtaggcacccaggaaacattaatcagccatcaccccatttcctccacactaccctgtccatgaaaactctcctcttcgttcatttactccaaagagtactaattatgtccccagatccgaaaggaggtcacattctcaggcacgcacgcctggatttggctttcccctaatggatggtcacagtctcactagagacatactggtctaacaacatatcagcaacaacaaggtcaatgcctccctttcccctcaactaacgctcagagtctcaagcctgaccgtcaaaaaagaggaagttttggcccagaggcggagacggaccgcccatgtgccaaagggcccacacaggtggttccctctggcaggaggctaccggaccctctcggcccagaggcttcccaccgaattcagagcggcccaagtcgaggcagccactctcccttgttgcccagacacccctggccggccgggtggaaacacggcaaccgcgcggagagcctacctgatgaagctcagatggacgcccagggagcggtgcaccccggaacagtcaatgcacaagaaaacaccgtacgtgatgctggcccaactcggattcttggcgccgcagtcgaaacaggcctgggtggaggcggcgatgagcgaatcgtcaggggccccgagtaaaggccaggcaccgacaccccagaaacataacccacctccgcccttctccctccctcaggccccagcgggacgagagactccgcgcgccccctgctcacgcaccttgttggttggaactgcgcgaagcctcttaaaaagagtctggatttcggtcttgttcggctccgccgccattttctctccttcccagacacaaccgcggctgacgggtcccgccgcgggccaatccacggcggggagggcgggctcaccaggccggcctcagcggtgcctgggccagccgaggggtggggtgattggagtccgatctggaccaatgggcagccggcgggacgggggcggcgacgacaaccgcggccgcaagaatcaacgccgcgccgggccaatccgcagccggggcggggcgacggcgcgcggaccggcccaaacctcctcgcgcgcgtagtacccttccccccgcccctcccacgccgcaacccccaggtggagtcgcccccacgccgcgcaggctgcgggaggctgggggcggggacccccactccagctaattacagatcgatgaataaggattaggctgcccaaacactcctcgtccctccggcccgaacgggcagacgcattggcccgcgtctcgcccagccttcagccgttctcggttaacagcaagcctgacagcgagtcccctccactccagattagtatctcgaagttccagagcaggtaccaagcaggcaaacccttttccaaccccggccccataacagacgctaggcctctctctagatgccctctggtggcctggcaagggtgtcctatcaaaaaaatgcacatgagcccgacagtggtgtttttgtttttgtgtgtgggtgtgtgtcaagttttaatacacgctagaacaagccacaagagggtgctgctaggccagaactacactcaccccaagcccaccccaggaaccccaaagcagaggtcaggaactgagtccacagctcctggggaggcccaggcacccctgaacgcttctgtcacctctgacctcccatcttgccctcagcctagactcgtcccttccctaccagtcccttccctagacaaaggcccctcccctccctgggtcccaggacttcctccctcaagggacagaggagcagccagagagcgacggttcagggccctgagggtccggctctccaggagaagctgggctctgaaccagggtgggtaaacgttgcagaagggctgtcaggacactcaggcgcccacacactccacgtagttggcagggtacaggccaatgcggccactctgcaactggccttggcaccagccctgctcgtcctcctcactcatcttcagcagctcctcccctgggggaaaggggattggtcactgccagtggccctggcccaggccctgttcctgcaactgggtcaaggactgagggggatggtgtggtcccagagcccagctagcaaagacatggctcaggcagaggcaggtcaaggtcagcaagctgccccaccccagaccctgaatgcagccaccaggcaccagctatctggacctggaacagctgaagggacagaggactggcccttaagaagtgggtatttggcttccctttctgacacccctgctcaggcagataaggcagaggctgaagctaggaaaggggtcccagggtacctgctcggaagctcagctcatcagcttcctggcc

SEQ ID NO: 56028 - DNA, 3605 bp, Homo sapiens
ggagcgcaggaaacgcgcccgctccagcagctgtgggaatgcttggtccaagtgggcttccccctctgctaacaggagacagagctaggggctccgcggagacccaggcaatggaggtgcccaccaggggcctcacaagctcgtcacttggttccctctgcagtgtgtcctgtctgcccagaaaggacctgacagggcgatggagagaaagagagctgctgccatgaatcacagggctctggagccgccccagtccagcctcaggagcctggggccccttgcctgttccagcctccgagttccctgctccccagagagctgccccccaccccttccctctctctggccccagaacagagcaagctgtgtgtaccgggctggcacagctccctccggcctcccagagcaaacacaggcccaagccccgggtgcagccaggccccacagccccagcctgacctctcagcaagcaagcaaggagggcttgcaccttggcccccattgagcaggttggcaccctgtgcctcctgagctcagcagagacccaaatcagtccccaccgcaggcaagagctcagaaagcaggtaatgcaatcttcccagccccgggagccagcacgttcggctccgagaggtcttcctgggcttggcagggtctccttgcagctgcacgggccaaggtaggaagtccctggttcagggaagacccagtctccctacctgaggcctgaaggtacccggccccagaccagccccaacctcttccagaagctgggggcttgcccctgggagggagctcagccattctgcctggcccatccctggaacctgagtcacaggctgcgcccaagggcttctttcccgggcagcccctcccggtgcgcccgcagctctaggatttgaggacagagcgggggggaggggagggggcgtcagtaggctggtccgaagagggacagcgaggttagaggggctggaaccagaagccagagccagccaggagatcaggaggctgggggagggggtggcgcagccaaagcgggaggaggcagggccagggaggggcataacaaaggggcacttttggaaacccgacctgccggccggggtgcctgcttccagatgacgcactccgaaccccagcctccactccagagctcggcgcccagaggctacgcgcctctggcctcaacccttatggaccgcgcccctcgacaggaccccttgccgcccggagctgcataactcggagcccgtggagccacgcggagcggcagggccaggcctagccaccgaagctctagacttcttggccaaacttgttgaacttggtcttggcgggggtggggccactgatcaccgccaaggggaggggacgccccctgcctgggccggccttgccgtgggctccagatggtggccccgggcagcggacccaggaatcggggctcgctgcatagggcgagggatcgccagggagcgaggaccctctggggcctcggggcgggcgcgaggcgagcggacgggggccctcgaggggcccctgaagacggctcagccctccagcgccggcgccgcctcccccgggcggcctgcggaattgcgaagcccgcggcaccgcagatgggacggcccctcggcgcggctacggcccttcccgtcggcacgcagagcggggtggccgggggctccctgggcgggagtcggctccattgcaaacttcagaagccggagcaggagagggcgggctcgagccaccgcacccgccgccgcctacccgcgcgtcccctccagggcactcaccgcgtcctccctgggcccctcggcgggtgggggtccggccacgctccggcccgagtcctgccgctcctgggcccgcgccgcggcctcccggagcgcgccgggccctcccccgggaagcccggcccccggcccccggccccgcccctctcctggccgccgctgcctcaaccccacgcggcggggcagcggggctgcaggcatcgcggcgaccagcggctcttgtggcgcgggtcgaggtttctctgcttcgcccgtgtgcggagtgcctgggcgggctccccagggttgcgccccggtgccgcagggagccagatttcggctttgcctctcccggaccgttgcagagcctgggagacccgagggagcaagaagggaccgggccggcacgggcagccttggagaggggccgggggaattacactgccttacatttttagctgcacagcttgtttagaaattggctcaggcgaggctcacaaccaccccttgtaagcattaggattcccactgtacagatgcaaaaactgaggctcgggggcttttcagaggcttgcccaagatttccctctagtcaggcagggctgggactccaaaaccgtgccctaccgttccacagctgccctgctaatctggggcgccttctaaggcctgagacgaacacgcggtgggggtgggacaaaaaggcctaagctcctcccgctccgagttcttatttccagattttgtaccacgattcattcttacccttcgcccctccaccccctttatcagtctggtacatttttccatatcgccacgatgccaccccacgctaaataaatcccttctccctcctctctccctacttccctctccccgctttcccccgggggtgagattttgcagagcggctccgtctgttatttatatccactggagcggtccaagaatgttccgaagctgacctaatcgccacctgctcggcctctccgcccctcccactctctcctgggcccggtgacccagcggcggtgccctgagccttgaagaccagggggagcgcggaccaacggggtcgaacgcccgggcgcagaaggtcccggacgcagaaggtcccgggcgcgcagaatcgcagcgggtcggagagccccggcgctctcagaggagtgcgcccccagggacgcggctctgagccctgggaagctgaggcgcctggctgcgccctctgaagctcgtacttttcctcccaccctcagctccctgaagagtgtgagtgcgtgcgcgcggagttttaaacggcagctttaaaaatagcaaaattatgttgtttctaaatccaggaggaatcactgacgcgttctttacgcagatgaatccgctcacaaaacgggaaagggacctggagaaaatgaatgggggtaattttgcctgccgagggctcacttgctgggcagtgctaatggaagggtaaaactgcctccccaagacacctgtggggcacccaaggcgcgccacctttggcctgaggattctggccgtgtttggcaaatcatagctgagtagtgaatctgaaacctgggatgtggtttctgagaccaatttcaacacccactctctcttagggcttggacaagtcccttatctctatttctacctctataaaacatgacaggtgaccagctgaccttccgctgagccatgagccccagctaattaatgattgtaaaaaacaactgcagatcagaggagctgggaaaatggcaaatcacagccacagggttttgtattctttaaaatcagttaacatccctcctagcgcctgaa

SEQ ID NO: 56029 - DNA, 1127 bp, Homo sapiens
cattgcactccagcctgggcgacaagaacaaaactccatctcaaaaagaaaaagaaaaaaaatgacagaaatctaaggctgggcacagtggctcacgcctgtaatgccagcactttgtgaggctgaggcaggtggatcacctgaggtcaggagttcaagaccagcctggccaataatgaaaccccatctctactaaaaacacaaaaaaactagcaggcgtggtcgtggacgcctgtagtcccagctacttgggaggctgagacaggagaattgcttgaacccgggaggcttaggtagctgagattgcgccactgctctccagcctggtcgaaggaaactttctctcaaaaagaaaaaaagacaaatctagcaaggcatttggctcagggtaccaatgggcagattggtccatagccagatttcacgccactcacagactcaccttgagtttctggaatatcctaaccactgtgccttcatttgtttatttatgcattcattcacccagccaagaaaacacttgagtttttactccatgctaaggctatgctaggaatgttgggagtacaaagttaaataaggcagagtccaagtgtaccgtaatgatgcaaggcagataggaagtattgagagaaaacaggcagaagggacggcctttcacaggacatgacactgataggtcttgatgagtaggaattagtcacgtggacaggcattctaggcaggagcttcagggtgtgccaagccccaggggtgttaccatatgactttgtgacctagcaattctactttttggtatttaccctggacgaacatgtacaaatgcagaaagaggtacaatgatgtttgcatatagtactgtttgcaacaggggagaactgaaaacaaatgttcatcatgaaggcaatagttgaacaacctaaagttcattcatgctgtggattactctgcaaaaactcaagaacaagctagaggcaggagttcgagaccagcctggccaacaaagtgaaaccccttctctactaaaaatacaaaaattagccaggtgtggtggcgtgtgcctttagtcccagctacttgggaagctgagacaggagaatcgcttgaacccaggaggcggaggttgc

SEQ ID NO: 56030 - DNA, 2894 bp, Homo sapiens
aaaaataaaaaaattaggcttggggatacaggtctgcaagcctacttgggaggctgaggtgggaggatcagtgaaacttgaggtcaaggctgcagtgagctgtgattacatcactgcactccagcctgggtaacggaagagagacactgcctctaggaaaaaaaaaaaaaaaaaaaaaaaaaggcaaggagttccaatcattctcccttcacagagaagcagcttggattcgatgggactgtagtttctggaatccgactgcaaagctgaccgctggtagagcccagcttctaacttaggaaaggcactagctctctacaaagccgccactccccaactacaccctgtagggaccagccaatcccaaagcccgagcgggcgtcatcaccaattgcaaggcgggagacagagccttggctggcaccgggcctcctccccggacccgcagaggcctggcagcgccgcgtttgaggagggttcgtgtcaggaagtcaaggctggatgatcgcttaagcccaggagttaaagaccggcccggacaacaaagcgagaccccgtctctccagaaaaagaaaaaaagagagagagagagagaaattagccgggcgtggtggcgtacgcttgtagtcccatctacttaggaggctgaggtgggaggatcgcttgagcccaggaggtggaggctgcactgagctatgatcgccccactgccctccagagtgagcgacagagccagaccctgttgctaaaaaaaaaaaaaaaatccataaagccggggaccatctttgctccagggaggtcagctgacccgggctggcactggccctggcgcagttcccgcccctcccgggagcgctggcaccgccccttggcaccaccccctccccgcgcccccgccttccaggaaggggcggggtctccgagacgggtggggccggagctccaagctggtttgaacaagccctgggcatgtttggcgggaagttggcttagctcggctacctgtggccccgcagttttgtagtccccgccttgtttctccccagaggcctctcaatcctccctccatgatcttcgcatagagcacagtaccccttcacacggaggacgcgatggctcccaagaaacgcccagaaacccagaagacctccgagattgtattacgccccaggaacaagaggagcaggagtcccctggagctggagcccgaggccaagaagctctgtgcgaagggctccggtactgcctgtgcctgctgcttgaatatttccgccttttagggtgctcgcgcaggaggctgcagcgggggatgggtgctccgaggctcccgaggcccgcgcaggtcacgggtgcctccggctgtgcattctacctgcaggtcctttgacaccagagtgtttaggtttcaacacctctcccgctaggtaacaggaagcagatgagctccgtaacaacagacacacggacttgtcagattccttgttcgtatcagggttcttgcacagttaggacggcttcagagaatcctacctttcctggcgctgtgtgtgctggatttcatagtcacgcttgttagctgcacgtcctcggtggtcagttgtgagagcccccaattccttcctccttagaaagctcattctctgaggtttactggggcttgaacctggggctataaggagtttcgagacactcaaaaacgagctggggcttgttaatcaagtggtttttgtccatgagaagaaagaattggttgtcaagacgtcggacctatagtgattgggtcctcaaatacagtttggtgatcaggagttgttgctttattgctattctaatttcacttacctccccagaagtaacctagttaagagcatttccaggccttcctattccttcttttcctaaacggtgacttctgccatgctgccctaaaatctttttattgtgcattatatgtgatttataaaattgtgacccagtcccatctcgagttttgcagcccaaactgggaagagttctgcattgtactttatccttgtgtgtttctttggctggggtctcaggaaccctgcacgactgtatttactttcacttcagacttactgtttgtgggagtgttttggggaaggggccaaatcctcactcatttttttatttctggtgctcgttgagaccacacagacatggaaaggccgcaggaggtgatgagacagagattaaccgtgccgaatgaaacaaggcttcctttcggggaattcagcagaaaaacctttcgtgagattggagaggaaaatatgtctgttctgcttggcaggtcctagcagaagatgtgactcagactgcctctgggtggggctggctggcccacagatcctgccaccatgccgcagcatcgtcaggaccctccaccagcataagctgggcagagcttcctggccatctgtccagcaggtaaggcattttttgcctcaagtcctcaagggtttacacgtgcatttttactattgcatgctcccaaattagatgatggcttggttcaccagcttgtcagagtggtccgatcacccagactgtggtgactggcctactgggcactcagccaggtaaaaaatgtcttatgttgtaaaggtcccagctggaatgcactctgccccttttgctttccaagattattcgttcgtgtacattgcaaatattttcatgcacagggcaggcagttagctttcctttggtgggaggacttggatctagggctcatccatgaaggaggcagagattggcagtttacccagaacttgggttttaattcaacctaattcatttctctctgtggcaggggctccagcagtcctttttgcacactctggattcttaccggatattacaaaaggctgccc

SEQ ID NO: 56031 - DNA, 3277 bp, Homo sapiens
agcatgtgtgcccaggcctggttcctcacggccaggcccatcatcactcactggctttttccttcctcgtgttagattggagctggagggagcatcactgggctgaagtttaaccctctcaataccaaccagttttacgcctcctcaatggagggaacaactaggctgcaagactttaaaggcaacattctacgagtttttgccagctcagacaccatcaagtgagtagtttaactagcaggggaaagggcttctaagcttaggtgtagttccggcaagagcatccagatcccatttccttaacccaacctggcccagggaagaaaggaaagatgtcagccactttccgcccttctttctctttctcaaactgctccttggctgccctcactttggtccaggtgggttactgctttgggaaggtgttctggagcctcagctcttctgtaagtcatacctgtattagactggaccttgaccctcactagataagccagcatggcgtggacccagaaagccacctagagaatggagcaacagctcagaacttgagactgaatgccctgcactcactgtggtgtaatgacctgacctgttcctgggtggaagcttatatggatggaatcttttccataaagtgctctggacttcccaagagaaagtggctggagaaattacagaatgcggccgggtgcagtggctcatgcttgaaatcccagcactttgggaggccaaggtgggtggatcacctgaggtcaggagttcgagaccagcctggccaacatggtgaaacccccatctctactaacaatacaaaaaattagctgggcgtggtggtaggcccctgtaattcccagctacttgggaggctgaagcaagagaatcgcttgaacccaggaggcagaggttgcagtgagccgagatggcgccattgcactccatcctgggcaacaagagcgaaaatctatctcaaaaaaaaaaaaaaaaaattacagaatactcgtcactttgatttccagctagagccgtgactctgactgctccctgaggaattaagtgagggtgctggggtgtaactagcattggattggatcctgggctgtcccgcagggatgaggagtgcatgcgcacgcaaatcagcaggcaattggatagacaaggctccaggctactcttccgcaagaaatcttcctgcttgaagatattcataggggatggcaaaaggcagtgtagcatggatttgagagtttgagagaaaaactgtgagctgagctcttctggctgaatagcaggatccctgaagcaccctcctagtcagcctcccagtccagtggtttgagggaccagaagagctcctggttgtgttttttcccccagtgttcagaagggggcagaagtgcttttctagccagctctgaggaacagggccaggcaatccctctttggcttgtgtctcctttggcctaaagggtgaagagtgaaaggagagagcagtaaaggaggcttgctcagaacccggggtgtggggggcaggcgtgcctcagggcttgctttatggtataagctttgtctgcttcagggacttttaggagctggggatcctgggcccagccataaccagacagatttctgagccccattatcccatcccctctgtctggacggtagagcagtctgaatgttcctcactaggaatccacggcaagacagttattcattcattcaacaaatatttattgaatgcccgctgtgggttagtcaccggagcggcaacagtgagtaaataggactatctctgtccccaagaatcttacaacacagtctctccctccagcatctggttttgtagcctggatgtgtctgctagtagccgaatggtggtcacaggagacaacgtggggaacgtgatcctgctgaacatggacggcaaagaggtgcgttctccgaggtcctgcctttccctccctcacccccacctcggttctgtgtccccacctgaaccgagctcttctctgcagctttggaatctcagaatgcacaaaaagaaagtgacgcatgtggccctgaacccatgctgtgattggttcctggccacagcctccgtagatcaaacagtgaaaatttgggacctgcgccaggttagagggaaagccagcttcctctactcgctgccgcacaggcatcctgtcaacgcaggtgtgatatcccagacctcatctctcctgcagaccctgcctgtctgaccactgctggggttttccctcagtgtggaagccactacgtcaaacctttacccctgatagcgtctgccaagctgatgtctgggaacctttgtggctgtggctgtccccatcagctgctgagtttccagaatttttttgttgttgttcacagcccagattcacctcttcctttccgctcctgtctagagaggagtgggagggagagtacccctgcaggagaaggcctgcaaggccaggaccacagagggcttgtggttccttcagctcaggggcttttcactttgccagcttgtttcagtcccgatggagcccggctcctgaccacggaccagaagagcgagatccgagtttactctgcttcccagtgggactgccccctgggcctgatcccgcaccctcaccgtcacttccagcacctcacacccatcaaggtgagtggcggtgggaaggagctcgcagaaggaggctgtgatcatgaggccggagcaggtctgcccacagtggggaagggctgatgtggtaagcctgccaccccagatcgctcctggcccgagcacagagcatctcttacccattggctctctctcttccttttatcccacttctgccatcccatatggttgagttttctgtctcgctgataagatatttttctgagttttttcagcccagctctgatctcactgtgagaattttctaagatcctgaccctctgttctgtcttctcagcttcagttacctgtgtacagttgacccacaaaccttcattttttatttttttattattttttttaaggcagggtctcgctctgtcacccaggtgggagtacagtggggcaagcatggttcattacagccttgatctcccaggctcaagcgatcctcctgcctcactttttttttttttgtagagacagggtattcttgtgttacccaggctgatcctttttttttttttttttttttttcttgaaacggtcttgctctgtcacccaggctggagtgcagtggcacaaacatagctcactgcagcc

SEQ ID NO: 56032 - DNA, 2823 bp, Homo sapiens
ggccatggtgaagaacttggattttattctatatgtgatgggaagccactagaaaattctgagaggacagtagtatgaactggtttacattttttaaaagttaactcagtcggccgcggtggctcatgcctgtaatcccagcaatttgggagactaaggcgggcggatcacctgaggttgggagtttgagaccagcctgaccaacatggagaaacctcatctctactgaaaatacaaaatcagctgggcatggtgatgcatgcctgtaatcccagctactcgggaggctgaggcaggagaatcacttacacccgggaggcggaggttgcagtgagccgagattgcgccactgcactccagcctgggcaacaagagcaaaactccatctcaaaaaaataaaaaaagttaactctgctgtgttgaaagactggtagggacaagaatagaaccagaaagaactaggaagcttttcattcggtcaggcaagagctgacggtagattggactgcggaggcaagagcacatattaatatttgaaaggttgagctgatctggcagtgggctggatgaggggtatgagaaacggtatgcagaatgaccccaagggttatactgtgccactaggtgactcgtggcattgactgaaacaaggaagcctggaagaagagcagctgtggaaggaaaagcatctggttttagacattgcaactttgagatgccttacttaacatgcatgtagagatctcaagttggcagctggatatgagtctctagctcagagaagaggttgtgaatctgtgagtcagggcgtaaggacagaagtgggcatggagatgggcataaagtcatgaggctgcatgagatcacttgggagtgtgcacagatggggaaagctccagggatgagtcctgggtcatccgttctttagtgaggaagggacgcctgaaagtcagaagccaagaaagtgtttcaggaaggggtgaccaattatgtaatgctgctgagaggtgagagaagctaagaattagtcactggctttggtaggaggtgactggtcaccagacaagtatggcttcagggtagtggaaggtgacacaagactgtctaatgtgagtctaagagaacaagtggtgaggaagcagagccagattctaggcagctctttcaaggattccattctgagagggaagaggctggtggctggggaagaggtggctctcagaggtcatggatgggcttttgggagggaagtgatccagtagagaagcagaggcgtcagagctccttgcagagatgaggagagaacccaagtgcgggtggagaggccaccctaagcggtggcttcccccaggaagtaacctggtggtgggagaacgagccaattctctcttggctcttattttctcggtgatacaagtgagacatcacccgagggtgagaagtggggagaaggtataaagcagtctggggtcggggagggaactcctagcaaatgcagtcaaatggctggaagtgcgacagctcttgagatgcgtggatgtgaactgcaggctggtctagggcatgactagcaaggaggccggtgacagctcacctgtgtctgcaggaccgcttgccagctggcactcctgctgccaatccttgggcacgacgggctctgtgaggcgaaggaagtcctgcagtgggcagcggtgagggcagccaggcaggctgagcggccagggggccttgtcactctcgttccgaaagtacatctccactgagaaattcctgagggtcgacaggaggcaacatgggagctgctcagcctgcccatcatggggtccttgggctgccccgagccacctcccgagggcccccctccagaggacactgctagctccactcacccagaatcttcctggtacagttcaaatatgtggcaggaggcgtagggggcttgttcaccattgtagacatccagtgccatttgcagggcaaccagggtagtgtcgtgctgcgggggagaggggctgcccgtcagcattgttccccacacccgcaggaaccgaacagagaagaaatccagctccttgcctgacacagcacgctagggagcgcaggcactcaccgcagagtaaaccagcagcttggggagctgggaggtggtcgccattagggtcaggttcttccttatctgagccagcaggactcctgaaggagaaaagtccccggtgttgctggctacagccacctctgccttctaattagacctatctgtgctcctttcaccctctgccaggcctgggcctcatcacctacacggagaactctttagtgtcatagggaccatgtaagaactctgtggcacccctcctctctaagaactgtcaaatgtacagaaggaagcaagacaaaacaagatatctgcctatatttcaacacggatgtagaaacctgcctgtgtttacagaagcacttcagtttgaaacaaatgtaaacttaagattgcttcagagtacacagcgggtgggtgcatgcccgggtaactaccatatgctctgaaaagtgagatgtcaaaaaggtgtgacagcaggcatgcccttaggtgctcaaataaggaagctggcatgtgtgttactctcagccttctcaaaatggcccccagtggttctcttggggcagctattcatttaggagagggagggtcttctgatgtgggcgaaacttaagaacatgaatggcagggctgggcgtggtggctcatgtgtgtaatcccagcactttggaaggctgaggcgggcagatcaccagaggtcaggagtttgagaccagcctggccaa

SEQ ID NO: 56033 - DNA, 1874 bp, Homo sapiens
gcagaggttgtagtgagccaagatcgagccattgcactccagcctgggtgacaagagggaaactccatccccccgaaaaaaaataacaatttttttaaaaagaatatgaatggcagaaaaggaagagaggtggggaaatttggtgactagcggcatgaggagggggatttggttttgaaagagcagggagtgtttcagtagagagggaagtgtgtgagaagcccccacagcagatttttaacgccttagggtcctgaggagtagagtgacacgctgtccttgtcactcacccccctgaagccgggccttctccgcctgctggtagattccgaagaggaagcggaagctgaagtcctttagccggctgagacgctgcatggtttggggtgaggcccagggcggcaggcgcagcccgtgcgtttgctgtgtatcgcagcaggcaggttagcgccccaggcctaggccagcctctccagggggcagctctcttccctagtgggaaggtgcctgtgtgtgtgagggagggagaggggagagaggcagaggggctggaaccagtagacatggcaggcggtgtggatgcttcagggcacaggaaaggaagctcaggcacaaaaagtgagactcagcagaaaggagctctgggtggagagcagcagggactgctgacaattaataaaccatttcccactctgaggatctctgtcacccatgagggaagttcccgtgtttcacaagcacagcctccctggacctccccaggggcgtgacggtatcaggcactgtgttctaccgtcctggtgacctgggcctgctgagagggaaaagaatgatcacagtgggcaccctagtgggctcacctcacagaagagtgtgtcatagacattccagacggtctccagtgtcaggtctgtaagccctgtctcgttggccaccatgtccagaaattgctatgaaaaatggatcagggtctcagtcctgctctggggaaaagacagcgtggtgagctgcacctctgcccccactcactgcattccgagaactctcattctgatactctggtgtctgccgggtctcgttctgcagctgctcataacggggacatgggcccaacgggaacttcagcagctgtagagcgaagcggggaaacaggcagcgggaaaaggagcctggcatcagcaggcctacggccagagctgtcccctcaccaccccagggaagggctggccactcttaccctgtcctcagtgatgggcacagtgtgcacaggaataggctgccacgagatgttcgggttgaagcgctgcatcccgttgggagggaagagtccagccaggttggcctcagcactcatgagagtccggtcaaagtctgtgcttcgcacataaacctgcagcgatagcaacacaagtcgtgtgtgtgtgtgtgtgtgtgtgtgtgttggggaagttttggtcaccctgaagtggagccttgtatgtatgtgtgtgtgtgtggtgggaagttttggtcaccccaaagtggagccccagaggagaacctgttcctgatggtcacccagcaaactaaacctaccatacatctggccctcaccctcctctggcctctggccttccccatcccccaaacactccactgggggttgtcaccactctgtgaagaactcttgtgggaatggccttagttgaaatgccccttccagtcaaaagtgctgagtcaatcagtaaggctctctggtctgtctggtttcataacaacacctctctccctgtctagatcagggtccttggggcagaaactggctccagtgacgacccttagagaccagggagaaaaaaataagataaagggctgggcctggtggctcacaccta

SEQ ID NO: 56034 - DNA, 2197 bp, Homo sapiens
aacccaagggttaagagggtctagagggaaggggtggcttcaagccccatggggtttaggccctgttgctttccaggttcacgctttgctggagtcaattaatctgatcccagaagtctttcattaagtggccagtcatgcacagcaatatcatgggcacagagattaaggttatgaaatctggtcaaagtcagcacccatatgggaaaaggcagtttagtaggaccccaagttttgtagactgctctagacgtcgctcattctgcagctcatcctgaggaaaggctggcttctgacccaccttggttaactgaccaaacccctggggccattcttcttcctgataggggtccttgggatatgtcttcactggtgaacggtctccatggcggtacagctgagagaataaaatggtttgcctataggtcagaagcatccccttgatagggacccagagcctaccttttgccccatgttagggaaggaagtctcattccctctgggaagcctactggctgcaaaagaccccagctaggagtcagtcacttcttccagattccagagattctaacttagctaagcaatgctactggagaccataggcaaagccaaggtacaggtaggaagggaaaagagaagtgaaagcaacgtatgtggtggggacaactggggaaaaaagataaccaaaggcttctttagggatgagtcttaaccattcaaccacttccctgtctcaaggcagactcaccccgacgtattcggtcatcctgactcccataagccagggctccaggtcaatcctgaatccagcctcccaactacccaggccagtcgtcccctcctaaaccagctgttccttcccgagatcctcgacctccaccagctggcctttgcccttttagcttcagggaagtctttggtgagcccatctctcattaccaaggtaacgaagcgcagactccgggcccgggtgggcggcatcaccaccaggttcacgccgagaaggagctggaggagagccgcccggctccagccggaccgcttgcccgccatcaccgttgtaatctatgcagcaaacaagctggaacccgctgggtggcacctgcaagcagccgcccggacgcacccgtaaggacacacgccggaagtgcgttcgccgccatcttacttagggacctgctggggtgcggggaaaaggcgcagtctcggtgggattgcgtgcaggagggtcgtggtctggctgtggcggaggagcataagaaggtaacgcgacctggcgcggcagacagggctcgaagacctcatcttgattaagaaggccacaaattcgcgtttgcctctgctcggagaaatcccttaccaaggtggcacttgcagtgggcgggaccatgtctggagaaccagcgtcccctccaggcttgaccccatagctagatcgggtgcagaattgaggcgagggatgggaaagtagaggtcgcttctctccacgcccctgcctttgtggggagattgagccctggccctgttctccaggagatgttttgcttggggtgcaggacacagtatgtaaacaaccctttggactccgtgtgtccttgaggttgccccagtctggcctaccgttcctgccctgcacaaagcttcagtagccctctcactttcccttccagtcctttccctgtcctccctcccctccacttccaagttttagttaattagagtcaagacgtcatgtcatgcctcttcccaaaggagttgggttgcacaggatgttcagactttacaaacccaaagcactgaatccctgggggaggaatttcagaccagtggggaggtattttgaggtaagggacaggcgcatatcataaagtgggagtaggtggggtttccacagaatcaatggccctcttggcattgaccattaggattcaggtgcagccagtttggcctcaggactttgtgactcctgtgacggttgcaggtcagatcataggtcctggggatgctttgattcagatctgcctactggaagcaaatctcctcagatctttgggaaacaaaactgatcaggcttggcctgggcgccgtggctcacctgtaataccagcactttgagaggccgaagcaggcagatcacctgaggtcaggagttcgagaccagcctggccaacgtggcgaaaccccgtctctactaaaa

SEQ ID NO: 56035 - DNA, 737 bp, Homo sapiens
actctttccctgtttcctgtgttctcttccctggtgccctgttcatctgtttcggtctctttggctgcttgccctggcccccgtccttctatgctttaatgtggggcccatgggaactggagttcatagcaaaacaggaagagccggtgagcaggaaactgggaatggggcagggggtgaatgaccagcagtaacctcagcagcttgcctcccacatctggactggagcatctgcagggttctcagcctctcccctgtagcccaccagccctggctgcttccattacagcacttcactggcccaagacgcaacaagacaagattgtcctggactctgacacagcaaagggactggagtgaggacatctgggttctgatcccagcccagccactaactgtgtggtcttggaaaaggccctcacatgagtttcagtgttctctgtcaaatggagctcgggttacttaccctcctttcctcccagcgctgctctaaggaccagaaaagatagtgaagggtttgtgctgtgtatggaaacaagtacaaagttcaaaatccaccaagttaaagcaatgggaagacctacagctgaaagaactgggagggtgatgataactcgtgccatttctcaaacactatgtgccacacgttgtgatagactctctttctttctttctttttctttctttctttctttctttctttctttctttctttctttctttctttctttctctct

SEQ ID NO: 56036 - DNA, 1933 bp, Homo sapiens
caaagtgctgggattacaggcgtgagccaccgcgcccggccgagaatatattatatttttcttgttattcattcaacaaataggaacacagtacctactctgttgccacatctatgccagccctgtttcaggggtgttgggggagatgaaatcaataaaatatgatgtctactttcagggatggatttcatgccccaggcagcagagtaggaagaatgactatagtctcagtagctgctggttggagcctgccatcacttcagatggggttgttccccagaagaggcaacccgcataccttcccaggtccatcctgggctgccacctgagttgcctgtcttccttctgccacctccacccctatcccaggcctgccactgctcatagcagatttcctatcaaaggctctcctggcctcctctcttatctgtggcccccgcagggcacccactttcagaaactccctggaaggcccagcacctgcctctctccacccctggatttctaccagcttggctgaggcctggggctagtggggagagcttcttggcctcttcccagaggcaagggaggaggagggaggctgggaaagccgctggggctcagtgtcgcaattccgggccgtgctgggacctttgctccacgaggtgcctatggaggggagggaacacgattctggaggctgctgggattggggtgggggttcctgggaggcagtccttttgcaagagctgctaagagcgctgggtaaggagaggaaggggagagacatggaacttggctggtctgcagggaaatgccactgttttggccgggagtagggggcgggagtggcgggagagggggtggccggctggggaggagccagcctggtggagaagctgccctgtgggcgggggtgaggaggggagggctgtggtcaccaggcaggaaggaggggtggcctgacccctcggcagtccctcccctcagcctttccccaaattgctacttctctggggctccaggtcctgcttgtgctcagctccagctcactggctggccaccgagacttctggacaggaaactgcaccatcctcttctcccagcaagggggctccagagactgcccacccaggaagtctggtggcctggggatttggtgggtctgctccttagcagtggcctggggctctgtgtgtgtatctggggtggggtcggggaatgtcctaaggatctgagaagggggtttctggggagaagtgaggggtgatggtgatggaagcttgggacaggagcaggactctgggtcccagaataactcatgaggggctcaggggaggaggtcctctatgtgaattggggagattcttggagacaggtttgtgctgggaccctggaaagtggcacgagcgaggttctctaataagcagcgtgtttcactgggtggagtgagctgtcctcagtgttggagtgagggggaaggggcccaagagaagcagggcagatgcacccaaacattccctgctggcctggaggggactttgggggagaaaagccggcacggtggctgggagcccagactttggagtcagaggagggttggagtcttgactctaccgccgcctaactgtgtgaccatagttacttaatctctttgaacctcagtttgcttatctgtaaaatgagtttaagaatagtcctgagccaggagcagtagcgtgcgcccataatctcagatactcaggaagctgaaacctgattgcttcagcccagtagtttgaggcgatagtgtcctattattgcacctgtgaatagcactgagttccagcctgggcaacatagagagaccccatctcaaaaaaaaaattaatagttttgacctcagagggatattatgaggaaagcacataaagccttataacaggctgggcgcagtggcttactccaataa

SEQ ID NO: 56037 - DNA, 1900 bp, Homo sapiens
gttttgtggctactgagcagtggagccctcgctaacactgtgctgtgtctgaagatcatgctgaccccacaaacggatgggcctgggggccactttgcacagggttctccagagccctgcccatcctgcctccaccacttcctgtttttcccacagggccccaagaaaaattctccactgtcactctgtggtatggccataaatgcctcagcgccgcctcactgataggtctggtactgtttgaacaggaagatcaaaatgaatacaaaatgagagaaaccaatttctggattgggggtggggacacggtaatagaggaggaagcctgcgatctttaggatccgcctccaggcccagaggagggagagtcacaaatgacagccttggccgtgagagggggcctcttcttactaacccccactgcgccatatgggtaaatggaatgctgaggcttaggcgcccccttcccctgctgggatccgggtaggatccggttgcctttctgcggtggaggaggaagtgttggatttcagcgctaaggcgtcggcggtgcacctcacgtgcatgtgtagcatgccttggtttttcctttggcatctgaaaaaggcacaacctgaaagacctagaacccagtgtcggtccccaggccctttgggacaggaagagaagagccgtgtggccgcggggaggatgtcctgaggcggggctgtcctcgcggactgactggactccatctcccagcgggcgccgcggcgcggccacgcccccccactccccgcgcgcgcccggtggaggtaaccgcggccgcgcgcccccctctgcccccgctgcccaggattggtaggctccaccgctcggcagccggcttccctgctcggacgccgagcaccgccaaagcgcgtgagtggggggtggggactgggggatggggagcccgtcaggaagtctcaggggccgattatcttgggaagtgactttcagaggaatccccatgtcgtcgaaacgggcgctatgaccccgtcgggtgagagtctctctgagcaacccaaacagaaggtactgctgtgggtcccccacttggcacgcgacggcgctgggtcggcctggcgcgccctcccgcgcccacgggcgctaggctaggtctgtgcgcagccgctgtctcccgaggtcggccccgccccgcggcgctcggctcggtgcagccccggccccccgggctgaatggtacggccccggccccggcctccccctccgcaccccgcgcgagtggtgcgtgccccccagtgcagacgcggaactggcgcccgctcggagcggcgccgcgctggggagcgactgacgccccgctgccgggggacgtcgggctgggcctggccagtcccccagagcttgggaggtaggagagtctgggccggtggggtcctgggcgagcgtctggggactccgagcgggagacgggctctgagaggacaccgtggctcttggaggaaggggtctctcaggaggccctgggggagtgtgaaggggcgtggggacgggggtctgccgaggaggggcggggacggggatgggggcgccccgggcagaggagggggctcaggctactgggcttggttcctgccgagcgggcggctcgggttcaggttcggggcgggggcgggggcgggggagaactgtccagcaggtgagggggcgggcagagctggccagccctggggccgaacccgcacagcgcttggcgggtgtgcttgtgcgtgtgcgtgcttgcgccttatttttggctagaatttggagaaacacgtttggttctcaagaaattttttttttaacttgatatttcaaaattgacttgctggagagagaacaccatttcatctttctgcaatcgctctcctcccca

SEQ ID NO: 56038 - DNA, 365 bp, Homo sapiens
gcaagggctctttatacagagctgctgagtgtagcgacctaaatttttttgctcaaacaaggctgttttaataagaaataaattatataaagtcacgtgatccatttagtaaaatattgggctgtgaaccaggagactggtatttagtcacactgattaggtcttacccaataacctttgatcagttgcctctctacttactctatttcatgtgttgtgaaatggcatgatattacctacctctgatctagttgaaaatcttttttttttttttgtgagatggagtctcattctgtcacccaagttggagtctcactctgtcacccaagctggagtgcagtggtgcaatcttggctcactgcaac

SEQ ID NO: 56039 - DNA, 1124 bp, Homo sapiens
ctctaactcctgttcaggcgctctgtgtcattggtcctcatgttcccagggtccagcattgggtacagtcctcggtaaacacccgatggacaaatgacaaaaagagacgtcgcagcacacaggggccaaaagagatacacaacaaattttaaaagagactctgtgctgcaagaggatggattgagaataactttacttgttttttgggaggaggttaatgggtgggaggggtgagaggggagatctgatttacatacggacttgagactcccaaggcagtaccccgggtcgtcctctgcaaggttgccccggtggggtctgacgcccagctggcgtccgggagccggggtggagtcctggagggaggcgaagcgggatgtggagggggcctggagtggggggagggggcgggtgaggcgaggcccggcccgccacagtcctgcctctgggccccgggagcgtcctccctgtgtccgggccgggcgagggcttaatgctatggccagcggggaggcctggcggggcccggcgggggctgcgggctcagtggggcgggtggcgccgctcggccaggcccccgcggcccagcacttcgccgctgaactggtaggtgagcttcttcttcaccttcttgacctcgcccgtcttgccgtagttgcgcagcgcgcgcgccatcttctggtaggtcatcttcttgcggttgcccttctggatgccccagcggtgcgccagcgcctccttgtgcttggacgagaactggaaggtgcccttgtccttgtccacccaccagatgctgtccttcatgtcgccgctgcggagcaggtccaacaggaactggtacaggcggatcttcttcttgctgcctgcgggggggagggcccggtgggagggggcccggggcccacatgggagccgcccccaccgccttgcgtacgcacaggggcccggggacggggtggccgggaagggcaggggaacggctgccccagcccgcgccgggcgtgcatacacaacgcacccacactcacacacacacacatgcttgcgcacacacaggcgttcacacacacccactcacacccacgcactcaccccccccacgcgcacacactcgcacccacaca

SEQ ID NO: 56040 - DNA, 2784 bp, Homo sapiens
gaagtcctagggcaggatccctgagtagcttttctttgccaagaaactaacccagggattccattttggaactcagggagggaacagaacgtcctggcagttgtatgggcccggtggggtgagatggacagaaagcttcagaagacaagctgggccaccagggagaagttggcggtctaaggaaggccaacagtgcaacatgaagtgggacaggcaccagaggcagccctgagagctgagtgtgctctcaagagccccagcagaggggaaagtgacagagtaaatggttggagctgccatgggaggctgatgagggtcagagacttaagagacctgtactcagtcgctatctctgcccaagtgagtacccacatgccccttcctgaatcttctcctgtactggctgatttccagagaagaatacaaactcgaaacgccaagccagactcccactgctgttcaggacctagacgtgagaagtggtatcacatactctggcttcaggacacccaggtttgaatcctggctctgccatctgtgccactgtgtgaccctgggctaacagtacccaccacaatgggataatatgaggattcagtgagatagtgcgagtaaagtgaatagcacatagtaggtggtcagtaaattgcggttataagaactgctatccagtgtttgctgccttagtctaaccaaagaggtcaggtctagcttcctccaggtgagggaagcacagagccctcgcctcccaggtttggagttcccatcagcagggtccagccaccatgcattggaccccaaagggttacaagccctggagacagtggcctgaggttcccagtgaaaaaccaaagcataaaaataattcgatgagtaagaataaaattccctcttctgaggttcccggggccaggcccctccctgcggcaggcacttcccctttcccttgctcatggaggagccaggccgggctgactcagagcaggagcgcacagtagtcctcccagcccgacctgggcggcgtggtctggcggccgggcgcgcccccgtgcggccacgggcagactgcggccctggacgggaagcggcggccagatccgcaagccccgcagcctggtcgatcgcggtccccgcagagccgccgcttccgtccctgcccagcctggctgagcgcggtgcgtgtggctctctcacttccgaccgaccctcccctccggcccgcagccctgcccaaacggaagtgcgccctctacccgggtcccccaccgccgcgaggcggaagcgccctcccgccgccactccccccgaccccgcggcacgcggcgcctcgggttccggacaggccccttgtgacgtggccgcgcgccgggggcggccccgggccgggggccgggcggccgggcggccgggcggggcagagcctgggcggggcgcggcaccgcagctggatggctggggccgcccggatcgccgccgccgccgccgcacggtgagtgccagcaggaccctcggggcccgcgccccgggcgtgatggacccggccgatccctcgccccgtccgactggtcctcatcagacctgggccggctcccaggacccgggagtcaggctcgcccgcttcggcctcctctcccccatcgctccgcgccccacgccccatccctccctcgctgtcctctccgcgtcccacccgcctctctctagctctctcactctctactttcctctccccttggactctccgtgtattccctcccgctagcctgtggtcccctcacctctgcgtgaccgcctcgtcctggcccagtcttgcctgtggtccccagtggagccccgctggcttcatcagtgcccctgattagttaaggcctggaggtcctagacatgggcatctctgccaccacccagaggcagctgctttcttcccctcccatctccatcagaaggtgaggaaactgaggcagggacatcaccagctcaaggtcacagccagcctgaggcagagcagaccacatttaaacctcatgcccgagtttccagatggaacttctcgcttggttgactcacgtccacatcctgtgatcggccggctgggcacattcctgctgcagggagccccaggccttccctggcacaggcagggcctctgcgcctcctcatgccgggtacatccacctgcactttcaggcttatctcgtcctcacagctgaggcaggtgatattgatccctgtcctgcagatgagggcactgaggctcagagggggggcttcagagatttgcccagagttagacagctcaaagtgcagcatagaattcaccgtgggggctctaaagcctgcgctatacaagagagaggcatcccctggctaaaggctccttcctcatcagccccatctcctgttgccctcagtgccctggggacattggtctcatgtcctaggaagaagcgtggatggtcttgccctggctcatctgctcagtttccccacgtatgtctctctgaatccaccccatccccttagaaggggtgcctcagtctctggggtgtcgcgggcggcagggcctcccctggcagccagagacacccagctgggccgggccgtgccgccggtggctgaggagagccagccagcgcctcaccctgtcattagggaaagtttagcctcaggcggaggtgctgacacagtctggagctgctcagaaggaaaaaatacgcagtgctcaggagtagggtgtggagacacagggccccattgctgtgcacccagcatttggatgctcag

SEQ ID NO: 56041 - DNA, 2475 bp, Homo sapiens
tgtaactagtgaggtccagggtgcccaggggaccctcccgcatccattcatccagctctgaggctctctgaaggcagagtctgactgtgtccacatcctgcagaagtcaaaagaggaggccagtttggaaacctcctggtgaaatagtggtagtattggaataaaagcaggcctccgagagaggcaaacataggttttaggttctgcctcatagtaagaactgggtgctttatcgcagtacaaacctctctgggcctgtctcctcatctgtaaaataggcattttactaaaagaaggattcttgagaggattattcccagttctcactgggaaaggcaatctgataacttctcatctcagcccaggcctcccaccaccccctacctgtcttcttgtcccttttaaggcttagttttctttcctctcttcctgatatgagggggaagcccgagccccatgtctcccccagggtgcccgattaggaagtacgagaggcgactcggatcgccggggcctgtcctgtgggggctccatcgcccgcacaggagctgtgcgcccaccttgatctcactgtccagcagccgtgtgcgctggatgatctcctccgtggacatcttgagcacctcctccccaattccatcttgctgtaaaaaattatttgtttatttatatatttacttttactcaggacaagcatccctcgttctccgaacccactcacagcctcagtttccacgcccataaaaccaggatggagtcaggacccctgcccacatcccaaacaaccccgtccccgggatcgggccagaccttgacccccagccacctccttccctcttgtcaatggcgtctccctgcgggccccggttcccggaccgccagctcgcccggtgcccacctcggcctcatcccacacggtcgccatcttctcctgccgagtcactggactctcaatattcggcagcagattcatttcctggaggagcgggcagaagatgggaccaggcgggagccgcaacgggagattaataccgtctttcttaaagccttctcttgaccagtggaaaacctctccccacaaatcccgactcttgacccgaccagctccggccgtgctgcggagcagcgaatctgcctctccgattccaaagaccaacccctggccacaggccccgcccccgcggaccccgaaacgttcccgcccgcgtcctatttttgccgggcgcgagaggtggggccgctattggccgacacgcgcgttgggggcggggcctatgtgtaaaaccggaaagggagggagaagggtgggatccgcgagggcctttgggaaatgtagtctttaatctggcccgtgacagatgcttgcggaggggcgcgttcaaactcagaccgtgaccccgctaggaataaggggatttacacaatgacactgcctcccaattaataaacgacataggccagccgtgtgcaaagggccaaaaaggcatgccacctcagtccgcatttttacaattatttaagtacaagctggccacccggagttacgggagggaatcattaaccagctttaaagagaaatcgctgctgctcctaacgtcagagcaggcttcacggaattgtccacgtgggaagaactcaattgaccatcagcctctacgattaaaaacattatgactcgggccgggcgcggtggctcacgcctgtaatcccagcactttgggaggccgaggcgggcggatcacgaggtcaggagatcgagaccatcctggctaacacggtgaaaccccgtctctactaaatatacaaaaaattagccgggcgtggtggtgggcgcccgtagtcccagctactccgggctgagccaggagaatggcatgaacctcggaggcggagcttgcagtgagccgtgatcgcgccactgcactccagcctgggcgacagagcgagactccgtctcaaaaaaaattatgtctcgtatctgcaattgtttgttttctctgaccatggttagtaatctcagtgagcagagcgggtctccggatcatgggagactcattcgttgtacccttgtcggctattttaaatgatctctccttatcctttgaggtgagccctggagcccctttaaagggaacttcatgtaagcaacatagcttatatttcaagtcaaaccatcacaaacactctgttaacctgatgaaaatctgtgcaatcgttgccttttttttgtttgcttgtttgttttttgttttttgagacggagtctcgctctgtcgcccaggctggaatgcagtggcgcggtctctccctaccgcaacctccgcctcccgggttcaatggattctcctgcctcagcctctcaagtagctgggattacaggcacccaccaccacgcccaactaatttttgtatttttagtagagacaaggtttcaccatgttgaccaggctggtctcaaactcctgggcgtaagtg

SEQ ID NO: 56042 - DNA, 1567 bp, Homo sapiens
acatttaaatcaggagactgaggaaagcaggttgccctctctaatgtgggcgggcctcatcctgtcagttgcaggcgttgaacagaaaggctgactccgagggagttcttcctgccagattcccttctgacaggcataaaggtcttttctgcctttggagttgaactgaaacattattcttcacagggcttgagcctgacagccttcagaggagaactaccccatcggctctcctggttctcagaccttctgaatcaggctggaacaaaaccatcaagtctcctcggtctccagaactcaccctgcagatctagggacttgccagactccataatcacatgagccaagtccttatactacatctctttatatagcaggttggtgcagaagtaattgcagtttttgccattaaaagtacaagcagccaggcgcggtggctcacgcctgtaatcccagcactttgggaggccgaggccggtagatcacctgaggtcaggaattcgagaccaggctgaccaagagtaaccccgtctctactaaaaatacaaaaaaaattagccgggcgttggtggtgggcatctgtaatcccagatactcaggacgctgaggcaggggaattgcttgaacctgggaggtggaggttgcaatgagctgagatcgcactattgcactccagcctgtgcgactagaccaagactccatctcaaaacaaacaaacaaaaaaacacaaaaaacaaaagtacaagcaaaaagatcctattggttctgtttctctggacaatgcttcctaaaatctactattttgaaaaaccctttattttgaaaaatgttgaacatacaacaaagtttaaagaatagacaatgaacacctgtgtacctttcgtctagatttgccaattgataacattttgccacatttgactttgctctctcttcctctgtgtgtgtacacacacacatttattcccaaaccatttcaaagtaagctacaggctgggtgaggtagctcatggctataatcccagcagtctgggaggccaagataggagaatctcttgagcccaggggtttgagaccagcctgggcaatgtagggagagcccatctctaaaaataattttaaaaaattagccaggtgcggtggcacatgcctgtagtcccagctactcaggaggtggaggcaggaggaacacctgagcccaggaggtcaaggccgcggtgagctatgatcatgccaccacactctggcatggatgacagagaacgtcatttctgtccgggcacagtggctcatgcctgtaatctcagcactttgggaggccaaggtgaacagatcacttgaggtcagaaatttgagaccagcctggccaacatggtaaaacctcgtctctactaaaaatacaaaaatcagtggcgcgtgcctatagttccagttacttgggaggctgaggcaagataatcacttgaacctgggaggcagaggatgcagtgagctgagatcaggccactgcactccagcctgggcaacacagcaagactccgtcataaaaaaaaaaatcaaaataact

SEQ ID NO: 56043 - DNA, 1234 bp, Homo sapiens
aattagccgggtgtggtgacacgtgcctgtaatcccagcattttgggaggctgaggcaggtggattgcttgagtccaggacttcatgaccagcctgaccaacatggtgaaaccctatctctactaaaaatacaaaaattaggcaggcatagtggcacatacctgtaatcctggctacttgggaggctgaggcagtgagccaagaccatgccactgcactctagcctgggcaacagagcgagactctgtctcaaaaataaataaatacataaaaagagagagagagagggctcaatcttgctgtcaccacagcagcatggggggaaagtcttgtaagaacacagagagaagggcaagtcaggaggagaggcttcttgaattttctggcacctcgatcttggatgtcctgtctctagaactgtaagttttagttgtttaagcttctcatcctaaggtgccttgttatggcagcctgagctgcgacattcactgttactcattatcagtggctgctgggagcccatccaagctggctcctgtggcctttgagttttcctcattattctttcaacttcccttgctttctggcacaaaatagctctggctcatcttgtactctctatgacccagccctggaatcaggcccttgaccaaagagccttggttcctttttgtgaaacatggtgtttcaaagccaagccctggctgctgggtgagctcattgctgttggcatatcactgcgcccaggctggtggacacgcacatttataactatatttatttctagatctacccgtatattttgaaatccatgagttcacactgattcttacaattctaattcagcgccacagggtccactctggttctctccctttccatatttgtaattctctccatcaatagtgagaaagcggccaggcacggtggctcacacctgtaatctcagcactttgggaggctgaggcaggcggatcatggggtcaggagatcgagaccatcctggctaacacagtgaaaacctgtctctactaaaaatgcaaaaaattagccggcatggtggcacatgcctgtagtcccagttactcaggaggctgaggcaggagaattgcttcaacccaggaggcagaggttgcagtgagccaagatggaggcattgcactccagcttgggtgacaaagcaagactccatctaaaaaaaaaaaaaagtgagaaagctgccttccactgtcct

SEQ ID NO: 56044 - DNA, 910 bp, Homo sapiens
tttgcacatggaggcctaacctcaaagacttgcattaacacttgttatctagagaatattctaccatttaatattcttggctttgaataacctaaagctcatttgctggaggttccaaaatactctgaagcctggttacagtgactgaaatcaggggttggaaatgtgtccttctctacaaagtccagaattcaggttcctagcagctacaactcagggttaggttagcattttggctgtgtacaacagcagttcttggacagtactgcaagctaacaaggtttctcactctcacaatttatttgggcaaattgccaatcaagattgatccagttttgctttttttggagggtaaaggacaatttgatgttcctaaaatcacgtgctgagctgtattttcaattagactcggcgggggtggggggaatcaaggtccaggattgcactttgtatgttaatacagaatgttgtagatgatactaaacacactgactgtagctaccagtcttctctgtgataggagactaagaatccagtaatttaaaataataaaatacttccttcccaaaagattatttgaaattgcatgtccaacccaaagcgacaatgctacagtttaaaaaaaaaataccttgtaatctatcatataggaaaacactacagcttaaaggaattggagctagcacacttgagctgatgctgctggtcatatatcaagtgcacctttatgtaaataacttaaagccttgaggaaataagcagtaatgagacagactacaattgaaaataatagcatgagagaattcaggttgttttggcttctttccccatttttctcttccccttcttaaaaaaaggaaccaatttcatcaaataaagaaaacagcccagttcctctgcttatgataaa

SEQ ID NO: 56045 - DNA, 1004 bp, Homo sapiens
ttaatctccaatgacaggctctacatagggtgcacaatgattcatagtataaatgggaaaacattaggacagtaaaatgagaagggcactaagaatagccaagaaagagaagatgaagcagatataatgccacactcaaaagaatttggaaagtcagtaaatatacaggatccaggagaggctaagcaccaggtcctagaccctaaacaaataagcatccaaaacctacaatgcacaaggtgcagaagagatccctaagtgattcagagccagaatacatcagtgtatagtcacacagaactctgcatccataccacacagccacagaagaagctgcctcaatcaaggtgtttctccagcatttaataacgtcctttcctctcctcattgactacagttacaaatagtatgggcagagaactgtctcatccccactcagctgacaagttctattcccaacactgcatgcttatgactcatgaggggatgggggaggggagtgaaaggaaactgtaaaacaaagcaacaaacttgaatttagacttacactgaccaggagtaagaattcatcactgtttaattagaatatctcataacaaaccaagaaagtatccttttaaaatacagtaacaaacccagtatcttctgaaaataacctgaaatttgtctacatgtcatgtcttctgctattccttaaacagacatgacaccaaaaggcattacaaggcctctgtaaggccaaactttacaaagcactcaaacagcgcaaacagcataggttgctgtggggcccaaagcaacagggcattccccacagttcctttcctggcagacagcgaagtcaacacacttaacccctactgcactctttcaagatgtgcactaaatcatttcttaaaggggtggaggtgcctcatctttttatactcaaattttatgtcaaaaaatttgagtgccaggaaaggaattcaataccaccccaagagctgatctttgtgacctgt

SEQ ID NO: 56046 - DNA, 594 bp, Homo sapiens
tctactaaaaatacaaaattagccaggctaggtggctcatgcctgtagtcccagctactcaggaggctgaggcagcttgaacccgggaggcggaggttacagtgagccgagatcgcgccactgcactccagtctaggcgacaagagcgaaactccatctcaaaaaaaaaaaaaagaaaaaaaaaaggaaattaggtcctgatacatgctacaaaatgatgcagggaccctgaaaacaacacgctaagtgaaataagccagacacaaaaagccaagtattacatgattccagttacatgaaatatctagaataagaaaattcacagaaacaaagatagattagaggctaccagaggctggggggaggggaaaattgagagttattgcttaatggttacagaggttctgtatgcggtgatgaaaacattttggaaagatcacagtgatgattgcacaacacctcaatgtaactaatgtcactgaattatacacttaaaaatggttaaaacgggccgggcacggtggctcaagcctgtaatcccaacactttgggaggctgaggcaggtggatcacgaggtctggagttcaagacca

SEQ ID NO: 56047 - DNA, 1965 bp, Homo sapiens
aggcgggtggatcacccgaggtcaggagttcgagaccatccagcctgatcaacatggtgaaaccccgtctatactaaaaatacgaaaattagccaggcctggtggcacatgcctgtaatcccagctacttgggaggctgaggcaggagaattgcttgaacctggggaggttgcagtgagccgagatagcgccactgcactccagcctaagcaacaagagcgaaactccgtcttaaaaaaaaaaaaaaaaaagatgaagttcttgtaaaagattcattatttgtaacctcttacactgcacacattataaagcatttcatgctctttaaaactgttatacagcctttttactcgaaggtaataaacctacagctctctcctggcgagaaagagattccattttgcggaaacagattccagtcaaaatcttaccacattcccctcaactatgggtatgagcctaaaccaatgagaagctccttggtgcatgtgtaatggtctccaagaattacaacaacatcctacccggaggaccacaaccacgacaccactggctttaaaatcaaagcctggtccctagcgaagaaagcgctttaatgtgctcctcccgctcccgggtgcgagattcctgcccagctactaggccacgactgggtgagcacctgatgtggggggagggcgagccaaggccgtagcggatctggggcgaggaacgaggggctctcgaggctcgggaaaagcgctgccttctaggggcgcggacccttcggcacccacaggagtggacactaagaacacgtgagacgacaggggcagagatggggtgtcccgggcaggtagcctgggtccagcacggcagccagaaagacgaggaaaacggagctggccctgggcagggcacgaggcctctgagcctagagagtgaaggtaaagggcgcggggagaggaagcaaagccacgaggagggcgggtctccctgggcgcgggggcacgcgctgggcaaacgcgacaggacccggggagccggggaccccgacatgcaggaggagatcgcagccctaccccaggacgcagggaacgagaaaaggccgcgcccggagggccctgtgacccgcggcctccctaaccggacccgccccgcggcgcctccctcttgccttttttcccctccctccctcccgcggcccgttatcctgcggccgcagcactcaccagcggctgcacctgagcctgccgctgcctcagttgctgcctgcgcctccgcagccgccgccgccgcctcgctgctgaggccgaatcccgggggagcctccgcgtcccgccgccgctgccgctgccgccagagcagaacaccccaaaatggcggcacttccggcacctaccaccggcggggagggcagaggaggagggggagcgcggcgagggggaacgtatcaccgcggcgccgcccgcagcgccgatgcgagcggagcgcggcgtaggggcgggccgagcgccgggcgctgcagcgccccctcgggctgggaagtggaggagcagccgcacctaagcccctggggccgcgggcggagccctcaacctagggagctgcaggggcgcatctctttgtctccgatccctactggagggaagagccaggcctgggaatctgaagttctcgactccgcccatcgcacccacaggagctctagatgaccctggtgggcaaggaggcacccctactgggcactgaataggagcataataagatatttgttgaataaatggatgagtgagtgactggtgcttggccagcgttgggcacatggcacgcccctttttgccccagcagacaagcaacagcatccaggccttccttctttgctgggatgtgaatatgtgtgttccaagtgcagggagtgctttttagcaagataatcagtgtgaacgcacaacctggcaacgatcgctgcgacataaggaagtt

SEQ ID NO: 56048 - DNA, 1712 bp, Homo sapiens
tagcctgggcaacagagtgagactccgtctcaaaacaaacaaacaaaaagtaaatagctggcattacaaccattcttcttacctttttgtaggttgcaggttttatatttgagctcttcataatatttttcttaaggatatattaatataatgtatattttcctattttttcctgctatgtaaacactgctgtttggtcagatgaaggagggagccctgccctaggacaggggaggggaggaggaaggcgacctcaacccaggacccctgttcaccctgggatcaggccctcacccaggtagctcctctgtttgaaagctctaagcccttccactgtcctcttcagggctaccccgccacacagcctctccttgtcttgtcttccctttggcggggtcacacccgcacctgggtcactgcccccttcctctggtcgagggttggggggagtgtcccctcctccctcggccggagtcacagttccacacgcaggggtccttcctgcccctctcacctggggtcacaacccccctccctcggaggagggaggtcaccggccacaggcgggggcctcagtttcccacgctacagggctcacacgtgtctggcctgcgacgcgctctcccttcgccggggtcccagtttcccgcccaggaaacctcggtccctcctccgaggccgccgggccctcctccagagtcccgccagtcccccagagtccaggccagtccccgccgtcacccggtgcgagcccgcgagaggcctagtgcagctggcagccccgccccggcacccgcctgctcttctcgcgggtccggaccgcgagcgcgggggccgacgggtcgccgctgcgccgggccgggatggcggccaccgcgctgctggaggccggcctggcgcgggtgctcttctacccgacgctgctctacaccctgttccgcgggaaggtgccgggtcgggcgcaccgggactggtaccaccgcatcgaccccaccgtgctgctgggcgcgctgccgttgcggagcttgacgcgccaggtgagccgggccggggagcccgggcccctgccccgtccccgccgctccgtccctgtcgggccgctggggtctccaccgtctttgctgagccacctctttgcctcggcagctggtacaggacgagaacgtgcgcggggtgatcaccatgaacgaggagtacgagacgaggttcctgtgcaactcttcacaggtgagggaccgggccgaggggcaggctcgggggcccgctccccctcgcccaccgccctgagcctgggacggctagagaagtgtgggggaggtcaccatgcaccggagccaggtgtctcaagctgctttgcctccggtctgtgcctctaaatggcacctggaggtaggctagaagctgtgaaaggcgtttatttaaaagttcaagttgggccgggcgcggggactcacgcctgtaatcccagcactttgggaggcgggaggaggaggcgggcagatcacttgagcccaggagttcctgaccagcctgggcaacatggcgaggcccccgtccctacaaaaatacaaaaagtagccgggagtggtggcgtgcgcctgtactcccagctacttgggaggctaaggcaggagaatcactttagcccgggaggtggaggttgcagtgagccgacatctcgccattgcattccagcccagccttgggcgaca

SEQ ID NO: 56049 - DNA, 484 bp, Homo sapiens
tgtggtgaggcacaggatgactagggaatggcagagaacaggctggcctactgtcagttcaagcaaccagctgagcagcagcagtctaaaaagccccaaacagaacacctccatggattcagggaagggctgaggcactgcctttctagtatgtgccaaaaaaaacataactctgaattggggcccaggggactttgagtttgtatggggagggaaaaggagtgagcagttctcctcccctccccacagccttaggccaacacaaactgcaaattggtaagcagcaccttaatacctcttgtgacagttacggctgaagtggcagggtcaagcttgtaggtgttggcatccccctttttatatcggtcccggaagacatagatgctcccgttacagctggcaatcttccagagggatggggcagagctccaggcctcaggaaggcaaagccgggtgaagctgtctagcaagggattgtagcaca

SEQ ID NO: 56050 - DNA, 1810 bp, Homo sapiens
gattggccttagtcctggccctatccatgatgtccctgacgctatcctttaaccaaatctgggttcgttatccccagtggcgcccctccgctaatgatataaataaaagttccaactctgggtgttttcctgagaaaacacggaataattcctttccataatgttaacaaaagacttgggatttaggtcaatatatgaaagcaaagggctgggagaggcctgtgatcgtaaaagccttactaaccaaataactggggcataaaactagtgaagctcaggggcagtagaatcagacaaaaaggacccctggccccggcctagtggccaggtcctctccttcccagcgcatggagttaagacgctccatatgaagcctagcctgggatatccgtgggtcttacatttgctctcttctgagctgcttcccccacacttccccgctcgctcgaaagactccctatggctgcgtcccagaacttgagtccatccgcccccaggccggggcactgggaggcccatcaccctgtgcaatgtccccgctccaccttgagtcgtcttggaaacggtcgccagggaaaccgttcttcccgctcaggcccgcccgccctcgtcaaaagcttggctcagagagcgggggaggggtgtgtagcgtagaacccaaaacgcccgccccctcccctcctctcacccgcctggttcttcagcgtcctcgccttctctctaggctctgccacaaggagctaggaccacgctcacctcacgatttccctacctgcctgtctcgctttctcacctgcgttccctcctttcatcccggagcccggaacctccgcttccggctccacgtccgcccggaagaagatctgctgcacacttccgtttccggtccgtgcccttggggctccgtgtcctgctgtctttccgtccgctgcctagtctgcatctgagtaacatggcggcggcggcggtagccaggctgtggtggcgcgggatcttgggggcctcggcgctgaccaggggtgagcacgggcagccagctgagaccggggtcaggcgcagcggcgtgcccagtgcagagagctcctcagggctcatcccgcgcgtctgtgccttttatctccctgtgcagggactgggcgaccctccgttctgttgctgccggtgaggcgggagagcgccggggccgacacgcgccgtgagtatgtgcgggcagcgctcttctctgaactatcggcggggccccttagatgcctgtccttgccctaggatgcccttccctacgtcctcctggcaaatcttggagatctgacttgcagtggtcttcaccctgcatgcagaatcgagccctccctgtgcccttaggcctgttatggccctgattgttccttgtccatttcaatcatcccctttttgtctgattaaactgtcagctctttgaaagcaagcaatataacctttaggcctcagagccctgtaataatagtacctagcgttaattgagtgcttaatgtgtgcctggaacctcgctaagcgttttagtgaatgatcttatttcgtcctcacaacagccttatggggtagatagcatcttactcttcttactatagatcaggaaacagtccaaagaattaaactgcccagggtcaaagacctagtgaatgacaaagtaggcctgcctgctgccagaggcagaaacacctaaccattattctgtagcttgtgatgtgtgattgctcagtggtttagggttgcatgaatgagtatgtacatattatgttacagtcaagatacacggactgggagttaggag

SEQ ID NO: 56051 - DNA, 1598 bp, Homo sapiens
ctctcagtaaaagcataaaaaaaagaatgacctgcccattacagggatatagcaaaggaactggaaacactaagtctatcacttacttggcctacctgcatgtgaatataaaataccatgtaataattatttgacagtagattagaaactaactcccatgtttaaactcgctaaaactcagcttcactaatttccagctctgacaaatgtgattttcattgtcaggagccacatgggccgctgctggaaagcgctcaatgcatccttccgaaatctgacagagcaaccccttcattaacacttctgaatgagctccttgtgtttctctcagtatctggtgcgaaaacctcggaacagaaaagcagtagtaacagtagcataaaaagaaaaaaaaaaggaataaaaaataaaatgttggttcccacctaacttcacatttgtcttcaactgagtatttcgtgttttgcgtctgagattttggggggagtagtggtgaatgtgaatttcggaggggcgagagggagggttcggaagcctttggtggcgaccggccaggatccacctcagtgacgaagaaccaaagttcagaggatccgccgggcagggcagggccgggtggcggttggctaagggaggagagggcctcaacgctgggcggcgaggcgagggctcggcgaggcccccaagcggggccgcgggactgaggaagctgtccctgcggggaggtaaagggcagcggaggagcagcagcatctcgggagaatgaaaggcccgcaaggctgagccgatcctcaggcgccctgagcagcagcgaccgaacggggcgccgggcggggtagggagcggcgacgcctcatacctggatgagcactttcacgtacatgagcggctgggacaggatggtgagaccggagcccaggagcacctgactggccgcgtccgccatgatggcacccgcgggcggacggacagacagacggagccaccaagcgacccggtgagccggtcctaggtcacgtgccagggccgccggtttcactggcccgcccgcggcgcgcgcgcacgcacgcagcagcacgcgcctctccgcccagtccccgcccccccgtcccgccccgagaaacggcaggcgctcgcgagggggcgctgaggtcggggcggggcttaagggacagaggcgcatgcgttctgccgggggctcgcccttcaccaggaatgacggtttctcttgcacatgcgcttccaggccgcaagtgtccggaaacagaagaatgggagtgtcagtgggggagtgtgaccgtgacggcagaggcaaggtcagaggactgaaaagaaattgaaaaggattcttcattatgcttcatctctgcacttgccttttgggcatcatcaacataggattcaaaagatactcagcatcagagccgtaacagtctcgtgactgacaaactctaaataagtatagcaaataatgaatccgctagcgagtggcttttcattcatttattcgtttgattaatgttatcttttcaaaaaaaccttctctgaccattctaaaattacctcccccttttctttttctttcttttttttttttt

SEQ ID NO: 56052 - DNA, 1142 bp, Homo sapiens
aatgttttcaaaccataatagactcaacaaaaagtacatgagcgttgttgcataggactagactaaaccaagcgagctgcattccatgcgaattattctatcgtggggatcaagatctccagctgagaaaagatgccaccagaacatcccttctcatctagtagcagatttctgtggagttcccgaagaaatggagttccccgaagaaatttctgtggctttccgtgttgtgtaccgacctgctttaggtgcgtttccaaagctgggaacatgttacttctggatggtaggctgaaaactagtcagtgacattagcatccagtcgcaaaccctgcccaatttccaaataggcagctgattacacaagagaagctacaaagccacaagaggacaagtgaaaaaactgccaatacctccccgggcgccccccagctccctcttgacttcagaaaaccctgccaacccagcttctcctcagctaaacaaggtggtcacgccgaggccagaggtgcatctgagacagggagggcagcgtatcttcccgcttcttcttcccaaggtgctggccccatgcttccctttccctgagaaaggagatgctcgccacaggaaagtgaaagaaatgggtatgggagcacgcgacgaagtcgtctcggtaggtgccgatggaaaaaggtcagggggttgggaaagtgggccctaaagattgaatttagggttcagaggaacctggtctggggcaggtggtgagggggtttcctaagggtaggagcggggaaggagagcagaaacttcccaggagggcagagcgatggatgcgaccgccttcgcgccccggcccgtcccaagcagcacggatggctgcggcagagaagctccagcgaggcaggcggccaccgcacttaagtacagaggccaagcagtgtgcgggcaaggggacaaactcgctgcacccgcccgccaccgccttctgtgagggcccgggtagtctagcaaccgaaagcaggaagcggagaaagggcggggcggtcgggcgcttccggggagctaggcctcgcccccaaggagggagcggggaccccgggaaggtctgcaacatgtatggcgggcagcggctttcttcccctcatacatcacagccc

SEQ ID NO: 56053 - DNA, 916 bp, Homo sapiens
aaaataaatgcatactgacagtctttgcaatcaagagcctttaacatttctttagtttttatggcatctaatgctgaaaagaaaagaaacaatacattgaggaaaaaccacgctctatgcacaattacctgtagctatagctgactggctatagagaactggagaactgccaatggtagctgacctctgaaccactgcagtgctaatttctgtagctttcctctttattcctttagtggaagaagaactagagatggtggaatcaactgaactctgaaacacaaacatttgttatcagtggctgaaggccatggttaaacatagcccgctcccacctcctttttttgagacaggctctcattctgttgcacaagctgcagtggtgagatcatgactcattgcagcctcctgggcttaagcaatcctcctgcttcgacctcccaaaggtctaggatataggcgtgagccaccgtgcccggcctttaaacatatgcttctaaaataaaacatggtgtcaatcatgttccagtcctcaaaatcactcagaatgccaaagggaattacttacctggctagttacaactgtggtttgtgctgaaggtttcaaaggggtatcttcctctgttcctggggcagggggctcctcacttccctcatcctccatctctacctcctggatctcaccatcttccgcaggaggaggtggtggaggagggggtggaggtgattctggaggtggaggtgggggtggtggcatttccaagggtaatggaggttgaagcacaggaacatttgactgaaggagggtccagaatggagtaagtggcatgagtgatgaagaagaaacttgaccagaaaaggattctttacaaagagaacctatgaaaacaggtaagagtcagggaaaaagcaagaa

SEQ ID NO: 56054 - DNA, 3189 bp, Homo sapiens
taatcccagcactttgggaggccaagacgggggggggggggggccacttgaggtcaggggttcaagaccagcctggccaccatggtgaaactccatctctactaaaaatacaaaaaataaaaaaattgctaggcatgatggcactcgcttgtaatcccaactactcgggaggctgaggcagaaggatcgcttgaacccaggaggcagaggttactgcagcctgggccacagaggaagactccatctcaaaaaaaagaaaggacatttcattgacccaaataattgggagataataaacacagagctggaatctttttttttttttttttttgagacggagtttcgctcttgtcgcccaggctggtcaaactcctgacctcgagtaatccgcctacctcggcctcccaaagtgctgggattacaggcatgagtcaccgtgccctggagtctttcatctgcttacaaacttcaacatcaagggaagactcttaccatggtaaataaaaattattaatacatctgcatggccgggcgcgatggctctcgcctgtaatgatcgcttgagccctggagttcgagaccagcccgggaaacatgaactccgtctctactgaaaatacaaaaattagccgggcatggtggcagggtcctgtagtcccagctacccaggaggctaaggcgggaggatcgcttgaacccgggaggtggaggttgcagtgagcccaagatcgcgccactgcactccagcctgggcgacagattgagacattgtctcgaaaaaaacaaaacaaaactcttaaaaagttacatctgcaatacttacaaatacatacaaaaacagtaagtattctccaggctatgataggacctttacaagacacaccaaacactgctattgcggattttttccaattaacgaaccagcgtgatctctgaacatgtgaaacggtcgcggcttctccggcgcctagtcctggagtcacttttaatctaagcaccactccagtgagaaccacacaaatacttaggaacctaccagctccatttctccagcagttctgctagtgtggggatgcttactagctggaatattaagagctttttctaaacgtctctatccccgtttcgacaaaaccgaaaggaggcagatgacgtgtggaaaggcctggcccacagtcacaggccgcgcacgcggaaactcatcctcacatccaccctctgcgttacccaaaaccgacccggggcgtttgggagactcaggatgcccgaacttcggtcatatttcaaacgttcccggggcaagccctgcaccacagatggcgcctcgggcttggcccgggccgagggcgcagaactcggcctggcccttctgcggcccggagcccagggccgccccgcctgcaggcccgcagcaggcaggcctcggaagccgacctcgcccgcctccctcgccgggtctggccaggcgccgtgaggagcctaggccgcaagccctgagctcgagttcaggtccccccgcgcacccttgccttctgaaggcgagtcgtccgaggccgcggcggcagtcaccgcggtggtggtggtcgtcgccgccgacggggcgggctggctggggaccgccgcggttgagtccggctcagtgtcgggttccggctccgggtcccggcccggcgtgctgccccgaggacccggcggagagagttgcaggatgggcctacggccgggtaccgcccgggacttcttccccatcgcgagcccaagcgcgagcagagagcgtcgggcggccgagaggggcgggcactggaggctgggcgctgggccctgggcgctgcgacgcgtaatcaatattcatacaccgtgacaccgcctccagcccggatccgctttcaaccagcggagcacgcgcttgcgcaagcgcctcggacccttcggctcttctggctcctcctcaccaggagaaagggcgggattaccaactgcgctaggcgattggctgttttgacccagagaagggaccggtggccaatggaaaaggaaaaagggtgagagtccagccaatagtgcggtagggcctgaattagaacgacttccccacttccgtcgggttccacccatgcgctttccccaagccttttctttgcctacttgtcctccatcttgtggctattctcggcctagagtttcatgttgtctgtcttctagaaaggtgtgctgctgggcccagctcactcacgcctgtaatctcaacactttgggaggccgaggcgggtggatcacgaggtcaggagttcaagaccagcttgtccaagatggtgaaaccccgtctctactaaaaatacaaaagatttagtcgggcgcggtggcaggcgcctgtaatcctagctagtcgggagactgaggcaggcgaatcgcatgaacccggcggcaaaggttacagtgagccgagatcgcgccactgcaccccaccctgggtgacagagtgagactgtctcaagaaaaaaaagaaaggtgtgctgttttctgagcccttccccacgtttcgcccggattattgtggcttactttgggtatagcattgaacattaaatgggacagtgggtcttttacgcttttgtaatttcctgcagcacacaaatagatgtctcatattttctcgcttattagctgggaaaaatcacgagatactccactacctacaaggaaaaagcctaaaattgttgggatggcatacaggaaccttaccagttttgtactactatcgtcaacatgctttaatttacccttgctttaacactgccccctctcccgtctcctgcctctggagcccgccacttggagcatcacctccctcacttttcctttgcactgactggaataattactgcatcacatgatgaaagtcttttattgtttcatcagggcgcaatgcagacgcagtgcaggcgtgacctctcctgcccagcctctccctggcacttgacatcctgttgacatccgtctcccctctaaactaaggaatgcgagtggtatttatttttatatccgcagcagctcagttcccactaaaaatatctaatacttactgagctctatgtgtcagtcaccaagcactttacacgtagaattgcatttgatcttttaaaatgattatttctaattttatttttaaacgtgtcttgctctgtcatc

SEQ ID NO: 56055 - DNA, 1747 bp, Homo sapiens
cagttttgttcatttcgtcctggtacctagcacaatgcctgacatattgaagctcgaacgtatttgtacaatgaaggaagctgtaaagcactataaaaacataacgggttcatgtttaaaattggtcttatgggctttattcccctaagctacatttcctctgcttctggtgttgcttggtgtatgtgtgtgtgggggtggggggggggagggggagaggtatctcttctagaactctgtgtctcagttttcccgattctgatacgaactgaaaaaacaatctttctctttccctaagtgtcaattaccgcttctagaatagcactttgggtacagcgacgaaaatttatacaccaaaccctaccttccaggggagtttggcgaaccacaacacttaccaatgaatgaacctgtttctggttacggagaacaacttgccactctccacgtagtaaaagcctcccgcgctttcactgtattttacggcgccagccacggcatttgcagtccctgcaaaatgaacgtggtcagcctgcacacgcgtcttctgagaaatgacagggactaagggagctgacaaagcagagagtgacagactgacaacccatacaaagaaaagaggaaaacgtcggacatcaaggaatctctgatcccggggctagaggcatgtggactcaggaggatgaaacagggcgtcagggaccctgggacccatgagaggagcccgaggggacagatgggatcgcaccctccctggccatttccgtaccaatgctgcagactgtgaattcccgaaagtgcctcggcctttcgcgctcagctccgcttagctccacgaagctccgttccagggctcccgccgccgccatcttcccgccgtcgccgcgacgcccaacggaacaaaggcagggccgcgcggtcgccgtcacttccgggggtggggcgggcggagctgcggacaggtgaagcattccgggagcagaaaggcggctccggcccttcgttgcgaggcttccaccgggagaatgagggtgggcagcgaggaatccagaagagaagggggcaggggaggcagactctatctgcgggaaccttccagtggccggctggaacgcctccggagggcggtgctcttttctcagcggccgcagggcagggggcggggccgggtttgtttctgtttctaaaacgcggggctcagtcgaccaggaggggcgaggtccggggagtcccggcctttcggcgtcctctgccggatcccgggtttatggtcacctctccctcggttagggtgtccgtctgtaaatctttggcgatcctcccttcgctcttcagtggcgacacttgggatggcggggtgaggaaggggtagtgagggaaaggcctttggttttggtctttcccctccccaagagactgtattcgtgtattcctgtataatgaaacgtaatgtggtaaaccttggtgctgccacttgctgaggttacctgagtgctactcacttggatacgtgaaaggaatttgccattccttccacccgtgatcttgcacttggctgtcaatgcagtaagggcccatagtgggtgtttagaagatattgtgggagtagatgttcaaaatcgaggaaaatgctaatctccagcggggaaggttttgttccttagtgatagccaatagaagttaaagcacttctattaccagtgaccacaaccattccctgtcattctccgtttcatttatctggttc

SEQ ID NO: 56056 - DNA, 821 bp, Homo sapiens
tgcctcagcctcctgagtagctgggattacaagtacctgccactatgcccggctaatttttgtacttttagtagacatggggattcaccatgttggccaggctggtcttgaactcctgacctcaggtgattcacccgcctcggcctcccaacgtgctgggattacaggcatgagccaccgtgcctggcctgctaccacttcttgaccaaaaatttccctcagactcaatggtttatagctgtcagctgactcagagcagagccgtttattttcttttatctagaagcttagggaagcaggaaagttgtttttgtaagactccctagaaggtaaacatgatgacatttttttcattctgtttacaggacatattggcatgaagggaatttctgttgccaccacatgctgctgtttacctgtccttcacacacctccagccagccagtgggacagctgctgcagtagcccagtcttccagaacttgacctttttttaggggaggggagcggcgtggagagggagagtgtgggcaggcccaggcgggtgactctgaataagagtgggaggggacagtagcttgtttcctgaaagccaccaaaggaaactctgaacttcattcaccaaatttttcaatcaatatatatttatttaaaaaaattgtgactagaggctgggtgcagtgactcacacctgtaatcccagcactttgggaggccgaggcaggtggatcacgaggtcaggagatcaagaccatcctggccaacatggggaaaccgcatttctactaaaaagacaaaaattagctgggtgtggtggcgtgc

SEQ ID NO: 56057 - DNA, 1428 bp, Homo sapiens
ttcttttacacttttcatagttcattctccacacaatagctagaatcatcttttaaaacatagatcatttcactcttctgtgaacatctttttacttaaaaaaaaaattttggggggacagggtctcactctgtcacccaggctggagtatagtggtgtgatcacagctcactgcagccttgaccttccaggatcaagtgatcctcctgcctcagcctctcaaatagctgtactacaggcacatgtcaccatgcctggctaatttttgtatttgtgtagaggcggggttttgctgtgttgcccaggctgatctcaaactcttgggctcaagtgatctgcctgccttggcctcccaaaatgctggaattacaggaatgagccactgtgccatgacctctttttttttttttttttgagacagagtctcactctgtcacccaggctggagtgcagtggcgcaatctcggctctctgcaggctcgacctcctgggctcaagtgattcttccgctctagcttcccgagtagctgggactacagaagcatgccaccacgcccagctaatttttaaatttttttgtagaaatgggatttccatatattgcccaggctggtctcaaactcctgggctcaagcaatctgcccacctcagcctcccaaagtgctaggattacaggcgtgagccaccatgcccggcctgtgtgatcatcttttatcagcttcctgctgcacttggaatagaatcaaagctcctggccaggctgtttgagctggcccctgcccaccttcctgaccttatctcctaccaatctcccttgccctcgttacttccttcaattcaccccgaggacatgagaagcttgttttcaggggcctttgcatttgctttttcttttgtctggaacactctgcttccaggtctctgcatggctgtccccttcctactcaggtcttccttaaatgtgtgcccacagagaagacttcctgaccactaggtccagcgcagccccagtgcctttctgtcactgcaccctgattcatgacgttgtgtgtgctcctgctatcacagcctggccctcatcactgtctgcaataatcgtactcctgtgtttgcttgtttattgtccatttttccctctagaatgtaaactgcatgaggatagaaatttctcttgttcatcacaccagtgcctacagctatgagtgtttggcaatagtagggatgtaggccgggtgtggtggctcacatctgtaatcccagcactttgggaggcttataaggtgggtgggtcacctgaggtcaggagttcaagaccagcctggccaacatggtgaaaccccgtctctactaaaaatacaaaaattagccaagcgttgtggcacatgcctgtaatcccagctacttgggaggctgaggcaggagaatcac

SEQ ID NO: 56058 - DNA, 717 bp, Homo sapiens
cttcatgtttagtggtcaaagactgtattgtcaatgacaaagagaaagaggaagaactgtcaggctacagagggccagatgcccagttctcaagaccccatgggcaggaggggaacaagaagaaagtgggaagctctgccctactcctccccatccccagatggggagggatggagaggcaagagaaaacctctctagatggcctttgttcacacttacagccaagcggtatttattcagcaccgttgggtgctagacaccgaggatcaggaactgcatgcaggagcaaaactcatctcagcccttggtgctggcaggttagttagtgggagggacagaggagcaaacagattgtgaaacctaccactggggtcagcagaaggatgagtgatgtgttcaaggttgcaggactgtcaggtgattcctgtgatgtcttcacaccgttgtttctggcagaaattgcctaaaaatattcactccttcgtcaatgagctgtgatcatgtaaggtttctataaaaatgatgattatggccaggcaaggtggttcatgcctgtaatcccagcactttgggaggctgaggagggaaaattgcttgagcccaggagtttgagaccagcctgggcaacatagtgacacttcatctccacaaaaaagaaaaaaattagctgagtgtgatggcgcgagcacacctgtaggctgaggtcacttgagctgg

SEQ ID NO: 56059 - DNA, 1266 bp, Homo sapiens
catagaaaacaacaaatgtggcggctaggcgcggtggctcacacctgcagcccagaactttgggaggtcgaggtgggtggatcacctgaggtcaggagtttgagaccagcctggccaacatggcgaaaccccgtctctaccaaaaatacaaaaattagccaggcatggtggtgtatgcctgtaatcccagctactgggaggctgaggcagaattgcttgaacctgggaagcagaggttgcagtgagccgagatggcaccactgcactctatcctgggtgacaaagtgagattgtgccttaaaaaaagagagagagagaagggagggaaaagaaaacaacaaatgcaaaggccttaaagtgagaccaggtgtgttagaggaaccccatggacatgccacatactattctaagttttctcactcctaggagggagatactattattgttcccatttacagatgggcaaattgtgaccagagatgataagaaacttgctccaggttgcataagaggcagaggtagctgctgaggaaggcagagtttgtgctcttaaacactaagctattaaatcattaaataaatgatttcattagcctgggtagacccaggtaccaaagatttatacctccagctcccagtgaactttccaagcccttaaggaaaaccccgggtgtggttgtaggggagggagtgactcaggccttggctggcttcctgctgagtcactactcctgggcccaggagggaggctcaatcctcatctcttcgcagtggcaggttcctgcctttttgggggaaatgtctggcgccaggtcttaaccgcacaccatcggtggatgaatttgtctgactttcctaacagcttcgttgtgaaattgtgggtgcgctccatttcctaatgtgacccttcagccagcaagagggaactttctgcccagcctagcacttcattctccaaggtgtcctcgatggacaggttctgccccttgacaggctggctggcttccatctcaggtcaaacagctgtgtgcttggcacgctcaagacaaagttgagcaagatgccaagggagccacacgcattatcctgggcctggtgatgctcactccagacacattcacagatacagcaaagaagaaatgggtaaggactgtgatgtggatgccaagtgccatgcaccaagttggttaatacttcaaaccaagagtcagccaggcatggtggtgtgtgcctgtagtcccagctacttgggaggctgaggcagga

SEQ ID NO: 56060 - DNA, 3209 bp, Homo sapiens
gttggacacctcgtggtctgcatcttgctgcacacagaatccagcctagactcattatcctggcctttgaagtctcccccagtatgaatcccccagcctcccattcctgtttctccgaaggccaagctcgaagcatctgctgcctcgtttctgccaagttggccccacctcctgagacacttctcccctctactggcctggtgaaactcaacacatccttcaaagcccagctcaggtgtcacctctctcctggttggaattaacctcttcctccttagcactctctggtttggccctttctcttgcggcttctcctgggcaagtggcatagcctccctgatcctagtgtcttcctctgtgcatgggcacaggagtaatatctgctgtgatctttaactcctgtcagttcattgacctctttaacaacgtgatgaaagcttccagaagagctaatgtatgtggagtcccacgatgtgtcaggctaggtgtttaggactttactaactactgtctcgtttaatcgcgaatgcagtggacctctctctccacacgtcctagtacgatctttatttcacacgggaggagaggagggtgggtggggtcggccagagaggagaaatgcgtctccagagttcacagggctggtactaccagcagagccccgtccaccatatgccacagctggggttctaatccctggactggcttgtactgggctctctgcctccctggccggcgctcgggggctgggggacagaacacaatgtacagcgtgccttctacaatttcggggttcacgcacccccaagcccacccagggccaggtcaaacgcgccttcgccgggttgctgtctacaatcaggcttggctgcgctctcagtaggggtctcggtcaacctctgcccacccgaacccggcgccgtggacctggtgtgaggctggggagcccgtcctgaggggtgccggctcgaggcgctagagccacggagcctggtcccgggctccaagtcccaggaatgtgggagggctgggcggaggggcgggcgaggcgggagcgcttcctctgcccgcgggaggggatccgcggccggctcggagggggcgggggcagcggcgggcggcggcgaggggctgcggagctccgcagccgccgggccggccggggcgggaggaagcgatgaatattcagagggggaggggaagggagggggccgagcgctcgccgcggctccctgcagcagccccagccgcatgacgcgcggaggaggcagcgggagcagccgcgggagccgggaccgggtagccgcgcgctgggggtgggcgccgctcgctccgccccgcgaagcccctgcgcgctcagggacgcggcccccccgcggcagccgcgctaggctccggcgtgtggccgcggccgccgccgccgctgccatgtctccggggaagcccggggcgggcggagcggggacgaggcggaccggctggcggaggaggaggcgaaggagacggcaggaggcggcgacgacggtgcccgggctcgggcgcacggcggggcccgattcgcgcgtccggggcacgttccagggcgcgcggggcatgaagccggcggcgcgggaggcgcggctgcctccgcgctcgcccgggctgcgctgggcgctgccgctgctgctgctgctgctgcgcctgggccaggtaagcgccgggtgggctcgggcggggggcaggaggctggggcgggactggcattgactgcacctgcccgagcgtacccccccggggggttccggggaagggggcgggggtccggatccccggatccccggaaggcgacttgcggggaccccggccggcctcgcacgccggcgatcgatcccttttccggctgcccaggatcgggggagagaggcgggatccgggtgccgcggtgcccgagcctcccggggaaagcctccgcgcgggctccaggccgtccctggcccggctcttcccggcgctgggcacatctggcgggcacgggcccggcttcctagccggaggcggccggagggggcgtgtttgcggaggtctggggacgcagagccgggcggcctggctgagcctttgccgacagacctccgacccggcctgcaggggcccgaggggcggcgggggcgacagggcagggccaggcgctgggcagtggggccctgggcgaggcgcgggactccgggccgagggccctgttcctggggaaagttcccaggccggggaaaaggtggccgcacgctggcttttctcaaggcagccggccctcttggcgtcgtgcttgatttcatgggtgtttaattcgtgctttgtgggcgctggctccccctccccaccccaccctcaccctcttttctggcttcacttttcagataatgctgtccctggcgttttggtgaccgacctttccccttcctggcatttccataggggctgaggcagagcagctgaaggggcattcccatttcacagatggggaactgagggagagaagtgaaatagcggagcacccagcccgtgccatgggagctgagccagcgggcacgtcctcttagcctctggagcctgttggggtttgaacccgcaggggaagcggtctagggctgccttgctgtgcgtttctgcaaatgaccatcttgcttgttttatacagacaccatctctgaggaaatgagttattggctggggatggaacctggtttcagggaaaacttctccagcgcgaatacaggagagagcagaagcatcaccctggggcagcaatgccgcctagcaggctgtaggagaagggggctggggcctgggggctgcgtgaccctcggcacccaagggtctctcctcgcagtttccccagcaggttctgcacaggctctcctgggggccagaaggcaatgtgacctcctgcagagaacctgggagtagatgtcaggagactggctccagggccgggccacagggctggacttgctcttcaggcttctctaccctcagttaaccgcatctgtagaatgagtatagcaccctctgcccaatggaattgtttgaggggcttccactggccaatgtctaaaagaactttgtaaatattaagggtttccacatgggattctcattattaaggtacagtgcctgtgggggctgtcttctccctgtccatgtaaggaaattcagggaagcagtgtctgaag

SEQ ID NO: 56061 - DNA, 3006 bp, Homo sapiens
tgcaacctccacctcccaggttcaagtgattctcctgcctcagctttctgagtagctgggattacaggcgtgtgccaccacgcccagctaattttttgtatttttagtagagatgggacttgttccttaggaaccatgttggccaggctggtcttgaactcctgatctcaggtgacccacctgcctcggcctcccaaagtgctgagattacaggcgtgagccactgtgccaggccccattttttgttttttggttaactccctgttcattaaaaaaaaaaaatctatatctatagatagatagatatagatataatctttgttatcaatttgtataagctctttggaaattagtccttcgattgtcatttgtattgcaaacacattccccctcccccatgccaattattttagatgtagcacttgttccttaggaactcagagataaataagaccctagggtggtgaagagagcatagaatttggaacaagactcctttgttggagtcttggctctaccacctcattagctgtgtgatcttgggcaggtatcttgacctttctgatccttgctcttcatattccaaaaatgctaataataggagtacctctgacacagggtagttggagaagctaagtgtgatcatattatgctaaaattccttgtaaatggctatggaaacataaacacagcattttataaaataccacgaggtattccatttactgaagagttacatcagaagagtatttctgattgtgccactgcactccagcctgggcgacagactgagattccatctcaaaaaacaaacaaacaaaaaactagccagtcatttataagaatgagttacagctataggtgcaggcggtaaatactctccaagatatctaaataaattaaaaggctatgtagagaacaatgtatatataatgttacctttaaagtgacaaaaaaaggtgaatatagatacttgtgtatcagaagagagaggtattccatttactgaagagttagggcaaagaccataatattgtaattatcaataattatgaattgtcaaaattatgtcatgaaacctctttttttcttttttttgagggggagtcttgctctgtcacccaggctggattgcagtggtgtgatcctggttcactgcaacctttgcctctgaggttcaagtgattcttctgcctcagcctgggattacaagcatgcgccaccatgcctggctaatttttgtagttttagtagtgacagggtttcatcatgttggccaggctggtctggaactgctgacctcaagtgatctgcctgccttggcctcccaaagtgttgggatttttttttttttttttttggagacggagtctcacccagtcacccaggctggagttcagtggcgcaatcttggctcactgcaagctccacctcccgggttcacgccgttctcctgcctcagcctggctgggactataggcgcccgccactatgcctggctaatttttttgtatttttagtagagacagggtttcattgtgttagccaggatggtctcaatctcctgacctcatgatccgcccgcctcagcctcccaaagtgctgggattacaggcatgagccaccgtgaccggcggaaagtgttgggattacaggtgtgagccaccgcgcccggccccatgaaacctcttatattgggtttgagattaaatccacaatggattgtgtgtattatatatacacacacagacacacgcaaatgtattaaaatgtataatatgaagcagtggaacttccctgatagcacaatttaaatatttcctttttgacaaacgtgcatagttaaataaattaagtgaccaccaggtgtgactgaagagtggccagtgtctattcctagccccgaaggagcacagggatattgactgtgtcccttaaaaaaaacaaaacaaaacgtagggctttctttgtattggtttgaacatttctctttatcttgtgacctggccaactctggctatggctgcctcctgtctctcggtacattttctgtggcggtcaagaggagttattttaagccaccaatgggaaagtttaaagacataatccttggctgtaattgcgggagacgggaggctgagagtctgtgctgacttgccacctgtttccacggcagcaaggtgattgtgcatttcctgctgctggctgaggggccagcaaattttcatgtcgttgtgtcatggggaagttttcctgtctcaatgagagcacaccgtgcttgtggtcttgttcctgtgaccaggacatggagaactatggggagattgttctgggtgtgaagggaaattgctggccagtgcttagtgcacgggctttggagtcagagccaacttctccacctcctacctgtgtgaccttgggcctatccttctaatgcttggagtctcttctgtcctcatctgtatgatggggataacaagaatacctactttataggattgctgtggaggattaaatggatctgcatgacaaatgcttagcatgaaaaaatccctcaacagatattggctgctattttattatcttattgtgctgagacactggcataatttacaattcaaaaattaaatttttttaatcttatactgtagtttacaaggccctttcacatatatgagcttgttcaatcctcacagcgtccttgagtttgtcattgttattgccatttaaaaaggtatgactcagagtggctgtaattgacttgtccaattcaggtttcatctgtcttttgcagaataataatcatgtacgttcatagtataggccacctctttttttttttgttttttaagacatagtctcgccctgtcacccaggctggagtgcagtggtgcgatctcagctcactgtaacctccgccttctgggttcaagcgattcttgtgcctcagcctcctgagtagctggcattacaggagcccgcccaccatgcctagctaatttttgt

SEQ ID NO: 56062 - DNA, 715 bp, Homo sapiens
tggatttggtagagagctaacactactgcatttgtagtttatttgtttgtttgttttctttttgagacgagtctcactctgtcacccaggctggagtgcagtgttgcgatctcggctccctgcagcctccacctcctgggtttaagtgatcctcctgcctcagcctcctgagaagctgggattacagatgtgcaccaccacacccagctagtttttgtatttttagtagagacggggtttcatcatgttggccaggctggtgttgaactcccgacctcaagtgatcctcccatcttggcctcccaaagtgctggggctatagggctgagtcaccgtacccagcctgcgtctgtagtttaaatgataacttaatgaccaccatccagtagctgaggctctaagagggaggtctgaatagtgggtgactcagctcagccctgcctgacctctagctctaggctgtgctgtctctaggctccggcactgatttgcatgggcctgaatgaaccttctggagattgttagcccaactggctgaaggatcctgatccccaggttaatttgattcccatcaaacagttcatttttttttttttttgagaggcagtctcgctctgttgcccaggctggagtgcggtggtgggatcttggcccactgcaagctctgcctcccgggttcaagcagttctcctgcctctgcctcctgggttcaagc

SEQ ID NO: 56063 - DNA, 3160 bp, Homo sapiens
cagagtttgggaccagcctttcgatgtcttttggaagatgcacatggaatgcttagcctttgctcttccctggaacctggcttaggctttgcacctatcccaccatgtggttggggtgagtgaggacaacttcttttcctccagaacatggtttctccatctcagccctattgacattttgggctggataactcgctgttttgggaggctgtcctgtgtgccccgtaggatgtcctgcagcctccctggcctctgcctgctaggagccagtagcgccccctcccccacagacaaaaatgtctccagatattggcagatgtcccctaaagggcaaactacccttgctgtaggtaatacttgctttgaagtactggtgtggatggcctatgccctggcagtcttactaggtgggactggctgtcctctcattctcatgggattggcctcatgctggtagctgacttcctccccgtgagaccgtaggtctaaactaacaaggtttacacatgtgacaaacatccaggttgccagggctcaaaagagggttcacatcgactcccttctcattcactgagtcctttttcgggagctttggccgagtttgtgctgcgtctgggcatctaggtgtcgagttcttccctagtgttttcagcctcggcttcctcctctgtaaaatgggagtaactgatacttttcctgtctgggtgggaaaggaaccccgtgctaatgtgattgatggtgtggtgctaagctctgctgcaagggatgtgaagttgagggaaaggtttaccatttattaggagctttgagaccaagttccttccacacaagagatatgccctgtcaaagggagatcccattgcaaagagattcactgccaagttccccctcccactagctccctggagcaattttcagcttttagagtgtttagaggcctcagggtgtaaagcgagagagagaatgccttccagccagcgagagagaatgccttccagccggtgacattgagaatagcaggaaagaggcagaagaagaaactgacttgaagggtgatgccagccaggggtgagtggagtgaggtaggatttgctttctgaaaactgggatgtgcacacaacctatcaagaatacttcactttgtgaggcccaaaaacagctcctagcacagtgtagagcagacttggtcagaacttcaatccttgatttttttttttttttaacccgaatttcatgaggtttttctgagacatccactggactgtcatataccgtgtgctgggctctcattttatccttacaattattatgttcattttaaagacctcatgttagctagatcagtagggtgactacagtttacagtaatctactgtatatttcaaaatagctagaagagaacaatttggttctagcataaagaaaagacaaatatttaaggtgatacatatcccaagtacattgatttgatctttacaaattgtgtgaatgtattaaattaccacatgtgctccaaaactgtgttcttgaaaaaattatcacgcccattttagagatgaggcacagagaggtggagggacttgcccagatccaggtatgtggctctcctgtaatctcgcttctattgctttgtgatcagcagcaacttagtagctttcaaagcttcaattttcttgtgtgccaaatggggctaataaataccttagaggattgtgatcaagattccgtgaaaaaatgtatgcagtgcccccggcaaggtgcctggcatacagaaagtgctctgtacgcaccagctgctgtcattattattgtttcaactaccagtgatcataaaggatgcctgctttgatgagcttttccaggaatatggactggtctgccctgatctacttgaataatctgtctcaggccctattcggtaaatacatgtaggaggtgcagctgccagggaagggagggatgttacctggagaggacagagtctgaagttcaggaaatacagcaagagccttcctcagggatgaaacatgtgatcttatggtctgactagcctcaagccagctgagctcattgccatgcaacttggtagttaatgattgctagtaagaagtttaaaaggatcatcccctcaaagaatgtcagagttggaaaagaccttagggacattaggctaggaaagacaatgtcctagtgagtgactgcttgggccctgtatagaagggattctcagatcacttgggatgtcctggctcagcaggaggctaaggtgggatcaattagtgatgtctgccatggccacaagagaggcaaggagtggcacatgtgctgtttatttgctgtctttggctgcagctgaggacactgaggcccaagacttgcttgcttactggacgatcacccaagtcattaaaccacaaaaatctcttttggaaggaatctgttaagaatgtctgattataagagttgcacctttgagcaagtattttttgcttgatagtcttcagtgaggaggaactgtcttcaaagagcacattctgtcttttggcaattctcccaattagaacttagaccactgaggtagaaaggccttagaagcccctttaagtgggctcttctcaactggggctgcacctgagaagcttttggaaaataccagttggaggctccctccccagaccagtggattctggatatctgggtgtatggacacctcttgcccccattggtgttttattttccaagctcctcatgtgttgttaatatgtagccagggttgagaaccactgagaccaaaactctttggaaacagagacccagaaagggagaacatgattgtctatgggtatgtagggctagtggcacaaggagaaggaaaactaggggggaaaaggcctttatcaaatgccacccatatgctagtctcttttactttcatgccgagattcttctttttttttttgagtcagagtctcgctctgtcacccaggctggagtgcagtggtgcgatctcggctcactgcaacctccgccttctgggctcaagtgattctcttgcctcagcctcctgagtatctgggagtacaggcttgtgccaccacagctggctaaattttttgtatttttagtagagatggggtttcaccatgttggccaggctggt

SEQ ID NO: 56064 - DNA, 809 bp, Homo sapiens
ccccacgggactgagggtaacatgagggtaacagacaggtgatgttaaattccatttgggctcatgttcacccccaggccccttattttctttcaaacacatggaatgggcatttagaactaggaagatcatgaatctggtggctgtgtagatgccataccaggtatggaccacaggcttggagcgcagcagcatacaggggtcagaggtcaaggccagtggtctatcagaacccagttcctgcaggagccagtgccggtactaggtagactcagatgactgaatggtcctcgggatctgaaggccagtgggggagatgaggcctggcctcccggaagtgctcagtaaacatttgttaatcatttcctgcctagggaagctctgtggtatgctcaggagaatcttgcttctcatgggggaatgggtggttgtcatttgggtggcctgactgccagcctgcttgctggctctctgggagttggggtggtggcatcaacctgcagaggcggggcagtggggcagctcacggctgtgtgggtaagtaagcagtgagcacagtgagggagctgttgccaggagcctcttggcttagtgagccaagcagaaccatgtgatgcaccctgtgggcggccacctggggactcaggacatgcacccagatccctcctcccctacccacttcaaagaaagtgctgccctcccagtggtgatgaagaccttccgctggccccagcctctgggatctggcctttacttgggtattcatgtggccctgggggttggctttgctgaagttgggcagagcaggt

SEQ ID NO: 56065 - DNA, 615 bp, Homo sapiens
ggcatgagccactgtgcctggccctcttctcctttctaacacaagcctgcttctcagtttcacgcacacataggagtggccacctgaccctgtgttggcaaatgattgcaggctgttgtcaccggtggggctcctggaaaagccctctatgggggattgactctggcatgactggggtgtggatgctgtgctcagaggtgctgcagtaatggttctgctgctgctgatagtaacacaggcagtgctgtgtcatgcacagtaatcctgtaagggagatactatcatgatctctgttcggtggatgaggaaacagtctgaggaaaggcacctgacctgttcaggccacacactaagtacagagctgggatcctggcaccagcatttgctctcaccacctctctgttatgtacctctcacacaggtgcgagtcccaccccagaggggccttgagaggctgcaagtgtcctgggtgggctgcctgcttcaggaggacttattattggggaaaaataccccccctacttattactaagggccgaatgctttatgttcacacaacaactccatgttgtgtgactttggacatgttccttaactttctttatcttggtcttc

SEQ ID NO: 56066 - DNA, 1331 bp, Homo sapiens
agactccatctcaaaaacaacaacaacaagaacaacaagaacaaaagaaaaaacccctaactttggagaggttatctcctgaaaaggagggttttggtctctttctcgcactgctctaaaatagtgactggcacatagtaggtagtcagtaaatatttgttgaatgaatgaatgaatgaaaggtaattggccttccctgctcagttctcattaaaaattctggttttcacatatatgggcagtgtcccaacaggctgctggggggtggccgtttgtgatggcctcaccagtctttcccagagagggaagtgcacatttttaggctacttttgctctgactgatacacttggctgcctaacaaaaagccagagaagaactaagatttttagcatcattcaaaatgcttgccattccttttgctttgtgaaatcatgagctagttattttgagttcacataaaggtcagaacttgatctggggaaggaggttccccttggtttatgtgaggggaactttttcgcccttctgtttattttatccaaaggcttctgtttttctcccaagctaaaatctggcatttgttgtagaaagttctcagcttatgtgtgtgtgtgtgtgtgtgtgtgtgtttttaaaaagagctcatattttggctttagttttgattctcagtgattttttttttctgcctgagagttgattttctgcttcttcaaagtccagctctcaagtgggtgcctaaagttgtttcgttttagaggtgacttaatcattttttaggcctttaagtgctgctcccagcttgtgtttccttctgtttttagtttttatgtggggcagggtctccaaagtacacgggctcttttccccacccctctaccctcattttaactgtgcatcaaatgggtcctgtttcttcttcatgtataattttgtgagtcagggaaggtggtgaaggcccttgaaccctggctttgtcatggcccttccttaaggacctgaaggtctcttctcctaagggctaggttggttcagaaagtgagaagggctggaccttttgtggggagaggatacagcagggtccgaacagctgggctgacaccgggcagcagcccagcagcagtcggagctgcagggtcagctcaccatgggctgaacttgggcattgcctgtttaggcagagtctgcccgagcctttcctgctccctgagaatcctcagcatgttttcctgctgagcaaggagtgaggaatgaagcccactacgaagcccgagctgcaaatgtatttatttatttatttatttagagacagagtcttactctgtcgccc

SEQ ID NO: 56067 - DNA, 1423 bp, Homo sapiens
tcctctgtaaaactgcccctgacaccccggcaggattgaattcctccacctttaagctcccagagtaccttagctctgtctttagcacttcacactgtgtcatgcctccccttgggccctaaggccaagagcatgtgccatttatttttgtattcctacttctatagcccagtgcatattgggggcactcaggaattgctgagcgaataaaagaatgaatgaatacagacccagattgtcaatgattctcaaaccttattttacaaaagaatcacttgaaaagctggttaaagatcaaaactcctgagccctactcctggtgattgactcctaggtttggggtgggaccccagaatctgaatttcccggaagcgcccaggtgtttctgatgcgggtggtctgcaaaccacacttgcagcaaccctggcacaggtgcccagccttctggaataaagacaggaactaagcattaaaaatagcacgccattcatttgcttgtgccgagccgccaagtgccccctcctgccggcgacaggtccggatgtgggccagttctcagcccagggaaaatgaacagtgtcttctccgtggtgcccagaacagtctgagtcagtggaatgtgctggccagtcaggcagaagggaacttccacttcttttttaaaaccttggtggaaactgtgctggcaaggcaaacagggaggagaggaagctccatgtggggcttgggcttggcggacgacttggggctggccggactttgggtggccgccgaggaccattgctaaatatgcccctttcgtcctgaaatagtcacttccccggctggcttttgtgttggtcggtcgccacaaatgtgtggctgttgttcaaggaggcctcctgggatataaaaagagagaatggggccaggctgcggccagggctgtgtaggaagacaggagagctgccttttctcctgtcccaccacggactcattgtaagattcagagggagtggcttctgggccctgggtttacttttccatctgtaaaatgggtggggggaaggggcagcatcataaagcttctttcttctcctgaaagggatgttttaaggcccatgtcaagattgaacacagggctctgttgttgggctgatgctactgatgaagtctcaggaagctcgaagtttgtagttaactctttcagggtagatgtggtgaatagtctcttggtattgtgttgatggtggcccactagaacagaaggtcccagagggcaagggcttggtctttcttcttcctctctgtatccccactgtttagaactgggctgggtgcagagtagtctccataaatgtttatggggccaatatctccaaatattggcacctactaagcgtcagtcccatctctcttttgtcttcttcacaggtttaacttg

SEQ ID NO: 56068 - DNA, 1661 bp, Homo sapiens
ctaagatgagagtgtaagtgagtaaactttctcaatcaaatattttgtgatatgtttcaggaatttcattacatgtttggttcaatttttaaagcatttctttttattatttaaaacttttagcattggtgaccatccatgtgctgcttttattgccagcttaacttgtttttatgacatcttcaggaagaaaacctctgctgtctatttaatggagatgaattgttaaacttttaccatttgcaactacacgtctctatgagtcagacttttattgatcgtgtacaactaaatgaaacccggaaatgaaggaaatgtaacaagcgattttatgtattttttgtttgctcaaattgcctttataaaatagattgatactctataataagcaaatgttgtgaatttggaattttcaaattgaggcttactaataatgttaactattttatccgagtttatttgggtttcttataaaatgtaatttctcaagaagattttgctgccctaaaaaaaaaaaaaagaaaaagaaaaagacaaaaagggaagccactggttgctaatggctcctgcggctctgacgatcctcgatgaagtgttctttgattaagtgtcaagatgagtggtgcagacctttgacagacacatgattgtggttggagaaagcccagcattaactgctgaccttgccatctgtgagcaggtgttgaatgagctcagttccctcccagcccttctttttccctggtgggtcattggctcctgagtaagatagatgcatgcaatagaagagctgttaatagcatttactctttcttaatccttattaatcccattcatatttcagtgtctgaaacttggcaggatgtcaagaagccacagtgcaagtagggaaattgaacagcaaggaccaagtacaatgttcccctgatatttaatttgctaaaacatgtaagaagaagaaagttcttacattgttaggtcccaaagagagtgccactaagcaaccttgccaaaaccaccttgctggagcttcttattatctttttttagcgaatggcaataaagtcattttgtcaagctaaccaagtaccataatgagatctttgtggcataaattaaccgagtggggaaataactttgacaggggttgatgtccgaaatgaagtgttgtttgtctgatgtcaagcctgtggggaatttgaaccttgcactctttcctgataagacattaacctctgcatgggcttgctggcccaaccttttgattaactggacctattttcttgtagatctaatacaaggatttggagaaccccagtaaaatgctggagggacttagactctgatctctattgggatgtgtcaaattggagatttggtgggcttttctgctgtgtttactgcgatgggtgtgtgtatttgaagtctgtatgtggcctttaaggatgtgtttggggcgcagaagttctgggtaacagagaggctctcaaacgttagattttggattagactttgggtcaacttcagggtagcaagaggatggatacccgagaacatgttttctccgacttcctggcccctgtcttctaagttctgggtagtgatgggtctttggaggggcagccctttctgccatgtgaatctttgcccagccctgaggg

SEQ ID NO: 56069 - DNA, 2110 bp, Homo sapiens
gcctataatcccagctatttgggaggctgaggcaggagaattgtttgaacctgggaggtggaggttgcagtgagccgagattgcgccattgcactacagcctaggcaacaagagcaaaactctgtctcaaaaagaaaaaaaaaaaaaaaaagatcaaatagacttccaagtgcccatgtctcaggttcagtactgatcagcattttaccctcctttgcttcagctccctcctgtcattgctcattgctgagagtgggtaaggggctttctcaggttcctgtagctggtaggatcccgctgtcctcaaagttcctgcactcagtggctgacggtgccaggtgactcccccttttggggtccatgacatttgctgctgtttctaaagcccctactgtgtgctgctaatcccctcaccaagcttgcagagcggatggtaactgacaggtgaaaaaatgcaagaagttaggtcacgggtccggggacatcctgctaataggtggtggtgccaggcttcaaactcaggcctgacttcaagtcccgcagcttctctgccccaccctgtctctgtcctcctcacctctgtagtgtggtgggactcggtggggtggtcgtttgactgtgggaacttctgtttgcaaagccttggaaggacccaggtgactgcagatagttccgtgagaagcatctgggactgttgacctcactgctgatcttccttgtgagcctgtgatagggctaacccttggctttctggccagagtgtagacagagacccgattagcattttgtggtcagtcagaggcagtttgtgaacctggaacttggaagctggtttcctcctctgggagggatgtggagcctggggagccaggaaggcatggactgaatatacacccagctgggcagtggggaagggaggattccgtggggagctagccctgaacacagcaagcatttggtaaatggtgcctgttagctgtttttatccgtattctaaggtggacgagcggcgcaggagagaactggtaggattaatggagtggtttcattattcagatttaagtgcatgcagccagaagtcttcaactgaagaattgaaactctctgctcttttttgggggtcatggtggcagtgtgaggggctggttcatgagtgaggagaaaaggtagtggcaggcagaatggtacattttatattcatattgtgcacattattcacacctgacatgggccagaaatcctctcctaagagagacacttggaaagtaaacagtttgttaatcatttcaacccgtggactttggttgcagggtgcattttgatcaagggttacaaacaccaatgtcttcagggacatttggggacataaataaagggaatggacaaaaagatggaaaagcatactgcctctcagtctttcgcatgctcatgtttgatagagaaaatcaacatcgtgggggcagtgttgcttggcaactgccatttgtcctcagcgttggggtgacattactagggaatggctgtgaactccaagcacttccccccgggaagcgaggctgacactcagatccaattcatgtctttaatgtggccaaatgagaaagccagatgtatttctgagaagccaaaaaacaagatttaaaaaatgctatctccctaatttttttttttgagacagagttttgctcttgttgcccaggctggaggacagtggtgcgatcttggctcactgcaacctctgcctcccaggttcaagcgattctcctgcgtcagcctcccgagtagctaggattacaggccaccatgcccagctaatttttgtatatatatttttttcagtagagacggggtttcaccatgttacaggccaggctggtcttgaactcccttgaactcaggtgatccacctgcctcagcctctaaaagtgctgggattacaagtgtgagccactgcacctggcttctatctccctaatttttaaatacttaagattttaagaaacatcacaggtcaagcaatgcatggcagtgggctagattcagacaggggagcctcaatttaggacccccagatttatcatacaaggtggaggaagggttcagataggga

SEQ ID NO: 56070 - DNA, 817 bp, Homo sapiens
attatacatcaattatgttcaaagtaaaaaacaaggtaatttgaaacagctgcttttatccaggtgtatacacggtgtatacatacacagatatgtatgaaatgtggaactctatacccgtatgtatggagttcctcctaagagtctttttgagaaaatagttccattgctaaaaatacccaatggaaacttctggcctgggatttccaagttcaccctcggctgtgcgtctcaaagtccacacagcctcaccaaaatagcccttctgggtacttttttctgtgtgttcttggaggaggccatcgtgcctccagctccctaaggcggaagatgagccagcggggatctttgcagggtggttggttctcgttccttccaccgaagccttccatggcatttttgggacctggaattgtgaattattctgcctcttccccacagtccctgatgacagcatgaagttcagagagtttatttgcagatgaggcagggaagccggcctgttctcatcttgctgtgcctgatgccttgtgcttggggcactgttcactgtgctgcctgctggcctgcttgtctctgccttttggatgggagataggccaccccacagtgccacacctgccttcagggaagcttttgggtgttccttgtctggcttctgggttcagtgggagggcccacccagcctgtcattttaatgatttaccttagaggagccagttttatagggagttgttggataatcttcacaaggcagataaatgggagagcaggaagaatgatggcctttcagagttgaaatctgtgctgctccaaa

SEQ ID NO: 56071 - DNA, 967 bp, Homo sapiens
agttggatcaagtctgcaaatcagtacccaggaaaaacagcaaaagacccgctggtaaagacctgtccagattgctgacctggttcacacagttcccaagcttgcctctgttacttccaaggaagaaagaatgcacagagaggtaaaaaaacaaacaaacaaacaaaacaaaacaaaacaaaacaaaagcaaaaaaaaaacttcctctgtcttgcagggctccagcacttggaaccttcctacgcccagtttcaggttctctcagttctaccctcaacctgagtgactgtcctaccagcagcttgtcgagaactcagccctgcaccgttcccagctaccctcctcctaactcgaggggtgctcaccccacattaccccgaccctaatcgccgcccctggggaagaccagcaacaggatcccactcggcagctgacccgcgagtcccagcaccgcggcaccacggggaagactccgaggtttgctccgcgaggcgcccccctaccgaagaggaagccgaggagaaagaagccacccgccagcaccagcgccccagcgcacagccagcgcgggcggcgcgcggtggccacagccgagtcggtttcgtgaaggagattccacatctcggcgcgagcagagccggcctcccgggacccgcgcctgtgctgctgctctactgcgcgccctccaaccaccacggcggggtaaagtctctctcaatctcactaatgcctcgcttatcagccctgcaggctggaattcgctccagacctggggtccagtttctccaccacagcagtgtttctagagtgcactgaaccaatccgagcgagagagagaggcaacatctgcctccaggagaaggaaatccggccccttttgagaggcgccttaaaaaaaaaaactttcttggaaaatgtccagctcttgcttaaatataaaaatgaaaggaagaaagagactctcctc

SEQ ID NO: 56072 - DNA, 1063 bp, Homo sapiens
aaagcatatattgcaagagtggcagaaaaaaccaacaaaggttttcagaaaagcaaaagactattttagctgaggatataatgtgcagagtcacggcaaaagtcttttgattaccaagaatggaacacctttctatctgctctagaattaatcccaacatcaaaatctgtaccaagtgtttttgcatttactgaaagatactatgtacatctaaattaggattctatccattatgatgtgacttttgtaaacgcctccagagggagccctaatgatatcctgtgggtttcttatctaatgcttcaggaatgagtctaccgagattagtcattcagtataaatcctcccacactggggacttttgagtaggataagaaattactattccttcacaagtaagtctgacagttctgagaatcaagaactcataagaaatttgtgtgatttcctatttcctcttttgaacataaaatgaaattagtagtggccataagaattgtcatggtaaaacaaaaccatagacagacaggcctcagactctctgatgaagacaacaggtaactagtgatatacgaggaggtcaggcaggctctgcaaatagccctctcattagttacagatccattattcatgacacagctgagacttagagtaggcttacaagttgagttttagtcaaatcttggaattcaaaaacatacatttttccactaacttgtttaccttctccagaactagagccttagaatttggcacaagaaaatatactcttctatgtctttaattacttaatacaattattactaagaggagagtgtcaagagaattggataaaaatgagggtaaggttaacggtgagaaggaaaaaaaaaagtgaacacatttccatcgtcatttctaggagcttttcttaggtttcttcaattcggttttgcattggaatatgatggcaatgctgtgtctgagctcacgcttgtaatcccagcatttggtgagaccgaggtgggtggatcacctgaggtcaggagttcgagaccagccgggccaacatagcgaaacctta

SEQ ID NO: 56073 - DNA, 657 bp, Homo sapiens
cttaatctcttgcctgtcacaggaaaggtgctcaacacctgttagctctgtgttgatgtccccagatcagagagccagaaaaggagggctaaagttccaaccaggatcttctggttccaacccagcagcacctgagcaaggttgataatggtaaagaaaagaagaaataagcaataggggcctcacaaacacaggcaggaataaatcactcccatgtggcagttttctgtgcctgacccaagagataggtgttgcacctttatccatgtggacagataagaaagagcaaagggcataggtcacagaggtgagtatgacctcattgcagtgccaggatatttccaggcaattggcaagacttattgacaatcatccaataaataggataaatagttcttacttcccaagtgcctgggaagagagcttgcagctctttccaattcctgcctctcatctcttcctcctcggacactgcagctctccgtttctggaaaatctcagggcagaatctgggctccttcccactttcctctgtccagaattctaaggatgcctgggagaaggcatctgccctgaatgaatgggtcagaggcatgattccaagtgactggctggtaattggaagagctcagtggtctggctggggagatgagagcc

SEQ ID NO: 56074 - DNA, 730 bp, Homo sapiens
taggaggcaggtgctctcattagcctcaatttacagatgaggaaactgaggcacacagaggtgaagcagtttagccaagatcacccagcagtaattgtcagagccagaatttgaaccaaagctgtctcgagcccatggactaaaccactatgctcccaaagaaaaacgcccaatcctttttaaactgaggggtgtgtcatctgttaagcattagagaaatgtagggcgatgccaggatacctgtaatttaccttaaaataagctctaccgggtgagattttaaatagattgactatttagagacacacctcacattgattagacagggtataagaatcctgccaggcaataatctgtacacttagggttagcaccatagacttgatccagaaaccaccctcgctctagccattgccaaagagaattcctggttgcctggtgccagctagaaagctaacaggactctgcccctggaatcttggcattctgtacagtgggggctgggacacccaataggatccagagctggggctccatccatctcacagtacacagggtaggaattgcttggggcctcttgctcctgcatttttggctaatagaagttctgcgcagatggcagaatggttttcattatatcctgacattcattcatcatatcatgattcattcatcatatcctgatataatagtttcattatatcctgacattatatcctgggtggaaata

SEQ ID NO: 56075 - DNA, 556 bp, Homo sapiens
tgaatattgctcacaagtaagccaaccctaagcttcttggctaagactcagaactcttgttatctaagtttatggctgttaattacaggatttgacctgaattaactgaacaatgcagtaagaataacaatccctgacttttcaaattttagattttccaaatcatacagcaatcatctcatttgaccctcacaataaccctatgacgtgggtatgctatctctacctctattgtgcaataaggaaatttagagaaggatgatgtaattgaccaaagtcgctcaaaacctgtgcgtgctgcaatacatctcagtgccagttttctaacacatgctaggggctctttcttctacagttcagctgtgtctcatgcaaatttctatggaaatcgacaatgtgaaaatgaacatccataggatttgaattcaaaagcttgggtgctctgtgcaccaagagggagttgtttaagcatacaggtgttgaagtcagatggcctgggttttaatcccagttctgccacctgctagctgggtgatagctggcaagttaatctacc

SEQ ID NO: 56076 - DNA, 1096 bp, Homo sapiens
ccataagattatggtgaggattaatgagacaaggaatataaaattcttagcacaatgcctggctcaacattagaacttaataaacactgaatgatgctgccaagatctttctgggagacaaaaagatgccactattccttccttcctccctcagggcatgatcgtgtctcactacatgacactcttggcttcagctggagaacaaacggaccacctaacccggcttcacgtgcaactgccagcgagaagagaatgttcttttctttgtctgagattcggcactggtccctgccgccaatcccaggtcttcgtctcagatttgctgccacccagaggccatttcatgccatgccaggatgactctccaaagtattccttgggacagtggttttcaaaagaaagtgggacgtgggggcagggaaggaaaaggaaaacatatccaactcttggaggcaggcgagactgtgggggttgaaacaatcccgcaggggatcctggcgtgccctccactctattcacttgaggttgtctgatttcggtgaagccaaaaagagagaaaaggggaaagggagtcaaaaggatcctgtctgtcttcaccagcactaggaatacatgtcagctggtgctttcaaggggtgtcagctccacctcgtggaatgagagccagtgatttgtttctgatgcaattcttcagccagtaaacacaggaacaaggaagttatgacatgacctttctaaagatccttaaaaataccccagccaaagggactagtatggagaatatgtaaagaatccttgcaacctggcagagcactgtggctcatgcctgtaatctcagtactttgggaggacaaggtaggaggatcacttgagcccaggaattcaagacccgcctgggcaacatagtgagacctcatctctacaaaaaaaaaaaaagaacttttacaacctaatcatcaaaagacaaatcagcaaaaggttttgtattagtccattctcacattgctataaagaaatacctgagacaggataatttataaagaaaagaggcttaattggctcatggttctcccggctacacaggaagcatagcagc

SEQ ID NO: 56077 - DNA, 881 bp, Homo sapiens
atggattactcatgataacaatgtaggatgccagggactgaacataacaaactcaaggggaggggaggtcccttctcagctatccagcaccccaaagcttgaatcaatagctccttcccacgctgggtgaaatcagccctgagctgtctgtgaatcagaggaagtgtttgtgtgtgtgtgtgtgtgtgttggagagggtccgggggaaggatgtatatgtgcatcctgaggtggaaaaatccctaaactcacttgtgtggtgaagcagggctggaggcttctagagccctagggagggcgcagcctttgactttcggacagacctggttagaagcctcactgctttgctgccagctgataaaggagccagatgaaagggcccagcatagctcctggcctttggagcatgccctttatccatagaatgctactcttctcctgatgtccatcttcccctagcgctgagcccaaagcacagaaggcatcctgtttggagccaggctggctggggttaacaagagaaaggcagctgtttcccgaaaacaaagggctgggtcaataaatctgccgcagcagccgtggatcagtgagggcaaaggctcccgcggggagcagccagccagtttctctgaaacgtctagaacagagccatccaggaaagcaaggctgaggcttgaaaggcccttaggtaggcctgtcctggggtcaatatcctcagagcacagggtccctctcctcacccccagcaccttccaggatcagactcagagtctcacagaatcacagagctggaaaggaccccaagcattctccaatgcagttttttatctggggaacatgttaagaattcatccatctatgaacttggataggtcaggggg

SEQ ID NO: 56078 - DNA, 650 bp, Homo sapiens
tggtggtgggcacctgtagtcccagctactcgggaggctgaggcaggagaatggtgtgaacctgggaggcggagcttgcagtgagcagagagcacgccactgcactccagcctgcgcaacagagccagactccgtcttaaaacaaaacaaacaaaaaacaaaaaaacaccttatcgctctgcacccagggcctggcactctccccgggggagggcggtgtgcttctgaacctgccagcattttttctatctatgatacacttgctgacagaggtcaaagggctatcctgggtaagcccacactgctggctcaagaggccccaggcaaatcagccccaggaaaatctcgtccatcagcttctaggccaagcctcagcctgctctgtgtcatcagtctgggaggcaggaagactgcaaagggttctcagttcaccatacgaacaaaagacaagacgagactcgccaggaatgtgtggtttgtcccaggcactttgtcctgcatccagacctcaagcagtcagataaagctgattctttatttttgcacttcttttaaagctcaggctcagagagagagtccccagctcacaagagtcagaagcaggatataaactctgatctactcactccagagctgcccgcaagaaggac

SEQ ID NO: 56079 - DNA, 663 bp, Homo sapiens
agatcgcaccactgcacttcaggctgggagcctgggcgatagaccaagactccgtttcaaaaaaaaaaagagaaagtgcccatagtgtagaatttccctacatcagaatttccctgctcagaacactaggttcttggacattagccaaattagcttggaaaatactgcattacttgtctttaaggtactaatatatgctaatatacagactaagtcttctgtacggccacagagtacccagcattttccaaacatattcacagactggtattctttaggacacattttagaaaaggctgcccgaaagcataaaattcaaacaagcccctcgaactcctctctaaagcaactgttttcgttcggctttttgaggagccgtgctttctgttaggagccacgctttctgttgcatacaatgaggctcacctgtatggcatcacggctaacccctgaactcgggttaaagtcaacactggccagattacggtaacacaaccacaaaagcctgggtgttttaaagacacaatgatgacactatcctcctcttcccctaacctagtcccatcacaatccccgccccacctccctccatcctaaactaagggaacaagatgatcactttccacttcttaagagccaccccacacagaacggaaaggcaga

SEQ ID NO: 56080 - DNA, 2552 bp, Homo sapiens
aactcccagtcctgctcatcggcatcctggctgctgtacctaccatggtggtccctcttccccaaatcttggccctgctcgttggcatcttggctggcataagcacccagagaatctctcttcccaaattcccagtccccaaggcttacatctcgactactgtaggtacccagtgaatctctctttccgaattcctggtcctggagttctgcatcccggctggagtaagtgccctgggaatccctctttctgaactcccagtcctgaacatctgcctcctggctccgctgagtgccaagctgggctggctttccaactacccggtcctgggctgtgagcacccctggggcagacactttactctggtcttggctgctgctggcctccatctcctcctggccgatgccacacctgctggcccactccctggtgctcccttcccctgctccttgcccatacttgctggtccagtccctctctccgagacctgggtctcctctagggcttgcacccccaaggccatagtcctgagaagcaccttgacaccagctggaaggactgaaactgctgggctgtgggtctcctgtgatcccaaattcactctgcagatctttctgggaccagccaaggagtccctgggaataagaaaaaaaaacagacaaagaaacaacgattagattccatcagggtgggagtcaatccagcagagtcagcgctgcctagtgcctgaaagccccactttggcaacagaaagctgtgtgaccttgagcaaatcacttaaccactctgggtctcagcgtcctcatccttaaacgaggataattcctattgcatggggctggtgtgagaggattaaatgagatcatttagaccaagcactcagcatagtgcttggcatgcagtgggcactcaatcgatggtcccatggtcatgtttacaactcttgggcaatacttggctaacagccaggagaggagtggtcttcacacaggaatggcaggcagtgcactttccttttgattaggagaggtcaagattcaaagcctctctgcgacttcccttgcaaggcaaggttccaacaccaatgacagcttttccagcccgtcctcccccatgccccatctgacccccatcctcctataagtacccaggcccttcttccccagccaaagtgccgtctgctcaatcttccccaggaagacctctcagccctcaccctggcccaggaaagacaagaggggcagcctctggcacaggggaaaatcccagccagggcttcttgcaccccaccccccacctcacgctccctgactcacccttgtgggcgggagagccctgggctcagggcttcggagccggccagcctcatccctcagcgcagcgttggccagcagccgctccaggatagacatgctggcctccccatccccaggctgggccatggccccccgcccccaacccgccttggggctgctgggtgcggccagccgggcgcagggatagagctgggctgctacccgcgctgggacctgtccgacggctctggcgctggctctccctcaccctggccctgctccctccggagcagctgcagcttgggcagccccgcccaggagccagttgagtcacccacatcccgggacagacacacctactacaggagtcagcttaaccccttcctgctcctccttctccccgccccgcagcccccagaggccccctggctcctcctttcctgcagccccgccccttgcagcccaggcccggcttgagaaataaatttcgaaagccacctggcccccggcccttaaattcagaggcagcctggtaggagaaagggcactgggccgggaaacggcgctggcccgggcccagccaccaacttgctggataactgcacaaggctaacctcctctgaggcccagctgcctgtctacaaagcaggtctggagctcaatgttaataacgtttgtaaaagccaacacttcttaagcacttaggatgagccaggcactattcttagcactttagacattacagctcattgaacccttgccaacacccttggaggtagaactcatcttgttatccacattttacagatgtggaaactgaggcagagggcagaaaagtcactcttttaaggtcacacctgggcaaaggaaagcagagccaggagatgaacccaggagcccacgctctaaatggctacactattttgccttgaacgatattcccataatgagagactgaatactcagcacctgccacgcactgtgccgagagctttccacctcgatttacccacaatataactctaagaggccaatgctactatcaggaaagcactctgaagcccagcagttaaggtacgttcttcccaagaccaatcagctagcgattgctggagctgggatagagcctcacacgaaaccccacacacacaccgtcctgtgtggctctgcagagctacaatctgcaggtccacagctgccttgctcactaccacagcccaagctctcgacatgtaaaatccatgttcaaagaatgaa

SEQ ID NO: 56081 - DNA, 2006 bp, Homo sapiens
ttcccaatctagttttttcaccttatgtgacactcttctctatcatccatagtaaactttcaatctcagctgagcttctctatcctgcctccaggctgcctcctcccccacccacagcacactcccaggccacctccccactgtcatctggtgtgtgactgggaatgcaaacttactattgacccaagtcaaacaaaagtaaatctgctatgggaagaaaaaaaaaaacaggaccagaaatctaccttctatataaagctaaatgaccttggaagtaccctcgtccacagtcctcctgatggaatcccgtacctcctacacatttggctaaatagaagaaaagagtctacacaaggagccaggaggtctgggttcaaactcccacttgtacactccatttttccctgtgggcctcagttttcccctctgcaaagcatgcagcttgatccatatcatctcaaaggtccctgtctgctcttacacctgttggagatttatgatcccaaacagttctgaagagtctcaagagaagctgagaacctttcaaactcatcctgtactgccttggtactccttccctatctcaacagaatcatcactcaaccaccccccaagacagaaagagggggcagcctctgtccttcccacccccctcccagccacctggctccaccctgcacccattggtacctggctcagagccagtaggcaccagctcctcctccatctcccggggcagtggggaagccatggctgagctttccctgagagtagacactttcatcacatgcggcagaccctccttgagagcggggaggcagagaggtatgagctggggtggctgcagacctaggaaaagagagagaagagaaggaaaaaaagagttgggcgttgccagtaggtttagcagagagaagtctcctatttctaacagaggcagagtgtgggacaggaagagagaacttggagtgggggggggggggtaggaggaggtcaagggaggttcccaacagccatatcctcaactcttcaaagatcctccccaactcttatctcctaaccccaaagtcctagcgcttcagggagtcactcactgctccctcctctgacaagctctccaagacaccccacttacagtccccacagtgccccttgggtaggacggccccgctggaggtgtctactcaaagcagagctagagagctgcaaagtatgaagtctgtctgtgaatcacctcacgggagacgggaaaaacccgctcctccccaacctgggctccgccccactgcctgcctcccccttcccactcaccctccttccctctctccctccctcccgcagctgggagtggttccttctcccccctctccctgttctccttccacatccctgccccactctctcccctccctcagaactgtctcatccaaacacggaaaaataaggaataaaaagtaaacatctggaatatatttttttctttaatttctcaatcgcttggcttcagcttggaatttgatgaggtaaagccagggcctagtcctgttgccatagcaatggcctcccactggatttccagggcctagccaagaggaaggaggagccggcccaggcctgggctgggagaacgggacagggcttgagaacatccggggggtggagtgacttgggggaaaattccctggggctccaccttccacgacagtcagggtggagcagccacagcctatgtatgaaaaggggttatgtgggcttcactcaccagcctagggttggctttaaggagttctgagggggacagaagaaattaaaccaagaggcacagcctggtggtagaagcctgtcacatgagcttcaggatctgatataccaagattcagtgctgggtgggtctaccactttctagccctgtgacttctccaagcctcagtttctccaactgaaaaatgggattattgagaccctgagggggcttacatgaaatagtacatgaaataggcttagca

SEQ ID NO: 56082 - DNA, 2961 bp, Homo sapiens
gaagacagtagagaaacccagtactgtcaacccattggtcagttaaccaccacggaagactgcccactgtgggtgggtgaataactgtgcagagccaggccaagtgtggtggggggaggggcacatgatagaaaaaataaaattaaaacacaagattgtttccttgtccttgaacattattactaggaacatagtgtgggtggttggagatggaaattaattggctcagaaccaaaaaaatcctttcacctggggttctgatgggcccctctgcggtatgaggggctgcagcaatgaaggcgggctcagagtccccaggtgcggaggtggccacagcaactcagagaccccagccaggggccccaggtgaccaaggccaccaaggctgtggccagaagctgcgattcgcagcggttctgagcactccccaccctcaagagaccagggggtagagggtagcagggtagaaacgagctgacccctggcagataaggcctccagaagggctgggcagctccagccccggaggggactcggcgcaggcggggtcgcccctatggaccccaggatctccagccggatccgaggctagagaggtcggcagggacagcacgtaaactgctggaaagagggagggccaacgggaagatggaacagccccgggcaatgggctgtctggaggggcccagtggggagctctggacacagaagggacggcggcagccgaagaggaggaggaggagggggctgcggtggcggcagaagcggaggacctgtgagcgggctgtgaagcagccggcgaacagacggtgggctgcagacgtcgatcaggtgggggcggactggggtggctgggggcgtgccgaaggagccgggggagggggctagcgcggcccggaggaaggggaggcaggggtccctccagcggctctgcccgcccccggccccgccccaagccctcgccccctcccccctttcttctggctctgccagcacgagctccaagccatgcgccctccgcctccgcgcacacgcgccaccttcccccgggcctccagcgtccccagcgccctcggcccctgcaaactttcctggtgaccccccgaccaccaccacctcaacccgaggtgtcggctggaaagcacccactccttccatgcccctcccccgccccatcccggaccccgccccctccttcgcccgaccgcccccgcgcactcacgcgctcgcccggggtccggctccgctcggctcggggccccgatgccagtccccgccgccgccgccgctgctaccgccgccgccgccgccgtcaccgcgggacgaagccactgcgagccccggcggggccccgccccaactccgcccaggtccacgcccccagggcgcttcatgaatatgcatgagccggttggaacccgggagtgggaagcccgtgcagaattcgtcccaccgtcggcaaacaggcgcggcccagcactcaattattcatgaggcttgcagatgaggggcccgccccagtctcagaccggggcgaaactgacgcaattcagccgggagcgctcgggtaaaatggccaccgagacgactgcctagagaaactgccttggcggcccctcccgggctccgccgcctgcacagagcacagtatcatcgagctacgccggcaagaaggtagccgccggctgactgaagcggcttcctgatacaaccacctgagtgctgagaacgcgcgcaacgtggccaccctcctgtgtcaattcagatttagagccaccgtgaagaagtctggcagctctgcattcctcattagtgacctttatctccttttaggccccttctcagacatgggttcctccctacactgaagtttgtatacccccttcttcccgtaagaacaaaagcttcacatataactccgtactttgttgcaccaccaccaggctgcaaccaccaccactctacgcacacgctcatcctccccgactctccaggctcaggtttccactcccccggctgcgggaaggacagtcaatcctgatttcattatcgaaagccttggaagacccttgactcataggtaaggatgcagccaagagctgcctccccctagcttggttggctaatggagtgtaactgggagaaacttcctaatcagatcagctctcatttctagactctcaggtggcccatccgggcagaggcgggtgaaaaccaatgctcgtccagccgggaacagaacaggatgtacctcgagacttgcttcccggctggccaggaaggccctgcccagtctgaccagagcagtaaacaccaccaataaaagtgggagcaacacaccaaggctacaaagaaagcatgaggacatggtttccaaagtcagttccctttattaaatcattttcacagaccagaaatacaaaatgaaagtagaaataggccccaggtaggagctacaggcctggcctcacatgacccctgctccagcaacttgaacaggacaagcagcagctacatccttaaggtcgggaaagtaagatgaggatttggatcctgcattgccctgcctcccaccctatctctccccaaattataaacagccatccttgggaagcagcagagttaagacgtctccccactgccctagtgacatacacaccaacaggagagcatgttcagatggcacagaatccagggactgcatttcatgaggagaaactggtaccaaaatatgggtggggagtcggggggtgtgagaaggcaagcgcaaagagaaccttcctccgtttctactcatcggatcctgacgctgagtcctctgagctggggggagtactggctagttcttcttcttcagagtcctgaaaaccaaaggtgtcttaagggaaaagctggagtcctgggtgccccacccactcttcagtgaagggcccgcaattccctaccgcccccaactacagc

SEQ ID NO: 56083 - DNA, 1672 bp, Homo sapiens
gagttggtggagacactaggtacacattatactgagtcttctttttccaaaataacgttaccaaagcaagctctcattaatggacaaaaactctaccctccttccttctctctacttgtatcacctgtccaagccattctcaccatggaacctttcacctcctgatagacgtcgttgaactccagtgtctctgccatgtcgacccctgcctgtggtggcctgggcagagccccaggctgcacaagggaaaccaagtaaactgggagctgggccccaactcctgagtgggtgtgcggatgctcagcaggttgggaatctgaattcaagaggaagacagataagcatgaaagacagcacctcgctgtgctcacggatggagccaggtagcaactcccagctgcgcctggatgtctcaggatttcctctgcctggaaacctacagacggacgctgcagtgcccgagggtccaggtccaggcctgggtggagaaccgggcccggaataccgctgacacccaacccgacgcccgctctggccgctccggcgggagccatggcaacgagcagcggaaccccagggtctgccaggagcccgcacatcgcacgcgacccaatccagctcagagtgcagggtttccctcgcaccgctcccaccaccccgcggccccagacccacggttcacccccgccccacataatggattcgcccgctccccgcggttgcgaacgcggaatggtccatgtcgagggtcccgtgggggagcggggcccctgccttcctgggaccggggacgaccaccacctacctcctcaggctgcggcctcgcgagggccccggcgcgagaggtgggcgcgctggggggacgcggggggggcgcggggagggggatggggggacaccggggaagcttttcccgcgtgcgcggccccgcgtcccgccaccggaagccgtacacaggccacagagaggatgagctggctagagagacgcgagtcgggcccgcctgcgagacagtcgcatagagcgtcagcgactctggaggacctgagggaagggtggttgccgtgaagcctctctcacccagggggaatccggcctagaaaatgtgtgtagggctctttagaaactacagacacttcttcagtcgagactagatactaaagagaaattgtgtagttttattgtatcagacttagtacaggggtggggtgggggtgtgtattggaatgatgcgtgcccgtttctctgcaaaatagtttctatgtcatggaaaggagtcgatgggacaagaagagaagtatttgaacagttgtgggaggaaacgacctctcccactggctgcggagagtatgcgggtgttggtgtcatcgtgggtgcactgctttctggctgaactgtcaagttcactgtctacacccaaaattttcacatccttaaccgaaaattataggtacctccaagaggctggcaaacggccttatccagttcaagtcctggtgtcagattcaccttggagccagaactgatttgaaaccacatcatcctgtggttgcggaagccaggtctcccccgtataatcccagagtgcattttgcaacatcagagaccagacctggaaaagatgttttagtttttctaccccaacctccttttactgatgggaaaactgaga

SEQ ID NO: 56084 - DNA, 723 bp, Homo sapiens
ccgacatacatcaccctgatacacagggaaggcggtgatggggcaccagaaagatgcagggaaaggaaagaggggagggagatggcgaggtccagatgaaggctgagggctcagatcccccctaggcctgggctccggaaggcggggagagattgcacaagacgatcttcccatgaaccctgggctgacctctctctctgctcctccccaggggaaacctccttcccaacctgacagccagggacatgaagacctgccgcttccacccggacaaggaccctttctgccccatcttgcgggtaggggacgtggtcaagtttgcggggcaggattttgccaaactggcgcgcacggtgaggacctagccattcttccgcgaccccaaactccccaccttcagccctttcccagatttcagggccctttggccggcactggccaggagccgccgcgagacagcgccacctggtggaagcatcccaggccgccactggctttgtgcctgaatcctttctgctttccccgcgcagagcgatcttgccccccgcctccgccgagtccaccttcctcaagcctcagtttcccactcccatcttcacacttcacctcaggcaaaggccttagatctgtaataagccccaaacgacgggaaagtagacctgtggccactttctcctgtgttgtagctaaagcactgaagatcccaaaattaggactcagagg

SEQ ID NO: 56085 - DNA, 4684 bp, Homo sapiens
tggcggtggtgtagaaaaatctgaaacacataacaggaaaagcagaatattgtcaaggagggagaaacctgggagaaaaaacatgattctgctcagccagcccacaagtgtaggacttgaccgcaccctcagcctgggatgcaacgggcactgatgcctctgagccccaggctcaaaaccaggcgcaagaagccgcgatgagattgagatgtggtcctgacctcatggacagtgcattttgctcattctgaggcccaaggctagcatggaaagtcttggacaatgagctcagctgacgatgtgattggcttgggacttagccaggacagaatgggcaaagcgaaggtcctcccacctggaagccccaacagcccaaccccttggagaaaggggttagtgcctggtctgcaaatcaaggccttgagttctaactcctcctcactctgtgaccttgggcaaggcgctgtccttctctgggcctcaggagccttttctataaaaagaaatgatcggactgatctagctcagagtgctatgatttcaggactacagtcccaaggttatcaggctcccttagcatttgggggtcttgtaaggcatggagtaaaaaaaaaaaagcaatatcctaaggctggagaagagggaggggacaaaggaaggggaggaaaggggaggtagcagggagccaaggaccaagaaggactgaggtacagtcattctgcatccaaaggcttaaattgtaagggactggctttactctggctgtttccggaaaggcaggcccagccagccctcccgtctctctctctgacagccaatctcacatgtgcctccctgggagcacctgctctgagctgtatcagcccccagcaggccgctgattaccactgagcctggccacagagcacgagattaggatgcagcaacacactgtgtgtgagatcacgtcccgaaccttctgactcatctgcacaggaaacccccccagtctcccctccagtcagaagggacctgaaattccaccagtggcaataccaaagaaacttcctattagctaagcccctagggagtgattggctgttggggcggggagggggggcggtgaggaggatgaggatgaagcctgggcaacctggatgtgaggctgtgcaggggatgaggacaaggatccttggggtgaaggaagagaagagcaattttaggttttgctaattttgtaaccctggctccaagccagcccttacaggaagtcaccctggcctccggctcaattcagcacgtgatagggaagccacatttatgcagagcagggaacgaggtaaggaaatggaagtggggctgtggtgaagtgggcaagtctagagagagtcccgctgcctggggctgttcctaacagctgctgggagcgagctgcaggtgtggtgcctggcagggtggccgggctgtctgactctggatttcactccaagctaggctgctgcctgaaggattcctcttacccacctttgcctgggctggcctttgggacttacatggctatgaggcgtgccacggtggtcttgaaccggtcaaagatgtagccagtggggaatgtcatgaagttgttcatgaaggaccccagggtgaagatgagtgagaacctctcatcctgggctttgcagtctggagtagaaaaaaggtctcccatgcatcccagccttcctgccaaatgagcacacaggctgggctcccctccacctcagacagcttgtcggtcgcaaacttgtcccttaagctgagttgaaatgtggctgcccctaattacccctcaggagctggtgcctccctcccaggcacttcccagatcaagtggggtgagagctgctgacccttcctctcatcatagaaagaggggtgggcagggggcagagtccttcctgctccttgccaccacgtgggagccagacttaacttccttagaaaagtcatccctgcccttaccagcctgccctgtggcattgccaatcggcccagcatctggtccacacagatccttaaagtaatcttcattcttgaagacaaacactagtgaaggccagccaaagaggacgccagcaaagcccaggcattccagcagcccagtcagcagtgtggccacgtgcaggggcaggccctggcccgccatgagcagaagtggagtggatcttcaaatcccactttgtcctcctggacggatcacaggcgccgtaagcctggcgtttgagcacttggaaaattcctctggcaagccaagcccttcctttcccgtagctctctggttgtttcaggcctgggcaaaaaccatcagcgggtgattctctggatcctgtagaataaagatagaggctgctggaagaggaggcctgcgggaaagggaaaggtagactagagttatttgtgaggtgcattaagaggcaggatgatcatggccgctggcagcaaatgtggggaataaatactccaatacatcatcttaggcactgcatttgagtaaccacgtggcaagtagagaggcaggtcttgatggccacctggagtcacaggtgagataaacgacttacccaatagctccccgggagcaggtggagaagcggagctcctgcgctcgaattctgaataccgtcccctaaaataatgacagcaactcaaccaggtgcagaggcagggagatttcatacagaagacacaaactcccgctgccaagttggtgttatcttcagtttactgacaatgaaacaaaagctcccatggatttcaggaacttgcccaaggtcacagggctagtttagtcacgacgcaggccattctactgccagaaatacccccaactcccatgaccctcgcctaggactcgcaaacctggtccccgccgcccttcctcgcatcaacttctaccaggaaagcctccgggggccgctccccgccagcctccgcaccccgctccagcctgcggcctgccctccccgcagaggagcccgaggggccaggccgcgctcggcgccccatggcgcccgaaaggggacccttcgccctacccgcctgctccgcgccggggctctccgcgccctttccgcacgggccaggttcgcattcgcgcctctcgcagcccctcccagtcccctgctcgcctccgccccctcctgcccgcccggaaggggctggggcagacctcccactctccatcacttccttcttcttttcccttgctcacagcctcccgcgccctttttacctctccctcttgaaacttctccctctagaaccccctagaaccccagcggtgtctttccctccctcctcgctgcctttcagcctcccagcccccttgcctctgcctcccctaaccaagttagttgaatgctgttactcgctcaggcccacctagggaaaatgtcacacccagcacccagaggacacacagacagcacatgagggcatagggacacacacactctatttgtgcattttgccttgaccgctgggttggcagggaacatatttttcctatttgctcaccagcttaaccgtctctcccagtttcacactcccagagctgccaaaaaaatcccaaccacagaatcaggaagccaagaaccaggactgagggcttttcagaaaccatcccctggaggactgccccatattttcactcccaaaaaccccttagatgactccctgcctcacccccgccccccaggttctgaaagagccttcccgccagactgcattgattaaccattcattgccccattttttattaatcaaagacatatataattgctcatcggagcttgtgatcagcgtgaggccttactaagcagctgccttactatccttccagcccagagcacgtgagctgacgtcttctttggcctgtgtggccgtttccttgccaaaagctcagtttggggagagcttcttgcgtattagatgcagtctgcagactcccaaccccagctacctggatcccctgagggcccaggaactccagctattccaagcccactcctcttttttttaagaggaagaaatagaggttacgataggggacagccagaactgaggattttccagctcaccaccaaagcacaaaagataaaagtctgcaaccaccctagtgacttgactgaatggaggaagggtggctggggtcctgtaccccaagctactcactagttatacaacctgaggcaagctctttggctgccccacctgtaagacgaggacaatagtaccttaattataggaattgtcataaaagaagtataagatgggtgtatgaggtccctgcatggcgcaggtgctataggcagattgtagggtagtagattttctagtctgcagttatgtagacagagccagagaagcagctctggggaggaatttcaaaggaacttgcccacggtcattctacaaagctgcagtaccttcccaactctgaaacgtatgctctcatcaccccgtcttaacaaacatttggacattagagaaaacaagtcttttcttaaaataacattatttatgggagaaaatccacaaaaatatagcatcccaggacaaacagggcttaagatgcaagattttctattttactgcaagacacaaagactctgaaattaatgcatgccctatcttctgctctggcatacattttagtctcctgggg

SEQ ID NO: 56086 - DNA, 846 bp, Homo sapiens
catagatgaaaaaactgaagcctagagagataaaaagtcaactaagatcatacagccagtaagtggtgaagatatcattgaaaatcaaactggcatcctttaagcactaaagtctttccacagactagtttcttacccattcgctttcataacaagctgaaggagagcttgtttaaaaatcaggtatatccacccaccggaatgggtaaaatttaaaagaatgaaaatatcaaggtggagcttggacgcagaacaactggagggagtaagcagtaagaaccactttggaaaagtgtctggcagtttcgaaataagttaaacaaacacttaatgaatcagccaagttcaaccagggatgtggaaccactctctctgtggattgctacagggatttggccttactcaattgtaggaggtagttaagcaatcttgtaaggctattatctttgcatgtcatgttgcagttgaattccacaggtcaggcaactgggaaaggaagatggatataaagtgggcaagacagagcaaactgagccccataagtatgaactggaaccccatgaggatgaactgaagcctttaaatccacatcagcttttgttgtctctgtcgttgttaatgtattttgcagaagcccgggttcattgcatggagctaaccacatacacacctgccccaacagtaggcaacgccaaaggagaagccagctccatgccaaccaggtgtaccagcagttcagtcacaacatgtgtgagccagaaaccgactcctgcttcccttccaccctccagattccctgaagagacaccctcatgttccgctctaaccagaaatacacaaaaaagg

SEQ ID NO: 56087 - DNA, 818 bp, Homo sapiens
atagtgccattagttgacaagtcagagacagagcctttctttcttctaccaaagccaggcagctagggcagccagaacacctgggctgcagcaagaaggaagccttcctgtatgctccaccctcaaccgtggagcagctggacaggcctccctacactgcagcttgggctggttgtggctggacttgtctaaccctctaacttgtgcacctcaaagtcagggctcctcaatattttctctacccctgacagggtccaccattaagccatattaagggacaaaggagagacctgaagtcaaatctgaaaatttcagataaagcaagccacccaacaaagaggtccaaagtacatgatgggattggagaaatgctgacaagcgaaactcggagaagccaagctggcagattgatctggaaaggtcaacaggaacgaacggctataatgaggctcagtctgtacatcaccaagccaatggattgggtccagcgaggatgcaagatgtattgagtgtggtgtgcctcttctgcacacacctgcggctccctgggattcgggatggggagggactgagagctgtgacaaaccaggtcaggccacagactctggatttaggacaatcaaaaagtacacatacctgggggaagtgtccagggaggctggaaactgaccctgaggcaagactggaggtgtctaggcccactgctgcgggcactggcttgacagtgcttttgagaaaaacacaaagtctacactgtttgtcgtttgtttttgtttttgttttgagaggtagtctggctctgttgccaagaggccaga

SEQ ID NO: 56088 - DNA, 629 bp, Homo sapiens
tctcttaaaaaaaaaaaaattaaacaaccaaaaaaacgtaatggctgggcatggtggctcatgcctgtaatcccagcatgttgggaggccaaggcgggcagatcacctgaggtcaggagttcgagaccagcctagccaacatggcaaaaccccatctcttaataaaaatacaaaaaaattagccaggcgtggtggtgcgtgcctgtagtcctaactactcaggaggctaaggccggagaatcgattgaaccggggaggtagatgtcgcagtgtgccgagattgcgccactgcactccagcctgggtgacaaagcaagaccctgtatcaaaagaaaaaaaaatttgagctatttcttgtaaatgtttatacatgtgttgcttaacaacaggaatgcactcagagaaatgtgtcattaggtgattttatctttatgcaaacatgatagagtgtacaaactagacagtatagacgactacacacgtaggcaacatggtatagcctaggctacaaacccatacatagtactgtactgattactgtaggcagttgtaacacaatggtaagcatttgtgtagctaatcatagaaaaggtgcagtaaaaatatagtataaaatattaaaaaatggt

SEQ ID NO: 56089 - DNA, 920 bp, Homo sapiens
tgttctgtcctgttcacttactgcagaaatgagaaaagcgttgttcacatgggatcacctaatgaagggatgccatccccaacggtgcctataaggaaatgggggagggttggagagttgtgcaaaatgcaacagggaatcatcagagtctcttgccccatgatagagggttctcaaattaagagagtctacagcaactaatctcacggccactctaggcagggcttcccaatgcttccccaaccccacctccatcctagactttacccactctgctgaacacagatgttacccatagcaccttgcaccatgattgtttgattagcacctcccacagtagactgtgtttctgataggtcagcaacatttgctgagcacctactctgcagggctgtgccaggtgcacaaaataaacaaagccaaagacaacatggaccctgaactcagcaagttcagagtcaagtgggatagggaggctctcttcactggaaggtaactccaagaaacaatgggactcaactttctaaccaagagaactccagggagctaaaattctgacttctggttaagactggtgtggagcttcattaaagaagaaaagattcacccagacttgagttcatagcctggctttgcagcttttaagtcatgtaacctttgatgaagttatgtgacctctccacccagctgcccctaacacttgcaggggcagggctggagtgcaaagggaggcactggtaccacagcctgggaggcaccaccccactagtgcaagccgggcaacctctgcccccaaggcatccctagcctcccaactgcaagcatcaatcttgcacttggaaaggaacctcacctttgaaatctaggttcaaatttagaatgatccagctccttgaagttctatacagaaatacagccag

SEQ ID NO: 56090 - DNA, 4307 bp, Homo sapiens
gcccattgagccaccggacctcgtacactaaccgccaagtgttctacacagtgaaggtgacaaagaggtgaagggaagagccagggaggttctgtggactcactcggtgggtatgcccagagggaagggggatcttgggtggcacattgagagtagctgcgctgttagtaagtgagaactcggaagtccagactcatccagtctgtgccaataaacccctccttctacctggtctcctttccaaagccagctgttctccagacaatggggtgggcgggggcgggtgtcctcctccttctcagggaaaatccgacgctgagcccatctccagagatcttggcttcccgtggggctgcagatccacctagagccaccagagggcgggccagcactgcggccaaggcttgaagacccagcacaccaaagcccggccaagcctccagcccagtgtccaagagtccagccagaggccgagtcctcgatctcaaaatgtctaactgcagaagcccaactcatgttcaggcatgatgtgtctgattctactgggacaatcattgccaccaaagaattactgccaaaatagtaacgacattagctacctaccacccctccacacaccaacacacctcattttaccaagcactttctcatgcctggggtgcctggagacttaatgcagcctcgcgatgaccgggtagcctcaccgtacagatgaggaaactgaggcacaaggaaggggagtacattgtctagggtcacctggagaactctgatctccagactcaaatttccaattcgtcccccctccccccaaccctaaccggagctaggtggggtggggacagcaaatgtggatggggggaggtaagaggggtcagagtgctctacagagaagaccaaatgcattgtggcacctactgtaaaatgagaccagccagccacccacccaccagccagccacctaaaagtcttcagtgggcacctgctggaaacacgacaatggatgacacgagttccctgccctcaaaaagctggtagtctagttgggggtggagggggtgagtcagcagataattatgggaaaccgtgacacctgtataaggggcggggatgagcagaggggctgcgactgcctggagccagggattcccggacggggcttccctttcctcgcagctcgtcccaggaggaggagctcccccccagcttcggggttccgcctgccttgggggcccggggtcccctcccacccctccccgaagagcgcgggccccgggaaccgatgacagcacacctgagtcagcccgccgcccacccgcccctcagcgtctgtctccgcatcttgtgatatttcgctccccgggagccagccccactgcgctccggaggcagctcggcaaacaaacccagcgacagattgtgccgcggctcattccggggaaggacgccaaaccccaccctgctacccccaacactccctccccgccgccgcctccaggccctccccccaggcgcaggccctagtcggggtgggtcctggggaaacgcagggtcctgtcctgcctcctggaaatagggggagccctgggtgagggaagacgggagccccagagacttttctttctgtttctacctgatccgaaaacgagaggggcgggaaaggaaatttaggggcacagagaggagctggggggccgagaaggtccgaaaatggaaccagcagggggcacccgagagccgaggtgcccacgggccgggagcctgggaatgaaactggggaagagggggagagaaagggaggcagagacaccgagacacacagagacgagagacagagacgcagggagccccgcggggaggaggagagagacgaagacacagagagacagtgagaaagacagaagaccgggcagggaaacagacgagtagagacagaaaaggtccgagagagagtgagggagggagggaacagagagacagagaccacgaaatatgagtaagagtcgggggagaaaaccagagaaatcgaatgagaacgcgagaagaacgagagaccgtggagggagcagagaatgaatgggaagaataagaccaacatttatcaagagccgactgtatgccaggcactgcattggaccctggcacggataggaaaggaggagccgcggcgcgggcagcggggcgaggggcttctgtgctcgcgggagcggcagcccagggggctcagcagccccggcaccgccgcacctgaggctccagcagccccaaccccgccagcgctgcctggccaccgtacccgaagcggctcccccgagggccccgagcctatcctacgccggggcggctccgcggacgcgccgggccgagtcaagacctgggtcaaccgccctgcagcctttgtagggaagtgcctaggtgatgggtctgctgataccgcctgtgaccaggccatgaagggccagaggggctccagtgagaccataatccgcccctctttaaaagggggtagaggaagttcacgcgaagccaacagtcttctccccagctttgggtcctctcctgcacccccgcgggagataaggtctcccctcccggacacatcatacatacacaaaaaaacgcacacactcgcacgcgcgcccatctcgcacccgcttgtaaatgcactaaggggcatacacacaccgggcacatatttctttccacccatccccaagatcgcaagcgcaaaacctcgcacagcctcacgtttcccaccagctcagacatgcacgctggcggactttcagcggctcacccgtgtgcacactcacgtgcccccccccccgcttccccaagcccgtacaaagggtaacgggcaagcatcctgagtcacacctgcacaagcatccttgcgcgcacgtgcacgctcatatgcactcgatcttgcacgcacaaactcttgcatatactattcttatagtcgcacactgggcttgaggtctgggagtggaaggaaaagtggaatcttggagctgtcccaggggacagaaatgctggaggctgggacactggcgcgagggacgcggctgggggcgggggagggggtgacccagaagctcatcttctcctggaaagttgggaggggggaacaggacaagtccacggcgttcctctaaactaccgcattcccccaagaagggatttctctagaagagtggcgccgcgaggacgatcgaacacagtcctccgggtcgcttaagcgggggggaggggggcggggtggagggggttagaaagccgctcccgcctcctagtggtcgagaaagggttaagtcggcaagccagcaaacgagggaggagccagcgagtgcgggaaggagtgggggtggttgggaagagcttcctcgctgtccccactctccctcggctagcagcctgggcacacggacagacggactgacggactctcgagcggacagcgcagctagcggggcgcgggcgctgggcgtcgacggccagccccagccttccccgccccgtcgcgccccgccccgtcccgtcggggccgatggctcctcccgaggcccgcagcccgggcggcgcagggtagagcgccgcggcccggccacgcagcccggggactcccgggccctcccggagccccgcggggtccccgccgtgcatccggcgggctcagggagcgagtgggagcgccctccccccgctgccccctcccccgagcatcgagacaagatgctgcccgggctcaggcgcctgctgcaaggtaagaacgccagcggcgggagagcggagggcatcctggggagagaagcagggcgtcccctctttcagggattgagggtggggcagttggggaggtggggtaacctggggaaggggaaaagctcagcgctggggccgcgcccccgccgccagggctgttctcagcaggagggcacttggctgggagcccgcgggcgcgtgcgaggagctcgtgaccgaggtgggacgcagggggcaggtggacccggcccggagcggggagggaggctcaggttccgctgtccccgctccacctgctccgggggacgctgaggactcgggccggctggggaagcgccgactcagcaactcctcctgcccggtgcctcagcactttctggccacctgggaagacaggagatgtgggtagggggctgtctggggaggtaggaggcgcagagggaaatccaagtggccctctctggtaggagagatggagggcgctagaaagaggatagttctactgattgagtgacagataagggtgtgggccagagactggg

SEQ ID NO: 56091 - DNA, 1751 bp, Homo sapiens
tcagttaatgacagatccaagatttgaaatcagaaaggctggctccccagtctccatacttcaccaaaccagaagttctgaaactcaaactgtggtcctgccaatggccacactggcttccctggggaacctgtagacatggggattcccaggctccaccccaaacctcctgaattagaaactctgccccccgccccaccccgctcagagatccgcaggggatcctaatacacccgaaagtttaggaaccactgacctcaccaataccactttttccacagcaaataggttagaggaggcagaatccaaatccaggatgctatgaatcaaaaggtcaaccctttctcttctgccacggtgcacccccttccctcccccggccaaggccccagcggggtctgcaccctacctcaggcccattctcttcttctgtgccccactccaccccacccaggatgacttgttcgcggacctggccaacctgagccacctcttcctccacgggaaccgcctgcggctgctcacagagcacgtgtttcgcggcctgggcagcctggaccggctgctgctgcacgggaaccggctgcagggcgtgcaccgcgcggccttccgcggcctcagccgcctcaccatcctctacctgttcaacaacagcctggcctcgctgcccggcgaggcgctcgccgacctgccctcgctcgagttcctgcggctcaacgctaacccctgggcgtgcgactgccgcgcgcggccgctctgggcctggttccagcgcgcgcgcgtgtccagctccgacgtgacctgcgccacccccccggagcgccagggccgagacctgcgcgcgctccgcgaggccgacttccaggcgtgtccgcccgcggcacccacgcggccgggcagccgcgcccgcggcaacagctcctccaaccacctgtacggggtggccgaggccggggcgcccccagccgatccctccaccctctaccgagatctgcctgccgaagactcgcgggggcgccagggcggggacgcgcctactgaggacgactactgggggggctacgggggtgaggaccagcgaggggagcagatgtgccccggcgctgcctgccaggcgcccccggactcccgaggccctgcgctctcggccgggctccccagccctctgctttgcctcctgctcctggtgccccaccacctctgactgcggtgctgagatcgaagaggccagtgtccgatccccgcttcccgtccacccggggctgcggctccggccccagtcgccccaccttccctggccttgctgcctccctttcccctcccagctcctctcctccccggggagcaggccgcctctccttgcctgccccctgggctgtcctgacttgtggcagccccaagagggcgtgtgtggtggctcagccctgccctccccagttctggccattaactcttccccatcccaaggctggggtggggccccccaggcagccgctgacccgcactcctaagggcccacagcggacaccagaggggcttttgtctgcagagcgtcttccaccagcagagcctttggaagctcccccagggagccccacccaggaccctttgggggatgcctcagtcagggccaggctgaccctgacccctgcttaccctagtcccctcaacctcctgacactggaggaatacttttctcctaagtctaccctggacactttttagggcacctggagagaactttcctctcc

SEQ ID NO: 56092 - DNA, 1354 bp, Homo sapiens
ataaaagaaaactgcgataacctcctcgctggtttcctacatggaatctctccctccctcccacccagccataccgtggtgaccagattcatctgatcaaaatttgcatatgttatgatgtcactcaggagcctgtaatggcttcctaatgcctatagggtaaaggtaaaacaccttagcagagcatcaaagatccctcagagtctggtaccaactgcttttctagccttttctctcacaatctcatcccaaaccttcactccagctagaacgtttgtatcatactggccaccagttatcatgtatgtgaaacccaccaaccgactttgagtgcccccctaaaatttctcagtctctcctgaagtaggaaacctcttccccctcctcagatctcagactccagagccctttcccaaggccaagactgcacctctctgaccatatacaggggttcttcaaagcagcagacagaggctcaggctctggctccctccaagcagacggctgcccccgactggccaccttgggaagcacagccaggcttcagtcgtctagaacagagaatgagcatctaaccgcctggggagaggactaggacaccagatgataaggtttataagcccttaagcctctaaggttcttacacccagagtaggggggggacggttctcagccctgtttccctagctgcgggctcccaattttcgatccctaatccgagaggaactcctctccaatgaaatacagacttgggactctcaggacactgtggaagggaaatttcccaacagactctgagagtccaggaggccagggatagaccaggtggcaggcccaaggtccagctggggtcaggtttctatatgaatttttaatgcttccagatagacttgtcagatgttctgaaaactgagcatctcctttcacctctgtacatgatgcccttctccaaccccattgcccctgcaggagggcaggcctgggacagatattcagtggcctctggagaaacggttttgggacagtagaagggtaaatgacctagttatgttcccactagtaagctgtgtgaccttgggcaagttacttaacctctctgaacattagagttctgtgggtttgtttttgttttgtaagctggggacaatagtgccagcctaaatcaatttgttgtggggactcagtgcaatagcccatggcaaagtgacctacatgcttgctgttattattctctttcctcaagttctgcctccctcttccagcttttcttccaaccccaaagatgtctctggctattgcttcgaaggtaggaactttggttggttctcccctttctcttcaggcccaaactccc

SEQ ID NO: 56093 - DNA, 1780 bp, Homo sapiens
aaattgaggcccccatcttgcactgagctaaaactttggtcccctggcttcgaggtacaccaggttgacctgtccaggatccagcctggcataaactcactttgtgaccttggaccaaaccacccatcctctctggaaggtgtggaaaaatgtggccccaaaggctgaataaagccagagagtcagggaccttgaacgcatgtgaaggggctggacttgattctgtaggtgaagctaaaccactgaaggtttttcagcagtgtgtgagccagttccccatctgagatctttctggaagtcacgtgagtgacagagtacagagaaaaagaatcagaggcagggagaccagctgagaaagcttgctgtggcccaggagagagggggaaggcctgcattgggatgatgacagagaaaggagagcggagaagtcagacccgtgggtcagcactagctgctgctcactcggccccacccggttcttgtgtcaagacaaaaagaaaacccaggtggcctcataccttgattcctgggaacgtaatggcagaagaggcgtaagagccaatcatgagggccattaacgtggagcgcaggttcccaaacatgttgggcagctgaggagggaaagcagcacccatgaggtggggacaccgtgacccttgcccagcattcccagccctgctccatacaatagccccaggagacgcagcagaaaagccccaaggtaaaacaaacagaaaaatcaatgtgggaaactgtactctgccccctgcctacacagtcacagtgccctttagcttcaaaaaggctcccagacacccctcagagagacattttgttaattttgtttaattccaggtttcccaagtttgttacgtaacacctctgaaaaacacatggaataggtgcttaagaaacactgatcttggctgggcgcagtggctcatgcctgtaatcccagcactttgggaagccgaagctggtgggaagcttgaggtcaggagttcaagaccagcctggacaacatggtgaaaccccatctccaccaaaaatacaaaaattagctaggcatggtggcatgcgcctgtaatcccacctactccagaggctgaggcaggagaatcgcttgaacctgggaggtggaggttgcagtgagccgagatcgcaccactgcactttagcctgggtgacagagcgagactatgtccccaccccccaaaaaaaaagaaaagaaaagaaagaaacagtgatcttgtccaacccatttgagatgagacaattgagacccagggaggaaaagtgtactcaagttcacagagcacattaatggctttctccccattgtcgttgtcccagccctaacccaaggctgtgaccatggctgtgtcccggtaataggcagtgcctcttaaccctctcggttgacgtcccagcccagtttctgcctaatcaggacaaatcacatcctgggaggtgagggtggaaataagggagggaactgagccagggcagacagtctccagaggaggtggctctgacgcagagcagggtcagaacccacaccaggagagaatttaattgatcatgtgttccactcacctgcctcagccaagccctcagggcaggggaaggcaaagtcaggatgcccttcgcacacaccctcctctggccccaccatcctccccaagtcactagatcccacagctgagaaggaccttaggatccgtacaaagcctaaacacactccacagagggggaaactgagactctgaagggaggcctc

SEQ ID NO: 56094 - DNA, 1510 bp, Homo sapiens
agaaatttagaaagaacactaaaacttagaggaagctttcccgataaatgatagtctgataaaataatagctaatacttattgagcacttaactatgctccaggcactgttctaaacacaacagccccataagtcagttaataaagtatcccgttccctaggtgatgaagctgaggcacagaatgagaaccaggcactgccctccagtcccctctagaagtccacttggaggacttgtccttaacggtaaactgccaacttggagttgtgacaagttaaggagaaaagctagtgataggagacaaagggctgcttcgctttactcaatgctcagtgagtcatgaggtggctgcccccaggcctccaagttgtcacttggcagcactgccaagggcaaactcagggtgcacctggagcaggcagacagaccagggtctgaattcccaccaccagccttactagctgtgcaccttgaccaagtaactttcttcttgtctgtaaaccggaccaaagaatgcctaacccacgacctccttaggaggattaaattggagacagtaaacaaagagctttgcacagtgcctggcccagagaaagtgctcctgaaggatctgaggaaggggtagctgaccctcctggtgggtcatgtggtaagcacgtactctaggagctgggcatccacactacatgagacaggaagttctcagctctagagtgacaggtgctgctaaaagaacaaaccaggccaggtgcagtagctcacacctgtaatctcaggactttgggaggccaaggtgggtgcatctcttgagcccaggagttcaagaccagcctgagcaacattgggaaaccttgtctttacaaaacaaattttaaaaatcagccgagcatggcgatgcatgtctgtagttccagctacctgggagtctgaggtgggaggattgcttgagcccgggcggtcgaggctgcagtgagccatgatcacaccattgcactccagtctgggtgacagagcaaggccctgtctcaaaaaaaaaaaaaaagaaaagaaaagaaaagaaaaaggaaacaaaaaaaccaacaaggggacaaggggatgtgataatgcctggatactagggggtggtagaggacatctgccctcagtagtgaaaatgacccctgactttacatatccaaaggtcatgcagttggcagaagagtaaagataaaggaatctgtgtgttgacataaggaagaacacaaaggcctggcagatcctgagtgttgaccagccatggaaggaactgtcctggacaacagagagtcttcttcagtaccagctgccaaggaggtggggaaagtgctcagacacctccaggaagcacttaggggttggaccacacagcctttggggatcaggctagccctataatttagtgatctttatgatcactgtcatttctctacaggttttttttttttttttttttgagacagggtctcactctgtctcccaggctggagtgca

SEQ ID NO: 56095 - DNA, 2547 bp, Homo sapiens
cttccacctgcccctttgccatccctccccccagcccacccagcccattttcaggcatacctgggcacgtgctggaatagaagccctcgttcttcagaatgatcaacagggagccccagcccaggagtacagcagagaagaagaggttctccagcacagccgtgcaggccatccaccagcgcctccggtacgcctgttgcagcgtgggggccatgctggccccgagcctgcacagaaacagagcgctgggtgaagggccccccagtggccccagggaagggtcctgcatcatggtggcacccgagacctctcgggccagcccgcgaggagcccctcatggaggccccatagagccctgggcttcccagccggtgccaaggagctggctccgcgcgcactagcagtgccagaggtgcacgcggcacggggctcccgctgagccactatcggaaacaaggaaggtcctgtctgcgcgctgcagcttcctagcaggctgccgggttctctcacccaggccagggcgctcagggccgggctgctggggagaaagtccgcatctgcccaggtccccagaggacagcaaggggcagagcgcgctctgaagcaccgcgggcccatgtccggactctcgcgccaggaaagacccctagaagctggcaggaagaagggcaagttcaaggctaccctacgaccccatcttccagttgcccctccaagacctctccttccctctggggccgggcgacagcaagccctccccctttccgtatcaggtgacccacgaccctacagtctctcgggccaagccaacagctgccacgtggagggagacccaggacgggctctcctcggttccctcctcccccgcgcgcccctcactcactccgcagggctcggggcaccaggctttgcacctcggaacccgcttgcccccctccagccccgggagggggctcggacttcggcaggaagtctggcggctgctgactttataagggcagcggtggcggatgggctggcgggcgggtgtgtttaccaaagggagggaaagagccccagctccccccgccgcggccgctgcagcctcggcgggaggagagggaacgcgggcggcgcgggggcggggagcgacaactgggatgagaccgaggaaagcggagaggagaagggcaagaaagacccagagagaggggaggaagtaccagtcacttcttccagggggactcggtattctcatctgtgaaacggggctttgggttcaagcgctccaggaggtccgctggaactctggcaaacgcgcagctctaagcagaggaagtgcagcgagcggggacccgggaggaagagaagagtcggaggggtcagagaaaagaaaagggaaggacgcgcttggcgagatgggacactgtgccgcgggaccgcgggcgcaagtaacggtctttccttgggaagcctggcagtgtcggcgggagccggcctcggtgtctctcagccgacgcatagccggagaccctacgcgcgccccctccccgcccacgctgctcacctccggtcaccggcaaatgagcagccagcagctgcggacgcctccgggagcgcaacgctttcgcggcgcgtccggagtcccgtgggcccagccctgagccgcgccggcgctggggtcttctctgcgtgcaggacccggcggccacggagcttcagcctgacagcccggtggcctcgcctccgctgtctcctcggaagaagcgggggaactgggaacccgccgggcgccagaggtctgcgaagctgggcttggatgaagtggatctgcggagttgatagttgtatttacacgcgtccggagctgcgccccgaggtgggggcgggggctcccttcttttcccctccccttaggtcgagtttcacgcgcacgtgactcgcccgctggtcccggacactctccctctggcacagccccagcacctacatttccaccctggacccccatcttctcccccaagcccccagactaacatcaggcagcgccctctgtatccttgttcaaaacaaagtgcgattcggctgaagccgactgaccgcgattcagggccgccttgggtggggttttgaactgtgcagctggaagcagtgttttccgagaggcagagtggcacgggtttctttggagttagtcagatcgaggtctgagtcttgactttttaactgactaccctgggttacctagggcaagttacctctctgagcctcagcttcctcctctttaaattcggttaaaatggaacctacctaactgcccaaaggaatcgcgattgtgatgcaggtaaaatgctaagcatagcatttggcatagtaagcataatgttaattgttgctgctgtcattatttcagaagacctggtgatcggatgcttccagatcaacaattgattgactccaggtaaatctctcagcctccctgagcctcagtatcctcatctgtaaaatagactactatggtgtggagtaatgagaagtaatctcattacatgtgagtttaattgtgtg

SEQ ID NO: 56096 - DNA, 1773 bp, Homo sapiens
ggggagggtaagcatgggcctcaggctcccctacattcaggaaggaatttgtcataagtcattcaccttcgataagggtgaccaagacttattttccaagacagggtagcacatagttctctttacctgttgtacatatcggccatcatctccacctccagctccgcagccagctgttgggccctgagaggatccatctcagcctagcaccgtggaagggatctccttctggcctcctaatcctgggagcagacatcaccatcagcacccaccgccgccgttcactctcctacccctggggctagaggatacagaggactcacagggcgccagaccaccacgggccactaacctcagtgagcttaaccaccccatttcacggatgtggaaactgaggcctagcccaaggtcgcacaggacgtctatggcgagcctggaaatcgagccccggatctctgatgccccagttcctggaggtcacctctattcaggagatcgaggaccggaggagaactctctaacccacgaacctgaacctccagggccctgggaatgggatcatacgctgaacagaggcgaccgggacccagcccaaaggctacacctctgaaatggcgacgccatcatcagggccacattgaattcagaggtcatgtgtcacttaccactgcctgggacggatcacaatgcccacggagaccccaacttctgacaaatactataacgttacccgcctcccgagaggctccagcggaagcacgtgggttacttccgggaggaaagtcccgcctcttctttgattcaaactcgcttccggaattaaataccaacgagacggcgccgggaactcggcgatcatagagagggagcggctggcgccgggcgaagaggaaggcgacttgccagtgctagagaggacaccaaagtaccatagaagcttgggcggggtgcagagcgtctgcagcccgatcagaattcaagtcctttgggatgtcaccgagcggcttcagtttattggttctgtaggaagaggcgtggcgacagacacctgtgaacctcacccccgttccagacagccgactcctgtgcgcaaatcaggcgtggagaaggaagaacgcccccaaacagcggttctgtttttgtttcgcgttaaaatcacctggaacgtttttaaacatcccagtgcccaggactcacctcatttcaattaaatcagaatctctgggagtacagtttaaaattcctcaggcagcaatacaatttaaaattccccaggtgattcgtatgtacagccaaatttgagaagcagtgctccacgggacgttgtgcgattactgctgtgtgtaggtcacactaagccccgtctggggttgcaaagataagcgagataggcttcctgttcgcagaaagacaagacgtgtaaaatatgttttcttcaacagttagaggtcctcagccacaaagagataataaaagcaatttcggctgccaccagggctaatcttgggtgagggaaagaagggtactggtgaactttccaactttcaagacttaatgtgttcttcaaactgcaccattcactcattccccactaaaaagaaggaaacaaggaaacaatactcagtcccttgatttgtcacacaatttcctggtaaaataaatttacaagatgtaaattaatgacgcaagggcacattgcccattggaaaaggtgggctagacattttctgtgtggtcatcataagcttccctaattgtccaagaccatcctaa

SEQ ID NO: 56097 - DNA, 2896 bp, Homo sapiens
agtgatgaggttgagaaactgaagctctccaaacccagtccacaagtggggaggggtcctttaacactgtggaccatttgaactttctctgccttacccccacccccaacatataatataaacacatcccatgcccccctcctatccctcagcctatgttctatttctgttcaaccaataagctgcttctggtgccttccacccagggtcaatggcccttcatttatctttaccccaaactagaagcatctgcacttgtaagagtttctctatcatctgtgactctttggcaagaacaaagcccagggctgaccggagaagatctggaatagacattttccaggtcttggaaagataaagacacttgaactttatctgtttaggatgagttctgccagaactttcccaaagcctgaggaagttgaaacccaacctaaaacacacagttctttcctactgcctactaggaaatcacctgactcagaggaacagaaaatgaaagtagaaaggccattaagagagcctgcaggctggaggcctgtggacctggtttcatattccagtcccattgctccttactgaaagactctggacaagcaagttatttcctctgtgcctcaatttcctcatttgtaaaatgcgggtatatattacttatctcacagaactgctgtgcgaattagatgaaataaccatgtaaaccgtttggcatgtaatggttccaatgcaataaattctggctcccatctctcttccacttggctggaaagaccctctgcctcattttgctgccaacctccagatttagtatctaggccaagcctgctctgggcatcccagtctgaggccattttcttctcagaggctgagggtagcaggcaccctcttcctagagcctgcccctccaccctgcagactggaaggggcacttctgaaagacttggggtgccagactcacttcaccaggatcaccttcctccctaatccatctccaaacaccctgggttttcccaccttctggaggaaactgccccctccccatccttccagatcttatttcaaattgtgtccctgataggaacaaaattcaacaagggccggatttgtgttcatctctgcccgcccccccccccctcctagaacagggccagcacatgtaggcattcaacacttgtagaactcacgaacgcaagccacctactccaggaggccttccaggtccacctccgcatcttttcctccagagaatactcagggaactttgtcccaaattctaatcagcattccgtgtttctcaggactctagtaatacaggcatcaaattatgggatgggctatgggcttattccaaggcaaggacttcatcctggtcatctgtgttcataacccaccaccagcagtagcagaatgcctggcaccaagatgccaaggacttttcctgcactggagatgcacccagttgttatcacaagtttcaggcaggaaaagcgaaattgaaaccagttttgggggagccggctcatcttcaccacgcgaacggctcaagcagaggcctccaaacccccaaaaccccagctctggccactcttgcaggccagtcctcctctgagtagagggcggggaggacagggattcagccagccctggtgcccagacaaataaataaatgtgctcggagagccgcggaggggatggagggaggagggaatgcgggaggcgaggggagccaagagaaaggggtcatcctatacgcggttaccttcaccactcgcatgctcgccatcatgtcgggaccgagtgtgtggcacccgtggcctccagcaggaccgagctccgacccgcgacacagcgcgccccgccccgccccggggaccccacccccggcagccccgcccacccctcctccagccgtcgctgcgtgggcctccccgcacccgctccggcgaggccaggaggccgtcgaaggacgacccgccggacaaccgcccgatccccgcgcggaaggctcggacccgggactcacggtctttgtgcggagacgggggcgggcctcggggcgcacggctttgctgatccctgcctcccgcggggtgcgccgtgcaccggcggcgagcgctcaggggcgctggggggcgctcatacgggttccagtcttcgctccgccggcggccgcaccgggagctctccggtctttgtcagccccctgcacgccgccccaaatacacactcgccctgaataaataagggatgctcgctgtacagacgcagctccgtgacagttctcagcggcctccactatcggactgccgccttgagcccctgccccagcaagctgccggagccgccgagcctgccgccttccctccatgggcccagcgctccatctccgaaactgcgtgggggatggcgtagacctgtgccctccgagcaccgctccccggcagtcggggatcctttgtgctgcccggcgttcggcgcgggctgcaacgtttctccccgtggcttggggcagagcaccgcaaggaggcgctgttggaccctttctcttttgctttgggggttcggtctaccatcattcagtcctttactaggtttagtatttactaagtgcctactgtatgctggtttgggaaacagttggtgggggaagccccaagaaggactcaggagcctcctttccaagagagagtctgcttcccctcccttactttactactggtccattacaagctgtgggcctaatgtgtgcccccatgcacagctggagtccccaaccctctgtgcaaggacagagtacttgcagcccctgagcaccaagcagcatctggggaagatgagacttgttgggagggccgatcccctccttctcacccttccctacccccgtttagtccag

SEQ ID NO: 56098 - DNA, 722 bp, Homo sapiens
tccaagtattttgaaaccaaatgacttctctgctcagattttgcagaacgattaattgtttcattcaattcaatgaactttaacagcattttctatatgcccgaaatgaataggacactccgtaatcccttaacaggggtagagatgagggaacaaagacattcgaacctgcctgtgatcaatagtctcagtcaacaagcgcctactactgagtggcaggcattgccaataggaaacaccaggatgagaaaggggagtccctgctcctgaggagttagttcccagactactgggacagagggagagaatgcagcccctgatttttaatgataatgctatagagaatcacctggtactctgggagtatgaggagggtcactttatccctcttcagggaggggcagaggtttcccggaagagagaaaaatccaagtgtattgtgaaacatgatgagtcagcgagaagtaagagcgtgggatgaagatgttctaacaagagggaacagcatgagcaaacggggcagtgtctatggaaactggagcaaaagcctctgtccacgtatcgtagctctccttttcttttcttacaggaacgctgcatcccgaggtgaattaacagtcatggatatagctgggtcctaagtccccacacagtggggcagcccactggtgtgcctttcatgtcctttcacaatgcagacctttgtgtgtcagaacaagccc

SEQ ID NO: 56099 - DNA, 4341 bp, Homo sapiens
gcccaggctggagtgcagtggcatgatcaatgctaactgcagccttgaactcctgggctcaagggatcctcctgcctcagtctcctaaaaggctgggattacaggtatgaacccccaggcctgcctacttcgtgtgttttatctggcaatgctgagaggacagctagatgtcgaggacagccagatttcgaggacagccagacgtcaagggggaaagcaacttgctggctcacacagccagccaggtctattgtggagccctagtcgcaaacacatacaccccagctttcaagtttttaaatatttatttagttagttatttgttttttgagacagtcttgctctgtcacccaggctggagtgcagtggtgcaatttcagctcactgcaacctctgcctcccagattcaagtgattgtgcctcagcctccctagtagctgggactacatgtgcgcgcctgcactgcccagctaatttttgtacttttagcggaaacggggtttccccatattggccagagtggtctcaaactcctgacctcaagtgatccacccacctcggcctcccaaagtgctgggattacaggcgtgagccaccgtgcccggctagctttttttttttttttttttttaattaggttgaatgcttgttgagctgggtgcctcacatccgttgtctgttatacaaagaactactgattatgggtctctacgagcaaaaatggcagaacacctacagggcacaggggagatgggagcagggattaggcttcagaatacttctccaaatgagggtgatcagggcccgacatttcactgctctaaggctcagtatcttaactatcaaatgggtacaatggggcacaaagggttactttgaggaataacggaggtgagcaatttccaaaaagttcattcctttaaaaactgcggagcacattttgtgtacatgctgtttttattgttactcatgaagacgcgggggaagctttggttgtgtaaagctgagaactgcacccaagcttccccgttcaccccacctaccaggggatttgggctaaattcctggcctggcccacaaagaagaccaagcggtcagtcccattccgtcccatcctgatttacaggaactcacaccagcgatcaatcttccttaatttgtaactgggcagtgtcccgggccagccaatagctaagactgccccccccgcaccccaccctccctgaccctgggggactctctactcagtctgcactggagctgcctggtgaccagaagtttggagtaggtttggtgctgggcaggggtggggagtagggtggaaagcatggagtgaagaggtctagggagggggtctcctcacccccgccttcctgcccgccttgatctcgggggtctctataggcttgcttccacctgggacttctgcctcctcctaccccagcccctcccgcctcaggcctgttgtgctcagccccccaggacctcccctcccccacgcctctggcctcattgtttggttaaagcaggaccccctccccctcccaccacctcccctccgactgaacagatggacagagacccgggcccacggggagaggaagggccagccggtgccgggaaagggaagcggtttggggaaaacaaaacagagggaggagccagggagaaggtggccccaggagggaggaggagggaattcgctaagagggactggggcctgagacggaatgggggcgggccccgggcggggtgggggcccctgggctcccagggtgggagctggctccgaggctggctggctccgcaggtccgctgacgtcgccgcccagatggcctccaggctgaccctgctgaccctcctgctgctgctgctggctggggtatgtggtcccttgtgggatgggggacgggggtggagacgggaggcgggatggtgcggggtgcgggcggtggctgaggattaacccttcaggctccggggaatgaggagagctcctcttgggatcattgagtgtgatccttgcacacgcactcgtagatggtggaaagagctcaggactcagacagatgcaagttctaatcttggcgggccatgtaggagctgcgcagcgtggtcctgaggacgtcacttttctcagcctactcctcctgatttataaaatgttgaataaacagatcccaccctgtccaccaagcaggcttggcaggaggatcacatagggcaaggagatgggaagcattttgtgatatcaaagcaagagtttgttgtagaaaagagctgtggggaggagaggtttggctgctgtgacacagacggtggtcccaggctagggcctgtgaagacagggaagaatggtagcaaacatacgtgggtctgggtgggggtcaatagcagtgagaggtcccagtggtctgggaggtcatggactagaaataaggctaagaagtgcaggatcccaggagaaaggtaggtaggggtgtgtgtatgtgcgtgtgtgtgtgtgtgcacgcgcaagttggtatcacatactcagcagatgatgtagttatgagcagggagtttggaatcagagaccttgttttgacccctagctgtttctcccatttctgtgagaccctggactagttaatatgtgtcggtatgagtttctctacctgtgaaatggagctaatgcgtggtttctcagtggaggatctgttgacattggggctggataattcattgctgaggggctaccctgcgcattttaggatgttttgcagtatatctctagcctctacgcactagattccggtagcatcttccctgctgtctccctgtgacaaccaaaaatgtctctggacattgccaaatatcccctgggagtcaaaattgtttcagagccgctggcctatactacttctctctccctcccttcctgcctcccttctttcctccttccctttcttcgttcccttcctaatgtgtactgtttttccacacccactaatgggttgcaacccacagtttaaaaatttactgttctaaatcaaggagcacaagttcaaatgtctgtactagccaagcaagtgagtcaaacaggtagatatttacaggaaattgcaagaacatagataaatgacaacactcagcttcactgtttggaaaacaacttcctacagggcagtaattggtcagagattacagagtccctgactatccctcatcttctgcagagcacattcctgtgcacccccaccctcaccctgtattgccccttctctgaggaattagtggtggtggttctaagacagattgctcatctgccgcactgtcagaaattactctcttgtacaggacattttccacatccacaccttctcttcctgctttgagtattttagaggactgtgcctcgtagtaagaaaaaaatgaaactcagtttcttgaaccacaggatagagcctcctcaaatccaaatgctaccagctccagctcccaggatccagagagtttgcaagacagaggcgaagggaaggtcgcaacaacagttatctccaagatgctattcgttgaacccatcctggaggtttccagcttgccgacaaccaactcaacaaccaattcagccaccaaaataacagctaataccactgatgaacccaccacacaacccaccacagagcccaccacccaacccaccatccaacccacccaaccaactacccagctcccaacagattctcctacccagcccactactgggtccttctgcccaggacctgttactctctgctctgacttggagagtcattcaacagaggccgtgttgggggatgctttggtagatttctccctgaagctctaccacgccttctcagcaatgaagaaggtggagaccaacatggccttttccccattcagcatcgccagcctccttacccaggtcctgctcggtaagaccctgcttgaattctctccaggtcatttgttggacactcccataagagtcaccaatccagacacttacaaagccatgcctctgggaagaagctgtaaaaatgggctattatatattgggggtggggtagagggatgtatcttttcattcttgaacattccatcatttcacagtgatgtaataggcacgattgcttgtaaaactctgtgactatacaagaacatataaaataaggtcgcagccactaaccatgtttcatggcaaggagaggtgataagaaagatgaaattaggcgcagtggctcacgcctgtaatcccagcactttgggaggccaaggcgggtggatcacctgaggtcaggagttcaagaccagcctggccaacatggtgaaaccct

SEQ ID NO: 56100 - DNA, 767 bp, Homo sapiens
cctagtgaaaacaatcttctttactcagtctaccagctcaaataccagtctcttcaggaaacaacctcacagacacacccagaaatgatatcttaccagttgtctgggcatcccttagcccagtaaaattgacacataaatttaaccaccccacaccttcccttctcagtttcccaaagtcaatctctcaggctgctgggaagaccccaaattcctgtctgggtgggtcccgctttgattcttatgtgaggaactgttgaaagcaaaggcaccccccaaattcaggaagattcccctctccttggggagatcctgacatgatgaaggtggtgctcagcaccaacctgaattgtgaaccaacaaagtcaggaggtggaaggtgattctgacccctgtgggggtcaaatctctttgacccttccaatcatgctgagcccggtaatgttcccgtttgtgaaatgatgaagccaaaactcagagaggttaagtaactatccaaaggtcagactgctgcaaatcgatcccacattatccaaattcaagtgtagtagataacttatttgggcaggcttatttcctttctgcccaaacttgactgtaacttaaatctgtgtcttcttactccctgcaccatgtgaccctacagagcttatcaaagtgtcttgcacttaaaaaaaaaaaaactatggaggctgggcatagtggctcatgcctataatgccagcactttgggagacggaggcaggcagatcacttgaggccagggt

SEQ ID NO: 56101 - DNA, 1240 bp, Homo sapiens
ccaggctggagtacagtgacacaatctcggctcactgcagcctccgcctcctgggttcaaacaattctcctgtctcagcctcccgagtagctgggactacaggcttgtgccaccatgcctagctaatttttgtatctttagtagaaacgaggtttcactatgttggccaggctggtctcgaactcctgacctcaggtgacctgccctccttggccccccaaagtgccgggattacaggtataagccactgcacccagcctgaacatttattttgctaatgagtcattgacccagtgtgggcttggcaaatctagggtagcctcagttatgtacctgctacagtcagctgggggttagctgaaggtttgttgaggtttgatttcactgagcttgcataggctctttcacatgttttagactttggctgggatcaaccagatgaccaattctgatccaagtgatctctggtcttccaggaagctagtctggcttattcatacgaagtttgcaaaagtccaagaaagcaagcagaggcatgcatgcaaggcctcttgaatccgaagctaggaactactagaacatcacttctgcctcattctagcagccaaagcaagtcaccagaccagtttagattcaaggtaaggaaagaatctctacctgttaaagaaaagacctgcaaagtcattctgctaagggcattaatataacgaaatgtgaataattctggccacttttccagtataccatatgtggtcttacatagttgcaaacaactattagcaactttccccagcaacctgccactctgtttttccctaaagaatcaagggcttttgtcgagatcataataatattagaaacactttgttacatgaagtttcaagtcgtttgcatataaattgaatcttctgttgctatctctgtggcatatttaacaatctctggctcttccagctgcctgtgttgtagaataaattattataaatacagagctgcctgagtatttataataataaataaataaattatcttcatttccatttcccttgagaaagatggacagagggctatgcactcatagacacacacacacacacacacacacacacacacccttacaacccccacctttctgccctgccttgcaattctactctggggtagacaaaggcctgtatgtccacagatccattttcagtgatctgtttcctgtccccaactgtagacccctccacacgtg

SEQ ID NO: 56102 - DNA, 1145 bp, Homo sapiens
cttgtatcttccaaggtctccaaatccagcacgaggggcatctgggaacagggtttctgccagccccaccttggggccgcatttggcgggaactggatctgccttcacctgcagccctgtgcggggcgtgacggaaagagcggggagaggggcgtcctggtgcgggggttgttgaggtgagaagccaggggagggggctccgggagcgccctgacctcgcggactgttgggaggcggaggggatgggggttgggggagaagaggggagcctggcagccaatgggagggaggatctcgtttcaaaagggttaacccacagccaatgggagcctgggggagcggatcctgctcactccattcaagaatcccaagtattcaagatggacggcagggagtgtggaaggagaaagggggcgaggggggaagagcgagatcggcagaggagagggtctccgcggcccaccggcctcgcaacctcggtcccggccggcgggtggcggggcggccgctggggatccaagcccggcccgggagaggggctggcggggtgcgagagggcgtgagcgagggggagcgaggccagggaggggagccaagagggagggaagggcagagaaagagcccgggaagaaggaggtggcaggcagaggatcctaacgaagagcaatgtgtaggtatcgagagcttcccgaagggtaacgacaccgattttcggttttattctctcttggggaagggagggggacggtctgggctctttctctcgtcttcctttttccctcctcattctccactcgtgggcatcttttctattttttcctttggaaacactgtaactgggaagcaccaggcgtgtctttctgaggtggcctcactgtcattttccagtggggggcgtggtggggtagggatggggggctccgctgggcacggccgagctgggccatctgtctccacctgggttgtgtgcgagggcgtggagtgttccgagggggaccgggggccgaagggctggagcagggcagggagttctgcacctccagaagttgtagggtgagccaggggcggtgtgggggtgtgaggctggttttcgagctgatagttgtggggtgttgaggggtgcggggatgtgtgtgtgtgggggg

SEQ ID NO: 56103 - DNA, 850 bp, Homo sapiens
cccctgcccctgctgctccagctaaccccccacctgccctttctctccctttcacaggctgggccccatcccctgctgctctgggggcaggggccggaagatggtggccaatgaggagggggagaggagagaacttgagccggggcctcccctcccccatttcctcctcggtctctacactcgcttctggaaggagctgggggctggctcctgggcccaaggtgggggaggggtcctgctggctggtgagtcgctgggcctgctcctcaggaatgagttgggtgtgtgagagctgaggggctcttggccctttctccctgcactccctaaggagagacctggaaacttcttggggaagaatcttcccctggcctccctgaagcttgctgtgcagccttatctttgcccctctgccccctgttggtgtgatccagttcccagctgggcctggtttgcccaaccccagagcagagaggtcactgaccctcgaggggtcttggtttccgcccattaaaactgtagggcagggccccatgtttgcagattacgggaacaaactctgccggggagagcgggagggaacgtctcctgcttcctgagggggtgggacgaggctagagggaagcccagaggaagagctcccaactggaattctgtcctctattccttacggtggctgtggattagggaagaaggcatctccccttcgttgatcggggcactggaggaatcaccctccagcctctgtttctctgggctgcccaaagttcactgggtcagaactggagctgggctccggggctgtggccctagctggaatgtgccacaatagagcctgcctgggtctgag

SEQ ID NO: 56104 - DNA, 1246 bp, Homo sapiens
agggaaatgagtgcctaacaaaaatcctcgtttagtgggagagaggttgttgggtaatgactgacttgtagctggaagaaatcatcggatttttattcttttattaaagaaaaaaaatttgaaatgccttccatgtgccaagcactgtgtcaggtgggagatgacagcttggtgaaacctctgtcaggctgtcttcctccgctttctctatccctgggtttccccctgcctaaaaaggattttgtgcttcgtggcttgtccaggcaagcaggccgtcgcgggacctagaccgagacagtgagtctctctttctcccgggcctcccttctgtttcctgggctgcaggggagcaggaaatctggggcgagattcccgccgcggacgcgcactgccgaagcctggtccctcgacctgtccctgcccagcgcgggggcgcaaccgccacgcctcctcacccctccctccggctgcacgaataatgacaacagccgcccctcccacctttggcgtcacgttcaaaacaatcctttgactacaactcccagaaggccgagcggcttagcgagtgcacccgctctcggctgctccggcaaactacacatcccaaagggcagcgcgcgaccgcgtgtcctttcacagcgcaagtgcggaactgcgtttgtttccggcgtgggtccgggcaagaaccgcttgtagtttggtttaaattctgcacgggaggaccttctgagtttacctgttgggctcctggctgcgcaggtgagttaaaaaaagggcaggaacacaactgtcacctccttggggtctggggacattttggtgtctggggagattttggtgtcttggggagattttggtgtctgggaaggttgggacaaatgctggagctagagctgcagtccaggatcagaaataattcatatcgtttccttgccgttttctagtttacgaagtgcttttttttcctcccacaattcctgtaaaccccaagaacaacactgtatttgaggaagtgtaagtgcttccagtcgacagcttcaaaggttcagagaagttaagtgattgtctaaagacactactagtagttacagagacgaggattaggctgttttctgagttcagacccggtgtgctctgctttgcatccgtatttcagacgccctttcctgttgactaggatgattggggtcagggcatctgttaccttctcaagtttggagtttaccaatagagtgatggagggtga

SEQ ID NO: 56105 - DNA, 2858 bp, Homo sapiens
gggattacaggctcccccgaccatgcccgactaatttttgtatttttagtagagggagtttcactatgttggccaggctggtcttgagcacctgacctcgtgatccgcctgccttggcctcccaaagtgctgggattacaggtgtgaaccaccacgccaggccaggtctgttttaaaaatataaagtcgttataaagaactctcaagtgtgttgcaataaatgctggattgacgctgttaacaagaataaactagaacttataatatatgccatgtcagagaaggaactagattccagaaaacagaaggtagttctcttttaccttactgcctaatgctagtgtcagaaccacagtaaagccagcaacatttgagaccaaacccgaggacagtcctcaggattttacaggtgaggggcctcggcttcagggaagtggcttgtgaaacacctttttgagggaccattatgtaatagctagagttgctttcgaaaaaagaaatagcctcgagccgaatggggagagaacatggggcattgctattgggttcacagctgtcttgggctaatcagggcaaagcgtagcactatgacctatgcagagttagctcgccagggacagtagctattctagagaaccttttgcttttagctttgtattctaggattgggtgaggtgagggatgcgggcgcccatcccacgtgtgacagtgggaaactaatggaattcagggagttcacttcccggctcgcactccgggggcgggagggtgctgccaccgcctcaggtcgcgcgctccttaggcttccctctcacggttagcgctacggctccaaggctggcgcctgctcttcttcatctccctccccggcccttggcaggagcctcgccctacattggctcttcaagtccgggcgtccccttcatgtgggagacacagcccagaccattccatcgccctggattctgcccggaccagcgacctcgccggactgaagatttctccagcaagattgttttaaataaagtttttgccatcaaaaaaaaaaaaaaaaaaaaaaaaggagatgggaaggagaagagggaggcctagtcgccaaatggttggccaatccgccgcgaaggggctgaagcaggaagcggcgatagtcgtcggtaattggctgcgctggaagcctgtctggactgtaccacctcagtaggagaggggttgctgaattcgagaaggtagctgcttgcttttgagtacttctagtacacacacataattcttttcttatttccgggggtttttgcttggattcagtgggaatacaacaggacgcaggagaagggaagactcgcctggccatttcctcattcctgactcctgtgcattaggccaatccttgtctcttagttgtccccgcaaccccacggccttacgtgcgcgctctcgtcttctcgcgtgcgtacgtcgttgtgttgctgcagccaatcaggccgcgaggtcgccgcggtcgccagggttcgcgcgcacgccccagatcggagtcggggtgggggctatgggtgaatgggagagtgagcggggttgggcgcggcagcgcgagccgcatgaatgagacaaacgtgcgccgcgcgagacgtcgcgcgagcccggactagggagccaatgggaacgctggaagggttcgagacccggcactgagggcaacggccgcgcgccggctccgagacgagcgacgcctggcgggagcgcgcggcagcggggcgggcgtggagcgtgcgggggccgcgcgctgcttctctgaggcaggacggcactgccgggaggcggcggtgacaacgacggcggtggtgacgggcaccgggctcgcgggtgagtgcggaggacaccggtccctgcggaaccggaagtgccgtaccagcgaggtgggaggggagggtgacctctagggaagggggaccgaagacggggagggtattaaggccctatttctcctccgggccgggtcttccaaccgcggcgggacccatgggccttggaaacggacgacgagtagaggccggggatccacgaccgccagggctcggaacgggttagagacggccactcagctcgagaccgcggtccccggtgcctggcgcccagccgccgccccttccgcccccggccctgcgccctcgggctctgcggtccccgcagcccgctctctcaacctcggtgggcctggccgccgtggattccttcttttcggtttcagcggtcgtcagccctgccccaacgggtgattctcctttccccagtcccgtggtggggaccgggtgctgtttcccttttaccgctctgcggttcgagtccctcgctccactctgctgatacttattttggctcaagcttcatcctgttacctgttctctctcacccgtccgcttcctcctcctaccgccaccagccgagtgctccatgcgtttagtactttgtactttttaaagtggagcccgaatgcgtttgtcaatattttacctatatttggggcaggcaggtggaaagtgttttacccacttggccaaatgaaacactgaaataagaagtaagaaagttgctaaaagttaggaaggcagttgtaggatcacatatacgttatacgctagactattttttgccttggattcttcacttcctggttaatgccatcttgaccaagttgatctaacatttgcatatcatccttctatctcagtatacctctgtcctggatcaaatatcttcagaatgctcattatcacccattgtataaacttaatgtttacaaaattatattgccatgtattttgctacctcggtatataatgataacacccacattaaacttc

SEQ ID NO: 56106 - DNA, 466 bp, Homo sapiens
atagcaacggaaagcctctccttaaatcaagcagaatttgggatatggcaagaacgggctctgctcacacatgcctctccttggtggggtgttcccttatagtgctgattggaagcaatggttctgtgaatctaggagcaaatattgtccatgaagttgttatttgcatcatttctagattctggcactgtgggggcagactttattttggcaacagatactggaattccattccaggattacacactttatctggaccaagttgatatccagaaggttgtagggtaaagttcatcatccagggataggttggcaggatccccaagaaactgagttgctttgcctaaaaatgaaactggctgggcatggtggctcatgtctgtaatcccagcactttgggaggctgaggcgggcaaatcgctttgagctcaagagttgagtccagcctgggcaacatggtgaaacc

SEQ ID NO: 56107 - DNA, 1787 bp, Homo sapiens
acagtaacggagatgcactacgcccctgcccgccattcatccctttggttgaattcaactcatcctggttgaattcaagtcatccctctgcttgtgaatcctaacagcgcttccgacttagggctccacagtccgggtatgcgttgcctaggttacctcgcacctccgctagccggctgagagccacgcccatcacctcctctctaagatttgattggctggctttggcaaggccgagtactcacctggcagttccctcatgaggtaaaaagggccacagccagctcctgacttgtccgcgccaggaggagccgtggccgcggtgggaggcggggccgtgccgggtcccccgcccgcaggaggcggtggcgggggtggaggctttcctggtccgaagccgagtgcggttgggggcggtggtgggtcagcctgagccccaaacagtgccgtgaaattctccatcgtaccctccgccccggcgctgtctccgtgtctgccgttggtaattttcattggacaatgctttcaaggagtacccccccgccctttctcaaggagccgcttgtcattggatgcctcaggcaccgcctaccttttttcaacaactacttccgtcgccttatgagaacgttcaggaagtgctatttaaccttattagagtcttctgctagctctgcttgctacagtccaataaaatgacttaggcggataaagcgacaactagactaaccaataaaatattaagttcttttttgggttctgacctaccacagcgttcagagaactacatccgggtttagaggccgtacgtttgcgatatagcccaatagcagtcgttatggtgggggaggcggggcgagacctacgacgccggcgagcagtggccgttacggccgaaaagatggcggtcttggcacctctaattgctctcgtgtattcggtgccgcgactttcacgatggctcgcccaaccttactaccttctgtcggccctgctctctgctgccttcctactcgtgaggaaactgccgccgctctgccacggtctgcccacccaacgcgaagacggtaacccgtgtgactttgactgggtgagcctcccgcgtgttagtaccccgcgaccttgactgtccctgcccttgcaggtgtatctgggaaccctggggtttacctctctgaggacacctgaggttccgagcctgtagcggacttagagactattaagtgcagggtccgaaccatcatcgagtctaaactttgtgtttaagatgggaaaacggaacatgttagtcgtagcccatgcacaacggcccaacagcttttgactgttgagtccaggtttctttctgtttcaccattgagactaattaacagccctatcaaaactgtacatacacgtgtataacgttttacagtgccgctcattatgtaaagcctcctgaggagccagtaaggtagacaaggcaagtagtaatattcctgtttcattggtgaagaaatggatctcggtatatttaggtgacttgccccaggtcatacaactaatgagtgcctgggacttgaaactactcttctggccacactacctgcacaacactgtcagccgcttcttaattcaataaacatttctagagtgtacactctaggcactctgcttgatcctgaagatgcgaaagtggataaaatttgggggctactgtaaaggaattgtaaaaaatacgttgtaaagaaatctttgggatttctttgggaagtgtcccaagctccttgctgtgcttccttggtatg

SEQ ID NO: 56108 - DNA, 1750 bp, Homo sapiens
tctgacatactccccacacccagttgatggctttccgtaataaaaagattgggatttccttttgattgcgcgtttgtgtgtttctgtattagaaaagcctgacaactgcagaggaattgcccatcttaagggcaaaggccatcctatttggtttcaccaaatgccgggcattgatccccaggactggcaagagttggagaagtctagtttccataaatctagaatagcggccacatgttgttaggtggtgggtttactctgggattggcctgcggttgccagggaggagagtttggcggcagatggtggcacacaacatttagcgccatgcaaaggtacagaaaagattgcgcgaagcgaggctagcagtcggacctagtctccgccccttcctgctgtgttcaccatcccagcgtcccctgtcccctccacccgaagcgatgggtggttccgtcaggcgcttcccgcaccttcccgctccctgcttgcaaagtggttgtgccccaaggtccgcctccaggccacgtgggtgctgcgggccaagctttcccttcctttgagagaggtttccgctgtaggagcagagcttccgggctgcgctcttcgttgcccagtttccgctcagtggtcgcgtctccgccccccacccaccagtcccgctgcattctcggccgggctctaggcgccatggctccccgcgggaggaagcgtaaggctgaggccgcggtggtcgccgtagccgagaagcgagagaagctggcgaacggcggggagggaatggaggaggcgaccgttgttatcgagcattggtgaggggcctggagagtaacgggagagagggaacagtggcgccggggggggccaggggccccggtttctaacctctccgtctctccctagcactagctgacgcgtctatgggcgcaacgccgcggccctgagccaggcgctgcgcctggaggccccagagcttccagtaaaggtgaacccgacgaagccccggaggggcagcttcgaggtgacgctgctgcgcccggacggcagcagtaagtggggacctggatgtgggggagagggacgtgggtgaaagggacgtgggttccgaagacaggaagcgctattcttagaaaccacggcagtctcatgacttcagagacgtgctcgtgggttccgaagtattgtaacttcgcttcattctggcctttcaggtgcggagctctggactgggattaagaaggggcccccacgcaaactcaaattccctgagcctcaagaggtggtggaagagttgaagaagtacctgtcgtagggagatttgggtagaagccctcatgctgaggtttgaaatgggaagtggggggcgcgaccgctgttgaggaagagaaggcattgatcttggtgtggctacaagtacccacctggcgtgggtagctcacgcctgcaatcccagcactctgggaggtcgaggcaggagtggatggccaacacagggagaccctatttgaaaacaaaaaacaaaaaaaagacacaatattgttttctgtctagtgtgccctaagtggaatttatgtcctttgggagactgtagttgacttgccctgggggtatggacaagttttccatttggaagtttatttcatgttacttcatttatgcttatccctaccctcttctgtttggttcttgggtgttctgttactgtcctgtgttaacactgcattacaataccattaaatttggttacaaggat

SEQ ID NO: 56109 - DNA, 2592 bp, Homo sapiens
gtctctactaaaaatacaaaattagctgggcatggtggcacatgcctgtaatcccagctactcgggaggctgaggcaggagaatcgcttgaacctgggaggcggatgttgcggtgagctgagatcgcaccattgtactccagcctgggctcgaaactccatctcaaaaaaaaaaaaaaaaaatagctctaatgcaattaatccaaaacagtgaaactgagtttacctcagatatcccctaccatcccagtcaacatatagtagtcctgtttttaggatttctctctcctttctttcccgtcttcctttagggaaatgctttggggtaggaagcaacaaaccaaacagcagcaggcaagtaaaatcagctcttttctatttccccactgggatagtacagaagagggagcaagaactcatcatcaaagagaactgagacttaggcgtaccattctaaaaagcccttgttccttgtctcccttgcctcttccgcccccctcagctctgcagtaattcctcagagattgtacagtctctccactttaaatataaatatataaatataaatatatatatgtataaacttccccctgtctttctctcctctcttttttttaattttctataataaagtttcctattggataaggtcagctccctgatttatgcctggttcctattggaagctcacaggggctgacatcacttaggaaagcgaagggggtagggctgccagatcagtttgtcaccacccaggctcccttgcctttggctgggtgcaacttccattttaggtgttggatctgagggggaaaaaaaagagagagggagagagagagaaagaagagcaggaaagatcccgaaaggaggaagaggtggcgaaaaatcaactgccctgctggatttgtctttctcagcaccttggcgaagccttgggtttctttcttaaaggactgatttttagaactccacatttgaggtgtgtggcttttgaagaaaatgtatgtactgacgggaaaaggaggataagcaagtcgaatttttgtcttacggtaaccggagggaattaaaaaacgggagagtctgttatgctgatgagtaacttttaagcaattatttttcttttctactttcagtactttggcgggggagattttggtattttattatatttaaaaaggtaaaatatacaagacctagaaacaaacttctaggtctctttaatacaggaagctgaatagatccagaggggtaagagcaggtttgaaaatttacattttggtgtgttctttgattttatttatttatttttctggattaagctaacatatttctgttttcagagcccaaatcaaaagttggttttttggcatgttgcatgtgggttgggaaagaaatttgtccgtgtcggaacccagttataccgatggttcttcatatgtttaaaactttttttttcttttatcattggatttgtggaagtggaaagttgcagggagctttgcagtgtaaatggtattgtttttcccccagagagtttgaacggcccgtatcggtttcagccctgctgttcctgggtggatccctcttacttttccaggtgcggtgggtgggagcctcattctcctgctagatgtagtctcccttctttggcttataaaagaaaacaaatggaaccatgttaactgaattgccatctccttcttccttctaaactacctttgatagcaaagatttgtggaggtgtttgttaaatctgcaaatacgataacgtttggtttatgtgtttaaagggataaggaaattctaatcatgctttttatttcacctgagtaaagtggcaacatacctgaaaatattttcagctttttgcactctgaaagggccaagggtggaataaaattaggtttagaaaaaccatttatacaaagtttagtgtttaaaatacatttcagaaaacaagggagatttttatttttaaaccaacctgaaagttgttttttggagttgaatttattgtttagttaatttaccatgaaatctgaaatctcttagagctgaaggcccatgactgtgctttcatatcttatatttaatcttaagatttgttttgtttttgcaaatacattcttgcaaaagtacggattctagataattatatagccaactcatcagtagctgaaaaactagggtattctcttctctttttgaaaatgtgaatccgcctgaaaattatagatgctgtcctaattgtaacaagatgggctttagtgtgtaagctgctcattagctttaaactggtatggatctttaataatctgatttcgttctcccctcacccccctgccacaaatttttttaagactagacttccttgaatttcttttctagaatgagggtatttcttgaaagacgatttcatccttgtgaagttgtggcttcaggaggaaacagaactttgttcctccttcaaatacaacctaggcaaaggctgcaggaaatttttgatgtctgaatctcataattataacaagtacagttaaaaagaaagaaaaaatacaatgtgtataggctgttgaactgtagttcttgt

SEQ ID NO: 56110 - DNA, 2314 bp, Homo sapiens
tgatctcagctcactgcaacctctgcctcccgggctcaagtgattcccctgccttagccacctggagtagcttggattacaggtgtgctccaccatgcccggcaaatttttttatttttagtagagatggggtttcaccatgttggccagcctggtctcgaactcctgacctccagtggtttgcctgcttcggcctcccaaagtgctgggattacaggcttgagccactgtgccaggccaaggactaaatccttctaagttgtctgtttagacttagttcctttgtatcatgtgctgctttagaccagggttcggcccatactacttctagcagatctaagaagatgaaaggaatctaggaaaaataaagggagaagacaagacaagaagtgatagcatattaccagttagttcctggtgtgcccctctggttggaggactctgctgagcatcttgctcattttatgcaaagggaattgagccctttgggcaaagggtgttgcttctttggatttcaagaatctctagctaatagagcttaacctctgtttgcatttttgcttctgtgatttagggctaatttccaatgggttgtacaagataatagaaaaatgtatcatttatctcattcttgcagttagtggaggacctttattaggagaggaggctttcttttctgactaggctccaaatttacagcccctgacccacttcagggggttgtgagcaggaaaagctgatgttgctgtcttgacctctttgccgccaggatttggcttctgtgcaattcctagtggttgtcctctcattctctagggaaacggggaactttgctcccagcacctgattaaactgcctctttgtagggtggagtccgctgcctttgtttgttctctgtggagcctgtcttagtaatcaactctatgcttgtagggagaaagtttgaaaggctgaaaacagaggtggatgatagggaaggtgaagttcctaaagtagttctccaaatgggaatattccattgactgaatccagattggtaatcaaattgccataatgggatgtgtcacatgtagctgagctgaattaacagcatcagtagctttaaaatccctaatgcagtgcctccaaagtgaagaaacttgccaagtaggaatcttaaaaattccctcacccccttcaaacttttagatccacacacagtctttctgctgattcttaaaggcctgagctttgtcctacgtagtgttggcttggggcagagaggagggttgttttccctgaacatgataaggagctgagcagggcaaagtgggggctctggcccgtgattggtagacaggatgccctggaatgcagttggcctgcagcccagaatccagcactttgtatttgtttgtttctgggagactgtggtctggtgctactgtgacaggaagtgagaaagctgggagtgggggaacagagagggtcgatgtctttgtggttctcctgtgaaatctctttgtccctggagagcagctctgctacagagctctgctgagaagagagcagcctttgtgtgtctaatgggtctcggagcatctagctactccgagggattagagagtgtgaattctgactgtggccttttgcgttttagcacttaagttatataaatggtcctgatctcttagcactgggaagcttactgagttttgtgtgtgctgctattctttgtggatctctaggatttaattaagaaaggaattctagaaggaaataaatgttaagtaatgttcatttgctgtatatgttgcaggtaccttgttgggtttaaaagggacagaaggaaacaggtaatgctgaggtcctttacattttatatctcatccttccaattggcaccctactgcatacagatcaggagaaacctacccgcttagtattaagagttactagcaattctctaatgtttgatcataactagagaatggttggtagtttcctgggatttttcttccctatgtctagactgaaatagcacctgtaataccctctctcttttctgccctcttttctctcttgttttgtgttttccctgccttccattccagctgtgaaacaggcatcttttctcactttgtggattggatggctgagtccttaactttgagccaagctggctggttcctgagcacacacacaaacccgcctttgattgtccaggaggacagctgccctagaggcagattgctaacataccactagaacaatccttcttctctgttcttatgctggctagcacaatctttactgcctctagttccttctgttt

SEQ ID NO: 56111 - DNA, 945 bp, Homo sapiens
ctgggattacgcgtgagctactgcacccggctgagtgatttttttttttttttttttaagatagagaaagtccctcatactgaggagccttgcagttgagagagaacagaattccagttggaggatcaaggaatttgagggaggcagcatgcttgcagtgttcctaggatttttacaggaactacaatagaaagttagggatgaaattatattgaaaggagaaagctggactgctcaggtttggaggtcatggggaattccaggattcagtatgtggttgctctcttatttttaacttctgcttagcagtaaaaccacacccttccttcttcctgaaagtaatgtttaacttcctctccctgcagcattacactctatgtaatgggagtggggtggaggaagagtctcccaaggtggttggatctcactattctactggaagaggagcaggcaaatatatttttatgtggtataatgtcattagattatttcctgctgcttaagacagagcaacttctggatgacattttggaatgtattctgtggctctaataattgttggtaaagatattgagccttctgttttcttgaggggagttggggtgcttgtttttgtacttggaaagggagactcgtatctcttgcttttttctttaattaaatttctgttttttacattaggacatgatagccatcttgcttctttctttaaaaagctgcctggaatgggagtttccagtggtagtactgcatgaagattcatgagactataaagctctttggaaaccccccaacttagcccttccaactttccttacatttttatggctttccaaaaaggttgcatgtaagggaaattatctaggtctgtgctgtttattcagcaaatagtttttgagcacctgttatgtgccaggcactgttcaaggcactagactaaactaa

SEQ ID NO: 56112 - DNA, 1096 bp, Homo sapiens
tgtatcatctttgtcgtatgttgttctttttttcaaacaatcttttaaaaatagcattatggggatgtacaaaaacaggtttggcccatgggctgccaatgctgcttcagaataaattagaaacagtgttttccaggtaaagagaaatgataagaaacaagggatgatttatggttgtcttgatggtaaggatatcctagcagctgttgctgaatttctctatatggggtcatgaccttttaaagcaaatgccttggtgctcattttcctcatatattaggtagctttggttaagagtgaacagggctgggcccaggggtagaggccccattatctaagactgagtcactcacctttcaggtgtcttggatagctaatccaactcccatgtgactcatttttattcctacaggagcaccagacctcggctggtgcaacctagagcagtggtagataacagccttcattgaagcagtctgtccagggtgttggctctactgcaagtctgctttttctgacttcctcattagtaaagagtgattggacccagatgggtgtgggtggccaggtcattctctgccatccctagttgtgctagttcacatagagttttgggcctggttcttgggtttgttccagggtagcactggacttggaaacctgcttgactagcaagcatatttgctgcttcctgttccaggctagaagagtaatacaaggtcaaacttaaacagtgaggcagtgattagtggaaaaagcactgaaccctgagaccttggttctagttgtgcctttgccactagctaagtagcctcaagcaagtcatttggtcttcccaggcacagctttgtttcttgtaaaacaaaggaaagaatgtccaatccactgcctttgtatagaaaaggatataggatagagttatctggaaattttggttatggtaattgttcttataattttgtatattaataatagaggttaaacatgttcaatacagagcctgaaaaacccagaaaagcattaccatctattgataaagaaccactgttaacattttggtgcatatcctttgagtttttttaattatacatgtaac

SEQ ID NO: 56113 - DNA, 714 bp, Homo sapiens
gctgggattacagatgtgagccaccatgcctggtcctgtttccgtgttattttaagaccatcttggtcatggtttactaaatgctttgtccatctgaatcactgttgcatagttgatgttgatacctgtgaggcaggccttctgctcagggcaaccttgagtatttgttgacagtgggagtggttttgtagaacaaacaatggcttatttggagagctccacacaatagattatcctctcctgtgggagccagaaagagatgagctcacagataatgggtttcttccttcctggtagttacgaataaataatagtgtgacagactcaccctctagtggttgttggtagtactgaaacaggaagaattgtctcctggtttgatttttcttactttcaattgctttctctgttcctagtggctgggcttcccaaatgtgatgttggtgaataggcttcattttgaaagagctggaggtattgtctttagaaattggaggatggaatcttacctcttaacacatttgttgagtagcagacatgaccttggaatgactgtgaaaattacttttcaagtttatacctcatcagtaccaaagccagatcctcctgtgatgtagcaggaagccctttattagtttttctctatcaatccatcttttataatttccaaaataggataaggagaagcttaaatatgaaatgtatttaaaggtc

SEQ ID NO: 56114 - DNA, 829 bp, Homo sapiens
gcagcaggggtttaggcaatgacggtggccatgctgttgatgctgtcatctacactgctgatctttgagaaggccatgcagccaccctcgcccccgatctgcttctgcagctgctgatccagccactcaaagttgctgttgtcataactgaccaggcctactcaggtccagttaaagtaactcaagagcttggccaggactcaaggctggtgggtgctgctgggcactgtgcggaggaaggatgggaactggaaacagttggaaaactgggggcgctgagatccatggctgatctgggggaaaggaacagagctgtacattcctggcctgaacacacttgctcaggatccacaaatgttctcaccagccttgtaacttggcctcatttttccctctctggcttttatttctaattattatctcactggcctttgatatatgctgtttccaggtccttcgaaagcctgtgggctcaggcctaagaaaccaactgacgtttttagaaaggaatgcagcggactaaagaatgccaacatatcttccagtgggggtgggagaagcagagaggtaaagatgtgctaacggctttgtttctctctatacattgtataattcttggcattatttgaaagataaaggctcaagtgaattaaaagctgtataattgttaatagaataaaaacaagatatataaattccaaagcagcagaaggaaaataattggaaaaaatgatcaaattaaaaaaaattcagggccgggcacagtggctcatgcctgtaatcccagcactttgggaggctgaggcgggcagatcaattgaggtcagga

SEQ ID NO: 56115 - DNA, 7725 bp, Homo sapiens
gttgggagttcgagaccagcctgaccaacatggagaaaacccgtctctactaaaaacacaaaattagccaggcatggcggcacatgtctgcaatcccagctactcaggaaggctgaggcaggcgaaacgcttgaacctgggaagcagaggttgcggtgagccgagaccgtgccattgcactccagcctgggcaacaagagcaaaactccgtctcaaaaaaaaaaaaaaagaaaagaaaagaaagaaaaagaaaagaaaactaaggtagaaaaagaaagaaaactttttgcctcagatttttattagccagaccccacaccaaatttgagaattttgaatttttattctacatctttcaattatgctagagcccctttcttttctattttctaagctttgctctaactagaagccaaagatcctcctgagctcaaaataaaaagccatttacaataaagattataagagagaagaaaccataccacaaagagtaggaagttgccctcagaagcaccagctaaccaaagttatcaaaacccttctttctgggtcatgagttataggcttttctcttcctgtttcatatgagtgtgcatatcaccaacactgtgaggttattatgccttttgccagattttgtaatttgaagatgactaatttcagtatgacaaatatgggattcctggagagtgggggcgggggaagtggggactagactgaagactccataattcttctctgtagtcttttactgtggagatgaaataatatcaatattaacatgaaaggagtaaagtgaggtctcttgggagtctctgagggttgcatggatttcattcggaggcagaatctgctcctggttcctctttatctatcatgcctaatgcctacgtaatgagggtttaggtaaaaccttctgggtgtatacaagctgctagcctctgaggcaccactgcagacaggaaatatttgctcacttgagccaacctgtcctcgatgccatttctctgccagcaggaagaaagatccacaccaagtctcaagggtagttactgggctgatgacaatttgaagaaactgttgaagtgtagccatcaacagcctgtggagacgtagccaactggataatctgcacaaatattagcttccaggctacttggtactttctgtatttccagacaagatttacctaacatttagcctgctcaggagatgcaaaacaatataagtttctgttaaatctgggttacttcattggacagacaccagaaccaataaacttctaaaataggagagcaccttgttgcttagttttggtgtcaggtgttcccgacagtgacattgaaaaagttattttgtttttcttagttttctcatctgaaaaagaagtggataacacctatttcagagggttgctgcagacactaaaatgattaacatatgtaaaaatgtctagtttttgcttgatttactaaataagtattagtttccttttgaattatttgccatgaaagcctttcggtgtcccctccatcccccccaaaaaaaagaaagagaaaaagaaaaaaggccctagcactactagaactcaagcagaaattcacattctcccagcactcacgtaggataagaaatagaattctaccccaagtccaaaaaagagtctggcccaatatcaaaatagactttacctccaaagcagtttgatatttattaaacactacctttttctcttcattaacatctcttgcctcctggtaatttgccctttacttttcctctgtttctccagctttgaaatcacacgccattttttttaagacaatgtaacaatgtgcaagatattttttgttgttgttttttgcacttttgacataccctatccccaaacacaccccaaaccaggacactgtggaattaatacagtttggaaattgggtatagtttagtgactcagtgttagttaagatgctggcaacagatgttggcaaaggctatggaatgagtcccaagaatgacaaaccttacattactccaaaggtttgaaatccaggatttctctggttaatatggttaatagttccactgctggttttaattgtcttagagtggaaggaggtgtcatattttcaggccctagtaatctcttccttcagaattcttctgaataaaaagcttagcaacaaaatcactagagttagagtgctatgccttcttgatttaatactaaaacatggaacaaatgaaaccactctggcctttttccaacctctacagatccctcattcttatacttctagtccgtcttttcttcctcataacaccccaattccctttttgctctttcttttcctcctcaaatcatatctctgcattgtctcgctatgtggccacccttgatctccagtgacctccaaagggcaaaacgcccataacaagacaacaactgcagtaacaatccagtccaaaagtatttgccaagagtttattccgcggttagcaccaaactctccatctattttgccactgcaaacagtgaacccatagttccccaaaacaatcatagttcctcatgcttcactcttggcagggctgaggacaggaaagaagtgaaaataaaatcttccattactaccctcagtctagccagaagtataccccaccacacaaggagatggcagccaagtcttcactccctcagagtttctcctcaggctcctcactcacctaactcttccattgtcctacatccaagatgctcttgtctcacaggccgtgaggaacagctttggcatgtgctgaagaagaggaccgcaaaggaactggatgagacagcataaggcagcctctataaacctttttggttcctgtatttgcttagcacttcctctcttttgatttggtgagcttttttttttttttcataggttacacagttttaaaaatgtgactgacatagaaaggtagatagtaagatttgcattatggcagtgcattggccagggtgataaagattcaaaattaattttgcaaaatttgaggacctactctgtgccaggattcatcttggattcatgggaatggcagacttatacttgcgttttttccaagtgtaggtaccccactctgagcatctttcttttttcttttttttttttctgtgaagctgggagacacagaggcatagtctccttcttaaaatttgcatcagagttgaccagcatccatttcattttgttgtcttatttattcagaaattatggttatctgctttcctgcatggaacgtaaatccttaaaagtagggcagaagtggattcatgcttggattctcagggcctggtttactcagtggtcccaaaagcaaacatctatagggtggtcacaaagaaggaagccaggtttgacaccagatgttaaactgtgtgcatctcaattaagcataatccctgcctagatacactgccttatagcaatttctttggaaagtaacactgaggttaactcttcaccttttttaccactgtgatttattcaccttgaattaaacatttacaaaaggcctactataaaaaagcaatacgtaaggaactataattatggccctgtgaaatagattttttccccctttttaccaatggtgaaataggttcatgtaatagcaacttgctaagataattaattggtagctttgctacttactataattgcaaagtctgggatctttcctctacaacaccgtagccttctttactttttttaagacaagctctctgtcacccaggctggcgtgcaaaggtactatcatagttcagtgtaacctccaactcgaactcctgaactcaagcgatttgcccttctcagcttctggagtagctgggaccagaggtgcatcccatcacgccaccaggttagcttaaaagctttatttttattttttatgtagagggtggtctccctatgttgcccaggctggtctggaagttctgggctcaagggatcctcccactttggcatccaaaagcgctgggattccgggggtgagctaccacatccagcccacagtggctttttttttttagggaataattcattctccattccactgtctgtacatttttttttgaaaggagattcctcctctgtattactttgagcatccattggatgtcagcactgttccttccaaaagtctgctcactacaaactcaatcttaaaaaatttccattgacactatgccaatcgattattacaactgaaaatgacattagccctatgaaaatggaaaatactcagtagagaatataaaacatttgtctaatatgaagtggtatctgagtcaaagtactggaaggaaaaatgtacttcagcacttgtctacagtttaactgaatgattaatgtgaaatttaaaattggatccccagatcttgtttccagcttctttcttttgggacttttagccctggatgccttattttccaggggtaaaggatgttcttgcaaatcgttccttgattgtaatggatgaaaagaaaaaagaaatgggagaggcccactgcatcaccaactgcaacggaaattccctttgatgaatcaggaagacaaattaatgtcatacgctagcgtgcagaaaagtaacctctgataaagttgctattgtataaaccgcagaagcagatggcttccggccgcagagcttaagagacccttcagcttctcggtgtaggtcaccagtcatgtcacgctcacaaccctttcgcctccctctaggtcaggcaccgcatccaagttaagcaaccgacgccggctccttggtgtcccaacaaggtctagtagaaaagcaactttataattcgtttcacagatttgattaagagccaactgagtagtgggccttgtgctagggctccgagggcccaaggaccccatggaaccagatttagtcgctgacctctaggagctcacaggtgagtgactcacacaccggaagacgagatcaataatgtagacatgaacgctggctagccagtcccagaggaggtgtcatctgaccaaaccaaggcaagtctgggcagttacgcagacaccccgagaaaggtacgccaacgcccagataaaaagtaagaaaaagtaggaaaaaccctcccatcagaccagcaattggctcgacgcttgagcccggatgtacggcacgcgtcgcgacctaacccggaaacactgcctcccgaaaaaaaggtaaactctagactgcggaaagtaaactacctttcccgtcgtgactcagttagaacctcccggcatcctctccacctctggtttcccatctatttttcctaaagcctaggcgaaataagacttcatctcccagaatgcccttggttaagttaacggtgcgcatgcgccaagaggcgggccctcgttgcccccacaaccccgcctccgttttgccgccgccattttttcagagactttcatccggcaaccgacggggctttttttcttaaaggagaagcgacagctcaaaatactacccccttctccgcgcaagatctggcggcgctggggacagaaaggccaaagacaggaaagtggggtagggtggaggcggaagaacgcccaggctacttctgcggcctaaagaagaatagaaagagcccttgtggtatcagtggctcctcagggaggcaggtgcgcgcgcagccagtctagggtttgcgtgaggcggggaaagaggtgcgatttcttctcacccgcctccctcgcgagacctgcccctcgcactgcccctagcgcgcgttgaagtctggaggggggaaaaaggtcactttgggattgtcgcgagacacagccgtttaacggtgagaacgggtgcgcggggaaggaaacctcgcgcgctccccttttagccgtttcctgattggctgaaggaaggggtgggggagggaacctggggcgccgctgcgtgtaagactgcgaggggcggggtgaggaggcttgtcctcttttccgattggcccgctgagcgtctgtggcgcgcgcgcgcgcgccgccagcggtagcggaccttgagtggcagggggtggggggggcgccctcggagccgggcggaggggaggggggaaagaggagcgcagggtgagagtgagccgcaggcttcgggaggcgagggggcggggggagcagcgccgaggccgccgcctccgcctccgccgcctaggactagggggtgggggacggacaagccccgatgccgggggagacggaagagccgagacccccggagcagcaggaccaggaagggggagaggcggccaaggcggctccggaggagccccaacaacggccccctgaggcggtcgcggcggcgcctgcagggaccactagcagccgcgtgctgaggggaggtcgggaccgaggccgggccgctgcggccgccgccgccgcagctgtgtcccgccggaggaaggccgagtatccccgccggcggaggagcagccccagcgccaggcctcccgacgtccccgggcagcagccccaggccgcgaagtccccgtctccagttcagggcaagaagagtccgcgactcctgtgagtaacagtctttcaggcggtgggaaagacccccctctgtccgtacgcaaccctctcggctcccgtagcgcctactccacgtgacatcctgcctggtctgccccctgccggctccgcacgccagatgtcacaccgtttccccgggagccttcgtgcctcctctctgcgccaccctcatctcgctcctgtaccttcgcttgtcgggccgtttccccactccccgaaatcatcttttgatacacccctgcactcgctagtgatccacctcctccctgacacccgcaggctcatccctctttctggcatccgcaccccctttgtcaccctatccctttcctttaggcggctctccagtattacatcacatgccctttagggaatacacagcccgatcatagccttcaaaaatgattcccccccgccttcgcgttagctcaagagccagatgtactagtgtgtttatgtagctttttttttttttcacttttctaaatttttcgcaacccttctcattcttttgagaaatttgccacttattatggtcaggttaaaagcccactgctacgattttaagtatggagtctttcatataaaattatatgagcattctttaatgtttgtttttactaagtagcatatgttttatctttgtgtttcgtgtttttaaatgtaggaacttcatccttgaaattagaatcatctgagaggaattcctttattacctagacgtaatagaggaaacatgaacaggtggccaggagcattgtcttaaattgttcgttaaaataatactcatgttaagaatactgaagcacacaagtttgtaaattctagaaattaatcacattgactattcaattcatgactgaaaacatcattagtgacctttgatttttgagtgaaaacagattagtaaaaacagagaaaattgaagtgagggggagtcagttttaagtgttccctttcttccagtagagatagtggcaaggtttgacttacaccagacctaatagatttaaaacttgaaacagacttggtccaaaattaagagttaagcctgtgtcttggcatgcttgccttagaagcctctcagaaagagaaataaaattcagaggtaatcatattgtggtat

SEQ ID NO: 56116 - DNA, 1666 bp, Homo sapiens
accaagtgcattgtcagcactttgcaaaacgctgtgtacttgtctttcaggaagcatacaatatgcacccaaaagaagtgtggggaaagctaatcttagaaaaagataaaggggaaatgagcagtagaccatgcaacaaaaatcaacatgtatgagatctgaatgtgtagacattgcatcatgtttatttgaaatggataaatagaaaaagggactgaatggattagtattctagatgtgtgccttatagtaaagaagaggataacgatgacactatggaattacgtttttttaggaatatagaaccccaagaagattttgttcattaggttttattctgttgatctgatatggataagatctctgggaaatcatatatggtataactatatagattgaattatagtttaaggtacatagatttagtttctagccctaactcattttgtaaaaacaatttcttctgcctccttttcagagagtaccttctgaaaagtcctctgtgggtaaagagatcttgttttcctgagtcaaggaattgcatggatgagagtttttcttgcattcatgtaagagggtgatttggaaaaggctcgcaaatcagcacaaacttgaaagccaagcatggaataaaattagccttaagataatcaggtttaagtgaagggagagttttaataaaaatggaaaatgtaaagtcatagctctggtattgctgttatttcaagctgctatggatcaatgcccaaaggatgactcattgttgtgatcacttgtcagacagggagaggactagtaaatatttcaggaagacatatctgaaaagttatttagattgaattttgtttgtgaatcctcagctcctcatgaggtacctgagcatctctgttaaggggtgaaatagagacacgggaagcagagagacctccaccaggatgtaaaggggattggtaaagaggaagggggtaggggggagtagaattttgatttcacttcagttgattctgtgtgtgtgtgtgtgtgtgtgtgtgtgtgtgtgtgtgtgcgcgcgcgcgcgtgtgtgactaatgtactgttaatgtactgtttaggtcaggacatttcttaaaaggaatgctttggcctcctgcctcatcccacctccactgcaagcgtcagacccacccaagaatgagctctctgaatgtgggtgcattcaaaagcgaaaaatgataaaaacttcatttcttggcttctgtagccctctgagaactacagataaagacagaataagataatttgatggtttgatgaagtgtctgggtgtgagataaaatctatgtgcttatgattcttaatataaaagattatttcgatcaatctggtttgaacacatagaaaacaaaagatgcaagaatagctaacaataaagttcttttctcagcaataccataagttacttcttttctgtatctttggatgaatgaggggaatttcaagtgacttcagcattggatgaagcataatcctcctagccagggccaggcccaatcaagcgtgctgagtaaatctccatggtgccaggccactcacactgggcaaaactcccagggccagtcagcctagaaaaggtagattgcccctatatcaccaggccaatgctttgccctctgaatacgtagtccta

SEQ ID NO: 56117 - DNA, 1269 bp, Homo sapiens
aattacctggtctcatgtagtatctttatagcagtgtgagaatggactgatacagaggacatgacattcgaacttcttggtttatagtgcaggcttttcactaaattgttacccatgaccatactttctgcctgttttaaaagccaataaaatacaagtcttctttagtgatgagcagttgattttattctggaagcctggaactcctcgctgtgtcagcatcaccgaccagcagagggcggtgcagatgcagaggcacacatctccctgcaagtgagaaacgctgtgaggagtgtaatttgctggcagcgcccaggggctgcccacgtgggatggcacttgggccaagtctgtactctccccatgcttcctctaggggactgaaggggtctttcttagaaagatcttgcagctaaaacttgaagaatgaacagaacttacacagactaagagagatagcaaaatgttctagcaaaggaattattcataagccagactacaagcagaatgtcactcctctcccttggttaccaaggaactgtgctcctagcggatccacctcctttccacgaatggtcctaaatgtgacctcaccttgaatctgaaaatgctgcttctggttgatgggccctgtaaatcctctgggttcttacccaggtaagtgttggtgtcgtgatcaaagtcatctgtcgtcttctggaggggttggggaaaaaaaagtgttggactttgaacactggagaacctacgtggacagaaaacctgttcctctattttggcataaatatcactggggaatgaactcaggtcccaaaagagagcagtcacttccacacattcttgtggccagatgacagttgtgttaaaattaagcaacctgtccaccagcacctggagctagaatgcttcctctggtttatgtggaagagaaacctatagcagctcgaatagggaaagtcagaacactgggagagggcaccagatcattgtatgggtgcggataaatcttgacataaattcataggctctcagggatggcagggttggggtctgtatacagcatgttcactaagtggtatctgcttgaacagctatagttacagagaactcaccaccttcaaaggcaacccagtctgcccttgatcttctctgactaatagaaaggtttgctttctgcttagtagaaatggatctccctggtgatctcatgtttcattctcagttttggccatagtgaacaattctaccttttattttcacctgacagag

SEQ ID NO: 56118 - DNA, 374 bp, Homo sapiens
cataacatcaggaaaataaaaagaatatttattcataataatagttattattcctcataaggaaagctcacctgagacttggtgtctagtttttattgggggtgactcatcgaggcatggagtcatatattgaccttagctacttagtcaccagccctataccccaccccagaggtcaaattgaatacagtgaggcccaaggccccaggtgaatggaatgaaaacaggtgtattccaaaggctcacaggttatttacgagagttgtttatcacaggccagtcttttcttagaaaaatgcaggatttgagcagcccaggcctgctgagttatgcttgctcccaggtgtgtttaagatgaaagtaaaatatataaa

SEQ ID NO: 56119 - DNA, 1037 bp, Homo sapiens
agttgtctgcatattctgagcataacacaatacgggcactttaatttgactcacttaagtggaagaggtgtcacaaagcaataattacattaaaaaaataaattttattgtggatatttaaagtatacaatatgatgttatgagagcatacagatagtgaaaacattaccattatgaagcaaattaatatatctattacttcacatagttacttattttttgtcgttgtttttatgtaaagagcagctaaactccactcatgtagcatggatcccatatacaatgcaattctattaactatagttctcatgttgtacattagatctctagacttgttcatcctatgtatctgatactttgtaatgagtcctcacctgaaaagctagtctctgcagatgtttccgggaagaaacgatgagcaacacccttctgggagatgaaatttctccctgatgcagccagttcagcagagtctcgcagagtaaattttgatacaccacctccagaaatttctgagctttggcttgtaatgtggaccttgtactaggctggcaaaagaatctggtgtcagttctagtggaattcagccctgcctctcacgggcccatgttgaagtaattggctctgcatggttgagaggctggctgtatgcccctgagcttctctttttaaaacatcacaatgctttttgtcctcacaggtcatggaaataccatgaaaaccaaagctgtgtgaaaccaacaggccagatactggaaggagggtcagattatgtaggcactaccctcacctctttcccattcaagtatctgtaatagaagcaaggcagtgggaaagatatgaatgatatctgatttgcagaatgcaataaaatagcaaattacttgcatggagtgatgaaagctgttagaatcttcctttttaaagacaagttgtgccccctcccatgcccattttgaagctgcagtgaaacattctgacaatgattcaatgtgagcacttcttagtctcacttttatagagaaggaccattgaga

SEQ ID NO: 56120 - DNA, 1370 bp, Homo sapiens
ctaaaaaagctctgcaattttttgtgttattgttcagatttttgagtcataatttagatacaataaaattcactaattttaagtggataattttatgcaatttgataaatgcatatatttgtgtaactagcaccaaaattatcatatagaccatttccaacgctccaaaaactgtgtgtccctttgtaatcaatccccttttctgacatccagccccgtctgacttagggctcacagacgtcctccttgtttacttatgacaagaccaggcacagaagctccaaaatcccaattttgcttcataaatgattagctgaactgcttatcgccactgacaaatgagaagttaagaaatgttaactaagttttgtttaatttggtcaattttctcttcttccccaaggccaagtcagcatagaacacttccttaagagcccctaccaagaatagattgaactcaggataaaatattcatcccacatcctcacatggtgttctccgtagccctgtttattcctcccttataaatgattaactaaattgttcatcttcactgatccataagaacaaagtgcttgttaaccaacttgaccaaactttagttaaccttctgtcctccctatgggaccctgaactttgacccaccctcagccagagccagagccaacaatagcatgcagaaagagcctccttactccaaacaaaagacactccatagaccttgcttactcttcaccatataagaacagttcttttcttcctgaccttttagatgtttgatcttatggtctgagttctccctattgaaattgtctccctcttcctatcgcagaagtctttttctcccctcttgcaacactcctttaaataaaatttctccttacctaaatctgaagttgtttttatttaaaaatactttggtatagctttgttataagttaaattgacctttgtgacaaacctggaaacctgagtatcaatctatttactcatgcaatcatataataagtcttgactgagaacttactgtggtgactttgtaagatgtcaccttgccaagactgaaaaacatttcctgaaattctcttccctgcacacttccagttagggtgggccacaggagagatttttatgggagatttggagggcaaaattgaagaagcagccattttttttataactcacttcttgacatcaagcagtgactgggctggtaggtgctttggccaatttctcctgttcggaatggctgtacccccattgtatctacaaagtaactagcttgcttttgattttacaagctcccataggcagaagggacctgccttgcttcagataaaactctggactgtggacttttgaattaaggc

SEQ ID NO: 56121 - DNA, 1212 bp, Homo sapiens
tcaatatatatagtatagagtttattatatataaaatactatatatataattggatatatatatctccaattagttctatctatatagagaacccaaatacaacctgattgcatggacccacagcctgagccaccacactcttcatgaatatagatcgtgggtcagtggggttatttctgctccacactcaggcagatctccaggaattcaaaacacctccttgcctgaatcagcagcctgagtcagccaactctttctgtgcatagatcatggtacagtgggtccctctttcctgtacatgtaaacagatctttaggcatttggatcacccactgacatggagcctgagtcatcacctttctgtgaagagatctgggtgcaggagggccctctctatgccatgctcagggagatctccagacatttggagcacctgctcacccataacagaagtctgagtcagcctacccctcctgtgcagagagcctggtgcagggaggccctctccactccttgcccaggcagatcttcaggcatttggagcacccacttgcatggactagcagctggaatttccctaccctccttgtgtggagaactggggttgaaagtgtttcctagctccacatccaggcacaacttttgggtgcttagtggctgcccactgaagtctctcttgatgctggtactcttgtctgcaattggaggacctgtaggtagaccaagatggtcaggccctactcaccttggcccctcccccacacagggctgagcaaggaactaagctcagaccctgtgcactccatgaatcagcctattgcctgaggtaatagagaactcccagcagacaaggaccaagtataatgtacacccagccaatttcccctcagctggctcttatccataagcgccatctactggcttgcctgtcaaattgcacagcccaatacaaaacctgtggctatagaagcaaagtgaaaagatcctcctatccagcattctccacagtcataacccctgggttggggacggaaggaagatacaatgattttaggtcccacatccagagcacagtagtatgagggatgggctcccaaggccttgggaagctccacccttgtgactttgaagggtgtagcctccatggctgctctcatgggctggagtcaaaagtttgggctgcaagcctgaagccttctgtgtttgtgagc

SEQ ID NO: 56122 - DNA, 918 bp, Homo sapiens
gtggcagctgattagtgtgggggttgttctcatgtatcagccaaggctacaatattctcaagacagatggaacacaagttttttgtggggtgtgatacagcatggtagatcttgaattaaaacttacaaaatttttaccaaaactttaaaggagaagacaatagtaaaacacaagtgtatgggtaattttagttaaatcaggtgagaaacagcaaagaaagctctgttggaggtgggaaaaaaaaagaccaggttttttgtttgtttgtttgtttgttttacaactacaaaaacagcagagtcaaacaggggatagactcatgtcagagatccagttctatttactaaaatttccttgagtattcaaacattctgaaattctgagctcttgcaaaaggatgcctttgtttaaacattgcttcacctagctacagaacgtagtttaactttgaggactttgacctcagacaagacaaaatgtttcaccttgcctattacttaagacatattagttaactatttaaccttcaaagataaaaaatttcaaacatctgtattaactaatttgctaatgattgtttcaaatatctaatccatggtttacttctcttacattaactaagtttgttgtaagttcttcacatttttaattatttttacatcattggatttaattgttaaatctatatatgacatgttgattattatgaagtcaattaaaaaaactaacatatgttaaatattgttcttacttcatgccaggtatgcatttcatatgtattacattgtgtaatctcattcctctggaaaacatgcattctaatttccagttccaaagtggtcagaaaacactttgaggttctgattcattaaacaacttaaaaaagaagtaggagacagaactgaaatttggaacca

SEQ ID NO: 56123 - DNA, 932 bp, Homo sapiens
aagtggatgagaggatgaatcatttccatccaatgagagaaaacagcctccagagactcttcgtccattggccagcgagagtgtcaattcccaggctccctcccgcgcgccagcctgctcttccaggcgggaaaagttcagcttagacaggcaagagagaagtcttcccaacacctgcgaatcgggagcagcgggcactagcacgtgcactgtctggtcaggctcgccggttctttgagtggtttttctggttctgggtcggacccggagttaggtggatggccggcaggggcagtagacagaaggatctcagcccaaaaccaaggaggttttggatggggagctgggccccgcccgttgtggtaattcccttcctgcctctcagcttcaaaggccaagagtgttactcctgaaaagatacatggagatcgtctgggtgttcctgaatctcaagagtgtcgtttgaccctggtggatcctttccttccctggtgccctttgcacccatagaatgagaccaggttcggttaagcagagcagaaactttattcactgatcagggaatggaacaggagagctcctgttcaaagttcctggggtgtagtgagggggtgctttttaaggtcttttaggactcctaggtggagactgaggacaaggattcctggaaagaggtggggctttccaggaagacctgaatgtggcagtctcattctttctgttgcaccacagcactacatgtgcctagcaaggtgcatttctccccggggcagagatttaggtatggtaattagcaaagattcatgttagggtagcgctgctgagctctttcccatcttgtagcacggtggttactgacatccagcctttgtttctgtaagcaagcacagctgcaagcacaggttaccttcataggttctggagttttagga

SEQ ID NO: 56124 - DNA, 661 bp, Homo sapiens
tcagacttttgcttcagaccgaatcccttctgaacttgggcatccatttctccatttgtcaatccccaggatttttaccaggtctctgaggcagtgatagaatcaggtgaacatctcaatgtgagatgcacgtagaattgtaaacttccttccttctttctcactctagagggaaaacaaactacgtgcaattgctttgaatgactttgggtaaagtcacaggggagctgcctgcttttctgaatgagccagatagtctggggtttaaacgccctctagaggtttctcattggttactttgtttacaccttacggaaatgaagtagtggcccgcaaccagtttgaatggttgcgggaggggaccaaacagaggtactttccctttttcatctgcaatgcagtggaaagcgggaattggtggcatgatttgcaaagggagtaacctctgatccttttgttacttgattgtggagaggtgggattttccttttgattgagttctaggaagtgagtgtgaatcatccttaggttccctgcctccagatcctgttctgcctcactccttcagatctggggcatccctctccttgccagcctgcccctccccttggctcccaggaggctcctcaaggctgtctttgatgactcaggagaacctgaa

SEQ ID NO: 56125 - DNA, 3425 bp, Homo sapiens
aggcatgtgtgtaatatgtttgccataactgcttaggttccaatcctctagggttaacacttgttgaaggaggggacgtgcctgtgagctggcaatctggacattgtaggataattgttgtagccagcctctgagtaagttgaaattgtttagataagtttctccaattttggtggaaaaattgatgcgattgggtggctaggcctagcagtgatgtcatcacctgaaggtctgctcgttcattgacataagccaatgggccaggcagtgagctgtgggcttgaatatgtgtaataaaaacaggatgtgtacgttggtccagcaattgccgaagtcagaaaaagagtacacagagtgtgcaccagagtaaacttaattgaggctgtaaaagttctttaacaaatacacagagtaacctgagctctttgagtgccagtaaacctagatccagtgattggattatgtggtctctattagactactgctcttccatgtttaccagacccatcagtaaacagtgttaaagcatttggtatgggggattgcaatacggctttgaattgcattttacttaaaggaattttgatgatatcgagtcataacttagcaattgactgcattaatcattaagatggcaagctgaaataaataacgtgaagtttaaaaagaaaatctgaaagcatctttagaagcagagacttaaattatatattttaaccatgtgcttaaagccacaggcagaatagcttaaatgttgcaatggagttctcaggctgaccaagtttatggactttaatctggaaaacagtcttgaaaacagtgactcactaactggggaacttaatttgggactcttttagcaagtatgaatcaaagactatctgtaatcagtgggttaagacagtcattcatgcatgttttggctacacttacatataactcttcttcaccttttgagaagggcacaatattttcaccttttaattgaacaaatatcatttaattaggtttaaagttctcctctaagggtaatgtgtggttttacatgcctaacttttaattattctttaattcatgggccctccttaatctctctcccttcagaggctactgttttacttaaactggatttgtagagctacctcgggggtaggagagagataacagcagtggctattatctgaaaagaggtttttcaaattcttacattttacttaaattttagcagagaattataatttgggatgtcacttgtaaacaaggagcacaggaaattttgctgtgggctgtctgcaaagctagagagtcaggcaggtgcgtcctggggctttggctgctttgcacttgtaaaagcgctgctttttgcctgtgctggctccctcccgcaggcacccattggctgttcctggccagggtggaccccagcctccccttgggctgactttgttgtatgtgcctctcgcccctcccctgcaggctagctccaatggtggcttagctcttcgttgcctctgctgccatgtgggcggagttttagttttttctcactgcttgcttggcaatgcagctctagcttctaatgcccttttttaaccctttaggtatctgatcgctttgccaattttgcgttactgggcaggctaagagatcttcttttaattcagcctgcttaagacgggaactgataactgtagtgtatcctctgccttttttcttatctattggaggaagctcaggtaagacctccttttcctctctgttaattccgcctggtgattagggcccagggaagacgaggtgataaggcaggtaatgtttcctcttcctgcccctttttaggcttttccgtgtgtgactgagccagggctgctctagttaaagcccataacgttaaagctgttactgggacttgctgcctttgcaactgatgtttttaagatctctccccacttgtttcccggagctctatgtctagcgttccttcttctgggaaccatggactttgggatttaacagtttgcattacagcaatttgtctagcatgcatgattaggtgccttaattgagcctgtgaaactgaagctccactagccttaagcagctgttgtaatacttttatataatgtttctgctgtgctaataactgttgtcccatgatgaaatctcagcttgaaccaactttccccagaacttggtaaccttgagtgggcaccaatgacttactagttactcactgacttgaccacgcggtttttcttcacctttgtttcctgggggcccgtcgcattcctcaggcttcctttgcagctttcctcatgaaagcggtccttacacttccttcatagcttgccttacaaggggctccaactgcggaaggtctgtttctgcagacccctgactgtcctcacacagctctcctcacatggggcaccaattgaggtattgcttctcacaacagggcagtagctacctgtgtctgcccgcagaccctgacccaaacgacggatgaataaaatgtacactgacacacagataatctgttttgccagtcatgctgagtgtctgaccgcctgtaaaccaaaagaggtttgtcactgcagcttgccctgagtagctcagactctaggagtttatttagtgtagaattaacaacagaagatttgagtaaacacacttgtggataattaacatggttaagagagtagttctaggaatgattaaaactcaggtaccctggtttaaagtaaataccattagggggcaatatccttggtcaaactacccccaagagggccatctgtctcaaaggttacttaatggaggtagggtaaacagatctaactggggaagcctgtgttgtccctagtatttaccctatgacctaatgctctaaggtaagaaatggctgccttcagcctgttcaattattacaagctttataacctttcaacctttcaaaaaggtttgtgactattccctataactttccctaatattttcctttaatacttctgccaccatcctgtgtgaatcccaacaatccagcacaatggtgaatagaatctgccagagcagacattcttgacttttttctagtcttgggaatgcattcagtcctatcccattaagtatgatgttacctctaagtttttcataagtgttcttcatgagatttaagaagttcccttttattcctaggttgctgatattcttattagaaatagatatcagctttaccaaactcttcttctatgtctattgagatgattctatgtatatatagaaattttaattattctaattggcttattacagtgatataattttcaaaagttaaaccaaccttgcataactggtatttacctgttagttcttgcatttatctttatattggcctgcagttttctttttttgtaatgtttcac

SEQ ID NO: 56126 - DNA, 1939 bp, Homo sapiens
gttttatatgaatttcatccttagtaaaggacccctacgtccctcaaaaagtatcaaagaattgaaactcaccagatgatcccatccagacaatgggacaccagacccctcataaattatgattgcttccttaggtcgcctgagttcctgtttttctacacattgttacatttcttcactgctatgaaaactcataattttagttgatcagcaagacggatttgagaccgagcttgcatctcctctgctacagcatccaactcagccttcttccttggcaattggttatattgattggctttctgtgtggtgagctgcaggacctagaccacacccctggtgtttcagtaacagcttttggtttcccgaccaggaacactttggctcagttgccatgggccaggagtctcacagaactactaagcagctgcttacccaattttggctggagagataagtaccctctggggccaccacagctggccccaaccatggtcctgattgccttggaagaactgcctttggaatttcacatcggcatccagataggtgactgtcctttgtgggcccagacagaaagatctgctcctctcagtttgggaaatttttaaaggaatttccacttgcgggttgaataagcccaactgacgaagagaggaaaataccctgactgtttcagtatggacattcttgggggcttgtttgtcattgtgtgtgtgtccaggcaagtgagtgtcttttgtgggtactagatagtgggatcagctcctctccatttgagaaattctgaaggaattttgatttgcaggttgattgagcccaaccaatggagagaggaatcaccccaactgtttcagtttgtagacttttggggcttgtttgatgctgcaacagttggattgttttagtgattgtttgcaagtgtctgatatagtcatcagaaatcagaatttaataaactgacactcttttgtaacactgtttgaccccagtatagtttggaatctggtatttgcccttgaatgggaaagtgggttggagttccatgtatccaggcttttgtgctgctgctgttgggccaagttagtatgtgatattctcctgtggtgctgtttgaccccagtgttctttggagtctggagaactttggactttaaaaattaaactgccacggaaactgttttactgaaaattttggttcacagccttcactggattacctatcaaggctaacaaagttcagccatgtgaacatgtttgcagactgatgagtttctatttcaatagctagagttccaaggtaaaagctattggatctttgggtgtatgtatgtctagatgtgtctttgggtgtatgtatgtctagatgtgttaatgtgtaggcatatgtattacgttaaatgttgtgactacccaattggattataaataaaagagtgctcatagattaagtaaacaagtccaaagtatttttcatgttcatgctacttaagtaaatctttagcaagctagcattaaaattttgtaaaataaaactagaaatgtcatcatagttgtcagcatacatttttgtctgggttttgtatttgtttctgctagatattttgaggtatgagagtttggcacagaagtttataaagttgtcaccaggagttggagataagcctgggaaacagagaccccctcccccatctctataaaataaaaattaaacaattagccaagcacagtgattcatgcttgtagttccagctactcaggagactgagattggaggattgcttgagcctgaatgatcaaggcttcagtgagtcttgattcagccactgcactccaacctaggtgaaagagcgagaccctgtcaaaaagacaaatagaggcagagaatgacaatggggcacagaagcattgcagggagactaggggaggagtagtaatt

SEQ ID NO: 56127 - DNA, 940 bp, Homo sapiens
gcatgtgtctttatagcagcatgatttatagccatcccattactgggtatatacccaaaggggaggagtagtaatttttaataggatggccaaaggaggccttattgagcaggtggcttttaggtgaagacttaaagaaggtaatagagtttttataggtctaataagaaaacagaatgcaggcagaagaaaaagaacagccaagtgcctgaagcagagaggccaaagagagtgaggtctaggacctgactggacagatgtcagggaggtgactggagtctaacttagagaactgttataaacaatttgtacctctttctctaaatgagattgggagttgctgcaggagttgcacaaagacatgacaaaatctggcttttgttttaaaaggagcatcctcatttgttattgacggaagactaaaggcattctccatccagaaaagactgctaagaactgtgaagcatataaaagtttaccctacttggggcaatgtttcatgaatgctgacagataacacaagctttctgggtcaaagacagagttttatgactcattcaacagggagaatgatttttgtgtttgtgtcagtcatccttgctccacaagtcctacagaggaaatacagaaaggcagattaatgttgcaagtgcaacagatgtgtgttgaagccaaggaaccctgaatttaggtcacctggatgttttataatgaactgcaagcaaacctgtctgaactttgctccagagggggacattatctttcttatactgatcagtaagcagacctaccctctgcttcagaagaaagcaatatctctagcttccaagctgtcctctttagaaacatccttgaaaagatagtcaggagaaaaggctgtcaatgtctctgctcataagacatacagaaatgtgagaggccatgaagaattttctcccag

SEQ ID NO: 56128 - DNA, 1361 bp, Homo sapiens
gtatgaggagaggccctcaacaaaggtcattgcaaggggatggagtagggaatgcacaggaggggtattttggacaaagattggcagctgataggtgtgggtattgttctcatgtatcagcccaggatataatgttcccagggcaaatggaacacaagtttttttgcggggagtgatatagcatggtagatcttgaattaaaacttttaaaatcttgaccaaaagctcaaaggagaagacaatagtgaaacacatgggtatgggcaattttagttaaatcaggtgagaaacagagcaaagaaagcacttggagatggggggaagaaaaagaccattttttttttgacagctacaagaacagcagagtcagacaggggataggctcatgtcagagatccagttttatttactaaaagttccttgggtattcaaacattctgaaattatgagatcttgcaaaaggatgcctttgtttaaacattgcttcatctagctacagaacatagtttaactttgaggcctttgaccccagacaagataaaatatgtttcaccttgcctattacttaacacatatttgttaactattttaacttcatggataaaaaatttcaaaaatctgtgttaactgatttgcaaatgattgtttcaaatatctgattcgtgggttccttctcttacattaattttgttgtaagttcttcacatttttaattatttttacatcattgaatataattgctaaatctctatatgacatgttgattaatatgaagtcaattaaaaaaactaacatatattaaaacttgttcttactttattccaggcataatgctatgcattttatacatattacattgtgtaatctcaatcctttggaaaacatgcattctaatttccagttccaaagttgtgagaaaacactttgaggttctgattggttaagcaacttaacaaagaagtatgagatggaactaaaatttgaaatcagcctaagctttgaacctatcagttgtgatgatcaccttctccaagttattgttaaattattggcacatttctaagaattctgaatgatatttcaacaaaagtttacagatatgtgttaaaatttttctatctgtttttaatttttgtaatgaaactgggataagttccaaaatggccgtaggtttgaaatatttggccctgagaaactaaagaaaatctatgcctactcctgctccaagttttttagtcatacctgttcttagagggctgatattttctgttgcagatgaaagaagaattctcaggcatataatgaccaaaatacaggaaaaaacttatgatggtagtggtggagtgttctgttacaggcat

SEQ ID NO: 56129 - DNA, 1814 bp, Homo sapiens
ttttttatctccagatacaacaaatatcatacatagccctacaattacaaaatactcttgcataggcctagaatactagagattaacttgtttgaaacattctgtttttctaagataggtgtagaaaatggccttgcagtcgctccaagaataactcactatttatacactgaagatagtgtctttcttttagggcactaaagtgagctgcccttgagagggtgagtaaatagctccattgtctcgaatgggaagtgtaaccaaaatggtgtatgttaaggatttaaaagagaaggtgcctaaggtatggaaaaaatataagaaacaggtttggcaaggctccgggtttttggcaaggtgacacctgagctaatcctaacccaggaaggactctgaggctggctcagtgattggctcttggagtacatgtgaatagataaacttttggaaagaactaacattccagagccagatagtacctagaatagacagcttggtctggctctacatgtctgcctaccctctgctgatgacacttccacttgagagtcctcgcaggtgaaaacacttcttaatcactttcagccatagaagtctaggttgggatgtagtcctatgatcagaattttgatggaatagactgagtgcttggaatcctaattttatttacacatccagggttattgatcactggatctaagttcaagccttatctcactgccctaccctctctcccaaacagcccttccaaaacctgcatacgtcaacagtgtcaacattcttctcaccactcctcagtttcagttccctcattgccacacagagaatgtctggagagtgactgccctggtattcagtaactattgctcctacctggttctgaggctgagtaatgatgatctggtaatctgtccaggcatctaccatcacctccattttgaatgggtttttatgttttatgttgaaaatggtgctgtatgcctataatgcaacagaacaaaacagtaggggatgaagtttttctccaatgtaaagtcttatatgaggcatgggaaataaggacaagaagcctaggaggacttaggatggggccagtgcttccaaggtggttcattgggctactcattgagagttatgttgcaaaagggaccaataagcatccacaaaaatccatgttaacacccgaatcattaggaactggcttcccttatattcattcattttttaaaaattcatgccatttcacattgtaattgtgaaatgtgtgaaaagttcacattgtaaatgtgtagcagatctttaatggcttggtcaacacaaaatattggctacaatcaattacaggtggtaatatatcctgaaagattaaaattagaaaaaaaaggtccagaaccatcagggccatttggggctaaaaccaggatggccacctcctcctcagccgagtgagtgctggaggagggagcctgaaactaggctcactgtgactcatttgtggcacccattattgcccaacctgcagttcactatggtgaaggagcaattcagactcaccctgcagcatcccgtctgggtcaaacagtggctgctccctaaggaatagttgggggcgctacataaagtagtttaaaaactattgtaaaaaggacatgtttcaccaatgttctttccttagattctccagtgtttgtaattcataaaaattccagccgatggggcatgctgaccaacttaagagctgtcaatgcagtaattcaacccctggggggctctctcaactgggttgccctctctggccataatccccaaagatt

SEQ ID NO: 56130 - DNA, 690 bp, Homo sapiens
agccctttggctttaagagaacactggttggtagtctagcaaccagtgggtaggggtcactatggggtgtggctcctctgcctttggaaagagaagagaaaagtgggaaggacttcatcttgtggtttgaacgtcagctcgactgcaatataatagaacaccaggtactcgtctaatgtttttgactctagtccctgacttctggacagcacctctgtatccacccagggcctgggggatctcactgccctgatgggaaggacacaggcctggccggctttgctgcctgctgattgcagatctccagggccttgagcaaacataggcagtagccaagaagtgattacagcaggcattgggcaagatgcagtgctctgtgggcctcaggcctgatgtagtgcagtcataatggtggtggccacagaagtgcttatgtcactccacccccagttttaggtggcacagacaagagagagaaatttttttttttttttcaagaaattaagggaagaaaacagagcagtctctgcctggcaatccagagaattctcctgaatcatgtccaaggccattgaggcagtacttttatgagtcttcaaaaaccacagtattactgggcttgggatgctccctaaagtagagagtttaaatcacgatacctatgtcctttcaaatatctgcagagcgttc

SEQ ID NO: 56131 - DNA, 951 bp, Homo sapiens
ttctgcagtaggggctattaggtgcccaaccccatctccacttttcactcatgcttcaggaagaacagtttgctatttaccagggaagtcttttaaagctgctatggacattcagctaaaggacactgagaatgtaactaagaaattcaatgatgtcttcaagttgcctgactataggttttgaataacaatgacctacacttattgagagattaacaatacgccaggtaccttctaacttctaagtatactgttacatttggtcctcacaacaattctatgcggtaatcattactattatccacattttatagagcaggaaattgacatagagatagcacaaatagattgctcaaaattacacaagatgaaaatagccgactcaggtttaaggccacagaacttgtgccaagagctctcacgtgagatatacaaacaaagattccttttctaattgccatcagctatttgagaccatattatctgccagtttccttgttgatctagaagcctctttaatcattaactacttccccagaggctctgtctccaaatacggttacattgagggttaagtcttcaacctgtgagttttgagggaacacagtatagtccttaaaagttgctctctgttcccaagctgagtgctaagatctttcctcaataatgaattctttttttgcctaagtcagccagagaagtgcttttaaccaacaatgctaatgagtaaagtatctatatatgatagcaatatatttggtatcctttatttgatgaaatcatttatttgatgttcctttcatttgtacatgtaatcaagaatcatttagtcatttattcaaacatagttttaccactgccatttaaccacctgtgtgactttagagaaattcatctaagtaacagttcccttaactataaagtatagacaattatactgaccccaagatt

SEQ ID NO: 56132 - DNA, 1287 bp, Homo sapiens
caaccctatctgtttatatacatcatatagtcctctgtcaattgcataaaagttgtcccctttgtgactgtaatcgccttttccaatacacatctactcagaatgcaggtccttaaacagcaggctgccttgaaaaccctctccaatcttcttcgatcatcagctttgagatgcatattcctagagcccatatcatcttcttcatcactatcataaacgtctccacatattgatgaacgtttggagaatcgatttatgacaagggagtttactcttcctgcatccgcggcttcttcgtgattttgtcctagtcaccgggcctatcccacctgctggggatgccgccccctcggaagtgcctgaaatctccccacttacccaactagcctcagcgcctcctgtgtgctgcagcagatggcgcgctgcagaccccagcctggtgcctccgcgactcctccccaaccatgatttacaggcggggacagccacattcctgcgccccaacttccacctccgcttcctgcgcgcgcgagactcaagctgccacagtggctctgccgccagcgtcccagctcctcccacacccgagtttttatttcctgctccctctccagcccggcccaggccagcctaccggcgactaggatgctttcgctttcgctctcgctttccaatactcgggactggggaaaccgggagaatagaagcaggcaaggaccgccgtgggcacggggtcagtgagacagggtcctgctcgcggcgtcaaggaggagcgctgtgggtgggtagggtaggcgcgccccctcggccttgcctttccaaccactcttttttgcacgccaacaggtgtccccagcgcagccaatcggcttccgaagtaggtgagttgctgcctgaagagaaaagacaaactccagtatctttcattccattggccagacgcgccattccccaagtgagttctgttctccaaccaaagtgctggattccaagggactggaagggaaagtccctaaaaatcacgagttcaggcgtctgagacttggtgggaacggaccttcctcttaggtgagttactctttggttctggggctgacctggagttttgccaggattcattggccgcagcaggatgctggtggggacagggtaaataaaatctgcactcctgcgggcttttattgttgaaaggggcactgacgctctccctggaaacttaaaaagaacagccaagtgaacggatgtgtctttcttttgcagtgcccaagcctgttctaatttttaaaa

SEQ ID NO: 56133 - DNA, 6149 bp, Homo sapiens
tacctatttaaggttattttccatattaactattgatgatcaaaataagtctaactcgtgtttttcctagtgtttcataattttagttacagaaacgatgcagataaaattaatctaacatgcgtcttcctgactctagtacgttgaatctggccagaaaaaccacatttgctctctacgtaggtaatataaatccatcattagcgaaattgctgcatccctttggactgggtctcattagcagaggttggagtggccactggccggcacacgacactttaggccagcagggggcgggtaagctccagggcactcgcccgagcagcagggggcgtgtcttctgcttccttgacggacagctaaggatgcgggagaggatgaggtaataggagccggggcaaggaaggagttggggtgcgcgcgcgtgtgtgtgcgactgtgagtgtgccagtgcgtgcgcaagccccgagacaatgcgtgtctccagttcgcgctgcggacactgatcatgctgcattaaggaaaaaaaaagagagagagagagaaaattacatttgggggaaggaggctgcaaagttgcggctgggcgacagtggtggtcccggggccgtgtcatggcgggtcgcttctctgcatcaaggaaccagggaaacacacgcgggcgcgggtttgccttagcgccctgcttgggaggggtggttcattctggaaggaactgagcagagccacaggcagggggagctctcccagcggcggggactgcaattcgtgcggcgaaggggtggggagggagggagagaggggaggggaccagagcgtgccattccgagcgcggccgtgcggcgagatcccaccccggcgtctgcagaggccgaggcgcaactggtgcgagggctgggtccttgcctcgccgtcagccccagctcgcggccgccggggctcgggccgcgcgcccgccgagtggcttttgcaaggcgggggcctgtttgcagagagccgggcatttgcatgaagcgactcgaccccacagagcagcggcagcagcagcggaccccggcggcggcggcggcgcgcggtcccagccaggcggccccggtgtcccggccccggtggatgcacggctggggaggagcccatgggccggagctgaggctgcccggggcggcggggcgcggggcagggggcgcggtcgaggcccggaggcggcggcgcaggaggaagcggaggaggtcgggcgctcggggcccgggaggcgggccgcgcagcgccgcagccccgggctcgccatgctcctggcctcggccgtggtggtctgggaatggctgaacgagcacggccgctggcgtccctacagcccagcggtgagccaccacatcgaggcggtggtccgcgccggcccccgcgcggggggcagcgtggtgctgggccaggtggacagccgtctcgcgccctacatcatcgacctgcagtccatgaaccagttccgccaagacacgggtgagccagccgcccctgaccccgccccgcctgctcccaccttcccaacctgccaaggtacctccctccctgtgaacccaccttggccacctagtcggcacttctgtgcagcagtgtcaccaagaggtggtggtgggaggcgattcactccgctgaatcctcgcaggatcctccctcccccttaaacatccatgcaaatagtatcagtgttgtggttttgcaaacccagcttcaacctagtcggtaacaatccactccccacccctttcatgcccccgcttttcagcagttggtggccctaagtctttctatgtagaaattctagggccgccccagactacaggcaatcccagcccttcgcaaaggcttcctgccctcatcccgtggcggccggcaccttggctgacctgaccctgttttgcttcaggcacgctggggcttgccacacgtcccctcacccccgatctcactgcctctgcgtctcctgtgtgggatgcctccccgcagctgggtcctgggtgtgggaactgggggaggaagaagggattccccggaggttctcgctacagtcgggtaagggaagcgccgggctccctgggaggagagactagggctggggtaccctggacgccgcggcattggcgaatgcctctgctacacactacatgcgcggaagcaacaggccggagcagatggagagaggagggggaggctcggggcttcggaatgcatggcagggaagccgctccctttgtctgcggaggaggaggacgcagattcctaaggagaaactgtccccaggcttcctcttgaaaccatagcctgtaaggaacccatggtctcctggagcgccaaactcctatcttttcatgagaatcaagttgtcactgtagccagcacaaacccgcttcccagctgacctgcctttccaggtcagagccaggaagggagcctccaggatggggccttggggggtggggagtgggggtgctgcccaagggagagcaaaactgcctctctttgctcggtccttgcttaatcgatgacccgggaagagtttctgcctccgtcagtgacaggtggggagggggccattgtttctggaattctggctcggctttcccaagagtgcaaccgaggagcctggagaggccggtgtgctggggaggacgtagagaagatgactcggaaaggccctccccagtgaacagctgtttgagcagagtctctctgcttccttggaaagcccccacatcctgtgtgctaattaggattgtcatgggaaaggggtatctttccaccctcatgtccccatctttagtcataactcccagcaacccctttgccaaggactctgcagacactggctgattgaggagagctttctggggagaggattctggaagtgttagaatctggaggggcttcaaccgtgtgtggagctgagggagactgggaggagcagagaatagagaggaatgtggggagattgagaaagaggattaagtgtggctgagggggagggagagaatgtcattgcgcaacttgggtaaaggttgtggaggtgagggtggaggcatcagaaggtgagggtggagggggtgtgtgttgggcggagctgagccacggaggtgggaccagagagagagagagagaccagcagttaaagcatctgacaggggattccagtcctggaaaaaaaaaaaagcaggtgttaccttttctatttcagagtaaatctctacagcatttggaaaaccacccttgtgacagaaacgtctcagcccctttcccacatttggaaagggcaaaggtggaatctgtgtttgggggtacttaggataggcaaggtatctacaaaggttcatgaccctttctacagaagcgaagttgtagagaaaactgggtggaaggaaagaagctacgtttcccaggtctgatcactcttacctgaggactgcctggtggtgagcaatttagtcagaggctggcgctccctggactttaaacctcaggcagagaacttgccctgaatcattttaaaggctgcctcagggtgtgtttatcatcagactgctgtggtttcatccgctcattgctagagtcagtcagccatcctgaatacctctctgctgtgcgccaggccctgtgctgggtgctgcggacactgggctgaattcccagaaaagctgggtctgtcagggcgcttgtcaaagaagaatagaagaatctctgggtttcttagctctgagccccctcctctcccttctccaccaacacactcatagttcctctcaatctcattgatgaggccatgacagggtaggaactttaaaccagtggctcccaggcaacctcagctaagcccttgcaatgtttaattaaattacccaccatccttaagccataattcaaagctgggaaccagaaacatccccataaacaaaagagatctggaagtcccctgcccagaggcgattcctctccttttttgttgcctcctctgtatggggacatttcctgacatgagagctttgtctttttagaagttgcttgctctgctgctgatagagtcctcaggctctccactcgcctgggctcctgacctcatccagcctgtctccagggagatggctgggaggtcccagacacccgtctgcccgcctctgtttgccctgggcccttctccttccccagactgcctagaggtctgatcttatttgcattctatgccagtcttctctaggcattttgggctagagaatctggaataagggtagagatggggtgagatagatgggactggctcttggccacttccaaaagcctcggtgggcccctctccacctgccatcatttaccttgactgggttgtcctttttctgttgtagggcagtgactgaagagctttacttcagcatcactttcccctgtacctttcagcatgcctgaccctaccaactccaggttttcagtagcaggatgcggaagatccaggctgagagtggagacaaacaactgtggctctcattccaggctcactgtttactccgtgaccttgaccaagtctctaaatggtcaggcctcatttttttttttttttttagaatgaagagcaggcttaagatttcttctttccctctttttctttcctcccatcatgcagatcaacaggtgaatgggttggcccctgtgccagtgatgatactgataagcacagggtaaaggagcgttctttccagctctgagttttctgtgcaggttttgccttctttatgtcttttaaagtggtgagaagtgtcagatggagagaaagagcatgggctgaattaaatgatttgacagaagctgagttttagccccgccacaaaaccctctaccctatgttagcatagaagtggaggaggcaggcatcatgatgaccacatgataattacaatgtgcaggatgcaccatgtgtctgcatcatggcaagcaccttgcacacactatcttgtttaatcctcacaacaatcttatgaagaacctattattatccccattttataagtaaggaaacaaattgaaagtgattaagttgctcaagggtttacagctagtcaatggcagggccgagattctgaattaggtgccctatgtcctatttctacattcagtaaatagttatggagcaactatttagcgcagtcactgttccagacatgtgagatatagcaataatagagcatccaaatatttctttgtccttacggaaaattctggtgggcgtgggggatgctggtaagagcggcctgggatttcttggacctagcgcatgccctaacggcagtgagtcacttacatagatgtgtgtaacatgccccagagacctcagtgcatgcctggaaggcatggccttccacttcccagaagctgaaaggttttgggtgctttgtaacgcaggtggaaaatctgtaaaaaactgattttctttctccttcttcatccttagtttatgaacatcctcaatccctatcctactggagcccctttccttgggttacttcacagattatctggtttataatactgattctagaaaagtcgagaactagcacatccaaaatagggtggtctctgaaaataatcagcgagtaaaatcccaccatgtctattgtctcaacactttggttctgaggtctgcatgctatctctgactctctgtagcgttgaattgaactcaacaactttccctccaaaaccagctcttcctcttgacatccctctgacaccattttaccactttcccatggtccaaacccaggattctttgactcattctgtcatttagaatcttatttgggcacctaataggtacaggcacatagaccctgtagcccaacagctgaaatttgagtgtacccatgcaccactcaaggtggccattcacatgcagattcccatgcccaggccctggagatgctggcctgtaggtctcaagggcactgctgattcaattcataccccaggagattctgacggaggcgatcctcaaacctcacttggaaagcattcagctactcatgatcaagtcttacccatttttttctctgtaaggtctctccagtttgtcaccttcttttcattttctatgccaacacctctccactcac

SEQ ID NO: 56134 - DNA, 1318 bp, Homo sapiens
agagagatgtcagaaaagggactgcaagaaataaagccttctcgtcaaaccatctcactagcttttccacaatccatactctcttccatgttcttaacttaaattgcagaaggaattcctcccctttttgcttttaacttgcctgataacgtccccctctaccatgtctagcacgacaaggctgtttgatctcttacctctgccttggtggcccactgaacctcctgtctctgcaggtaaaaccccagaggaagtgctaaaaaaatatctacagaaagtccggcacccaccagatgaggtgagttcagggttagaagagcgggattcacctctccatcacccacaagcatttcctcttctgctgttggtttctacaggatatggcgggggctgcattccaagttctcatggatacagaactggtcagaactgacactgagggttcaaggtccatggtccagagctgcagctgcacctcaatctctcccgcctcccccttcagcatagtgctggttgtttttaagctaccttaacatgacagtctcaatttaggaaaaacagtgtgataagccacaagaactcaccttaaaatgggtttgatacagaacagtggttctcaaccagagacaatttggcccctgagggaacatttggccatgtctggagacatttttggtcgtcattattctcaggaccttgtgagtagagcagaggccagggatggtgctaaccaccctacaatgcccaggacagtcctcacagcaaagaattgtcctccccaaaatgtaaatagttctgaggtttagaaaccctgttggacatttatttaaatagccgtccctctggtacagttaaaatacaattcctttacattccttaaaaattcaccttaagtaaagctcctcagtgggcttgttgacagtatttgtttcctccataagccgttgaaggacaaaacagaaggacagtgcattgttatagccctcacgattatgataatttagatgatgagcccaagttaatcagtaccaggaattatttcaggacgttgttgtgtaaagacaaaacgatatttagattccagaaagcacttacaccctgatttgtgggtgttttagaagagaagtggtaagagctcatctgacctctgagatcatgtggaaatctcccaggctgagtgagagctgacagcctctctgctgtgtctcctccctccccaggactgcaccatctgtatggaacgcctcacggccccctcaggctacaagggcccgcagcctacggtaaaacctgacctggtagggaagctgtccagatg

SEQ ID NO: 56135 - DNA, 625 bp, Homo sapiens
cactaatgtcatccattagggttctgctgtcattacctaatcacctctccaaggacccaccttctaatactgtcaccttgggggtgaggatttcaacatagcaatttcgtgaggacacatattcagaccatagcagcagcttcagtcggctccacgtgtcttcctgttctgcaggccaggtggaaggagcagccctcctgtggcccatgcccttcccatggaagggggcagaggacaaacagagaacccaagcggaagtgtgtaatcccatttagagcccctggatgcttgttacttccactcacccttcacaggccccaacaagtcctgggcaagccagataaggggtgggacagtgacctttctacagggaggcactttgggtttcatgtcaaagggtatggatatggtctccccctacaggtggcaggcaggtattttggaagaaatagaaaatcaaccacactgagaagatgtgcgagtgcagtgtccccagattaggggtcaggaccatccctgatactgtttaccttgaagagccagatttctgtgcttgagccctggagctacatcccaactgttggcgaaatgcctccactgtaaagtcctgcggttaaaactagaa

SEQ ID NO: 56136 - DNA, 1520 bp, Homo sapiens
tctcccgggttgaagcgattctctcccgcctcagcctcctgagtagctgggattacaggcacttgccaccacgcccagctaatttttgtatttttagtagcgatagggtttcgccatgttggccaggccggtctcaaactcctgacctcagttgatccgcccgcctcggcctcccaaagctctgggattaccggcgggagccaccgctcccggcctcagactatgctactttggaaatgagtagtatacataaaaatctactccccataaaaaatgtattccttcttcaaggtaatgagaattgataaaattgcgattgttattaagcaattgttgcttgataaaacttttttaatttgcatattctaatacagggtcatttaaatttttgctaaattgttccacatttcccacactgaaaggaaaatgaacttctagacaatcttctcctctggatgtaaacagaagcagcgtctaccaagtaaaatgtttttgtaatgtttcttcaccacgagagggagctatttcttttccctgtttttccctttggcggaagttcaggaaccggtgaaaccctgtctctactaagaatacaaaaaaaaaaattagccggaggtggttgagggctcctgtagtcccagctactcgggaggctgaggcagaagaatcgcttgaaccccgggaggcggaggttacagtaagccgagattgcgccactgcactccagcctgggcgaaagagggagattacgtctcaaaaaaaaaaaaggaggagggaagggggaagggggaagggggagaaatttttatttccggagacaaaatgtcagaacccatatatcacatttgttttctccctctaaaccctcagatctgtttcttagaagtggacacgtgaactcttacacagatcaagaggagcagctctgtaaatatttccctgaggtacgtctggtgcagtcctctagggccccacagatcagagttggaaacttctgctatggcattgaatccgccacatcacctagcggtttaatgacaatgcaaaatcctaggcaccatctgcagaagattaaatagttctgtcctagatactaggaatctacatttttagccagctcacccttcctttccctgtctcatccatgattctgaggctggcgacctgtgttatcacactttgagaaaccgttccaaagtcaatgtttttcaaactgcagatcctgacattccaaggagtgtgatttcattttagtaggtctggacatgctttgttttaatgaaataggatagtctagggtagcataaaaaattatacaatttgcccggtgcggtggctcacgcctgtaatcccagcactttgggaggccaaggcaggcagatcacttgaggtcaggagttccagaccagcctggcaacatgacgaaactccgcctctactaaacatgcaaaaagttagctggacatggtggcgcatgcctgtcatcccagctactcaggaggctgaggcaggagaatcgg

SEQ ID NO: 56137 - DNA, 2013 bp, Homo sapiens
agccaggatggacacgatctcctgacctcgtgatccgcccgcctcagcctcccaaagtgctgggattacaggcatgatccaccgcgcctggcctcaaaaagcatttttaatttaaataaataaagtatgagggcggccttcgtgatgtccttcgacttagtggtggcaatttttagagatggcccaagcaaggcttaggagaaggtaggtgagccaaggggcaacacccaggaacccagaagccggctggccaggtagtggaaaggcgcaggcgcaggggcgagcgaagcctcggtggagcggagccgcctgcacctccagagaggcgccatacgggggccgccgcggaggccgactcagcgccgagcgctaagagaaaccgggctgatgcagcaggcgggaaacaagccgtagaaattcttgagacacgggttcgtcgccagcttcctggtgcaaaacccaacacctggctcacaaaacgctaggtaacatctcatggttccactggggctcgaacccaggaccttctgcgtgtaaagcagacgtgataaccactacactatggaaccccacacgactaaaacgttcctccaggatttgataattgttcaaaaagacattttggcactgggaaatggtcatgtagacttgacatccggcgattgtgcacagagaaaaactttcaaaaggattcctcattttccagtattcagaggagcacgaccgcacagaaacattgtcaaaatgtctgcgtctccagcttcctgaaccaaaacccacgattgggctcgcaaaatgttaatactaaacattataaagaaaggaaagaaaagaaaaaggtatgaatcacgccgtggttccactggggctcgaacccaggaccttctgcgtgtaaagcagacgtgataaccgctacactatggaaccgcgtgcggaatggctgtctctggatttagcaattctgcataaagacatgttaacaacgtggactgaaagggatttactgctcagcgatcacgaaaagagaaactttcaccaggattacagactttccagtgtaattcctacccacgctctctttagagacaaaggttccacacttacttgtggaaagaaagtgcctcccctgatgtgttcatcgcggagaggtcgcacgtgtctggctctgtggcgcaatggatagcgcattggacttctagatagttagagaaattcaaaggttgtgggttcgagtcccaccagagtcgctttttgtttgaagaagagcaaacggaaagttaggcggagggaatggatataaaatagatgaaacgagaactgtctaccatttaaaatttccggaatgatgtgaattgcagctaattgcagttcctggttatgtcccttcacttgaaggcgtaaagaatcccgttcctctatcgagccttttctccttcacttttacctggccccagtttctagtggcgagataaagaaattagggaaatataatcaaagttaccaagttttttccccatattattcttttatatcaggaaaaaaagtaattttaaattgttccgaaactttagtcgcctagtgttacccgagttgctttaaaataaaacattgttttatcagttaccagaatggccgagtggttaaggcgttggacttaagatccaatggattcatatccgcgtgggttcgaaccccacttctggtaaagaggagttgtttttcctggcaaaaaccttttttcctaatccttgacaatccattttgcaatcttaagcgtccagataacaataactatagttaatatcattttgccagataccttacatatagcgacagcttcacagtttatggtttgaaaagtagaaagaaaacgtctgaaaaaaagaaagaaaacgtctgggtccagctatatgggagtgagggagcacagagcgagaggcacattgtgctgcaaaaacgttcactccgagtcgacagttatttcttgagatcctattacgtgccaagtactgt

SEQ ID NO: 56138 - DNA, 1225 bp, Homo sapiens
atccacagctcggttcaggcatcatcactccctggaaaacttggctcttaattcgggtgccgaccaagtcctccggggtccgcaaaggctggcatcccaccaccaacgcgcgtgactagggtcttctgttttgcgcgtcttccagttccactgagggccgagactttgtctttgcggccccagtacttgcttagttccgagagtgcggtttgcactcagtaagtagccacttactgagtccaatcgattattggaaacctaatttttcatcactgcttctcccacaagaagctctaggactgactcctcaaagaccaaaactggaattagcaatcccgctgtttacccggaggcccggtcaaatgtcttaaatctgggaggattcctcctgggaaattccagtaagggcgcggagcaggtcaggaaggaggttactttttgggtctttatcgtctatgatgggagaaaaggagaaatgaagactcgattttgctgaacgcctgctcattgtcaattttgccggttcatctctcaagaaatcagcaaaaagactcagaattgtaatcgcgaagggaaagaatgcggccacgtggcctattttcctgtggatagactaagcaaacgcttttcttcaggggcccggatagctcagtcggtagagcatcagacttttaatctgagggtccggggttcaagtccctgttcgggcggatgctgttttagtttccaataaaatggatttgggcgaggctgagagaaaggaacgttatgtgaaacccgcttggggtgcctcctccttgagggaaaccagaacttgctagtgggttcttaccggaagaagtgaaacgtgtggaaaatgccaagaaactttatcttccaatagcaggcttttcttttccaacctttatacgttgctttgtcttaggatattttttcttttaaattgtattttatattcaaaacagatcaataaacacatcgtcagagtcacaattagtaatattcttggcaagaattgtgcagcttttggcaccgaggaatgttttcaggcactttttattaaaagtgcgatgaggaaactgagactcaagaaatatttcagatgaagacacgtaaagacgcaagattcctacatctccaactggacgcagtccttcaccagattcttaatgctctggtgggcccctgacttgtgtctcttgcggtaaagactaatgcttttgaa

SEQ ID NO: 56139 - DNA, 762 bp, Homo sapiens
ccagagagctgactatactggtgatcaaacccaagaccttccgcctgtggaacaggcgtgttggccacctcaataacaaatcttgtgccacgtattgccatttaacatccagtagtataaatagggtgattacggaactgggaagaaatcattctacgacttctgattcctttgagaggcttaagttcatcatgcatcctcataatgactttgacttctgatttctcgagcttattctttgcatccttataataccttactaaatacttcgtctcattagtttctgcccgcctaagagacaaggagaacagccgtctctgggtgtgtatggcgtaggtgcaaacgtgcaagggtactggggagagaggcgagcctccagagaggctaagaagtggaccgtagccctgtctgttcaaaggggttgagccaacaaaaggtctgccgaaacccgggatcgaaccagggacctttagatcttcagtctaacgctctcccaactgagctatttcggcgaagacatgagacagtcccgccctgtcaaggaaatttaaaagaaaaaaaaaaaccgggcgtggtggctcatgtctgtaatgccagcgctttgggagcccgaggcgggtggattacctgaactcgggagttcgagaccagcctggccaatatggtgaaaccccgtctctactaaaaatacaaaaaaaattagccgggcgtggtagcgagcccctgtaatcccagctacttaggaggctgaggcgggagcat

SEQ ID NO: 56140 - DNA, 1126 bp, Homo sapiens
atcccagccatattcctcaggcacccaatcggagagaacccaagagggagggtcagcaggagccatcacaggggagcgaagagaggctgtcactgtggcggcctggtcctttgatatatccgctgttgggatacagcagcccggctggtggctacagaataatctgcctattacagcccccaaagtgatggattagaagtttcccgtatacctctgcacaaaggcctatccccatagagggcttaccctccgagaagtgtttggggtcgcagtttacacaatccaggactttattcccttcttttgcagtgtgttaacaaacaaaagatcctaaaattggttcttactcttttaatgaggaaaaaaaagataccgcccgaacagggacttgaaccctggaccctcagattaaaagtctgatgctctaccgactgagctatccgggctcacggtagtaacgttgcttccattaatgaagactctgttaccattatgccgtgaactaacaggcaaggtgcaaggtggtgaacgagttcctgggctcttcttttgtgtgtgatccaatccaattccgatgcagaaatccggcgagggctgggaggaggctaagtcgggcgtggggaggaagggtgattagcttgttctttggcagctgaatacacattcgttaaataaagcaagttctccttacatttagagactgcgtggcaaacgtgaatcctcagttctgcaaaaccgcgcaggggagagaaaaagccgcccacgaattgaactgtctgcaccgcctacgcgtgtcttagccctgaacccaaagcgcatccagttggaaaccacagttcagtggttaaagacatcaggctgccccttccgaggagacgccacttcgtgattccttgcctccatcccaggtgcccacctcaaaaaagtagcgcgaagcagattagctgaaaagagatgacgggtggtagccgtagctcgccggcgatccggtgagcgcgccccggacccaccccgcccccacagccccgacttcgacgcacgcgcagctccgtctcagctcgctagccgacccgcccctcccacttctcccctgtacacgcagctgttttcttctgacagatcccat

SEQ ID NO: 56141 - DNA, 1112 bp, Homo sapiens
gatttaaactagaaagggcttccgatctctgtctcccgccccacctaagagctgttctagggtccttgttattgtttttgttttcttttttaaagacagagtttcaccgtgttggccaggctggtctcgaactcatgacctcaagtaatccgtccgcctcgacttcccaaaatgctgggattacaggcgtgagccaccgcgcccggccccggtccttgttacggtttaaaaagctggacaaagcccgtgcgccgaacgctttcgaggacttctttggccaagagggggcccgggctgtcaccattcccggcaagcccgcgaccaagcaggcagcggaggcggcgcaggccgagagctcccgcccctctgacagtgagagaagggtcgcagcgcccacggctgcctagaacccgaaagaagaggagcggggtgcggggacacagggttgctcaagaaagtgagctatgcgcagtgctccggaagagcttgtctcaaaccaggtcccaagtgagggcagaggcgtaacttcgtactgggcagtttaaaaggtaagacatatgtccccagtatcctccctcccaggggaaaatgacgataaggtttcccttaactgccccagcccgcgtgagaacccacagggtgttgaccctgttaactgcagaaagaccctgttaactgcagaaatcacatgtagtgatgactaacgcctaaaacggaagcgctgccgaaacccgggattgaaccagggacctttagatcttcagtctaacgctctcccaactgagctatttcggctgccgtggaagacgtttttctttttttctacataattataataaaatagtatttgttccgtggtaacaaagatcatatggattcagctagaggtaggcattttacaaatgttacaaaggtgataaggcaaggcccttgtttacaaactgaagtgataaatcacttttctcagggttttttgttgttgttgttgttttaagttccctgcaatttgcttttttcatttaaaaacatattatggacttttttcatggcagttatgtagacctatcatactttttaatccacgttcgccagtattggattgtatggttata

SEQ ID NO: 56142 - DNA, 1196 bp, Homo sapiens
tctcatttcctaagaatagctctattttatatataccaaaccatctcgctcccgactgtaactcagcccaaatgagaactcagcccaatgttacatcatgcttagagttatatcgcagaagtgtaaaaaaagcacccttaaatgtttagagtattaaatattggctatggttcaaatgatatgaaataagaataactagctttctggggaagtaaaaaggaatcaccaagtgttttaatctttctggaatatgttcattcctaaggtccaccatactctactggtgggaactcctaagccgtctattaatagctaggaaagattcagcagatctgctctcagagaactgggtgtaaaaattttcccgatctctagtgactgacagttctattaatagactaacttttgaactttacagcattacttggtgacaacaagctataagacacttcacatagaataccaagcttcacataaaatatcaagcttctagcacaatcgagtgtctaacacaaactgtgtcatttccctaccacccgctggttatgcccaggaacctgcatgttgagactgcacttttccctgtccaaattggaacacagaggtcaaagtcctttgccaactgccacagtacaaagcagagccatttccctttcagtggagtcaagcagccaaacacacctggcatatccagaattcctgcatgccagaaatggcacacaccccataagatttggtatgtttgagaaagtctggaagacaggtttgttgttcaatttttcacatgaactgctcttccttcctcaaatagtatgggaaggccagaagggtctcaatgaactgggccattttccatctcctgcacctgccacactgtaacatgaatccgttttttctattcttacctccccacccccaagcttcagttacattatgaataatgcaggctgaattacagatgcacagctgacaggccagctcgctcatgttttctactccaagtatactacttggaccttcctccacattcctccttattggagctttttggaaaccacttcttaggaatctcttctgcctgggtcatcattgtaggaatctcttctgcctgggtcatcattgtaaactaaagaagtttctcaaattacaaaaagtctgtagcagtttaaaaaataccaaggaactctgggagtaag

SEQ ID NO: 56143 - DNA, 2880 bp, Homo sapiens
gaaagttgcccatgctaagtctgttttcctcatcagtaagatgggaatatttcccaactcctagggttgttgttgggagtcaacaaaatactataatgaaatactgtatataaaacacctagacacattgtccagccctcaggaaatgtttacgccctgtccccaaatcacctatcttaactcctctatcctttttagcccaaaagcgtgccatgtgatggccaggttatgagtcaccataaatatatattaaacagtccaaaataaaccttgttgaacagaagtaatcacaccaaagacatggattcttcttttaataaaagttaatcctaactaaccaaaaaatcacagaaatgccagataaaacacttaatcatttccacgggaggaggtggggcaagcaaaaataaaagcagcactggggtgcacatctccattctgggctgtccagaggccaaagcacatgcaaagtcttggagagataaggcagaaaggggacggaataccgaagccaccctgtgtgtgtgatgcccttatgtctgaatgtgaagggagcaaggacgggtacatccagagctacgaataaccttgagttttggagactgggcactgacagctacaacttgggacttccactgtaagttccttgggaggagtgcctcgggtttgttctgctgcatgtgttcccttagtacctacaccagtgccttgcttgcagaattaataattgcacccatgtgctggtggaaatacaatggaagcacagacgctctccaaacgactaatgactggaaaggccgggagcgaagggaagataaggcaccaagagtgggtaacccgaggggaggggaggtgtacgtccaggggcttttcactttcgtgacagtgggctccgacccctgggctgtcaatccgcacagatgacgaaaaggggcctggggcaaccctggctgcggtgccggctggcggtaatgccggagctgggactgttggcagatatgggggaggcaaggtgagcgacagcgccccggaagcagttacctgtagtagctcaggagcccgttgctcagcacgaaccatcgccgctggtagcctttgatataattggtccatttgaagagccagccctctcgagccgagcccgaacccccagcgcccgagccgcccgagcccccagtcggcggcgcaggggccgggccagccgccgccactcccccggcccccgggcccgggcctcccgccgccgccgcgaccaccgtccctgacgcggccccggagcctggccccgcatctccgcggccgccgcctcctcccaccactgggggaccggcgccgccgccgccaagtgctgcaatggctgccgggcctggccccaccactcctctcagctccgtcgccgccatgagccgccgccgcctggagatacaagaccggaaccgcctacgagagccgccgtcgccgcccggagcgccccacacggctaccgcatcagccaccgccgcgcagcgtccccgccccgcccggccagccgcggggaggagggctcggccgccgggaagaaggacgtcgattggtgccgctgagtgtcacttgaggaagaccccgcggatattggcatttctctcgggcctgtcattctacagcgcccagtgagagcctggggtgggacgcgtccgccagacccacctttgattggttcagataaaggccaatcagacttttggggaagctcattggtgctttcctgaagtttccagcgctcagggaggacgggagaatgcggaatgcccggccaatctgatcgccgattggctgctgtttccgccattcatttcagtttatgcgcctgtcactgccacgtcaccccctcccatcgctcttctcatcatccttttccgccctcatggattggtggttggtatcagctgctccaccttttctaccatttactgaacgagttgaggaaaaagggaaggagtctcgtctttacatccttattttctttttttattggttggcacctatgccactcacgtggtggagaggcggggcaatagttggagatgattggttctgagaattggctgtgaaagcggcattgctgaccagtgagagagacctaatgaggagcaggccggggcaaccaatgaaatcggagaagagcgcttgggggcgtgtccgcctgctttcagcctttggcaagttggtgggaggtgaaagtgacttggcctcttaaaagcgtttttttcacgtgggtgtgatgtcgtgttccgtttttctgaataagaacttcgtagcttcttgttaggaagaacctggaggacagagtaactctcggcagtcagcccccgcctgaggctctcttgaaggacccccttctaactcgaagctggatacccagattccaggggtgcccagaagtagcttttccagccccttcctggatccatggtccccctagttcccttccctgtttgctctttatcgctccacaccccttgtgtcttgattctagactgtcatatgcctataccgattctgtccccttcagaagtagattcgcgaggacctgactttatgtgtctcttccagacctaaaggcccttggttttagcatcataggtgccatgtatatgcttaactttgaacagaaaattattattttttgtatctttaaactgatatatcgtagttgtacatatttaactttggacagaaaattttttttatatctttaaactgatatagttgtacatattttcagggatacatctgatattgtgatacatgtattcaatgtataattatcaaatcagtgtaattgggatatccatcatctcaaacattatctttgtgttgggaacattttctgctatgcgt

SEQ ID NO: 56144 - DNA, 668 bp, Homo sapiens
ggcaaaaggacacagaacctcagggatctaaagtatagcggagaagatatgggttaattggccatttcaatatactgtgagaagcactccaagataggttaaaggccaagcagaagatcacttcaggccaggagttcaagactagtctggacaacgtagtgagacctcatctctacaacaaataaaaaagtttcacctgtagtccccagctactcaataggctgaggtggtaggtttgcttgagtctaagagttcaaggttacattgaactatgattgcacaaccacattccggcttgggtgacagggtgagacccaccctgtctcaaaagaagtgttttcagatttaatgtattttcttttatttttataaaagctcaatgaggaagaaaagaaataattagccaatttttatagatttttagagaatctataaagtgatcagaaactcagtgtttggagttacatagccacagctagagccagaacccaaggctgttgaattccagccttctagtcatttatttctttttgtcatgtagccaactggaaagttaaaataaagaactattaatataaataactaggttataacacaacaaaggaaatcaagagtgcttccagacaatcaatgcacatggtataaagtgatggctggttttactttaa

SEQ ID NO: 56145 - DNA, 3123 bp, Homo sapiens
taccttttaaggacctattgcgtctaaggttctgtgctaggctgtaaggctcaatgtcttacattgtaatgcagggacaataccaactatggcagagagttgtgatgatcaaagtgggcaaagattacagattatcgaacaaaggctagaggccaccacatcctaggtgtgttctattttccccctttacttcaatcttactcaactgatttattctccaagttttccttttggtttggtcttagatcattcctatcaagtatacctgtcctcaattttcaaaaattcagaatcagaattccatattctatcagtaggtacgtttgtgatacaccttgcctggctacctcttagctaccctgtttacaatggaaagattaggtcaaagggcgttcttcttaccccagagcccttccaaactcatgccaataggcatgccactgcctccttatcagaggcaacttccagcagtactcccttccaaatcacaaatatctactttaccaaatcgctgcttttttaaattaaaaattcttaaggatcatttacatcagttctttcatgctacaaattcagaaagtttacgtccagagattaggagtcactcaaggtcacacagtgagttggtgacagggtcagtactgtctgctgctattgctacattcccggcaccttctccaaacccgcgtctcccagcactagcccagaaggaacttctgcaggacacgcccccctcccaactcggagccctctttagtaaacgggctggggccctaatccaacggcaagcccaggcccccttcacctgaaggtagcctgtgtgaatgggatgtgtgtcagtgtaattcgagtggaggtgggtggggggtggttccgggtccagggcgggaaacgcggctctgggaattcccgggtgacacctacttaagaaaagcacccggggagatgcagtgctctaccctccgtggctcctctaggggtgggggcgggggtgtggtctggttacagcacttaacgggccctccccaccccaaaacggaggccaactttccccagcggcaactaatgggactgtctcgacccatgaagccagctcccagccctaggattagacccgcgaccccagaccagtcgcgtccagctaagtcctgcgactcccccagcccgccccctgccccgcaggaacacaggaccggcgcgcggagagagagtgagggagaggggcgcgggagggagggaggggtcacttccggtcgcaacagctcacctcgtagcggaacattcttggggaggggggcagggagcggggaggggagagggggagggagggaagaagcgctgactccccggctcctccgcgcgcgggtcctccaccggctcgcgacccctggccgccgccgtacgccggagcgtgcgtggggacgtgcgcaggcgcgcctcaggcagggcggccaccccgctcggcgcccggcggcggcggctgcgcagggacagatttggcgtcccgcttcctagtctcagcggcgggaaggaggtcccgtggcgagagactgcgcacgcgctgcccgtcttcggctgcctggtgatctgggcttgtagctccgccccctctttctccgcgccctctaggcgctcggcttggagctcaggggccggtcacgagttctccgtcacccgtggggcggagaaaacccttgtgattgtcacaggatatagctttgaagaatcctgcgcttagcctgggctgggaaagatgagattcccgggcagtttttccaacgtccgactcactcctcaggctgctcgggggtctccccgttgcaatctgcgccttgcgcagggaaaaaagaatggaaagttgctggtcttcgaaaggggcggacttcgtcgccactttcagcggctcgtcgcctgctgaatccacagcaggtcagggctgtgatttatgtggctcaaagtgatgacggcgcccgttttttttttttttttttttgaaatgctgaagacaggttccgggaggtttaactagggtggtatttttaagcgccaggctcattaggcgcgaggagctgcagagcctcgaagggccgcacggccgtgggccgctggccacgcagcagcagggtcttcgggccgtggtgcgccgctgggtgactccacttccttagaggatcgaacccacagaggaatgtgtccagcttagaagcttcggccccctggttccagaattctgttgggtggtttgttacctctagcacgctccatgcccttcttgcccctttcctttcagacaaaacttgcagcacaaagaatgaattcttttgggtttcgcaatccgtttcttccctgggcgtcttaaaatgcagcctcgtctcggaatggcatacagtaaatcccctaaatgttagtgtgtctggatcagtttgagtatcggaaacgctgaatttgtgaagaaaagttctgggtgggagcttgtgctttgccactggctaggaaactttgggcaacttacctaaacctctctgagccttagtttcttgtaaaatgggtataattacacctgcctcatgatggtaacactactaacgattgaaggctgcctgggactctgctaggcgctttataaaatggattatctcattgaatccttccttatgtgccccccatgaggtaggtactgttattttctcagtttacagttgaggaacctgaggattagcgacattgtttgcctccaaccacccaatggcaagtggtaaagctagcagctgagatttgtctgattattaaaaaccgagtgtcttaatcactgtgccagaataacaaaagcaaatgttgacatgggccaggcctgaactttaaagaagtggagcgtcgggacaagatgatttattggttttcaagcatgcatggaacattataaaacatcaaatactaagtaacaggccaggcgcggtggctcacgcctgtaatcccagcactttgggaggccgaggtgggcggatcacaaggtcaaggagatctagaccatcctggctaacagagtgacaccccgtctctactaaaaatacaaaaaattagccgggcgtggtggcgggcgcctgtagtcccagctactcgagg

SEQ ID NO: 56146 - DNA, 633 bp, Homo sapiens
ttttgagagggctgcagtgcaatggtgcaatcatagcccactgctacctcaaactcctgggcttaaaccattcccccacctcagcctccccagtagccaagccttcaggcacgtgccaccacatgtggctatatatatatatgtacatttcaaccacaaagttttagagtagtttattgctcactaatagatagtgggaatgtgtccgtttagaaaaattatacaaaacttggaaataaggaaaaaggattgttgtgtgccttgcaatgttgtaataagaacattatctaacaagcctgcctaaaggtcatttaaagttctacagagaggtaaccttgtttgacttagtgtttattattaattaatgagatcccagactcagtaaagttagatattagtttatagaagattaacaagttgcaaattatttttgtccagtggagataatttcattttggtgggaaagatcatctcaaaggagacagttttattgccacacaggacattaaccaataatatatttaacttttgagtcttaattcagccatttcccccactatatagttcatagtttcttgtgtcctcctttgaatcagcttcaccaccttgctgtttcttttcattaataagata

SEQ ID NO: 56147 - DNA, 661 bp, Homo sapiens
catctcttcatctggatccttcgtgatatcctttataataaactggtaaatataagtgtttccttagttctgtgagccactccagcaaattattgaacccaaagagggggtcatgggaacctcaacttgaagctgattgatcagaagttccagagacctggacttgcaactggtgtctggggggaggagggagtaatcttggggactgagccctttacctgtgggaactgacatatctccaggtagtgtcagaatcgaattggaggatacccagctggtctccactgcttgttggtggggaaaatcccccatatatttggtcacagaagtcttctgtgttgattgttgtggtgtgagagcagaggacaaatgcagtttaagtttttccatgacaatgttgatactttgaccccttcctatgactcacaaatgttctttttgcgggcagggggcaaacaagtgcagtggcacgatctcgactcactgcaacctccacctcctgggctcaagccattctcccatctcagcctcccaagtagctggggctataggcgggcaccatcatgcccggctaatttttgtattttttgtagggacagggcttcgccacgctgcctgtacctggcttcacaaatgttcttaatggcatttaggatggtaa

SEQ ID NO: 56148 - DNA, 3037 bp, Homo sapiens
ctctacgaaaaaaacacaaaaattagccgggcgtagtggcgcacgcctgtaatcccagctacttgggaggctgagatgggaggatgggttgggcccaggggatcgaggctgcagagagcggtgatcgcgccactgcactcaacttgcgcaacagaatgagactctgtctaaaaaacaaacaaacaaacaaacaaacaaacaaacaacccccaaactccccaaaaatgtgttaggggaaggaggtgggacagtgtgtatttctgatctactcgcctttcctagtatgaccaccagggggcgcggaagccctcctggtactaaggcggggacaacctgcccagcgagcacagcgggcagaaggaagtgtgccggacgcgagagagaactacggccgagacccgcggggccggctcaaagcccgacctctgccatacgcaccgtatctttatgggagccgatgaggtcagcagggagcacgcgttcagatggcagaagagggcaaagtactgctagaattacaaagatatttacagctttttaacctgaaagcacagagcagatcctattcttcagaattaaatcttcggctcgccagtcccgtttatggatctccactctgatgaatgtgccatttgttcccaagaagacaaatagggtagggagaagagggagaggcggggagaagactcgagataaagggacgatctgcttttcggaagcagaagccgcctgggaaccacctgcacaccaagcaggctgcgaggacggggagcgctccagtgcaaagttctgtattttaaagcccctcctcgctcacaggcttcacagcgaactacgaagtgggtaccatctctgatttacagacacgggaacggggtcctcttgagaaacgatgctttcccaaacgtctgcaaattgtgagtgccaagtgtctccactggcactaacaacatcgagctgcttacgtttctcggagcggtcccgatttccaacaagcaaaagatccaaattctctgaccaccctgaccgtcctgtatctccagatctccaggtctttcctctggacacctcctccatccccccactttcactgccagcagccctgaggctgcgcgggatcccgctactcggaatgccttcctcctggcgggatatttttagaacactcgactgccacccaatgtagcccacatcacattgtcttatttgttttcgggagcttgtccccgcctagcaaggagtcggctaagaactggatcctagcgaggagcccggcacagacagcgaatgaccgcagccagacagtcgctcttgctcttcctcggccctgcggcaggatccgccggtgcaggggcctctccccggactccacgcgtgtctggagggctctcgggttagggaagggggctttggagacgccccgggcggccgggcggtggcgggacgcgggccctttaagaaggagcgaggggcgcggccaggtaggggcgggtccagggcggatcagcgctgcgccggcgccggcccgggagccggatttggagcgcgaggcgccggtgggggcggagggggctgcgcggcggaggctcccgtggcctcggacgctcctcctagctagcggccgccgcccgccgccgcctgcgcctccagctccttcgccccggcgggcccggccgccgcttccggcagctcacctgggaagcgctcacctgggacgcgctcacctgggacgcgctacctgcctccgggcgcctgggcttcaggatgaaggaccgtctggagcagctgaaggccgtgagtttcgccgcaggcggggtgctgccaggaggggtgctgcatgggagaggggcttccctttgctccccaagtcgaggctggaggggggcccgagccggaggcttgccctccccaagcccccaccgcttcccgcgccggttccgcaccctcccctcccctcccctgcggggtcatgtgcccggtgattcatcgctaggcaatgattttcctgaacgcctctaactctcccaccccgcaagctggacagtgtctgtccagagctggttcccgaagcgggtgcttgggcccgggaggtcaggggtcccttcaccacctgcccactgctgcctggcactatgcccaggaccagcctccttctccctttcctgtttctctcctgaggtgctacaggcctggctgccccttcccccagggagcagctcagagctctctggtgacctctggagctgtgagccggtcacatgctgggatgggtcagctcctctccaaccggtggtctgtaattgttatccccgggtgtcattgtccccccctcccccgccgtatcttttggaacagctgtggttaggtcaaaggatctgaaggtagactacctccagccttggctgcgcaaaagctgtaaagccttaggttacttactgtgagtctctgtttccttatctatcaaatgggaatgatcataccctaggaatttgttgggaggatcagctgatacaatggaacttgatacagaaaagggttaacgcatagggttttaagccagatattcattgactcattcagtacataattattgagtgtattctatggggaggtccagtgctaagccttggagattcagtggcacaggttctaccttaatagaattaaaatctagcccttgacactcaagagtttagtccatctactttggagcttgttacaagtgtagcagcttaggcctgagtctagccccgcagaatcagaatctaattattcatccatttccccaggtgattcatgggcacattacagtttgggaagcactggactggattagaactggggttgtctcctggctccactgcttactggtgatcccttaaaatcccagcctaagttttgtcatttgtaaaatgggtagttgtaaggtcgaaatgcaacagaagatgcttaagaacacttttagggtgcatggcacgggggacttaataaatggtgaaatatgctaataactgtgagtgctcttgggaaaatgcag

SEQ ID NO: 56149 - DNA, 2506 bp, Homo sapiens
gtacatatgttcttatcacccttctgtcccccagtgtacttatgaataagtagaccacaaagtttattttatagaatgtggtgtagatatactgttgaaattgggataaattatgtttcagagaatagagatttggggaaatgagagattgtccccctctatgtgactggtgatcatgcccactacaccctgcaggttatataactaagtcgctttcttgggaaagcactcttgataaaacttactgtttggactggttccaggaggtcatccttggttatttgctgagagcatgaatcacagcttagtcatagaggtatttgcaaggtgcacatgaagtcataggaccagggtgttttcagaatgtgatttgcactgtcagattccattgtatcttctctagcttcttgatcgttggaaaaaaagattggcccttgggttttcaggccactttggctgatcaagccagagcctggtaaatgataaacgccacatttttgtctaatttgcagttgtctatatttttcttggtttgtttgctcagttggcagaaagtaatgttcagatgaaacagacctgcctttggaggcagaaacattaggggtttatttttctgtattcgtttatctattcatcaaagtatttgagcgcttactgtcttcaagatagcatgttaggtgctggggatccaatgttctgtgacaggattctcgccccctgttgtctccttatctggtaagggtgatagaaatttttaaaatgttgttatatgataagaaaagtgtcagtaaggtaccatgggagcacagaagaggaagcgttaaattctgcctgcagagaggaaggtgagggaagatttccctggttcttaactagacttgtcatcagaatcacctggggagttttttgcacatacacatacctgattcttagggactggaatggctcagacttttggatttttaggaatgtcttccggataattctgttgcctactgcagctatgcaccactgcaaagtgatggggaaccttcgaggatttaaacaaggaagtgatgggctcagagtgtgttttagaaaattcactccgatggcagtttgtggagggtgcgaaagacctgaaatggaaagaccagcaagccagcgatggagccttgacctgaatctgtgatcctgagcagcagtgtagcctatcatttagggatgcttttgactaactgtggcttaagcaacaaagatatgtaattattttgcatatgaagtagtttggggttagggatggtgccgtttaaaggtcagcttggggttctaggtcagcatcactgtgatcctcttggcttttctcttaggattgtgagagagagagtctgttctgtgattatctattgttatatcacagcatagccccaatatttagtggtataaaacaactgtttgttttgctgacagattctgtggagtaggaattcaaacagggcaaagtgggtccggattacttctgctctacaatttctggggcttttattgggaagacttgaacaactgcaggctagaatcttgtagaggcttttaaaattttactgtctggtgcctttactggggtggctcaagggaaaagctcagcagagactgtcagtcagagcacctacacttggcttctttctgtggcttgggcttctcgtagctggcccacttagggctattgaacttgttacatagaagctcagggatgcaaggcaagtgttccagctacagaagttacatagcacatcacttctgcttggctctgttactgaagcagtcacaagcctgccagattaaaagagcggtacataggtcccacctgcctgtgttttgaaaccaccagagtcagagctctatttggcatcaccctgtgacagcgttgcaagcattaagaaagggtgcagctagaaaagtccaaaggtcctttcatcagagaggaaaactgcccagatcctccaatctgacttcccttgtggcctcctggatagcactgggtcacatggtgtgggcctccttagctggaagggacaccaggaaagtgagtactcagcaaagggacaggattgccaggattgccatcaaacacatcatgattcatcctctggggctggcaatgccactacccaaacaaagtcagatttctgttaaaaagaaagagagggaaggggccagggaatggctgtttgttgggtcagtgaaaatgcgttgtcacagatggcagtgtgaggtgcaaaaagccttctgtgatcaaatatgtttgagaaatgcttcctgcttctttcttctcttggaaacttaaaatgcacgttaacttattgaaagctctaagaagtcctgtaataaatcagcttaacttggctatcctagcatttaatttttcagagcaacactttctaacatggaacttctattaataaggatgaaagttttcttttcttttcctttttttttttttttttttggggatgaagtttcgctcttg

SEQ ID NO: 56150 - DNA, 661 bp, Homo sapiens
gatttttaacaactgttctgttgagattactttatctgaccatggaaagggtactcactgggcagctgaggactttaagtcattatcttcttccacaaacccagaagatgggcagctttcaccagcagctctgccaaacgtttatctcagccatggacctgtacttcctctttgatgatgaaggttattgtctttctgattatagattgaggaaactcggcttaacattgacaagatctcagaacatgtagaggaggctaagaaactctacagtatcattctctctgcaccgattccagagccaagtgagtgtttacttagaactgagtcatccaacaatcaccctttccttggagctgagccagccttgttttcttgcccttcgtgagcagtagggaagtgtacaagttacagggcactagtgtacatattatctcatttccctcccctttaccttacctgagctcctactgcctggccacagtcaaggttttgtcttcatggtcccactccaaccatttagctagactttcctgtttcccagctagtccctcttcctgactggcgacgattcccactgctgcttacataccctgtgccctgtccctcctctgagcctctgcgtgtactatttccccagcctgaactgcttttcctagcc

SEQ ID NO: 56151 - DNA, 1151 bp, Homo sapiens
gtggcgcgatctcggctcactgcaacctccgcctcccgggttcaagagattctcctgcctcagcctccggactagctgggattacagtcgcccaccaccacgcccagctaattttttttgtattttcagtagagacagggtttcaccatgttggccaggctggtttcaaactactgacctcaagtgattcgcccgcctcggcctcccaaagtgctgctattaaaggcgtgagccaccgcgcccgcccaaaagtacttccgccggaggagtcttgaggtgtgggatgcggattccactaaatggactcaaaggctcaggctccgcaaaaggccagccgggatctctgggcgccgactcccagacgcagctgtgaccctcttgcacgaacccctacggtggaggtcggcggtgcgatagcgtagttcctaaccagtgcttcaccaagcatatgcagagccgccttttgggttagggagaaaaagcactggagggtgggggaggaagaggggtaaagtctttaggaaccaaaagggacttctgacctgacaagggcacccgcaggagcggcgcactagcgcgagccagcagcctccacatggtcacgggcgtccggcggcgcggagctcccccagcgactccggctgtctcctgcacccaggtaagcagcggcgctccactacctagctgtaatcggctcaggacaccgctcagtggggccggaagttgtgttcactcgggtccactccgcagagtcccgacggaagcgaaagaaactcgagcgacgggggttgagttccgggggaggttgagttcctgcggtcaaaggcgccgtccgcccagccacgcccaggggccctgttggctctctagggttctccttccaatctccagtctttccccagaagaagagggcggcggggcggggagtcttttgttttatttatttatttttctgcggagtacaactgttagtgcctgccggttgcttagcaaggtggtcccttacgattcacagcctttgagatgattttctaggggacccctcaaagacattaggagaataccagatttagcaatggtttaacatgtatagggcaattgcaatgtgtcattgagtacctcattcgttagtcctgccaacgaatctgtga

SEQ ID NO: 56152 - DNA, 1037 bp, Homo sapiens
ggtattgtcctctcattgctctgtgcttacaggtacttcagtgccttctccatgctcacaggagacctgtccaccaccacccatgtttccaccaaggcccatcctagcagcacagctaccatcaggtaccacaacacatgctggggccacatggctgacctgggatcattgaggccaagggctcactcatcttgggatcctactgactatgccaattgacaggttccaacctgagctgggttctgaagggagctggtggacacgtggtgggtagctgaaagaacacttggattgtaggcagttggaacgtggctttattctctctcctgtcctacagagtcagcagtgcagttatattactcacagacagagtggctcaaagccaggtatgagctcacacaaacagattatagtaaatggttacataatgcatggggttgtgcacctgcgctccaaacccgctgtgtcataccataccggatgtttaccttggcctactcctgactgaagcacagccactttccttacaataataaataacttttgaaaaatgcatagtttcccctcactgatgacatgtggagacactgtaaaggacaaaggtagcaagtgtgatttcctgtggtcaagttagatacctccagtgaattccagataccttgttttgcctttttctatttctcttgggagaaaagttgttcctcgttatcaccataaggtgtcagtagagtcaactgtgcagaaattgggaaaggccaataattctaaaatctttctcctgcaaagggaagagaaaacatgtttcctacacagtctgagtcatcctatttagagcattctacaactttctttctctcttttttttcctctctttcctttttttttgttttttcaaggtcttgctctgtccaccaagctagagtgcagtggcaagatcatggctcaatgagcctcaacctctcagtttcaggtgattttcctgcctcagcctcttgagtagctgggactacaggcatgtgtcaccacacctggctaat

SEQ ID NO: 56153 - DNA, 603 bp, Homo sapiens
aaggagaaccttaaggatcctcagagccaacagctctccttttgttgtgtgtcctgggccaaacaaataggcctctgctttttacttaactagaaccaactagaaaaataaatattagttgtctctaaaggttgctatgaaacaaaagcaaatactccctgtttaaatacatgaggagaccgcaccacctaactgtggctgccatttctctattcagcctgctttctctctgacacacaattctttcactactgcttcagaagtaccagggtaaagcaaacattctcctaacctctcagtcacccagactgtaatcatctgtggtagatttgacttgagtaataatgttggctctctcttctcacaggctgtgcaaataatgattggcctgattcacagtgcactgggaactctctgaattcattggattttgctaagagaggattcaagtggttctggtcctatccctataattgctgtagtaatttactcatttttgtcattattttttgtgagtaaaccatggtattattgctttcaattcatttatttttttctattgaattcaggtgtctagaaatgggctaaagacccaatctctaa

SEQ ID NO: 56154 - DNA, 2199 bp, Homo sapiens
aaaaaccactgtctgggctgaaaggaagatcggagatgatccaacccgtttctagaactggggtagaagaagagggacgtgggaggatatgcagctggtcgagggcccaggtgagccacaggacaaaggtggtgcatcttattggtacctcaacttccctcacaaacgttgaaaacgctgaaaagggagggagagctatggattatatacggaagcacaggacggaagaatcaagagtgtgaacaattaacacagaaaagaccgatcttccacctccaggacccccaggtagcagtccctcaggtaggtgggaggaggactctgacaggatcatttgggatgcacgaagctagtgcaaaatgacccctattacaaatgagaaaacaggcccaaggagggcaggactctgcccaactgcaccggagttggctgcaaaacatccactgggccttgcctatgggctcctcggaccttttttcgactctgttctctccctgaaatgggtcctcccactttcccttttctacttgctcgctcttctttccccaggaaactttgcaagaaaggcaaaagcgaatcccaggaaaaagactggctcatcaatcacatgttgactgcgctcgcgcgaattgcgcatgcgcatgctgagccccactctccccaaccccggtcccgcctctccacccctcaccaacatggccgcctcagcaacagcccccctcctgtgcgtcacggacgcggcgactcctgacgtcataggaaggcgccggtttcggcgggggctgcacgtgcgcaggggtgtggaaacttaccggctgagccatggatacaccgttaaggcgcagccgacggctgggaggcctaaggcccgaatcccccgagagcctcacctcagtttcgcggacgagacgggcccttgtggagttcgagtcgaacccagaagaaacgagggagcccgggtctcctccgagtgtgcagcgggctggcctggggtcccccgaaaggccgccgaagacaagcccaggatcaccccgtctgcagcagggtgcaggcttggagtcaccccaagggcagccagagccaggcgcagcgtccccccagcgtcagcaagacctacacctggagtcgcctcaaagacagccagagtacagtcctgaatccccacgatgtcagccgaagccaagtgaggaggcaccaaagtgttctcaggaccagggagtactggcctcggagttggcccagaataaggaggagctgaccccgggggccccccagcatcagctaccgccggtcccaggatcaccagagccttaccccggtcagcaagctcccggtccggagccctctcagccactactggagctgacacccagggcacctggctccccccggggtcagcatgagccgagcaagccacctccagctggggagacggtgacaggcggcttcggggcaaagaagcgaaaaggttcttcatcccaggccccagcgtccaagaagttgaataaagaggagcttcctgtaatcccgaaggggaagcccaaatcggggcgagtgtggaaggaccgctccaagaaaaggtgaagtgggggacagcatggacaggggtggcgttctctatggtgttgggaccccgcctttgccctgctgcagcctggagaatagccccagggttagagagagctcacgttagtggggatgttagcaaacaggtaattacaatcagaatgtggtaaaatgccctgggatcccggagagggtggggccaggccctcaaagatcaatttctctgatgcctttcctcctcagggtccctatgggcctctcctgtagcacctcaggtctgtattcgttcaacagacatttaccgttgtctgccctctctagtgagagaagcagaagcaagtaaaccagccattacttgatcaaagcagtgaggtcttcatccaatatagtctattacagttatttgcctttaagataaaaagtattactgagcactgattatataaggatttaccagtcaacagccttaataaggatttaccagtcaacagcctttcaaacatggaacagcatgtgtcatcacgcttaatctgcacgtcagccctgtgaagcaggcggtgttattattcctgttttttgtgtgaggaaaccaaggctaaatgagtggtaggcacaggacctgagcacagatct

SEQ ID NO: 56155 - DNA, 1361 bp, Homo sapiens
gcagaccctgtggtcgttagccctgaaactgggcaagtcacttaacctccctgagccagaatgtgctcagctgtaaagactggctaatagaagctgccccttaagattgtgggatgaagcgtctagcgcagtaagcattggctaaatgaagagggcaggctggaacagtgcttctcaaacctttcctctctcttctccaaaaatacatggatggtttaacataaaactccttcccccctcccccatcatctggtaaaactgaactccggggagacgcaccccgtgtgcccttccgactccactgccctagagtgggaagtctattatgagtttcactttgtgttactccaggcctcgcctgtgaacctgccgcactggcttctcggcctgggagcttgttaagtgcagactctcagtacccggccccggcctcctggatcagactgcacttaacaagacccctaggtgattcacaggcacatcaaggtttgagaagcactgctttaactcactgtttctgaaaaagattcagagtctcccggggcgctttaaaatgcaggtgcctgggtcccgcccctcggactttgatcactgcggcaggagtccggatatcgaattgaaccgcggcaccctggtgatactttcgcgtgtgagtgccgccctacgtgggccgggttctaactcgaggtgctgctcagcgcccggttcagggggcccgtctgcggggacgctgcgcagctgcccagcagccagccgaggagacgcgcggggccccgcggttcctccgggcggctgcagagagctaaaggggaggccgagcgggcggtggaggaggtgcggcggcggcggctgcttcccgcgccacccagctcgctgtcgtccaccagcacgctctccagcaccgtgcgcagcgagcgccgcagcttgcgcagcatgtcggggcaggtgagcacgtagagcaccgggttggccacgctgttgaagaaggccaggctggtgacgaagggcagcccgcgccacacgagcggccgcagccccgggtttgcgtgcgcccgcgcctccagcaggctgaacacgtggtagggcccccagcagagcgcgaaggcggccacgacggccgccaccaggcgcacgaagcggcctggccgccggcggccgcggtgctgcaaccgcaggctcacggccgcgtggctcgaggcgatgatcgccagcggcaccaggaaggccagcaggaacttgctgacggccagggccacctgccgcgagttgcacgtggcatcgcggtcaggccccgggttcaggagcagcacattgtagtagcacataatgcgcccgtccagccgcgagatggtgtcccggaa

SEQ ID NO: 56156 - DNA, 1208 bp, Homo sapiens
gcttggctagaagcccagggccagtcctgagagagctggagtcctgagagagccctgtcttggtctctccaagaaccaagctcaaagcaactgaaagtgtccccttccaggtcccaggaggaggctgaggctacggctgttgcccctcctaatgtcaggttaagaagccacagatgaagctgaagatacctctctgaggatgtggtgggagaggaactgggtgggggaggaacccctcattgttaggggcctcctggacctgctgactcaagaggcaaaaccaacccaggtgcccaggatgccagtgggggtgacccgagggaatctgtctgtcatgcctggctctgaacctgtgtgaccaggggcaaagcacctaaccttcaccctgtgggacggagccaatgggttgtagaaatcttgtgcttgacactgcatggttgctgggcatctccttccccttcccgccctgccgtgagggttggggagcaggggactgtgtcacagttcaaatgtatttggctttaaagctctaagtagcacagaggtggtagctcacgcctatgataccagcgctttgggaggcctaggtgggagaattgctggaagttcaagactagcctgggcaacacagcgagaccccatttctattttttattttaatttaaaaaaacccatatgttcttatggccaagtggtggaggacaagtctgtgtcatgcctttagactctctgatgtaagagctctgggagtcagccagaggtcaacagagtgcctagggattctcagagggaggcagaagtcagggggaaacagctgtagccagcaggactaggccagagagctcctcagacacaaggccttcagaacaggggtgagcctcctatacctactcagcatctccttggtaccaggcctctggggtgctaggagggtgttggccccaccagagtgtggaggagtggccaccatggcccttaggctagtgaggaagatgctagacactgtggcctttaggctgtggcaaaccagctgcaactacaaggacaatgaagacacaggtgcattatcttgtgatctcactcagtctcagtgccctcaaagggaggcagtcacagccattttacaaatgaggacactgaggcttaggttagaagacttgcttgtggtcccaaagcctgtaaatgctaagaagactcaaatccaggtc

SEQ ID NO: 56157 - DNA, 2078 bp, Homo sapiens
cagtccccatcctgaagctattgagtctaccagctaccagtcaactgattagcgtacagacacttatcacctggaagattccaaggagcaaagtggcaatcgctacaataaaaatatttaaaaatatttacatggcacatttgcatggcacatttctatgtgccaagcacaattctaggcatacagtacagtaattcatcttcacaacaacccgcaatagaggtatcatttacactcttgcctgcgtagactgtgcaccccttgaggataaggattacagctggtctctcacttccagtacaatgcagatgcccccagggcactcggtaaacatctaacaaatgagtgaaccatgccaggaaggatggtgctggggaacgtaaaagagagcttcccgaagattggaaggaaacaataaatgtgaaggtactttgcgagctgtaatttcttcaaagtgagggattccttttccatcatttcccttccttcttccccctctttggatcaatgtacaggttctgagaagagaaggaagtgaatagcaaaagggaggggaaacgagtaatctgatgaaacaacgaaaagggaaaggaaaatgtctgtacgtcatgataaaatatcaaagggaaagatagtggaaggtatgaaaaaagcatggattcagggtccaagatccgtgtcacctaactacgtcacccagctctgccactgactagctacgcatccttagataagccccgctcttcctgcgccttgcatcctcatctgcaaaaccaggatctttatttctcctttagggaattcttgtgaggataaaatgagatcatagacttggaagcgcgttgtaaaccaataagggcttataaatgtgcgctgtttttattagtcatacagtgtaaggctgggagccagatacctggctgccagccttgcctctacctctaactcatcatgtgacctttgcaaattgcaaaagctccgactatccgagcgaggcctcgcaaaacatccactgcaatgctctcgattttgcagatggggaaaccgaggcccagagccttgagccaattcataaagccaatgggaggcggaccctggacaagacctcgagttttctgactcctacattaaggctgcttcccttgcaccagctctctctgtccagacctgtttccactctgtagaatgaggcgaccggcctcagtaatgtctgcgacaataaacctcaggcactatgtaaactgcggggcactgcgcaaatgcaccccgctccgacggggggggctccggtgctgacaggccgccgctcggcctccggagcgccccattcccgcctccaccccggcccgggcgccgcagcggaccgcacacgctcccgcgccgctctctggcctcctgagacccgcgcttggccgcagccaacactcactggagcagattagggacatggcgccgtcaccgtgctccgaggcgccacacgccgggctccgggactagcttctgagcctccgcgagccacttccggtcccccgctgctgccgggactgctccgcggcgagctgggagccgccagccgagcgatgctagcgtagcgcttcacgtgggaatggggacagccgcgcgccacagccttcagcacctaacggaaattgccctttcccagaatgcagccgggcaggaaagggcccgccacgaacactcggttatttccggattgactcggctcgttccgtaaagcgccggaggattggctggggcgtcgggagagaggaggctcgaaactacatttcccatgacgcagtgagaatttaaaaccaaaacaattggacagcacttgttttgacaactgtgcggcactgtgccacgggaccctggtctttgaaaccttggcgtgcgcgagaatttcccagtgagtttgttaaaatgcagattcctcgggtctgcgtagacagactgtgccccacgcttttctaagtcagttgtttctcgggctaccctttaagagacactgctggatggcctggtgaagaaaatacagaaacagatgggtacaagaactaagaaaacggctaagaaag

SEQ ID NO: 56158 - DNA, 879 bp, Homo sapiens
caagacctagctgaatgttagctttttattaatagtatttctttaaaggttgttcattatacccttgctcactgtcctcgtccattttctgcttcctataacagaatgccactgcctgcgtagtttataatgaacagaaattcattagggtcacagttccagaggctgggaagtctaagggcatggcgctggcatctggcaagggtcatcctatggcagaaggcagaacccagcacatgagacagagacaggaaatcaggccaaagtcatcctttttatcaggagctgcattcctgggataactaatccactcccaagataacggcattaatccattcatgagggctgaaccctcataacctaatcacctcttaaaggtcccaccttttaataccatcatcatggcaattaaatttctttcttttttttttttttttggtggagaaggggtcaaactattttactgaggggaatggggtgtcaaagaagtacttaggaccatgagatccaacatccttggctggactgggagctcccaggctctgcaggaggtgcaagaacagttaaatttcaacatgagttttgctcttcaaaccatagcacctccattgggggtggggaggtgaggtcactctgtatcagtggttctcaacttcatgcagtggaactgcctagggagcttttgcagatccaaggctaggccacacccagacaatgatatcagaacctctgggctggggacacagacatcagtacttgggaagcttccaggtgattccagtgagcagccatggttgagacccacagtataacttgactcctaatgaagatgggtggaagcagaagcttgggttcaaatcctggcctttctgtgtagcc

SEQ ID NO: 56159 - DNA, 1341 bp, Homo sapiens
tggagctggtcaagagactagagctgcctgcacctagagcccttcctccacggcggtggcctagctctgtcagggcaggctcaggtggttggcatctggccccgtttgaccccctccctcctttcctgtccctgcagctcccgtcccatgtgtccctgaattctggttctgactcaggtgtcagatgccttcacaagtgagctgcttgtgggggtgggtgaggcagagaaagtggctttttcttccctgatcagaagcttccgtgagggagccacacagaactcaccgagtccctcctggcagaggcggccgtcctctgttgcttccagggacgtggccctcttcccgacctcggtcgcctgagcgcgcagggattggggatccgtagggcactaggacccggcggggcggagggggcagcccatgtgctgcgattcgctccctcccaccccactgctcccgctccattgtctgggaattgcagccgcggggcgggcggcggcggcggcggcggcggccgggacccagcgggccaggtggggacggcgcggagcgggtgcgggagatgccgtgcgggactggggccacctgagccgcccgcctcgtccccgccttctgtgggaaggatgtgcgcgcggatggccggtcgcacaacagcggcccctcgggggccctacggcccctggctctgcctcctggtggccctcgccctggacgtcgtgagaggtcagcgggaggggagggccggggcgaggggcggccgggcccggccgagtgggagcgagtgatgcccgggagccaccaacctttgggttctcggactgaaccctgagcggggtcgccccgcagcgccctgaaggtcggagagttcttgccctcgggaacctgcccccagccactcgcccctaaggcttccttcaccttgcacgacccggcaactccttcctgacccggggcagcccggcgcaggggcttccccgtcccgcaccttctgcgagggacccctcagcccgggcatcgaacccggcggccccggtcccgggcgcactagcgtcatccccactccctcactgtggtctgtagcgctgcaccctcctagcctccttccgccgccaccaacccacccccctcgggagtggaaagcagcccctttgcctgggacctgcaacagacgcaagccctccctcccccttcccccagggctccctgaccttggcgtctccagggatggccgcatccttgccttccagaacctttgagaggattcctgtcactgcgggaaagggcagcaacttccctgtgcttcggggtgggggtcggactcccttggcctgggctagc

SEQ ID NO: 56160 - DNA, 1883 bp, Homo sapiens
cggccgtcggggaaggcggtggcgggcagcaggcccgaggcggccaggtagagcagcaggctgagcgcgaccgcgcggtagcggcccaggtacacgtcggccagccagccgcccacgggcgccagcaggtaggaggcgcccaggaataccagcgcggcgcgcgtcgcctgctcgccggtccagttgaagttggtgctgttgaggtacagcacgaggttggcggtgacgccgaagaaggcggcgcgctccagcatctccaccagcagcacggccgcgcccgccgcccgccgccaccgtcgagggccccgcgcaccgcgaggcagcagcggctggcgctccccgggcacgcggggctgctcccgggcgcgcggcgcgggcatcctggctccgggctgggccccccgcggctcttctctcctctcctctccccgcctcagagccctgcactcctgcccccgggcctcggccctctcccccacccaactggctggccctcctttctcaccgctttggcccacccttccctcctgtcccctctccctttcttgccctacccttcctgtccctccgctcactacccggactctaccacctcctccctaattctcaactcccctctcccttcccccacccctaaggcttcctccccgcgcctctcctgcagctgtttctccctaactctcccctctcctccctccaccttgacccttcctcgcactcttgttcacactgcgaccctccctgcttcacttcgctgcccctccgcctccctttcccctccccgtttgtcgccccttcctgttgtcccctctccttatgactcctggcctgccctgggcgtggggtgggggctccctctgccccagtcaccctgctgccccttgccgtcttctccacctcctccctgtccccctcacccccactgcctacactcccctctcagtcccctgcagccctccccccaggctcagcctctgtccctctctcggcttcttgagaaactctgggctcccctcgcttcccctttcacaggccctatccgcagtcccctgcctgcatcacatggcgctactgggtgtttaggagaagtgaaagcctgggtcacagggctcctgcccggtcagctttctaaaaacctccctccttctctacctctgcctcctaccccaaacccccgctgctggcctccttagagccaaaaaattccaggaggaattttttctttcagtttcatttctcgccaggattccacttttgctttaccctcttccaatcaaactccacgcctccacccgaggcgccacgggtagaaagaagtggaaaggctacctgcatcatttggtcacactcagccatttcacagatgcagagacagacccagtggggctagggcaggaaggtggagaaagattggttcctggtaactgaactaggggtgaagccctgccccgggctcctgagtggcagggaaattcacagcgcaattcggattgcacagaggctgctgtgaggaaggaagtggggcactttcaacaagcctgcgggccatagaggaccacaagtgagtcgggattgagagggacaccgacctcagactaaatcagagtcagcctcagaactcctaagcaccagccccaccctgacctaggagcccgggggatctggcctctgctctcctctgatctcatctcagccccatgttcactcaagtccagccagccggcctcccaggttccccttccatgctaagctcctccctgcctcagggcctttgtctttgctgacccctctgccataactgctctccctccatatccttgcatggctggctgcttctctttattgaggtttcagcatatatgtctcctttgtagggaccttcc

SEQ ID NO: 56161 - DNA, 759 bp, Homo sapiens
ctgctcgggacaaaaggccagtcttcatacacaagatgcacggtggtctgcaggttagcagggagcacgcctctcccaaggttcggggacactagtcacaagggcctggtgccagtcttgcagagaggcacaccctgccctgtcctggcagtgctccagagcagcagctggactatccgggagatcactgcgctgcactgggagcctgacctccccgtgggccttggggatactcttcctttgggccgcagattttgcaatatttctgacaaaatacttgctgacaaaaagccttctgagagaagcattattaactccagttcatggatgacagtctaaggctcagactggcaaagtgactggccaaaggtcactccactaataaggaacagagctggactccagcccaagcctttgaactcaaggccttgtaaggtacataggtaccttccccccatacagcactgtctgatgtcaatatgtgagtcacatttataattttaaatttttggctgggcatggtggctcatgcctgtaatcccagcactttgggaggccaaagcaggtggatcacctgaggtcagaagttcaagaccagcctggccaacgtggtgaaaccccatctctactaaaagtataaaaaaagtagccaggcatggtggtgcgtgcctatagtcccagctactcagggcgctgaggcaggagaatcgcttgaacctgggagatggaggttgcggtgagcccaagatcataccactg

SEQ ID NO: 56162 - DNA, 1972 bp, Homo sapiens
atccacaggcagacaggtatagccacagaaaaagagaaaccaagccagggccttctcaaatcaattcttgactcaggcaggaatccacgaaggccattatcaaacaaagggtggcaaagctgtatccatgaccacactgagctctggactcattttcatccttgtacagaaagtctgccctaagcccgccttggccctctccagccctcttctacaccccccagtaacctcgagagaacactatcagagctcccatggccctcccatggctccccagcatttggtattatgttccaaatcttgtgctcctcagcttggtatacaacgccttgtatcagctgaccccgagcctctatttctccatgggttgctcactccatcccaactctttctgttctacctactagtcccagaacaaaaaccacacttccagtcacttgacatatattgatctctaaacagcagtaagacagggatcctgcccggcaaggaattcgcagcacaggcttctccgcctttgctcttgctctccactctgcctggaatactctttcctacactttccccatgtagaaaatgcctgctccatccctcaaaagccagcaactctctaaagctttccttgcttcttcctcccaaagagttcatcctgccttccatggtactctgtacacagcacatagcatttcttatttaggaatcagcatgcttctccagcaagagtgtgagctccccaagggcacagcccatgtcgtgtttgtttctgcatcccagcgcctaggtcaacactgggcacatataaggtgatatggtttggctcggtgcccctgcccaaatctcatcttgaattgtaatcctcataatccccacaggtggagggagggacctagtgggaggtgattagatcatgggggcggttcccccatgctgttctcgtgacagtgaatgaggtctcatgagctatgatggttttataagtgtttgacagtttatcctacagacactgtctcacctgccgccattaagacgaacgcacttcaccttctgccatgattgtaactttcctgaggcctcccaaacatgcagaagtgtgagtcaattaaacctctttcctttattagttacccagtcttgggcagttctttttattatagcagtgtgaaaaaacggactaatacaccaggcatccaaggaatgctgactggacagggacttccacttttggctaatgtggagggagaggcactagatttattctcctgccacaaaaaactaaaaagccagacaaagccaaacaaaacacataaaatgatagtttgtaaacactggacatcagacagcacagacccctgacagtgggaaacaaccaaggtgagtgctatagctgctccaagttactcctagagggactccgggcccaagacacaggcagtggaggagaggaattcacactccagggaggccagggtagccagagttcacagggcagagtaccagagaggaaagggccacacagagaacccagaaacctacagagggtccccctccagttctcagctggtactgatctataccagtccaaggcaacaatccttggagctcaaactgaaacagaaatagtcttgcgtgcccaccagccacagtggaaaaacctcatcattcacaggacattggtaaagcactaaggacagaattgccttggtagtgaggaaaaatcaggcctgggcctaaggctgttctgattccaactaacaaaccttgagagcagctttaaagaatcaaactgttcccaagtaacttaacagtgtcctaaaacaatgccaggaacatttctagaaatacaaaaatatccagcaccccacaaggtaaaattcacaacatctgatatacaataaaaattaccagacatacaaagaatcaagaaaataagactcataatgagggaagcaatagaaacagacccaaaaaatac

SEQ ID NO: 56163 - DNA, 4436 bp, Homo sapiens
ttcaggtattcctttatagcaatgcaaaacagactaatgcaatacaataaagaaggtcaattcatacacggaatataatactcataaaggtttatgcaattaacagcagagcttcaaaacatgtgaaacacaaattgataaaactacaaggggaaatggacgaatccacaattacaatcagaagtgtcaatgtccctctctcaataactgaaagaacggaagaccaaaaatcagtaaggacacagaagacttgaacattacaagccaacctgcctgaattgaaagttatagaacacttgacccggcaatagcagaagatgcaatcttctcaagtgctcacagaacatttaccaagacagaccacagaagaagtctcagcaaatttaatagagaagtatgttctctatttaaaagaaaataaattagaaatcagtgtttaccagataggagaataaagtaatcctataatgctgactttatccgtgactagttgtaatcctgcttgaggtgggaccagataaatcagcggaactaaaaatactaacaggtcttcaaaggtagggcctacctgcctgagctatctgtttgaggttcactggggagactctctctcctctccagcccatcctaagccccaggggtcctacttgtcagccccagctaaatcaagacaaacctgtttgatatttgcttaagtctttcacataaaccagtaaaggaagataaagaggtgagatatgaattggaaggagcacctactaagtaaacatgcctttacagctagcaaaacctcagacagtgctgccattagacacctctctgtcattcggtaagcacctgggaacagaccaaaaccttgtggaaacgccacatccttcaaggacacttctaacagaatttccacacaacagagatccagctggattaaaagagctaaatccattaaatcaggtcttgagtgatctaattttgtcagcctggaaaacccctactattactggccaagagtgtccagaaatgattcatatggctagttaacccaaaggctttttaagggcaaattaacaaatttcaaagcaataaacaaaaagaaaacaagaatcctcaggaataatgtcacttccaagctaccagtggcccagcaaatctacaaagttcttaaaggcagtgtttcccaaacttgccttaccgtaagaatcacccagtgcatttgttaatagatttctgggccctcctccagacaatagcccaagaatctctagaggtggagctctgtatttttaacaagcatcagaaattattcttaaggtccagcacctttgggaaactaaacggtctgagaggcagtatcacagagttaaaagcacattaacttcgaaataagactgatgggttacaaatctcacttgtggccagacgcagtggctcacacctgtaatcctagcactttgggaggccaaagcgggtggatcacctgagctcaggagttcgagaccagcctggccaacatggtgaaaccccgtctctactaaaaaatacaaaaattgcttgcagtgagccgagatcccgccactgcactccagcctgggcgacagagcgagactccgtctcaaaaaaaaataaataaataaataaataaaaaatacaaaaattagccgggcgtggtggtgggcacctataatcccagctacttgggaggctgaggcaggagaatcgcttgaaccagggggcggaggttgcagtgagctgagatcacaccacttcactccagcctgggcgacagatcaagactccgtctcaaaaaaaaaaaaaaaaaaaaaaaaaaatccaaacttggccacttactggctgtgtgacactagccaggttatctaacatctccgcaactcacttcatctgtaaaacgggatcatcacctatttggacatgttcgcaaaattcggtatgttcagaaagccctagaacagtgcccagcatatgaagccaagcaacaaatcacagctattgctacctgcaaaacagcggccagaaactgctcagaaagtctacaatgaaaatgttctacttaatggaaattacaaaggcacggaaccacatttccaagataatctaggtaaaaggcttttctgggcactatgaccgcaaagaacaaagactcagtttagcgtccagtattttcattgcaacagtccccgatcccacccggaactacagagttcaggtgtctgcagggttgcagctttggacaacaaagtaagagtctttctttccccagttcctcggtcaccaccacctccagctctaaggccaaaagtcacagaactgagagtctggtggcagcatcttggtgcattagtaggaaatgggactcctggagccaataaagagggtggaaaaggccttaggcagcaagagaactgaggtaccgctggagcgaagggaaatgagtgggaagtttctggagctgaagactgacattcccagggtaagtgagcccagacaaggtgtagctgggaaagcactgcctcagctcagcgactaaaaccccaggttgtagagtccactctgccagtaactcacaaaacacctccagttaactccttctcccatccgtaaagtgggaaatcgcctcatcggctgaggaggaaatgaagaggaaccaggcatataatgggtatgtatacatcagtgccctttgcgcccagagggtcccggggtaagaaatgttcagtgatgctgggaggtccaagtctgagtcctgaacaaagccaaagctgaaactcccatctctcaatgccctggagaaagggcacaagccagtaagtcacagagcaaagtccctccaacctcccctctgccactcgtctcccgcgtgccctctggcaagtcggaccctactcttaggcctcagcttccccatctatacaatgggctaattggctctaatgtcatcagaattgtgaccgcaagatgctcacatatgggacgagggcctgcagagacgcagaaaggagggtggcggtgagtggtggggcggaactggaggtgcgacccgccggggagccggggcggcgcctcgcgctctccctccctccctcccaccgcgaggggcaggggcgccggcccccggcgagagtcacgcgcccctcgtgcccaatcaccggcctctgccaggatgaggcgggcaggcgggggcgctccgggagccacggccggcgccgcccccaccgtcgtcctctgccccgcccgcctgcggcagagccgggaccctccccagtctccgctcacctgccagggccgccgtcgccgccgccaccgcgggttaaaccgcagccgcgcccacacttccggggtccgccaggcccgccccctaccggatgtgacccccttgcaacgtccggcgccccagtggcgcgcgtgctcgccccgcgaccccgttggccgccccgcctcgcgcgcctctgagttaccacgacatcgtgccacacacacacgctcgcggccgcccgggccacaaccacgggagcgcccacgagacccctccagcgctcgccgcacgcctcggccccgcccccggtaagaggccccgcccactgggcggagaccaggccgctctgggctagtgcgccggcgcggacgtccgccgccttccgagtggccagcgaggactcgctctgtacacagctcgatcttgggaggcttctcagagggacccaaaaggagggggaagcagatggaagcccagaacctaggaggagccccagatgggctgagctcagactgaggagccccaaggccaccacacactcatttccatttactagttaatctctttcccccacccattcattctacagaattaccagtattccccatctcctcccttcccccctggaaacaggagagtccagcataataaggaagccccctctgctctaacccttaaaaaaaggaatctgaagtgacctgatgttaactaatcaggtgtttttttttttttttctattctgttccctttcccacctatgaaacccactgctctgctatttcccaggggaatttgagaccaaataagtctatttacaatggtaactgatgtcaatgtctaaagtttccaacctctcaaaatcaagaggttgaccaaaaggggagaagtgtccagtttagcctaaagttgtctcctggcgtatcttaagtttgtcctaaaggtttctccgtacatagtgaactggatcctactcataccaatcacagagtttcagccaatcacaggcagccacctgttcaaaccttgttccaataaggcaaatgtcaatctgtcattggtagggaaccaaactggatccctttgccctcagaaagccaaacaccgaagtatcaggtttttgtagagggaaagatttgttgcaagtcaactgggaaggagacatgctcaa

SEQ ID NO: 56164 - DNA, 1813 bp, Homo sapiens
tgacaagtattccggaaagggaagctcagggtgcaatggcagcacacaaaagtctgaggaaagctgtccctggggcctttttccctctctgaggtcatcacagaagaaagggggggccctcctgctggcgggagctggcagtgaagtctcatccacccccttgctggagtgattatggcagcagcctgagaaggaggggaccgggcgaatgagcggagccttgggactctcagaaacggacaggcagtgccaccaaggcggcagataaaagggtgcccagggaggctgatggagtcgaactctcaggtgggcagggaccgagcacccgccagagcgccctaaggagcctcctagggctggtgacagagggacaggtggtgggagcctgtggaacgccggggagtcggggcaggttctgagcaggaactggcggtggctgtggaacacacgtgtgagctacaagcctggccgggccgcccccgctgcgcgccccccggaggacgtggccgcgggccaggccgcctgctgacacagtgttccctagctccgagcatcacgcacacacgcgcacggccccaccgcggcccgggggaaagcacgtgcggagggcggcatccatcgcgaaagacagcggaggggcatgcaccccacccccacgcgcgcacacgcacggacagaaaacgaaaagtgacccagagaccccggctgttccaaggtccatgaagttcgtagggccaagacccagggaaagccccgcgcggcaggggaggccaggcgctgcccgggcagagccacgggcacgctggggggtgagccagccagtccggagaccagatggcacgtcctgggctcccctctccagaggtccgcgctccagggcacattaggagtcacccaacgcctggacctccgatctcccaggtcccagtctggacagccccagccaggggggcacgatgagcacccgcctagaggcacaagttgctgactctttgtgccgtccccgagctgtgcccgcgctgatagcaccccagaggaagccccgacacgcggctgcctgcggctcctgagcgcccctccgcgcctctcgactgcacgccggtagcgctctcccgggcgggggagcggggaggagctccgggcgcttacctctcggccgcgaagtgcccgggcggcttcctcccggtgtagcctcgggctggtgcccccggcagcaggagcgcgacacaggcggcccgaaggagcagtccggcccacatgaccggcggcggcgggtcccccgggctgggctcggctcctgcgccgcgcgcgggagagggggctgccggccctcgcccctcctcctggcgccgtggggagcgaaccagcgatccccgaaatggcacgcagagctgagcaggggggcttgggacgccgagaggaggggccgagggccgcgaggggacgcggcggacgattgtggggagggtctctggcacctcgaagcgaaacacacaaaggcaacgccgcccgcctgctgatgcctctccgagaggcgcggagcccggggcgggggcaaagatcagggacccctgggggcggggtttcgccctcggcccacaccccctgccccggtttgggagtcggcttcctgcgaagcgctgactgaaggcgtcagaccgaggccccgggaggaaacagacttcgggaacaaggctagcaccagaggctgcgcgccccgggcatggcccctgtcggtgggacccgagacgccttgttgtgacgaggtgggaaccgtggaaattcgaacccacgacgccaggtcgctgtgccg

SEQ ID NO: 56165 - DNA, 659 bp, Homo sapiens
tgaatctccaaacaacgtccaaactgcccctggcatttctttcatttccccataaagtttctgtgaccttatggcattcaccttgctcctatcaacattttcccctttagtttggtttttgtttttcttgtctttttgtttgaccctgaggtttctcagtttggacacagagtctctaacttactattgttcaagactagttcgggcatatcccttgattgcagttcctgtgtttcttcccacttctgtggcttgtggtttctcagtaacaaaagggaccctccaccgagggtggaggatccaagttgttgttggctgcagaatgacagcctctggcttgtgatcccttcaaatggtcatgtgatgagtcagtgtttctattattctcccaaaggtcccttcgtgcagaggcctggagtgatgctagttcatcagcgcctacatggaatggagctgttccagttggctacagccacgctccaaagacaacctttcacccctagagaggtgattaatggtgtttaagaggggatgtgggagtatggcagcagaacatcagtttccaaagttggaattcaatcccgagtgaatacacccaagagtgtacaaaacaaaaaatcagcaaaacatagcaaggactccacaggcttccaaattca

SEQ ID NO: 56166 - DNA, 3776 bp, Homo sapiens
tttatctgacagaccaagtcaaatgaagaagtcccagagctttatatgaaaacactgttttgtccacaccccctgccctcctggcagtctaccaatacctccatccacactcagctacctccaactctgaacaacagttttgttttggaatcatgattagggtgtatataaacatgcaagcttggggtctgcatattcagctgagaatgtgggttaagatgactcttcccgggttctgaacatcggtgtccttaacaatccaagcgcatcgtcaacaaggcaaacccagcactgggccaggcaaaccaaaccctcttctccagcagggccctcatgtaaacaacagccccaggcaaaggggttagcctgaagagggctcctctccctctgtgggataatgcgggcattcctcacatccctccacctcctgggccccccagacttccccacaggaaaatcttgaccccaaagtcgtcattaccacctccccttttcctggccacagaaagccaatctccgggcccaaacgacaccgcacaaccaactcacactcctctgtctcactgggcccgccctgttctcgaggccgaatgacctccccaggacgaaaggggaccctcgagagcggcttccaacccccaaaaagcgcgtacagggacgactctttcgaggtcgcggtgctgggggaggttcctcggccgccagcgccttccattcgccgggcccactcctgcccggccgcccccggggcggcgggcctccctaggccgcggctccccccaactccctcactcgccggggtctccggccccggcagcctcaccggtcacgcagccgttcacggcggtgggcttctgggccgttaccacgtagttgtacgacatgtcgaggcttggagcggcccgtcgggactcgagcgcgacactagaaagagggacacaagcgaaaagacaggtggcccccaacagcgcgcagcgaactccactgccgctgcctccgccccagagacacgttgcaggccagagcggccggggcgcggggcatcacgggacggcctcacctggcctcttggaggactcccgaagcccgaggccgccaaccgaaggaggccccgcccccggaggcaccgcctcgcctctttccgccagcgcccgcaggacccggatgagagcgcacgcttcggggtctccgggaagtcgcggcgccttcggatgtggcggatgcggccgtgagccggcgggggaggtgcgccagtgtcctccgagctcgcccgcagactccccaccccgttccgcgccctttgcccttccccgcatccagtcctccttccgttgctccaggagccctcgggctgttcctcctttgggaacgggaaggactgcggaggcatagagagggaagggagaccgcgattcgtgcatatcccagactagaaccttgcctgctttcctttcactgtctcagttcctccagatccagctggtgccctcgcctgacgtttgaacgaccacctgctcacctcctcccttttgcgcgttgattcttcagacttcaaagggcccaccggtctgcttgcccaacgttattagtgcccctattgctctacaaattcgaacctcaaacacaaaaccagtatttctccgtagggaaccttaatgagccaggagagccgtcagccctgcagcctccagggtaccccacatcaaacaggctccccgggaacaagaggaataccacgtggcttggcacactcgcagaatgccagagaggagccaacccccattttacagatgaggaagctgaggcttagggaggaattggtttacctaagaccctccccacaaccccaagtaggctgaggcagagctatgttgattcttcctattgtgcacccacacagaggccaacacgctgctgaaccaggctgaactgaggaaaagctagaaagtcatcgtggtttacatcttgcctttcccatagcagagactctgcctgactttggaggcactgaattatcagtagtaaaaacacactctgtagaaaaactagacattggtttagattctggctgttacctgtattaccttggacaagtccctagagctctctgagtctgtttcccagaagtaaaatgggtcacaaacctggctagctccccccattcccttcccttttggtgccaaggccagtgagggcaagcgtgtgacgagctttgttaactttttcgctgcatgtgatgcccgtgtaaaagatagttattctgaggatcactgtcctttagtgatgaagtgggtgctgttcctggacataaaggcagacctgtgcttgacatggattgatctgtcttctggcagtgaagtgcaggcatgaaccttggtcagccccacactcttctccatccgtagcccatgtactagagtttggacttggaccgaagtctggggcagctccctaattactagggtgctgaaggcgtgattgtgccagtcgactgcgagttccttccgcagcttgtatcgttacccactcctgcaggtgctgctgctgcctccactgtactcagacccaggtagcacaggattgtccatcctccagcagctcagtgcaacggtgtgaactcagcctgtttcagagcctccacaccatggtgagtcatacagggccgggacgggaatggcagcatggtctcaaagcaggatcccagccttgggcaagctaaagctccttacactttgactgagagatgctattgcctcctgaggctcacgggtgaagagagagggtcatcctctctcccagggtctgatccctgcttttctttgtttcctggaggctgctggtcccagccaggcctggggctgcagcctcttgagtcccttcagagccactctgccccttatctgggtcttgcattcagagtaaaacagtaacagttacctgctctgtaatagacattgtaccggtcacagaaggaatcgtgaagaatgaccatgtgaccgttcctaaccttggggcttatgtgggccggtctggagctgggatctacagtgtgggaggctggccatgtccctgggctttgctccaggcccactgatttgaaccaaaacaagccttgaacatatctggattcaaatttcagcctgccactgaccagctgcatgaccttttacagacctctctgcgcctctttttcttcatctgcattataaggcaaattaaggcctacctccagtggttgtgtggtgttgatcaagcagagtcctggaggcctcacttgacttcctttccttttccatcctttcaggccactgaaaccagggatagcactggtccctaaaccctcttctggctctgtaaaagacagattatcatgatggggagcaggccactttcttggagggtagtgctgctggaggctgggcttggagtgaggccaactcacaacttcattgtgtgttccagtccctggtaggctctgagagccacaaacccatgtcctttctagggcaacctctgtcaccctccacttccctccagcccctcgagaaagcagcatgatatggccaaaagggaaccagctttggagccaggcagacctggacacctgctggctgtgtgaccttgggcaaaatagtttaactgtgcctcagtttcctcactgggctcatctttcctccatagggctgttgggaagttttgttttgttttagtttgggtttttttttttgagacggagttttgctctttttgcccaggctggagtgcaatggcgcaat

SEQ ID NO: 56167 - DNA, 1690 bp, Homo sapiens
tgtgtgcctatagtcctaacttgggaggctgagttgggaggatggcttgggcccaggaggtcgaggctgcggtgagccataagcatgccactatactccagcctgggcaacaaagcgagaccctgtctcaaaaaaaaaaaaaaaaaaaaaagaaactgcagccaagccagcccctaggtctctttctagagcgatcactgatggcaccagggtgagcaggggcactgtatgcatgtggagacaaacagcacatgcctggcacacatgtagggtagggagtggttaaaggcactggctgtcgactcatacacatgatctgaaatctgattctgctttaacccggctacaggagctaaggcctattttttagccctttgggatctgtaaaatcagaatggtacccacctcatggggacatgaaaggattcaaatgaattgatgaagatgggccataaagcccagcacagtccaagtgctcactcactgagagttacggttatcacaggggttgggcccccagcccctcccaggtcatctgctctaccactagctggtaggaaagagcctcctgccctcccaacccccgtcacctacttggcccaaatttggctgcaggctccccgagtgcctgggcttctctacccagggtcctgtctgtcggctgcaccatacgtccctgaccacaaggcatccacgtgcacaggagtatgcgcccagcagctgggaaggaggctgacctcagacggtggcctgtggatcccagctctgtcatttcctggctgggtgacctcaacctagtcaccctttttgagtcttgttttctcagattatgaaataggaaaaatttccttcctcgtgagataagcacgtgccattagctattaaggacacgcacataaatgagctgcatgtgaatccacacatgccattccatgaagacagaggatcatgtggatctttggtgccttccggttggcccctccctaggtctgtgagggtcagacctgtcctgaggcttttacaaattggcccagaactcatttaaccacagcatcatttcattagagggctgttattagagactgaatgtttgtgtcccccccaaattcctgtgttgaaaggctcacccccactatggtagtgttaggacgtggggcctttgggaggtgatggggttatgagggtggagccccagagagctctcacgccctttccaccatgtgaggttatggtgagaagatggtctctgaggaagctggcccttgccacacaccacatttgccagcgccttcatcttggatgtctatagcctccagaactgtgagaaataaacacttgttgtttaagccacccaggctattatatttttgttatagcagcctgaacaaagacagctttgattcttaacatatttaatgaaactcgagcttcataaaccagtgaaatgcctacccctatggagatggggagctggtcatgggacccaggtgcctggaggacatcccagtggctttgaaggctccagccagtcaagacggtcaatattagcccttctgccaacatctggcaatgtgaggctggggtggacgttggcctgatgttgccaggagtaggatgctgatgctgccagagagtaggtgggctccaaaccccaggcttctcacttgcttactaagcacagcagtctgaa

SEQ ID NO: 56168 - DNA, 2103 bp, Homo sapiens
tccagcctgggcgacagagtgagactctgtctcagaaaaaaaaaaaagaaagaaaaagaaaaaggctctactccaaactcttgcagtgttacttttataatttagaactacaaataaatgaaggggtagaaaatcagtttgttgctctccctccccgatggactgggggacttcaagaatcttgaggaccagatttaggatacaagccctaaaccctcatcttacaaatcaaaaacactgtgacactggggcccaaaacaagaaaatgacttagccaaggtaagtggccgagctggtacaggaattcgggtccactccctctcagctctgaggattccttattctcaaaggtagcttctgttaaagtcggaacatgaggagtgaagggctcaatattcctgccaaggaggtaggtgaacaagttaccccttagcaccggaataattatagaccccgacttcaggctgtgcctaggtccggctcaggtgtccaaagaaccgttccaggcacccgaggggtgatccctgactcctctgctgggtgctcgtgccagctaacaatgggtgaaaattggggtgaggagctccaggtgctttctgcgtcctctgaagagctttcgtgcctttataaccaccgcgttggaaggaagagcgcggagaaaggtgcccactttctaaaagagaaaattgaggccgagcaaggggatcgcgacagtgcgaagcgagatagcagcggaaccagcattcgaacccaggtccctgaactcccagccccgggatccttctcacccctaaccacagtgggacgaagtgaggccgggatctccggaacccgcctctcgctaccaggcgccggagctgccgctcccgaggttcctaggagatgcagaagacactgccctgaatgcctacagccggctggcaatgccgccccagagcagagcggcgggtgccgcctcgccttcttataggctcgcagcacttccagtcgcgcgcgaggcctcctgggaagtgaagtccggagaccaggggtggccggctcccagcgcgccaagctgctaaccccctaactcccgttcctcctcggcgtttcttctccaagtccgaagtcagggtccaggactgctgcgatgcatcagccccgcctctcatcccccatccagaggaggcggaaatgttcaggtgaacgcgaagcctcccactacgagccggccctcagcaaggccgtgcgcagtgtgggcgggagccctaagtcagctagcggcgacgctgggagggcccggagcaggccgggccccgaacagcgaaagctccaacatggcggccagactggccatagagcgggaagagaaagccggggactagcaggccgcacggcgcagacggggcccgcctcctccatttacttccggaatttaaagccggcttccggaagccgggacgatgtccgcatgacaaccgacgttggagtttggaggtgagagtgattgacgaggagtgggttaagtgaccagaagtcagaatttttggtgctgttgttttgggcttgggttttatgctttgttgttgtttgccaaggaagcctcgtttttaagtggattgggaagcgtgaggaatactgccctaggtacaaagggaaggcggcaggtagcggtggacgaattaaagagcttcatgagcttgtgagtctccactgccctaaactggaggggatcgtcgtacgtagagacaggcatgggcgtttctgcataacggatcctcaaaacagccctggatggtggcctatgagtagtggttaagagcacgggtttggcgtcacagttatgaagccgggttctgctgacttgagacctggaggaatgccttgagctctgacttctgtgtcctttcctgtagaataggaataattcccaccttgcagacttgtagggaggattaaaggaaacgatcttggttgacaagtttatcgtggtgtgagtacctaggtagtagctatcagtgttatttaatgcggccgggcgcagtggctcacgcctgtaatcccagcactttgggaggccgaggcgggaggatcacgaggtcaggagatcgagaccatcctggc

SEQ ID NO: 56169 - DNA, 1014 bp, Homo sapiens
tctcttcatgttaagaggcgtgccaaggtccagcttaacatctacttgacccagagggaagatggagccacagatgaaatacagatctttgttgagatccattatgagtacaaagtattttagcagaaattcaagatggaatctgatgctgcatcccccactcctggagctccagatgtgtgtgctctgttcagactctctttccttatcagaagccttaactgccctcagaagaataaaaatattcccttagccagctttggcaaaagaaatttttaaaattcttatgtccgtagtatcagttttctattgccagaatattgtgtaactccaccaccaaagttcaggggcatacagcaatcaacagctgcctggctctttgtcttggggttcagctgatcaaggctgtgtgtgggtggtttcatctgggctcactcttgtgtctgtcagctgcaggtcagctaggcagctgcgatggccttgggatccactggcagttggctagccttcattgacctcagctggagtgactgtggttactcagctctagtttgcagatttacttcccacagactagcctggatctgctcacacgccagtggcagagcgggaaagtcccagtatgcaaccccatttcaagcctgtgcttgtcttgtgtctcctagactcctgttgatcaaggcaagtcacgcaactaagcccagaaacaaagtggcaaacggttaccaaccacaagttcttagactctcattgctatagaaattgacatgaggctaaaagaatttgccgacaaggcttcattggagcttatgcctgggcataagagacacaacacaagtcaaagagagagttccctgactgactccaaacaaagcctgcagggatttttctcttaggcaaagcactggaattgacctcgggtagggtaggcaggctgggctggacaaagcacgtgagggtagggtgtgcaggtcagcatctggttgtaagggttatcttgaataatggaccacc

SEQ ID NO: 56170 - DNA, 487 bp, Homo sapiens
tgatctgcctgcctcggcttccccaggtgttgggattacaggcgtgagccaccacgcccagcctaaataataatcttgaaaaatcatatttttaataccctcagagagctggtgaagcaagaagggccagcagacctaaaattctagagtacggagaaccatagagaagccagctaacaattgcaacagaattctccctggggtatttactaattctacaattgagcaagaggctaagaatccaagcattgcccagacaaggttgcagaaaagccagctgagctgagtcatctcataacactggaggaagaaaattggggagtcaaagagcctttaaaacataacagattttttccttaagatatttaccaaattctgaagctgtgtagaactagaggctataaaaatctaagcctctggtgaggcatggtggctcatgcctgcaatcccagcactttggtgaggctgaggtgggcggatcatctga

SEQ ID NO: 56171 - DNA, 1669 bp, Homo sapiens
cggtggcgcgatctcagctcactgcaacctccgcctcccgggttcgagcgattctcctacctcagcctcccaagtagctgtaactactggcgcgcgccagtacgcccggctaatttttgtatttttagtagagacggggtttcgccatgttggccaggctgatttcgaactcctgacctcaggtgatccatcacctcggcctcccaaagtgctgggattacaggcgtgagccactaagcccggccagcaacacgcttttaccgctgcaaatccggatcaggcaggctttgaagcccagctcacaggccgtctcttggaaactaacttagatttccacctgggagcactttgtcctctcagctcccactgcaccactttatggatcgcgtggtgactcgtttcattttatttatgtgtgttcctggaaaggacgctctatttccttcgtgtctctacctggtaggtaaatcggccgcagaaaagaccaatgctaactccaccctgcatttgcagagatccgtcgctcacaccttttcttgtcttccgttgaaaaaagagaatcgtgggagtaggacctatttgccaatctcctggtaacactatcacaactggccacttccgcccaacgcccggtagtctgagagcctccaaggtcctcccccgcacccctgaggtcctgcagacgacggcgtcgtgggtggtcaccgttatcccttaggtctggagaggggacatccgagcgagggccacttgcggccaggcccgagctcgtccagctccgggtgaccacagagtgccgcgggcgggcagaggggccggaaacccaggccgcttcgtccctgtttccggcagcgccgcgctgctccgggagccgctgtggcagcgtatgctgccacggggactgaagatggcgccgcgaggtgagattccggaggtgtgtgagtcgctggtccctttcccttcggtcgctccctcccacctctgtcccagagcttgacctaaaccctccattctctagcgttagggacgtcgcgcctccctggtccaaagccggcttccgcggtcccgcccaccctgggtgcctgaaggtctcaaggtgcacagctcaaataaacgcagatccttggctgggccacttctaggctggctcaggtgcgaatctgttggtctctgcgccccaacttcccctcccaaatagtgacagagtgagatctttgagatgtctgtcagctgcgagttacctcttgacttttattcctgaagccgaagagtcgagtttcacggtgattcctaggaaaggagggaagccccctccactcccacccccgtaccctcgccccctcattatcagcaaccagaagtgcccctgagtggccggtcccattagttgcagcgtctagtttccccaaagttagacaccaacccatacgagcagagagggagctgccttccggcccatcccacttctctgtgctcctttttcaggtaaacggttgtcctccaccccgctggaaatcctgttctttctgaacgggtggtataatgctacctatttcctgctggaacttttcatatttctgtataaaggtaaggaaggcttggggcttgacgacagcatcccttccccacttcagctcagagccaattcctaccaagaaccttcttattt

SEQ ID NO: 56172 - DNA, 2063 bp, Homo sapiens
gcaaatgtacttttgatttttaagtgtggttagtctgacacccacctttggcttcctggggagtaaattccacaggttgattcaccattctattacacctgctttttatttgctcttaaatcaaagcctttaaaattaagcctggagcttcaaattaacataaagaggaatggagtgtagtctttaaagtttctgcaggagaaaaattttagaccggatagacgcgtgttcaagcctaggactggtacagcttgaaaccactgccagtttgctgaaaatgattcctcagatgatcaaggaaaatcccaaagctcctgatgacacctcacctggttgaactcctcgtcagcatatatatcaatcaagtccactccttctgacatggctccggaaggaagatcgcgagtccggaggatggacaaagtaaggaagatgccactgcgggattcggaaaaatgcaagaattagaaggcacgagggtcctgggctgggaagagggtaatgattgctaacctcccatctccagagacgcagcatcctggcggccccagctcggccccacccgctccgccccgcccccggcctcgcgccgcccaccgctctcccaggccgccgggggtcgctgcccatcaccctcgggcccgacccgggtagcgccgcgtctgcgccgcagctgcctatggcgcgacggaaaagtcccaccctcgggtcctagtggccctaggacggcgttgcgaagaatgaccgcggcgaagcccgcagcccctatccgctgcacctgcctagcccccaaggcggctccggccagagcccccaggtgtcaagcagctccagccgcctctgcccccaacccaggcctactcttcgcccccagctaggcccgccccgctccctcccgacaaacccggcccggcgcgctctgcctcctccctcaaaaggcccgcgactccctccgcccgcagactccggccgtcccatctcaaccgacccccttcccgcctcagtgccggcccggacccctcttccggcccaacctgcccccgaccgcgcgcccccgttaccgggaatatggcggcggcggcggcgagtccggactaggcccgaagcgcgcgaaccgctctccgccccaggtcccgccccccccgccgccggcgtcacacgcaccgccacttccggcatgcgcagggacgcaccttccggctcagctcctccgtggctgccgtggtcggctggccgggcggctaggagttcccggaagtgcccgcgcagccggtttccggtgcaggtggggaaaatggcggtgtctacagtgttctcgacttcgtcgctggtgaggagagagaacgttctagcgtccggggcgggcggcagcggggattaccctttgtcttcctctgtggtctctatcttggggagagttcgtctgcccgatagcgcagggcaagggcaggcccagggagaggccgatcctgcaactcaggaaataaaggtcgcttccattctttggtgagcctactgtgtgccggtctggaaatatctgcttaaacgatcagtcatcgtccaagacccaattcgcctctcacctacgtcccaggcgggattagcccaacttccctgggctccccttctccccgttctttagtctttaatgcttttcgtggtttcacatagtatcttcagctttttgtttgtttataattgacatataattgtacgtgtttatgggggtacagtataatgttttaatacatgtgtacatcgaataatcaaatcagcgtagttagcatgtccatcacctcaaatctttatcatttatttacggtaataacttttcaagatctttttctagcatcttgacatatacagtacagtgttattagctgtagtcactctaatatgtaatagaacactggaacttattattcttttttcctagcctgctgttataaagtaactaactttgcctctatcttcccctcctacccccatccctatctttattcttttttttttttcctgcagacccagggactcgatctttattcttttttgatgtaggcgtt

SEQ ID NO: 56173 - DNA, 562 bp, Homo sapiens
cctggcatgggggttcagtctgtggatggtaactacttatgatggacgttagccttgcttccggcttcttagatgcccagctgccctaccccagaccactggtcctgcctcaagtgatggacataaccctctcctaggacatacatgtaaatgcacaatgtgactcattctcatacttttttgttcagctctgagcctcaaaagtgatttgtcagcagcgctggcatgcaggctttgcctggctgctatctctagaggcaagtctgccacgagagggcactgcaggcgaagcagttgtgcttgctcattgcctcagcccaagtgtactcaaagaaaagaggcagccagctgtgcgtgctgtatggaaagcctcccgccctccctgcagctccccgccctcagtggcccagggctttgttgaagtggaactccccacttccaacctggtatggctccttctgcgaagggaagctgatcccagcctcctgagctgaatccttcaaaggcacagcaggcagaatgagggccacaggcaggagtggtgtgggcacactgcttagga

SEQ ID NO: 56174 - DNA, 734 bp, Homo sapiens
tgtccctgccacctctctgtctcctccccctgccccaccccctgctccgggatacctcccagaatccattcatggaatagactttaactgagccctgactgggtgccaagccctgctccaggccctgggaatgtgtgtgcagctcctgccctacggagctcagacctctgcatgggaggagacatgcatgtggctgcagccagttagcgagagctgttaggtaatgcgcaaagagaaagggatcgcgagggctgcagtgcgcacgggtcggatttgaaatcggtggccttgagcaggtgacgtttgaactgagactgaaaagaggggagggcggtgtcctggaggagcaacagagagtctgagctggaagggccgtttgttgtcctctggcctaaaccctgaggctcagaggggaggagcagagcttccgcccgcacagcagactcagcacagtggccgctccagttcccacggaggtgggggaggggcaacgatgttctgaccccttcttaggcaaacacctcctcctgtggctctggcagagaccagctccagtcctgtctgctgggtccttccagcctgtcgtgtcctgttgtgtcctgagctcctgctggctgtcaggcacgcttgctggtgcttcctggtgcgcgcagagccccgggattgtcatcactgattcctgcattgatctgtctgcaccccctcttcataagttcaagggtgggacccccttc

SEQ ID NO: 56175 - DNA, 1630 bp, Homo sapiens
tgctttgtgccctttccttcatcctggagaggcagccctaggctctgaaagactaaataatacagataataataatgcatcaagtgggctcttaccatgaccagcgactctcgcatcgccgtctccttactgaatcctgacaatagccaggcgaggcaggtgtcaccaccctctagctgaagagactggttcagagaggtgaagtcacatggccaaggctgacggcagtaggaaccctctctgactcaaaatcctgctctttccactaaagcaggcccacaccccagggcaacactgaggtttcccctcaagccggcaaagacccacagacaccgtgccaggtgaaaagcgtcggaatcaccctcatgatagttttttgtttttttgagccagggtctcgctctgttgccaaggctggagtgcagtggtgcaatcctggctcactgccacctccacctcccaaggtcaagcgattttcatgcctcagcctcctgagtagctgggaccacaggggcgtgccactacgcctggctgatttttgtacttttagtagaggcagggttttgccacgttggtcaggcgagtctctaattcctggccacaagtgatatgcccgcctcagcttcccaaagtgcggagattacaggcatgagccacacacccggcctcacactcacagcagtaactatcttagactggctggccgcccacctcaccagaccctgccctgtgccctgtgccttgtcctcactgacctcttacaacatcccaatgaggcaagcactcccgctggaacacgtggaacacagctggaacagtttcccggtgttccaactgtggctgcgagcacagacaggttaggtcacttgcctcaagtcacctgcgattgaatggccagtgggaatggaacccagtttatcggccaggaatcctgagtgcccttccacctgcgccttgctcttgccctcagatctacagtctgaggctttaccccggtcctgcctagttgggggcaccgagctgccttacagcagaagatgttccctccagcccccaccccttggccgatccagacaaacctgcaagcgccaccgcaggcccattgagaatgtggctttcctgcccacagcctgctttttcccgacgctcttttccctgctcatgccagccccacaccctttgaccctgtttttacatctgcagagtggggaccatgagacctactttgcggggtcctgggagagctagaaggggttccttctagagttctgccccgcgacctgacccactggcagagggatcgagcacctggggcatagcatgggtagacagtgccagcaaagatcactcgccctcccccttgcttctgaagttggggtggagttgctggtgactgaagcccagctggcctcagccccacctgaggtccctctggtcccttggctcctggctgccaaacagtgtggtcttgggaaggcctgggctggccaggtaggtttcacctgggaaaggggtggcagctctatgcccactcccagccttcttaagccacaaccctgagccctacttactcagctgggacagagccatctctgtggcagccaggttggccaccccatcacagtcaggg

SEQ ID NO: 56176 - DNA, 414 bp, Homo sapiens
agaagtcagcctcgaaaagcagcaagccacccctataccagggcaggaggtgcccagaagcaggtgtggcctcgcctcttctcagacacctctgcccctcagctccttctttggccagctctgggtgcttaactcttgtctcttgacccccagattccacagcccagggtccagagaccaggacaggctgaggtcacagtgggctgattctgccctgcttatcttatcatggctgttaacatcaacgacctagcattggcacagagctgtgcaattagactctgccctcccacctctgagcatcctcccagcacaggagagggagatgaggcctgcccttccttccgctggctgcagctgtcggcccttccctgggggcagcaaggggcaggcaagctggctgggaaggggctg

SEQ ID NO: 56177 - DNA, 736 bp, Homo sapiens
acctgtctgcttcatgcgctggctggagatttcaccatatcccacaggcagggccagagccaggctgcccccaggcaccagagcggagccagagactgggctgaatgagcagctttgggtgaatcatttctcatcttggaacttcaggggttccaatcttctcctcctctgtcccttccctccacctctcaatccagtggtcttggggaggggttgggaagccattgcctgtgggccacatctagcctgctgcttgtctctgtaaataaagttttattggaaccaagccattggcattagtttacatagtgactctggctgctttcattccacaatggcagggttgagtcattgtgcaagagagtatatggcttataaagcctaaatatttcccaagtggccttttactgagtaactttgctgacctctggtctagggccatggggcagccaagtatcccctgggctgcccaagggaggaggccccagagcccttgggagccaccttcaccaccgcaaccagacctcagctttgctcaccctctgagcctaccctgggaaccaaaagacaacagttaggctacccctgtgggctgagagagagaaagaaaaagagagagtgaaagagggagagaaagagtatagtaaagagagagggaaagaaagagaagaaagcaaaacgtagctttagctggggtcttggaggggtggcagccttgcctaactcaggcctgaaa

SEQ ID NO: 56178 - DNA, 705 bp, Homo sapiens
ttctatcccaaggggtccttccaggtggaggctgcagagactccccagagcaggccggatgcacctgcccgccttccaaccaactggacctggaattccaggccaaagctctgggcacagtccagccctttccacaagtcccatgctgtctgccaactctgttccagcccttggggaattctgctgggtgagaccaaagccctgccctgcagacactagttggacagggcccagcagggctgcccctgctgcctggaaggtcagggacctccatgcccacggaactggcagaattcacctggcatcaccagctggggttccctggcaaggcaggcaggcacccgggctgggcctggcacaggctggtgccggcacctggccagaccagtgactgccccgacgagagaaagttgacctctcggccacatatgccacctgccgggcactgtctgtggagcagaggaccagctctatacagggctgcccatgcccacctgtgatgccacagtgctctgaggagccatcaagccaactcattctccagctgggggtcatcagctccggactgggcctcccgcccccacgtgacccctcccagctcttctccctgctgttcttctgttcttggcctcactcccctgggggaaccagttattgaaaacgaaaacggtccatcagattcaataaggattcaaagtccgtgag

SEQ ID NO: 56179 - DNA, 1478 bp, Homo sapiens
ccccccagaacctccctgcccagctgccgcaccagattcccacttgccccctggcaccctctcaattcacagttggcactgcgatgccactccgctcccctgtgcccgcaaccttggccaagagctgccgggatcctcgccctggggtccgccagcgctggcacccccggggcaccggtgctggggagcctcgggtgcctctgagggcactgcccggctcccacaggggcagcggctcctcgctccgccacacacgttgtccttgggctgttgaggggtgggggagaggtccttgtggggacactgcgaagccggtcccagacatccagcctggcagtgtccagactgcgggggaccggggtccgagccgctgccgctcgatcccgcgcccccggggctgggatgacccctgggggagcccgtgcggctccgggcggacaacagccccaggctggggctccgagacggcgtccggcgctgccgctgtcctgcccgccggtgcggggcgccccagcccgccggggccgcgcttacctgggctggccgcctccgggtcccggtacatggtcccctcgtcgccggttccctccgggctcctcagagccgcccgcggccgcgcgctgctccgccgccgccgctgggcatggggccgggcgacccccgggggcgggtccgagggcgggggccgagcgggctgcacctagccgcggagccggggagcgggggccgcccgccagccctcccgcccgcccgcggagcacgctgccgccgccgccgaacagcgccgagccgcctccctccggcctgcgcgccgcgtgtgcgcgccggagcgtgtgtgtgtgtacgaggccgtgtgtatgtgtgtgtgtgagcgcgtgtgtgagcgcgcccggggcaccgccggcgccgcccgccagccgccgaacgccgcggccacagccaccgcctgcgcccgctgccggccgcgcgccgcactgcacccgcgcccgccgccgcccgaagccgccccgagggcacggccgccgccccgcgccccgcccgcctcgcagtccccgcggggagggccgccgagccccacggccgggctcgtccggccaggggatccggctccgctgcgcgacccacccccagcccgtgctcccccgatggccgcggcctggcaccgggcagggccgcagagccggccacctcctccgaggtgccctttggctccgatccaaaaggcgtggagatccactccgggttttccgcttgctggcggctcgagggcgtcagctccggactcaacaccgcggcggtccggggcagacggactggtgtgtgcaaaaaccaggagtggaatttttggcagcgctgagcctgggtccgccagtccggtctttctgcaagctcgcacacaggtggagccgaaagggctaagatccctgccctcggtaggaggtttggcctagtgaccctcctcacctaacccagcccca

SEQ ID NO: 56180 - DNA, 1902 bp, Homo sapiens
aacgagagggatgggggctgtctctgaggtttggattcggaatcgtgacatcttgtcccgtgcaagacgaaggcgaggacggcgagggcacacccttccagtcccgaccccacagaggccaagcggcccttcgcccccaccccgacccgggaaggccccgcgcccctcaagcctgggacggtctcgcgtcccccgacccgggacggccccgcgccccgcaagcctaggactgcccagcgctgagcgccgcctgcaggagtcgggagcgtggtgcccgcggccgggctgggcgcggcgcgggccggcagggggcgctgggcgcggcgggcggggcgcgtggggcgggcaggggccgggccagggacgcgcggggggcaagcgcggcggcggaccgggcgggaccgtagccggagcccagccgggactgtcgcgcgggccgcgccggcgatgccgcgcccccgggccgggctgtagcggggccgcggctggagtgtgcgccgggcaggcgggacatggaggtggtggacgagacggaggcgctgcagcgcttcttcgaaggtgagagaccgcgggctggcggcggcgaccctctggcgctgggaacccccggctgatctccccgggaactggggctcctcgctgtgtttccgcctcctctggctgggaccctccttcaggctggcaccagcccgccaagacaggctcccggggctgggagtcccccagcggttaccacccaccgccgctgaagttgggctccccctccccgctcctcaactcgcagcttccttgggactgtgtccccttccaggtccggactcctttgagccttccaggacccggaactttccctaaattgtgacactctcgcccccagcaaacttcccgagtctggggaccctctactttgcttccccagaaccccaagcgggatacaaccccattcaaggcccagacccccggtgtgccttctaggaccttccgtacctcttgaggctggaccccagcctgcttcccagaatctgtgacccccgcctagagaccaagaccccctgtgtgcccttctggttggcgccatcccccatgacttctaggagctgggacctccccactgtgcttccatgagggtaggaccactttcgagcctggatccccttggagactgccacctgctttccacaatgctgcctagtgactgctctcctgtttggggctgggacccccctccctagcatgctctcctggggctggaaccttcttgaagctgacatccctgccaccggtcacctctgctctctgagacccttctagtgctgtgaactgcatcccaccagccctctgaggctcctcagcactatgtccccccaaccctggagctgtgcctctctgacctcgccccctcaaagagtgacctcacccccacttgaccgaaaggagccctctggggtggaattgacatacaccccataatatcttcttctgcccccacccctacattggttttggaggtctgctcctccatctaaccaactccctgtcttttcctggacgacccctgcccctcctgcagggccaccactcctcctggtgctgggttctggagggatgggaccgcagtgggagggggaggggaagttctggctgactgcctcccagcccactccgcttctcagaacctccctggaacatctagccagaccctctggcccccttttgtgcccctgtctaccaatgcagcgagcccagcccctgccccgagctccctctagtccctaaggccacatcctgctccttggtgcattgagaaccttcccttcatgtgtgaacctatcagggctacagggcagggaaccaaggcccaagtttcaagccccagattcctgtggagtcctgtggaggaga

SEQ ID NO: 56181 - DNA, 2984 bp, Homo sapiens
aaggcagcccagatcggcgggcacagggcctgcagagaggggacccaccgggcaggatgcactggcttccagcaggtaaccgggccatggtataagggggctttggactccagagccagggcaggcacgggacagggcagtgtctgagaatcctgccaggacctcagagttctggtgcaggctggaccactgagagtggggtgaccgtctgtgcctggcagggaacccccaaagagctcttgccctctttaagtcctttttcctcacctgcaagacaggagggggtggcagagaagaacctcagctctgaagaagctcactgcccagccctgggaaggagagacatgttagagtatgaatggccgagcctggaaggggtgcctgctggccctagattctaggggcacatgaggctcgagtgagcaaccagtgtcccccagaaagcaggtgggtgtgcagggagccttggaggatggagggaagtcgccttccagcaggtgctggaaagaccacttggagtttagtgggcctctgcccggcctctggagccccaccagggctggaggagggaggcctgggatttcgccccttctgaagctgatgggtggctggactggtgacttccttctctggcctcattcccctcccagggtaagtaagtgggttggaccagagcaggggcttccaatgtgattttttaaccatcaaacaaactcatagtctcctgataggacagatacagtggataatgggggctgggctcctcacagcccctgaagcaccaggatactggtttgaaagccacccttcccggctgtgggatgggtaaggggaggggaatggcgctggctgaggctcagagagaagggagttggccagagttagccagagtggacacctagcccccagctccctactctgccaccagtaccttggggttgagggggctacctgtcagggaccaacatctctgcctccagagggcaggaggaggtcccaggtagagactacctgatgatttggaagagaggactcccacctggacaggaatccgggggctgagctgggcttcgtgatgggggtggcactgtggcccgtgtcagcctgtctctgtctgtccctggtgcacccagggagtaagtagatgggaggggtggccaggcacagggtttcctgagcccaggcaggggaggaaatggtagtagggggtctgactcatccccatgtccccagcacccagtgcagggcaggggtggggggtgggcaggaagtgctctccgggtcaatggtgacaacaatgggtatgtgaacagaggcggcgggggtgggggacgcaccccagaaagcacctctctggagggcctggggtcagtgcaggggtgagaaacaggcagttaccaaccctttggcctcagggactctcctgagactggaaggctggacagagtgctccttggggtcttaagtagagccaaggagggcatttgagggcagaatggccttttccctgggggcctgactccccaattaccaactcccaaggggttacagactggagggccctggcagcagaggctgctgggtaacagcccagcagagctgctcattggctgccacccttggactttgccctccctgataaggaactgggagcagaaattattaactgaatcattaactgggtggccccgccctacccaggcagcctgccttaccttcccaccttcctcttcacggacctagcaccttcctgggcctcagtttctctcattgccttgggtgctggagtatgtggggcctcctctcctatctccaggccttcagccccggctgccacggggtgtgggtacctcttggttgggtctcggggtaggatgatgtaatggttctgtgcattcgccagcgagggcagctggggtctgttcctagctctcctgcttacccacagtgcttctcttggccgtatcagggcaccgctgtgcctccgctttctcatctgtaaaacgggagtgcagttgtaatggcagggcctccgtcccagggtttctggggtgattaggtaagattgtgcctggcctggtgaacactccattggtccatggcaggtgttctgcgccctaccttgaagattactggtccccagggtaggtcagtgcccctaagcttagggggcttgttgagcatgttctgtggttctgtgtgcaaggcctgaaccatgacagctctggcccagcgtggcctggtcctggtccctggcacatccagtggggcccgccccacctccccctctgagatttgggttctgttcttgctgccagcaaggaggaggggcttggctgtattgtgacttcatctgctgcacccaggctctttgcacgttgtcttcctggagtcctggggtgcagtggaagcgtgggtgacggcctcccatttctgagggggactgtgaggcaggacaggaaggcgatgatgtgtcaggctccctcaaggtggccacaacagagctgggactggagcctgggtcccagctctgtgccagcctgggatgggcagggaaggggcctctcctcctgacatgctgaggggtggctccagcacgggtggccacgccaggtgatgtccgtgcagcctccttgacctctctagacctcagagccctcactcacatggtcaaggttgggtgatgttagcagttagatcccacgagtgccaaggcctggagtgagggggggaggggcaaagcccctgggtggggagtacagttgggtccggagccccctgccggcctagagtatggagggggctcccggacattctgtcctccctgtgccccaggtcgcatcagtgagggaagttctccctccagctgaccggggtccgtgcagccaccggagtgcacaaccacagcctctgtctctcctttgtggagtttgaggatcctatctccctccggcctccctcactcccctctcttctccctctat

SEQ ID NO: 56182 - DNA, 2688 bp, Homo sapiens
gagtggagctctggcggccatcattccctgctgggaggccggggcaagcccttccttctctaggcttctgcctcctctggaaaaagggggctaagttcccccgcctgtgcccaacagggtgatgggcatatccaatgagggtgcagggagctctcctgattctgatccccactcccgcctgcggccagggcctgggtgcaggagactcccacagccctgtgggcccccaggatatatggtcccactcagccaggcctcgtgctcctgcgttcctggagctgggccatctggactgacccctggaggacacggcaggacagtgcctgttgggtccgagccatcccatcgagggcagtgggcacccacggggctctcgactcagtaagcacctcatttgtgcctcacagcaccccataagacagaggcacagtgaccccatttgacagattagtggaaaggacttgttccctgtcacacagctagaaagaggcatggcaggatcggcctctctgtacccagatccatgccctgggcccctctcctcctctgagactcaaggtggccttgtggtggggcgggggggcattatcagtgcttcctggaggggtgccaggcagtggagggtgagagccggcccccacatggatacctgggtgggaaggagcaggggcatctgttttggagggccagcctgggcagggatggagggctgggccctgaagcccagggtctgcagggagctgggcctcttccctagcccatctctcctgccctgcaggccacgacatcaacggtgccctggagccctccaacatagacaccagcatcctggaggagtacatcagcaaggaggatgcctccgacctgtgagtggccccctcgcccggcctgcacccgcccagccccagcccttcgcctcccttctgtcaccagggaggtctgagggccggacctggggtctgctgtggtcccacctctgaaagctgctcctcgtcccttcccagccactgactcctccgaaatctccatagttccctgcagggagggggcggctacttccctgctggggctggggtcctggctggagctgagccgccccccttccccgcagctgcttccctgacatctctgctccagccagctcggcctcctactcccacgggcagcctgcgatgcctggctccagcggggtccaccacctgagcccccctgggggtggaccctccccggggcgccatggtcccctcccacccccgggctacggcaccccgctgaactgcaacaacaacaacggcatgggcgctgcccccaagcccttcccggggggcaccgggccccccatcaaggctgagcccaaggctccctatgccccagggtgagtaagggcagggagtagggggatacagcggcataggggcaggcagggagcagggctgtggccgtgacctgggaggtgctagacactggcctggcatgggatgggctgggtgactggctgtgcgtgggcaggtgagggaagggaggatgagtccaggtcaaggggggactcctgggctttgttctgaggcagtgggcagccacaaagcttctaagcatgggagtgatgagggctgacgtaagtgctagaaaaatctcgatgctgtgtggagagtggacaggaagcggcgggactggaggctgtgactgtttaccttcatgggaacacctgcatacccgtgcacgcgcgccaagcccacccacttacgcatccagctgacgtgtactgtggccacaggagctggcccatggctcagatgtggcacctcagttcccccctacccaagcaagcctcatggggcccagaacccaggcccttccccccatctttctgaggagtccacaccaagggcctgacccagggctgaaccttaggcctggctttgaccaaaggttccaggcagccacccggccagccagactccagggcagctcccggggcacatgctcacagcgggaggctgggagcatgggtctgcaggggagctcagggcaaatgtaggggcccctgtctctgggtggaagagcattaaaacactaggtgcatgaactctgtgttcagacagcctggctccaacttcagcttccccatttatcagccgtctgcctcggtaacccatggcctcagtttcttctgtgaagtgagccctcaaatgcttacccctcaagattatcgtgggaagcaacaagggcacagaggatgccctgggtgcatggtggccatggacacatggccggccgtgcttcctgagctccctggcttttggggagaagggagtggaggccaggcttggggtgccaggggtgaacctttgctgcagaaggcaaactgtttgcttgaggctgtgaggctgttcctaaactacaggcccctgggggcagagggaggagaactaacatttggtaagcgcctgctggtgcccactgctgtatcatgtgcctatgattgcgtgagctcatcagccttcctgggtatccagctcctgggagaccccacaaggagccctggccactgctaccgtcaggattttaatggcacactgaggctcagagagggaaaggggcttgtccagagccacacagggactctgtgggcagggccactccaggaagggacccagggccagacctgagtctaggtgataaacaaga

SEQ ID NO: 56183 - DNA, 2189 bp, Homo sapiens
tcaccttgctggccaggctggtcttgaacttctgacctcctgatccgctcgcctcagcctcccaaagtgctgggattacaggagtgaaccaccgcgcctggccctcaatttctaattcagtattttcctcactacctatgctattatggaatcttgtgagctatggtcaagacattcaagttctggttctgagtaatctgagtctgagtaaagcgactgtaatatctatttcacagaactgaaaaataagaaagatgatgaatcaaagcatctagtgcctagcagggagtattttgctcaacaggtatttgcttccttcctaaggctgtagggaagatgatgagataatgtcttttatgaaagagggctgtaaacgtaaagatctgtacaaatgttaacttcattgtcaccggtcagccaatgcttctaaaatccagaacataacaactctagagaagtaaactgcccccattgttctgagacactggaattcaattcagtaaacaatcacggcccccttcccccaaaatgataaagacaatcactgccatttattgagcttccaattacgggccctctgtttggcactgagaatacaaagatgaatagacatcatcccagagctagatgcgcgtcagacggtggtcactaggaggcgtggccgaaaacaaagaagtccatggaacgtggccagagatctgtacagaggctgtgggcgctcctaggaaagtctggccaagtgcctgagagttggaagtgcttcaccaataaacatttgcccagggcattgtaggatgggcacgggttcggcagaagaactttccaaataaagataacacaccaccgataacagagatatacaaactggaaggtattcaaaattcgccccacgcctctcgcccttagaaatcgcgagctgagaaacctaaggagttcatggcaaggggcttcccccttccccacccttcagcccaagccggaggttccaggagcgtctagccctctggatctccggcgtctgaggagataagcgcggtgtgggtcagaccccgaggggtcctcgcatctccgtctggaactcccctcaacgctctcaccattttgccccgcgaaggctaatccgccgctccgccaccggaagaacacgtcggcaggagcaggcgcctagcacaaccggaaaaggaagtgcctccggcgcaagtggcattgagggacttgtagtcctgcgatttcgggtgtagagggagcaggggcctgcggggacctggtgtgggtggagtggggacaagcggtggagaagggtacgccagggtcgctgagagactctgttctccctggagggactggttgccatgagagcagccgtctgaggggacgcagcctgcactacgcgccccaagaggctgtgcgtggcgagcaggtcacgtgacgggagcgcgggctttggaaggcggctgaacgtcaggccacccgccgctaagctgagaagggagagcgagcttaggaccgcctgcccggggcaaccccgaaccaagctttagccgccgaggccgcgtgtcccaaaggccaggtgagaccccatgggaagcgcctccgggagcgacggggtccgcttggcgctgggggccgtggggagccggggtctggagtgcgcgggattcgcagtcaagaggtcccgccacttttccccctgtgagccttgggccagtcgcgtaagctccgagcctctctttcctccattgtagaaaagcggtaataagttccaccttatggggtcgtgttgtatttttcctaagaccttggacgagaaacatttctgacacttgagttgtttaggcccctttcctgcctacctgtctgtgggacgccgtgaggggatcaagggctacatggtctggtcctcagtccacactccagcagcgcggccggcttgaggcaagagccgaagggttgaacaggcctggagaggggacattagaggtttctgtctgttgtctcagttaaccctggcagcagccctgagagacaggcatggtaatcgttcttcttctgtagacgagaaaataaacctcagtggcttggtaatgtcacacggatggtaaatgccgcgcctagattcaaggccagagcttttgccgctgcagttcacaggggaattattcatattaatcaaatgaataattcattgt

SEQ ID NO: 56184 - DNA, 3160 bp, Homo sapiens
agcaaggtttagtgtgacgagcaaaagaacaatgcttccacagcctgtaagggaactggagcgggttgcagcagctggctggggtggccagcttttattgtcttagttgtccctgcccacgtcctgctgattggctcattttacaaacctctagctagctacagagcgccaattggtgcgtttttacagagcactgattggtgcattttacaaacctctagatacagaaaagttctctaggtccccattcgacccatcaactccagctggcttcacctctcagggctatgagacttccgtcccttcttgcgggtctttcaataagtccctttcctctcttagctagggttctccaaaaaccacgaagaggaagacttccctacgtccgaactggggcacttctgcgtttcttccctttccctccaccgttgttctgggtagggctccacatttccctaagcactctggccaccccctgccccaaggcagctactttgggttgtgcaaggtaaggtccatggcgataagattcacgttggcaggtccggcagccccgggccctgtaagtgatgcggcgtgtggggcgggggccggggcggagccggcggccggtggcaccacacatacggaccaatcgccgtccccgccgcggcattcccggccccaaatcacactgcgggaagctccagcgttggtgcctgtttcgtctgcgcatgcgccgggacacgcctgcgcccttggccgcagtcagggctcccgagtggtcactctggttgacccgcgcaagctctggcctcgcccactaggctggtcgcgtcagagggtggggcgggtcttcgccccgcagcgtctaagctctgctgcgacgttatgggaacctggtgacccgcggcacactctgggacgccagggtagtggatagggacagtggagggcatcacgctgcagggcacgggatcagagggggatgcaaggggaggggacgccattctggccgccaagggggaaacgcggtgaagggaacgccccgactttcgagtccctaggactgagtccccaggactccaacccagcagagaggcgccggggccttagctctgagggctgtggtctagaaagggaagcagcaggcctggggctggggcgcgcgccgaccccgcagtgagaccaagggaagaagggacaggaccccgcgaagggcctaccgccccagagcgtaaacagcggtccgctccgcggaatagctgaagacctcgctggcctgcggctcagtggcctccccggcgattcgagaacagctctgggggtcctcgctaagtgtatgccattcccaatcccttatgtacgccagcggccgcttgccctccccggccagcgctgtcccttccgcgtcctccagtcttcacacgacgcaggggtccccaaggcagcggtctccccaagcttcccgtttcagccccatcctcgagaatgggctcctttcctgctccctctccgctcctgctggcgagtggagaccggcacctaggtccagacgcggctgcgctgcctctcctagccatcgagacaggatgtgactccctcccctggccactgaccccctccctccccaggcggcctgcatccttgctctcctccctcctagcctacccagctcggggttctgtccccgcccagagacctgaggctcggggctgcagatggaatgcacggcagggaggcgggaccctttgtttgtgtgtgcgtgttgttggcctccatccccactccccagactccacttctccaggcctctctcccgccttttcatcccgcatccgcaggacacccaatcaccgggcaacaggtatgatcaggcgcctccgggctttcctccgaattagtcggtgtttggctcggagtgcgtaactctgtctcccctgcactcagcctccggtcccgccctctcctgtgcccccgcctggctgcgctcaccgtggcatcctgcccggcgtagtggctgatgacccgggagccccctggatgccggcgggtgaactcgctgatgttgtacaccttacggtcgatcactagccaccgctcctcgcaccctgagcgctgggccacctcgtcccaggtgaagtagcgcggggtaggtccctgagccgcggtctcggcggccaccgggtcgggggccatagctggcctggcgacgccgcgcgccgggccagcaggggctgtcaggcgcgtgctcggggtccgcgggctccaggagtggatttgctggcgcgcgcccagagccagccgcctgcgcgccgggttttcagcaccgcagggcagaccggcgggcctcgcagcgcgcgttcccattggccgagcctcgtggcgcggggagcgagatcccgtcccccggtgggtcttgggcaactcacagctgggctgccaacacgcgccccctcgcgggctccctaaaggcgtcgccgccggattcgacttcctgacgtcaggcgggcatcgcggcgttggctcccagggggcgccgcggtaggaacagcggttctagtgcaggccctgggtgcggggccgcgctgcaggagtgaatggactgaggggccagggctgcggggtggccgcaggaagggtgggcggggccggggttgaggtttttccgtgcacgaggctgcccgggcggtcgcggacatcatctttaggctgtggatgccttggccggggtctccagacgctgaccctccagggttggaaactactgcctgcttgccacgtcgtgccgccaattgtgctgcccgaagtagcagcctgagagcccttgaaagttgcagttatcttgtgaacagcatatttacggtctcttgggcttggtggtggttgggggagggctgttaatgctttaatttgttcaatgaaacatttaaaatgccccacaatttttataaccctgtttgcctctttttgtttttatttttattgtattttggaaaaattcactgggatccttgagtgatgatcctagcgtctcctgacccttaggtgtttcacctgaaaagcctgggtcttcaagctgaggcatttctgttctagcctggaggcgcctaggagccctgggagactttttaagcagagagatttggcatttagatctctgggttttagaggagtggga

SEQ ID NO: 56185 - DNA, 2369 bp, Homo sapiens
aaaaaaagaaaactatttataaacaaaaaatattcattaaagcagtatctatgatagcgggaaatggaaacactctaaatgcccatcagtgaaatattttgcagacattgaaaataatgtcatctttcctttaatacagaatcaaggaaaaatgttttatgtaaatcttttattttattatactttaagttttaaggtacatatgcacaacatggaggtttgttacatatgtatacatgtgccatgttggtgtgctgcacccattaactcgtcatttagcattaggtatatctcctaatgctatccctcccccctcccccgaatcaaggaaaattaaataatatgatgtaagtttggctacagagataactgttctataaaaagactaggttgggcgcggtggctcacacctgtaatcccagcactttgggaggcagaggcaggtggaccacctgaggccaggagctcgagacccacctggccaacatggtgaaactctgtctctactaaaatacaaaaattagtgcctgtaatcccagctacttgggaggctgagtcaggagaatcacctgggcaacatggtgagactgcacctcagaaaaaaccaaaaaacccataccacttgtaagataattccttgatcaaccccacctacctagaaccattcattaagtgttttatttaacatttgtggggtgtctcctctttgtattcccagcacctactttggtaaggtgctgggaatacaaagttcagtactatatgggtcatgcctagtcatgtctactggaggagagagacaagtgagtcacggattataggtcagtaggatagatgcaaattaaattcatcttactcaggatttaaacagcttatatgacatgactttgcattcatgtttctttgcttttcatgtgttcttaggtcagtgtcatgtattttgctacctccctaacgagcttataatccaggatagggctgtggattctgtttatactaccaatacatattcagagcaccttggtttggagttctaggtggaatcccacataaatttgctgaattggccgggcgtggcagctcatgcctgtaatccctgcactttgggagggtgaggagggcggatcacctgaggtcaggagctccagacccacttggccaacacggtgaaaccctgtctctactaaaatacaaaaattagccgggtgtggtggggggtgcctgtaatcccagctactttgtgggggtgaggcaggagaatcgcttgaacccaggaggcaaaggttgcagtgagccgagattgcaccactgcactccagcctgggtgacagagccagactctgtctctaaataaataaataaataaaaaatttgctgaatcaactgatgatttcaacctgaaaaaatacaggtgagtaagcctataggccactaggcaaatgtcgtgttgccctctcatctccttacccacctacacaggtggtcacacagactgcaataaacccatatccaggtcaactaaaggaaacctttgccttgcaggccctgttgatcctaagggaacttgcctcatcctggatatgaatcacatacttaattttaggttgccacttgtgaatactaactgttctggccaaattaatcctcaaggaacagaacgaaatgagcttaagaccctaatgccaggccaggcacagtgactcgtgcctataatcccagtgctttgggaggctgaggtgggaggattacttgagctcaggagttggagaccagcctagacaacatagtgagaccccttcctaactgtcccaccattttctctctaaagaaaagaaaaaaaaagaccttaatgccgattgtaatgaagccataattgaataacctaactgccagtggctgttggaataacctgaattgtgagttcaaattttgatccattttaacaaaagatcctaaacataatagttggccaatagcctggatcctttacaaagtcaacacatataggagaagcaataccggttgtgctcagcctctgctgcagcctcccctcagtagcagcccttcaggccattaaagaccaaaaccatttttgaaaaatctggatttctgtgaaattggataacttatgggggtgcagtgactacaacacagtaggcactaataaagttgacagaatcagtctttgttttaagaaaagtcatctgtaataattctgcagattaatgttaagtaatattaaaaataatttatgacatatagtgcttaaactaaagggagaatcccaatcatacctctattagaggcagagcgagagctagaaacaggactctcattttgctgcattctaagagtgtgggagattggga

SEQ ID NO: 56186 - DNA, 3164 bp, Homo sapiens
gagcccatctgcccccccaagtacaaccccaccagttgggcagagtgatccccccaccacccctgcattgctgtgaaatttagattgggcagggcccgtttgaccatctctctcaatctcaggctctccattttcaagtgagatgtaataatatgcgtcctgtttacctctcagcctgtgatgagaatctaatgattagggtgtgctagcacacaggcacctgtaaatcccattgaaatctgagggccctataactcctctagtgattcccaagcctcgtgcaccccaccctctctgttcatccttacttcccacgtgtcccgttagccctccggatgcagtcaggcccatttcccccaggacgcccggcactaagccgccccatccagctggggtctgaggggcctgtctcttgccccacgcctaaaagacctaaccctcctcctatcccttcgatacggcagtctttatttgctggagtctgcacaacatcactgcccaatgatgtgtctgcttccacgattcccaaagagactgagcttactgagaccagggcaaggaccgcgccagttcctcatcgcccccttcctctgccttcccctcccttccccctcaccgcagccatggcgcccagaccaagaaagcagagcagaggttccgcaattcttttctaagattgtctgactagagggttcaaagccctctaatccaaggccggcttgtgtctctagggaggttgcagaaaggcgccagaatgtggatggcgcggacaatgtgggatactggagtctcgactgccgcgcgccaaggaagggcgtcacctagccaagccggccctggagttgagtgccccgcagcccgccggtccacccgcccggccgcttgctggcaccctggtggccgcgccggctttgtgtcggcatcaggtgcaaacccccagagcgccgggcgtgcgcgcacgcgccccggagcgcgcggagcccattcgttgcccccaccgggatctcctctaggatctcctccggcgcccggggccggagagtgggggagggaggaggtcggacacgtagcctgcctcgcagcagggctcgactccacgcgggagggcgggggagccggggacccgccgctccagcccgctggccttcgaaagatcctcctgggccaatggcaggcggggcgacgcgaccggattggtgcaggcgctctgctgatcgctgtggaaactcgggcggcggggaacgcgggaggatgtggaacccgaggcggggggagccggaggggcgggcagaggaggtgtcgaggccctgagctcccggggagtttttactggaggcaaaagtccatagcgggagggctgagggaggggcggaggaaggggaccgcttgggggcactgggaagccagggatcctccgccaggaaggcagggacactcccgagcgcaggcgagaaggctgggggagggggcgcggtgggaggagtaggagaagacaaaagccgaaagcgaagagggcccgggctgcacacaccggctgggaggcagccgtctgtgcagcgagcagccggcgcggggaggccgcagtgcacggggcgtcacagtcggcaggcagcatggggaagggagggaaccagggcgagggggccgccgagcgcgaggtgtcggtgcccaccttcagctgggaggagattcagaagcataacctgcgcaccgacaggtggctggtcattgaccgcaaggtttacaacatcaccaaatggtccatccagcacccggggggccagcgggtcatcgggcactacgctggagaagatgcaacggtaagggtctgggggcgccccagccacccttctctgctgcaggcggagtcaggatccctggctccccgtgggccaaacagacctccggcgctgaatggagcttgggacgtcctgtagggaaggaaagtgcatctattgcactcgtaccccctccccaatcctcctcctcctctgggccgactggggtggagaccggatctgggacccggggaggcggcgctgcggtgaaagtcccagcggtggagaacagggcaagcatctaccgcgcgcgccgggacccacgcgtcctccccttcctcggggtttgtctggaggcagggactccccaagaggggcgctcgggccagacggctttggcgcccccagcggggaagatggccgcccctgcgcgccgctgaaaggagcgggagcgcaggcagccaggtgtgggactccgcgcttgtcccgcactctccatccagactgggtggcgagaaggaaagctcgtccccggccggagatcgctcctgctgggactcttgtctaagaagttcctcaatggccacctgggaaaaaccgcccagcagctcgggttcccacgctccagggattatctagactcaccccaagctcgagccggccttcttggggaccggcgtccgggattggtggaaggagaacggcctggggtttgcaaagcccaggtcgagtgaggccttgagccggtggatttagcagcactagactggcttggcaacaggtccgtctgcactcgaggttactctcgggcgttcaactcaatggctctctctttttaaatcctgccaagaacacccttccctcatcttgcactcctaaaggttgtgggcctctctggagccattgctgcccaccttacccccaccaaatgcgtggctcagtgattaccccgcaccagctacccgcaccggggaccccagtctgaaatcctggcatttatttaaggatgcagctggtatcccatggattcgaatgggccagaaggaaaagaacagaggcaaggagggaagaaagggcggcttttggtggtggtagtgaattggatgcagagaaaaaaggtctgatgggatacagaaattggggaaagtgaataggagagaggcagaaaggagggatgaacttgacgtagatcattccacctggaggtctaggatgcccaactgttggtgggcttttgctctctaagctgtgtaggcccgacccttaacttccccacctcttgcatctcatggagacaggcctaggggaaggccagaccaggccaccataacccaagctggacaatggacaggtggtgtgggccagcagggccagggcttatctaag

SEQ ID NO: 56187 - DNA, 951 bp, Homo sapiens
catagcatgcccttaagaacatggctgtggattcaaatcccagaccaatcactgaatttcaagccactttgcctctctgagcctctgttttctcatctgtcaagtggcaataacaataaatggtacgtgcctcataggggcaccttgaggattaaaagagagggtttcaataaatcaagtactgatttcaaaacctggcacatagtaggcactcagcacatggcccttatatacttatggccagcagcggctgggcctcatccctccctggctggctccactagtatcaggctgcctatgactctcagacaaacctggccaagggcccagagtactctccccagggcacccggccttgtgtcccaagatggccacaggctgacttcatggcacagaaactctgggaatttcctggcaggaaggcttcattgcctggacttgagaacagctgatgggcagccggggctggtgagaggtgaccgctggaacacatccctggcaactggctgccccacctccacctgaggccaccgcccgggatgggatgcctggggcctgggctcaactacacagggcactgggctggcccaacccctggtctaccctgtgggttcatcatggacaaagactgattgcaccatcccagcaacctcacagtccctttggcctgaatggaccaagtatttctggcaactctagtccaggctgtggggccttgagggagctaagagacagcctaaagtgtccctttcctacttcagataggaccgtaaccaaataaggtcacccaggaaaggggtagccgtgcagggctgtcccaccatacgctgcagtttgcagggcacgctcacacttaggggccagcagcatttaccgaatacaaactactacctggcagccctgggccatgggcttgaggagacacagtcctgccctcagccagctcactgt

SEQ ID NO: 56188 - DNA, 1803 bp, Homo sapiens
taactaaggaaaaggggctggtcgggctgctccaccactggactccagccagacagtaccctggggccaggctacatccctgcctgtctagacaggggctgggattgggaagttggggtccccaggggccagcctgttcctggggtgactgtgcttccaggagaggcccacccagcctggctggcaaagccctcccacgtgcagctgctagcccggagaggtgagtcactgtccctgagccctttacagaagctcttgggaaagccacagacctcaggccggcccagcccccagcctctaatggcatgtccttaccggcccctggggaccctgccctgccctacccctagcactcagcaagcacccagcatggggacccagaactgaaacagggacctgggagcaacagggcagcccctcacccagggcaggctctgcagcatgacacacccacctctgaggccccctcctcccccgcagacctgctccgtggacagctgcgggtcctccacgcagggaactgccctccctaccccacatctggccctggctagtccaccccaactctgggtcccggcgtggaggtcaaaggtcagcgaggggagggaggatgctaaggccccacaggtggagcgggacatcacgcccacgaccgagctccaggctccacccgccggtgggtggcttccttatggcttccttaccgtggcgtcctcagcgccgtggtggccgatgaggcggctgccccctgggtgccgctgtgcccagcggctgatgtcgtagacgcggcgctcgatgaccagccacttgtcgccgggctggtcgtgcgcgcggatctgctcccagcagaaggtgggcagcggcgcccccggctgcgcgggtccctcccgcggtcccggctccccgacgccgcccatgctgcacgcacgagtcctggggatcccaggcggtggccgaggtccgagcaagaccccgagggaagcgaagagcgctcccgggcgccgcctccgccgccgcccgctgctccggccccgccctgccgccgcggccgccgtacgagcgagcgtgcgcctcccggctcgcggcgcagggaactccccgccttataaccgcgcggacggcgcccgcctcgcctcgcctgcccccccgcccccggccaggccccggcccccaaggctggctgaccccccgcgtccgctccaatccaggcgcggggcctcggtctccattggccgccagggagggcggcgtcgaggcggcccgcccctcccgggaggacagcggccgccacccagccctgccccggggcaccgtcccgcccccttttcccgggctgccggcttccaggttcttgactccacccggagcgcggggcctggggacacaacacgcacctgttgggcgtcccgcagcgcctcgccacgccctcgggaaccggaggcggagtcccggtctgtgagcagcggggcctggggggcttccagccgcgcgtcctgcaacgtcaaatccagtgcgcccagaggggggacgctgtctcggggtgcctgtgaacagccttcaaaccatgggccccaatctctgcggggcccccaccgccgctgcagctctctcggagccctctgctgggggcgggtggcctcccctccgccctcggcgctgcagggctggggatgcccaggggtggccaagggggaggtaggggagcaggagggcactggcgcgtggaggcgggcgctgccatccatgggctgaggacacctgtgcttgttactgcttccccgcccctcttttttgttttgagac

SEQ ID NO: 56189 - DNA, 1417 bp, Homo sapiens
ggaccttccttcctacacatctcccagtggccagtgtgaggattctccccacaagaaaccactggagggggcctcctcctgtccgggtttggggctgtacaaggagcatcatggacctggctcaggcctcaggaggggccctgggctggggaaaatgtgggatagcatcgaggcagtcccactcctacccagggccgggctagacctggggacagtctcagccatctcctcgctgcgtccacacaattccacccccacccccacccccaggctggccctcacggaagaacaacagctgatgtttgagaaactgactctgtattgcgacagctacatccagctcatccccatttccttcgtgctgggtgagttcccccttctggctgttccgggtccctgtggccgcccaggctccagacaggccaggggaggatcacgaggagctgcggcaaggggctggggagggggcgggggaacgccagcggcaggtcggcgcctctctgtagggaaaggtgcggactgcagccagtgaaactgaagttagacgttaggtaagacgtcctgccgttagcaatgaaaaccccattttctgagggaagcgctgacatcatggtccctggagcccctgcgcgggaggggagggggtctggcggatttctgggaccagcagggggacccccgggtgacagaacccttggggctctcgcgcctccatgcgaggctctgcctgcctctcgctcccgagcgccttccaggagggctgggggctaggcccgctcgcagcagaaagctggaggagccgaggcatcgccgggcgctgggccctgggctctggccgcagcctggcccctcgcccctcgccccccgcccctcctgcccaggcttctacgtgacgctggtcgtgacccgctggtggaaccagtacgagaacctgccgtggcccgaccgcctcatgagcctggtgtcgggcttcgtcgaaggcaaggacgagcaaggccggctgctgcggcgcacgctcatccgctacgccaacctgggcaacgtgctcatcctgcgcagcgtcagcaccgcagtctacaagcgcttccccagcgcccagcacctggtgcaagcaggtgggcggaccgggagcaacggggaggcaccgggcagagccaggggccgagatgggcgcggcaggaatggaagatgggtggagccaaagtcccccggactcgggggattgggtggagccaggagtggggtgtagtcaagatttgggggtccaattgggcgggacagagtcgggtgtctgaaggtggggcgaggccaggagcccaccctccgagagtaggagtctgaggcagggctaaggacccttgagggataatggaaagaagggtgacggcttgggaactggtgaggtactagggtctac

SEQ ID NO: 56190 - DNA, 3434 bp, Homo sapiens
ttgttcttttaagaaccaaatatcctactagactgcaatcgagtttaactacagtctatagatagtgtgaggaagggttgggaaggtgatcaaatgaaggctggaggcttgcttaggtcagaaacatttctggaggatgactttgagccctacatggtctgtaccccagcagctgaaggttgttgaggggtggggagggctgaaaacagaacgataaagcatagaccttgtctccaaggaatgcacaatttatggagggagctcaaacccaagcctcaaactctggatacaaggtacaaagtactggatgtccagaaaagggacagaacatggaacacagtcatctttgtctgcctgggaggcggcttccagctgggtctggagctgagccatggaacatgggaagaatctgaacttgggcaagggcaggccatactctctggtagataagctttcccttgcagggtaaaggtctggggctcccgggatgcctgttgctaggaagtcaaatttctctttgtggatgtcactcccagttggaaccacaaattcctggcattgcccagagtcactcatgggcctcatctgaaccactcatgccagggcaccagtgtttctgactgcctggagtgaggggttttacaggggaagtgaatgatgaggaggcctttacacgccaggcggggtggttgcgggggttggatgttaactctggtcaagagggaatcaacaaacagtgaggtgagctgggcctggagggatcaccgggaggtacaggacagatcaggagagaggtgagagctggggcatggtgaggaagacggtgtggccttggcttgggccaactgagagagaggagcgggggtaagggagaagtaaggccaggtgttggtcctttgtccactggctcagccctgcatctcctgtttctttccagcctgaacaaagaggagatggagttccagcccaatcaggaggacgaggaggatgctcacgctggcatcattggccgcttcctaggcctgcagtcccatgatcaccatcctcccagggcaaactcaaggaccaaactactgtggcccaagagggaatcccttctccacgagggcctgcccaaaaaccacaaggcagccaaacagaacgttaggggccaggaagacaacaaggcctggaagcttaaggctgtggacgccttcaagtctgccccactgtatcagaggccaggctactacagtgccccacagacgcccctcagccccactcccatgttcttccccctagaaccatcagcgccgtcaaagcttcacagtgtcacaggcatagacaccaaagacaaaagcttaaagactgtgagttctggggccaagaaaagttttgaattgctctcagagagcgatggggccttgatggagcacccagaagtatctcaagtgaggaggaaaactgtggagtttaacctgacggatatgccagagatccccgaaaatcacctcaaagaacctttggaacaatcaccaaccaacatacacactacactcaaagatcacatggatccttattgggccttggaaaacaggtctgtcctccacctgaaccaggggcactgcattgccctgtgccccaccccagcttcccttgctctgagcctacccttcctccacaatttcctagggttccatcactgccagagcacactggacctacgcccagcactggcttggggtatatacttggccaccttcacagggatcctagggaagtgttcgggaccttttctcacttcaccctggtatcacccggaagacttcttgggaccaggtgaaggaagatgaggttgtgctgaccagaatgctgctggagaactgccccagggctgacaggccaggcttagctgagcagatgttatcactggccccaacttactttgagcaagggtggctgacccaaaaccatgaggtggcagtcagctggatgacagatgaacacttcccccataactatttagggtagtacccaagcactacaggaaagggtggcaggaactgcctcactcctaggaactggtagatggtgaggttgagggtgtccagcgcccttaggtcattttctcactgcctgggaacctcaccaaaatacttcttgcttccttggggtcagcccaaagctgtcacaaaatcagatatttccctttattccagatttcctggacactttcacccaattataaacaccccacttcagccccaatcacgtgggaggaagtgtaacttcccttttctggattctcaagcagttactttcacggtcagaacacgcagctattatgattgaaaacttaaaagggcaacaatttcagtcttgcttctagggctagacaggaacttggcaaacatctgtggcctgttcagcaaaggatgttaatatttaagaatcttgtcttgggctgggtgtggaggcaagtggatcacaggaggtcaggagtttgagaccaacctggccaacatgatgaaaccccatctctaccaaaaaaaatacaaatcagctgggcgtcgtggtgtgcctgtagtcccaacgcaggaggttgaggggagaattgcttgaacccaggaggtggtggttgcagtgagattgagcaactgcaatccagcctgggcgacggagtgagactgtctcaaaaaaaaaaaaaaaaggatcgtctcaacctttgccctcctactgcaacattttggtatttgaaatgaagggaccttccatacttatgctgttaatactttcattctcactagggatgaagcacattcctaacctgcttcctaatggggatgcttcgccagccaggtcctcacctgtgtgtacaccagcaggacactgatccagtcacagccatacagctgtccacactgaagaacatgtcctacaacagcctgaatcaaatggttagcttaatagataaaaatcccagactacttcagcctttaatgccttttattcataaaaactgtgaaagctagactgaaccattggaaacatttaactcagactctggattcagagtcgggaacccttagttctatctgaatccaagacagccacaccttagtatactgcccaaactaatgagtttaataaatacaaatactcgtttctttttgattagtgtgattagaactgaacaacggcacttaaggaatctggaagatagcctggatagatttctgattcatcccaagacctcaaagacaacacctgggtaccaaatttctttatttgaaggaatggtacaaatcaaagaacttaagtggatgttttggtacaacttatagaaaaggtaaaggaaaccccaacatgcatgcactgccttggtgaccagggaagtcaccccacggctatggggaaattagcccgaggcttagctttcattatcactgtctccc

SEQ ID NO: 56191 - DNA, 12936 bp, Homo sapiens
tggccagtttgtgcagttccagtagtgactgattcacatttttttccaaatgtaatgcacactccattgcattcagcccgctctcccagtcatcacagtctggtttctgaatgagaataggttaatgcatctctaccaactaacctagaagtcagcaagcccatcatctctaaccaccacgttttggcaaaagggacattactatttgcctaatttagtttagatggtaagcctaaaaaagcacaaaaggcaaaagcccagtgtatcatcactttataagggcaattgctagtttaagtgatttctgatacccgaacactgccagatgatgaagtatgacacccctaggatcttttgttcaccttgatatcctgaaggaagattcggccacctcgttggttctgcagcttcatcagtttctcagcatgttccctctcctcatgagattggtgaagaaagtatttggcaaagttcttcaaagccacatcatcgcggtcaaagtagtaagactgaaaggggaacactgaatgtgttatactagggatccccagagacaggtagctgtgacgatctacagggaggcaagatggtctcgtcagcctaggcttcctttctcaaagcacagcatgaaggaatcagtgcctaaggagactggggggcagatgagctactggattgaacccaagagtaatgtttctattctaaaatagaaaactgaaacttgatccttgaaacttaacttcaaggaacctttaggatattatgggcattgcctggggcaatgtcttaaggatctgtattactgcacagaaaacttacagccagtgtcagaattcattgtctgatgagagggcgctggagtactgaccctgcacttagtccttttctcctccctgctcctgtattaaccatgttaaagcatggttaaaactgagctcaggagtctgccagctgtaccacatatttatttataaaattaaaaacccctgctgggtgcggtggctcagcctgtaatcccagcactttgggaggccgaggcaggcggatcacgaggtcagcagatcgagaccatcctggtcaacatggtgaaaccccgtctctactaaaaataaaaaaaaatagctgggcgtggtggcgtgcgcctgtaattccagctactcaggagcctgaggtaagagaatcacttgaacccaggaggcggaggctgcagtgagccgagatcgcgccactgcactccagcctgggcgacagagcgagactctgtctctcacacacacacacaaattaaaaacccccatgcaaggtggcaaatgtggacagtatgttgatgtaaacatacttttataatagttatatcacaaaaatttgattttcagttttagacatttgatgtagtcaagtgtttgtgaaaggcagtgacagtcacagaaatacaggcctgttttcaaatccatttggaacacatttattcttgggatagtttggacaatcacaaggcaattctaaggaagactcccacgacactgcctaagaccaagatttgggaaaactgattccactgatcactgaaaaatttcttgcccagtaactgtcggtggactttatccaagaactgggggttcaattagtaggccaaactccacacctcttacagtaagatacataaaagataaattaggtcccctaggcgcaaggtcaggtgacacttcggtgactgcagaaggggcgattcctagagatatgcttcaaagcaagtgggacttagagataagcagagccgagaggtggatacggctgctcgagagggatctacccacaagataagccacctcccgccagcccccaaggtttgctattcgacaccgttacccagcagctccgccacacacaggcggacgggagctggatacctaagcaaaaaacgctggcatttagggccaaatgccggaggcagaggaaaagatgggaaagcaaaactccaccttcctaaccgcaggattgatcacacaggctggcagtcttgcaaccccaggatttcaggacaccaaggtctccttaaaaaagaagggtgtgcagaggcggccctggcctaggagggagcattctcagggtacagccgagaagaaccagctgccccgactttctgcgccagagaagtcctcggaaacctcgagcagcctccattttccagaagggcgcagggaggcgggagagcccgcgggtggccacacccccggcccgccccagcgcgcgccccgggaaccgcgcccggcccccgccaccgcttaggcccgcccgcgctcaccatggacaggtaaacgtaggaggcgtagagctccaggttgatctggcggttgatggcggcctctgagtcctggtggtagttctggcgcacctgcgaggtggacgcggtcgtcatggcggcgactaaggagaggcggcggcggcggcggtggctgcgcggcgctggagcggcggcgggggccttggggcagtccgagggtgcggtgaagaggtgacggagggctggctatgggcggccggccggggtggggaacgagcgccgggttccgtccaagcactgttgaagcaggaaaccccgacgactctcggcgaagaacgtctggccctgcgggtcgcttgtggtctcttatagccgcgtcggcgtcaggcccgccccggccaatcagcgccgcccgccccgagcccgctccttccggtgggcgcgggaccccgcccctgctgtgggggaggggcggccgctggaggccctcgcgcgctctggcggagctcgggagcggggaccggtagccgactgcctctgggacagcggtggcgtctctgtgcccgtttagtggagttggagggaagctgcgaggaggcgcaggaagtccacctcagaaccccccccccggtctaggggcgcccgggcgttggaaccggcgggggaagggtgcgggggcgcatggggtgatcctgattcggctcccattttcccgaacgggcaccctgaggctcctggcccggggcatggtgttagaaatcatagctgcggagaagcccttgtgacaccttgctgcagattgggaagctgcagatgattgggaaggtggaaggtggagacgcggtccttaggtggtcgagcgcattttctcttcctcagagtccaggaaggagcgcgatggagaagtggggcgcacggcgggtttcgggtccgcccctgcccttccgactcctccgaccacgtctgcctttggctgaaagcaaatatggctccgtgtgcggtttctgcaacaaaggctgggcgggccgggtttccctagggatggggaccgcctccccggggagtcgtgggggtgagccaccggggcctccgagagaatcgctggtgtcgcttcgcacccaagggacacatctcgggttagaaaggagaaacgacgtggatctaaaggcgaagcccatgctgaggacttttcaaaatggcctcttatcggccccactcacaggagcttcaggcttcggtggccctgtaggacaaccctggggtgtcattggagagaagctgacggggttaatggcgggtgacaggtgaaagagaccccggaggggtggggccggtgtgtgtggctaagctgagtcccaggcacagggtggatgtgaatttatgggtggcagagctagagctaggccctgcccttacctaggtcctggcttcgaggtccactgttctgtcgcgtcttttgacgcatcggtggaagaactgaatttcaggatgctcacaaacctgcagctggaagctagacttccaaaccttagtttaaaaaagcaactctactgaaatactaaaataaattgccgacggaattagggtgatttcttgttcacggtttcatttaaaaatgcacctatgttatttacaggaaaaacgttttagtggtgctagagctacaagaataaggtaaacagaaggatgctgctagaccaggagtaccttacccagtctgggataggaggaggtcggggaagccctccctaagcaagacacgtgagctgagtttgaagaaaaagttaaaaggaaggtgaagtgcgggagagaaacagggaagggaatttggagcagagtgaacagcatatgcaaaggtgtggaaatgtggaaatgcatggcctgttaaagctgccttaagaaaatatgttgcctggggctgggcgcggtggctcatgcctgtaatcccagcattttgggaggccgaggcgggcggatcacttgaggtcggagttggagatcagcctggctaactaacatggctaaacccttctctactgaaaatacaaaaattagccgggcgtggtggcatgcgcctgtaatcctagctattctggaggctgaggcaggagaatcgcttgaacctgggaggcggaggttgcagtgagccgagatcgcgcctttgcactccagcctggaagacaaaacaaaactccgtctcaaaaaaaaaaaaaaaaaagaaagaaagaaagaatgttggcctggaaagtacagtttatgttgggggatgctggttagggtggagaataggggcaagatcgggcagggttgtgttccataaaaagaggttaaacttgatcctagagacagcatagagacacctcattagctttgtttttagaaaccttacactgggaatctcttaggataagagtatagcaaagtcaccatatataggatccaaagctttcctttataacagtaaccaccagttagaaaatatggggaaaaaagaatggaaaaaaaaatgtttttcacttacattgacaacaaaagcttaaagtaccttggaataaagttaacaagaaatatatagaaaaaactataaatgcttactgctggacaaaaaattcaaaaagcctagcataaatgaagaggtaccatattcccaaatggtcggtcaatcttcattctgtaaagatgtcagtttccccaaataagcataaattcactgcaatttccataagaggcagttttttgtttttgtttttcctcagccattactgtctctgggacagtattttttttttttttgaaacttcacaaaatgattctaaagttcatttggaggagtcagtgtgttgatagatttgcatttggtgctataataaaggtacagtaaagtgctataagcagtatggtactggcacaggaagagatgactagattaatgcaacaaaatagtcctgcccccctattatgagaacttggtatatgctaaactgttgtgtcacattagggaagaaagaatgggtttaacaaattatgttgaaacaattgacagtcatgtggagaaaagtgactcactcagtatttaaaaatacattccagatagattaaaaatccaagccttaaaaaaagtataaagttttgagaagaatatatacaagattatttttataattttggggtagggaatgttcttctgaggctgtcagaagccgtaaaagtacagttggcaggtttgcctatttaaaaatgaaaagctgtaagacaaaagatgttgtaaacaaggttaaaacagagatgacaaattgggatgatatttgtagctcatgtaagtgatgaagattaggaactataatatatatttgtatgtttaatgaagtactatgtatgtgtcacacctttttttttgagatggagttttgcccttgttgcccaggctggagtgcagtggcttgatctcggctcactgcaacctccacctcccgggttcaagagatcctcctgccacagcctcccaagtagctgggactacaggtgcctaccaccacacctggctgatttttgtgtttttaatagagacggggtttcaccatgttggccaggctggtctcgaactcctgacctcaagtgatccacctgcctcggcctcccaaagtgctgggattacaggcatgacccaccgcacctggccttatgagacccttttgattgcctgcgctggtgctgtagatggtaagctcctggaaggcaggcattgtttctgtcttgtctctgcactcccagctttttgcaaattgcttgttacttggtgcccagtatctgttgcatgaacagatggattcatgattgaatgtggaggatggatgagagtgaggctagagggctgggcaccagtcaggaggcagcagccttagttattagtgagcagagaagatagaacacagatttgacagatctggagaagatcaaatgaacagactgattggcgaaagtcgggggccaggggtgggcagtgtgtaagagatctctcagctttatgatttggtaggcctggctgctgctgccattccctgagccaaggagcacaggaggaaatgaaggtttcggggaaagcccttggggaaggcctgcttggttttggactagatgtgctgagtttccaggcttccgggatgtccagggggacaaagccagcatgaagctctcggacccactggagggaagtcggtctgctgcagggagtaggtttcctgaatcagtgttggctccatgcttggctaaacatgcatgtagctgcagtgaacatcgcagcaagactgagggacagcttgtgctgtagaaggtcattgggaggaggctggctgggaacaatggaagggaaatctattggtgggggagtgtgagtgtgtgtgtgtgtttatgattgtttatatgattgcttgtgtccgttccctactttctggtaacttgaggtgtcagaactgcaatgtctaagcctttagattcttccgaagctgtggcctggtcttgggacctttgttgaccagggttctacctcccccaccctccagctcagctcctcgtgacttggaggcagcagagagtttggctggtctcccaggacagccgcctcccagggccaggagtggcgggagggacctcagatgagagaagagccaagccggtggtttctggaggttcagcacatcctggagcaggagggggcggtggtgggggttgcggtggagagttgctgtcccaccgtgactcagcactctgctaggctgggcttgggctcaaaaagtgctttgtcatggaggagaagagcagtcataagacctggagggctgtggcttcactgtggagggagggagggagggagggagggagggagggagagtgtccccctccccccatttcctaatgggacaaagtccagaggccggactgggaacaaaggggtctgagatcactcaggggggcctctgatggtgtttttgctggcaagcctaggtgtcacttttcctacctatccctcgctcagtgccttcccgccgcatggggaattctcaatagatgttgggtccctttctcttctagggattgttattgtgtagtcacaatttaggatccacagctaggaaatcatagaccccccacaaattttaaggctttggaaaggacgttagagcttccaaatcatcatgttttacagataaggtgagacccaaaaaaggttaggcttgcccaaagccgtagagtcactggctgaaacacaagctgaaaactaggacagggcacatgatggaaccccgcatggccattaaatacagtaagtgtgtttaataagtgtgttgctggaatgtgtgtgtgcaggaatgctatgtgaaaaggccagaccccaaaccgttccacaggctgattgcaacaaagaaaaacctcagggctggagacatagatgaggattgggagagaatgggttacgtggtattttaactgaagagctgatgttttaaatgtctgggatttcccctgaagtgaagtgaagtaaagcaggaaattcgagttttgaaattcagaccaaaggaaaaacaatactaaatcagtatttgggtacatttctggatgatgcaatcatactcacagagcttgtcctgaaatcatttcttgaaaacccttgaggccatgtaaactcagagtctaggtacttggaatcccccgcttccagaaggttaacgagagccacagcctgcgatgtttgaggacaactgtgaatggaaggcaaggcccatttttgaatgctaactcaggcctcactgcactccagacttctgccagagaccctatcacatgccctagctatgtgtttacctcctggctggactttgaagttttaagctgtgtccccaaccctggcacagcccgggggtccctccagttgtagcagtttgcagctctgtacctcttctctggaatggtcatgcccagcagagcatcggctctctacctttggactagcggctcctggagatcaagggtcttgcctttaacagtccccagctgtatccttcccagtgagcccctgggatatgcacacagtgaagaggccacgtggcctctctgaactttgattcctgtattatttatggtatctgaagccagccctctcccatgctaccttgagtacccgctctgggcgccctctttaccacagttcccgttgcaccccgtcagctgggacccagccacatggcatccccacatcaccccatccaggctcagctgtgctcaccctggccaaatcaggggaggcccagctcagcgcaggtgacaggtgggagccatggctagcagccttgggaggaggatgaaaaaacagaaaaatgtcttgcaagtctgggcagggacctcagcagccagaggccttggcagccaggggctgggagtgcctcctcatggaaatgggaactatgcctcaggagttttcactgtgtagacactcactatggtggaggggaacgatggctgcacagcacagtcccttgagcaccgggtcggagggagtagggatcaagaggatctgagagatcagcagccagggactaacccagctgggaggcagcagaatgaagcagccggaaagagcggctagggctttcctgcccccagagaaggggcacaatccaggagagctagtgagtcttgctgggccagcagatggggcctcggtcagcagagggaaatcctgagtgtcctatgagagggtcaggaccccaaagatctcaccctcagcatggatgaggcctccctccagcctgtggctgttcccactgtcccaggctccctatttcctgcctctaccacctcctgcagtcccactctctctaatttgtctcttttctgtctgtcccagcattatgaaatacaaagataagcactttgtgattacaactccttaaaggaggccggtacagtggctcacacctgtaatcccagtactttggaggccgaggtgggttgattgcttgagcccaggagtttgagaccagcctgggtgacatagcaagtccctctctctccaaaaaaaacacaaaaattagccgggtatgatggcacaggcctgtagtcccagctattcaggaggctgagggaggaggattgcttgagcccaggagtttgagaccagcctgggtgacatagcaagtccctctctctccaaaaaaaaaacacaaaaattagccaggtatgatggcacaggcctgtagtcccagctattcaggaggctgagggaggaggattgcttgagcccaggagtttgagaccagcctgggtgacatagcaagtccctctctctccaaaaaaaaacacaaaaattagccgggtatgatggcacaggcctgtagtcccagctattcaggaggctgagggaagaggattgcttgagcccaggagtttgagaccagcctgggtgacatagcaagtccctctctctccaaaaaaaaaaaaacacaaaaattagccgggtatgatggcacaggcctgtagtcccagctattcaggaggctgagggaggaggattgcttgagcccaggaattcgaagctgcagtcagcaatgattgtgccactgcactccagcctgggcgacagagccaaaccttgtctctaaaaaaaataaaaaataaaataaaactccttaagtgctctccactgcccttgggatataattgtaattccagggtatggcccagccactcacccccaggcttctctctagccctccagggttcccctcacaccttgggacttggcacagctgtttgatctgcccagacggcctgcccctcactcttctgcatgaaaaagtacccagccttcaacaccgggctcaaatatgctcccaaagctccctgcactgccccgcagagctgagaatttccattctttgtgccctccagcactccgagcgcgtggtctccactgccacgcagtattacagtgacctgctccatacccacctcccccacagcaagggaacctctgccctgtttatcttggccatgcctttgcctttcccacctcagcacctggcaaagtactcacagtttcacaggctcccagactaccgacaaatatgggctggatttaacttggacttagctcttagcccaactcttattcatctttcctgttgctgagcgttaggctgccccaccactaccccgtgcctcataggttttttgtttttttgacagtcttgctgtgttacctaggctggagtgcagtggggccatctcagctcactacaacctctgcctcccgggttcaagtgattctcctacctcagcctcctgagtaactgggattacaggcatgcaccaccatgcccagcgaattgttgtatttttagtagaacagggttttgccattttgctcatgctggtctcgaagtgcggcctcaaacaatccgcccacctcagcctcccaaaatgctggcgtgagccactgggcccggccaggtttggtttttccatctttacttaattaagactaccagctgtttctacctcccgtatggaagatgctgggaattggtgagtctttctggggtttcaggattattcctaggcagagacctgaagacactgtgaggcagtcggggctgggaccagcgcggccatggggatggagatgtcacagtcacaggctctgtggctctgaggaccaattcctgtggcttgcttttgtggccacagagtgtttcctcaactggaggaatctgtgggctgtcactagggaccaatgtgggaggaaagcaagaagggttggtataaaaatcagcttgctactacaaaacaatgtcctatccttcctggcggtgggccagtgcattgttggagttttcattccataaaataacagatttttacataaagtaagttgacaccttcggggctgacactgacagcacctctgagtaggtagggcaggtagcccgtgctggcagcagaggtttcctttatccagtgaggaaactggaagtcagagaggttaagagacggccttgcctaagattgcgcagctggtaagagacagggctctgaccagaatctggactctgattgtggtgcaattttctgaatctggtgccctgacacagccatgacggcaattcttaaactcagcacatacattacccttaatctcgaagcatgcaggaagaagagctccaagattccacttgctgaggcttctgaaatatccctgcaggtggagagcacttcctgcagccctgaatcctgaaggcgagccagcacccaacttcggtgggcttcaagccactggagttggccgagggtgctttcaaagtagttgctgtgattctaccagcagcaaagctgtcacgggtgatctttgaaattaatgggctgatttgattagtaactgaagtctgtttgcttggtgggagttttgtggttctttggatggcactcttggggatctcgtggcagggcttagcgaattggacttggtcttgagttatctggacttggtgctaatggctggcaggcccaggagatgcctgggcagcccgtagactggggctatccagtggcattctgagcagggcagtgggtctcggcccacatgggagagctaagggtatttctggagcatgtaattcccagggaccatggctggctcctcagacccccattactcccactgtgcttggctggtcctcccaggggctgggggcctctgctcagccacaagacacaccatattagggagtggtgggagatgcttccctgagggtctcatggtacctccttcgtatgtaggatctgagaaccatataaacttgcctaaaagagtctcggggcctctggagctgaagctgttcacatgccgggaagcataggatgacccacctccaaactggggcaacaccagctcctcccctggggccttagcccacccttggttttctgtgcggagggctcacccacctttctgacaaagcttctgatggctcagaagccagttggcctgagtcagagccaggagagccttcccatgggaaggggctttacatgctattacctttctcatctgtttccagctgcacggatgatatgctaaccccctgtcaaacatccctgccttttgtaattctttgaaagcattagttggaaccaagtggctctcgtttttccccactatttactcacctatccagctgccctttcaatatcgtgggtgtgtatgtgggtggacaggggtgtgtatgtgtagtggcaggaatccggatgttttgctttttgcttttttctggaattgatttctccagatccatacctactccccaatatccacctgtcttctggacactagatccagattttcctctggggaactatttccctccctccaacctctgtgatgtgctataattggaactgcctccatccctagattcagggatagacatgttttgttttacttgcaacagatttttcagtcaacttaccttttatatcaggggtccccaacccctggtccatagactggtaccgaaggtgcatagactgtgcacctccaggctgcatggcaggaggtgagcagtgggtgaatgaacattacctccaagctctgcctgctg

SEQ ID NO: 56192 - DNA, 1178 bp, Homo sapiens
gttcccagggaaggaggatatttctgaaaaggtcctgaatttcagatgggctgtcatcactgtcagtgttaggatggaagggctgagtgcagttgcctccagaccaacccctgtgaaaaatactccagggaaaatcgctctggagagacatggcttctgagatggtgccctgggtggatggaggagagagctgggaggtctcacatcagtcgggatgattttgctttcaagcaacaaaacccaacccacaatagattaagcaacaagggggatttattgacttgtggagttgaaaagcccagacgaggtggactttagacgtggttccatcagggctcgggccccgtttctctgtgattctctcagatccgctcccatccaccgggcttcatcctctggctgtcttccagcatcctccagagctgcaggcttccttcttccaggggtaaagttaggaccccctgccctgccgcatctcacaagcattgtgaaaaggtcttgagctttgtctgactgggtcttgcttgagccagtactgcctcttggagtgtctaaatcttaatggttgtttaagcaaattaaggaaatggagttgatgagcacttctgaatggcattgggccccagggctcactggagacaggaagagtttttaccaattgctctctgctctcgcttgctggtgtctgattttaccagagtacagtgacctcagctgggacactcaggcctgcaccattcagacttcagagctgtatgtggatctgtgtgaagacctctaggagcccagcactcagatttgggaggccccactgcacatcagggcaaacacgttaaaacatgcccacattccacatgcagcattgtaaccaaaacacaggttcagttgcctgccacttgcagagtccaaataataagagtgaggtctggtataagtaaagtgactttttatttcaaaactagcttaggggaagaggtacaggcttcttaccttaagagtaccaccttggggctgggcgaggtggctcaagcctgtaatcccagcactttgggaggccaaggcgggtggatcatcttggtcgggagttcaagaccagcctgaccaacatggagaaaccccttctctactaaaaatacaaaattaaccaggcgtagtggcgcatgcctgtaatcccagct

SEQ ID NO: 56193 - DNA, 447 bp, Homo sapiens
tttgtggctgcaaagtaccccattgtgtagatgtgctattgtttatttctcaaagtccttattgatggatttttggctttttcccatgctttggtttttacaaacagagctgcaataaacagcatatctctgtgtctttttgtattgtttgcagtgtatcgttagtatagattcctagatgtgggattgcaggatcaaagggcaaatgcgctcataattttgctagctattaccaaattctcttctacagtgaccgtaccattttgcattcccaccaggaatatgtgagaatgttggttttctcacagtttggaaaagagagtatagagtattaagcttttggattttggccaatctgatcaacaagaaatagttacttggggcaatttgtgtttcttttactgtaagcaaggttgagtgtctttccgtatagttttgaaatatttg

SEQ ID NO: 56194 - DNA, 1760 bp, Homo sapiens
aaataaaggcagaccctaaaggcccagagtagggtagggccataggcagtgaagcccacctcctctctggatgtgcatctgcttgaggtcattcctgctctgctcacctcctggcgtccctgtgaggatggacggatatgaagaccctgtaacctgttgagtgtcccgacaataacatcattgatcgtttgcctagattttgcaacccctgcccccactgctaaaccacagtttattgcttagcagctctgaccttatacctccttatctctctgaggtggccttgaagcccaagtgtcacagagtcaaacatggttaaagagtaaaagtggctttagaaatcatgatgtctgggaattctcagcagctggagctgcccccactctgcctctgttgagactttcatgggaagccggggtttttaggggagcatgtcctgaccctcggctgtgtacagaaggaagaattacctgggtggtttgaccaagtccaggctgcccccagcccaggactcctctacatgcaggaccaggctggcgatgttcaccagctctcccggaccgcccacctgggccaggagaaccagaggctcagtccaggtggggttgggggactcaccatgatgtggccccttcctctgctggtccatagcagaatgggacccttctttctgcctgttccttaacccattgctacctgtcctggggagtaacatccacagcctctgagtgcccccgctatgacgcagcctgctcccactctgctcatcgtcttcggatccagtgtctgcttcttgggcctttgtgccacgtggcatgcttcctacctcctctccgtcctggtcccctccccagccttgctctcctgcctgccgaagtggcgcccggtgcagagaaaagacaggccccgcccgaggtagacttgggcgcgctttgtgttgcttacggtggctggtggcaaagtgctgccccagggcctttagaaagaccctaaggagaaaccgtcaagaagccccaggaagtgacgaaatcaggaacaccctcaccctgggatctgggagggggttgagtgatttttcctccccctgcatgtcattatcatgattattttcctagagaaaaccacacctgtcgattggatctcccagtcctggtgtggggggttaactcaggagggtcagctggaggaaacaatgagaggggtgaatagaggggtgagggctcgaagttcctaagctcgtcttgcctacccctgagacccctcagcgtctttctggtcaattaagtaaaagaagctgtcctgagctcagtgggtggcctagcagtgtgggagcaggcctcttagtccgcagttcaagggcctggctttggggctgcacggagccttggcagggagcccactgcaaggttaatctgtaccttctctggctccacatctgctggaagaagagagcaaaacctttgttccctctgctggaagaggagtttggagcctatcttgccaaaaaagactgtgtttgtaagtattcagtagatttgtgtgtacgaagagaagtcagcagaagcattttcacccagagaagaaatttcatcaccctcatccttggcgcatgggagtcaggcagtctgtacagcgagtgatgggaatgtctgactccatgaggcactgaagagaaaacagaaggctgtgttctctcctcgtgaaagctaagggtccctgctgacagtgtagcttgccatcgacggctctgcttagtcaaa

SEQ ID NO: 56195 - DNA, 1588 bp, Homo sapiens
actcctgacctcaggtgatccacccacctcagcctcataaagtgctgggattacaggcgtgagccaccatgtctggccagaaaatagctatttttaaaaggagtgcaaagtgagggtttcgcacagaaactggtatgtggtaagtgctccctaagtgtcagctattactaattaattaagaaacaagtagtccaaagacagtcagtgtgtttccccaagcacacatcttggtaagttccatgaagaggcatggtctgtaactgtcttgccatgatcattttttcaggagcctagagcagtgtttggcagtcgatatgtcttgaatgattgaacaaaagctagtttgtgacagagccacccagcggaatgttcacctcgtccaactcttctacacaatcgagagaaacattcttttctaatttccttccttttttagaaaaaattaatagaccttggttctgtccccaacggtctgaattaggggttaattagggttaaccacattttgtatttatatgtcctttcctatggagacatcaaagcccagaaatgtcacctcaatgcccatacagctttcccctcacctccaagagtgacagagtgaaatttagaatcccaggcccttgcaggtaagtctgacagtttcagtgagctctggacggggaggtgcccacagggtttgttggtccagaaagcaacagaactcagtaggctaaagggaagtgagtcagtgtcttaatgcacatggatttcaaaacagtagggactgcagacttcatggtgtgaagaaacgcatctgacagctttgttattacatcaggaaagctgcagtcagcagacacgtacgggatgtgggaggtttgttttgaccacacccctgtcaatagttacaagataagccaaagcaagaagcacagacaccatgcctggcagaaaagcggccgtttgcggaactattttatgtaacacaaaaccacgttttcggtccgtaaggcagggtctccacctcattgtgtgtgcacagatcaagcaatgacgatggctcttgcctacaggaagcagcagaatgtccatgaccttccccagtgagatcatcacttctacggtgcctgggacttccttacctctttttaaagatctccctctgtgacagcccccaccttgctcacggaggacttagtcttcttatttgagtctttagagccagcagtggctagcatgttagactcacctggagagcttttaaaaaatcccagtacttggctgcactcagactgattaaattagaacctctgggcacacacacacaaaaaaatgctagacgcgatgtctcacgcctgtaatcccagcactttgggaggccgaggcaggtggatcatttgaggtcaggagttcaagaccagcctgggcaacatggcaaaaactcatctctactaaaaatataaaaattaatcagatgtggtggtgcatacctgtaatcccaactactcaggaggctgagtcaggagaatctcttgaacccgggaggcagaatttgcagtgagccgagatagcaccactgccttctagcctggaagacagagctaga

SEQ ID NO: 56196 - DNA, 1046 bp, Homo sapiens
cccctcgttgagtgagggaagcacctggctgaacaccaccacaggcgctgggggccaggccgaccatttcaaacagaaatgtcgacaccctgccaccgcaggagccatgcagcgctggcctgtgggctggggagggtttggaaagggaaatatgggttgtgccaaagcacaaggccccacccagaagtttggcaaagggtgacttggagtgagaagagcaggtggggagcaagtccaccctgcgccaccaccaggaaaggacctgcccccacccttcctcagcggcctcttcccaggtcacttcccctcatacaaaaagcgtgtgtgctcccttcccagctcccctcacctcagcctttcccacacagctaggagccagagctaccccacgtgcttgttggccaaagggccactttcagaagtgtttacaaattaccccaggtggaggccactcacaccaaatccaggaacatttacctcgggcatagaaccacattccctggctacccagtgaagatccccgggggctcgaacccccaaattctcccaactttctttgcagacaccaagtatttcatcttttttaaaagtaagaaacaccaaggccagttcccctcctcctcccatctgctccccgcccctcccctgggcccactcccgctagcggcggcggctcattgcaggccggcatgtctccccggtgacctcaccccagatctggcctttctctgtcaggcctcacaatcttccgggccatctttgttgtcttatctctggctttggcacaaatatcacaccctggatgcctcatgactaaaagtccatcactttccccaagccctttccctgtcttccctagaaattccaatatatggccaggcgcagtgactcatgcctgtaatctcagttctttgggaggccaagacaggcagatgacctgaggttaggagttgaagaccaacctggccaacatggtgaaaccccgtgtctactaaaaatacagaattagctggacgtggtggtgcaaaaccccgtgtctactaaaa

SEQ ID NO: 56197 - DNA, 591 bp, Homo sapiens
tgggaggttgcagtgagctgagattgtgccatcgcactcgaaaaaaaaataataataaaaaatatatatatataaaataaaaatctcatattttgaaagttttaaaatccgaattctgagggaaaacaggggcagccacacaaaccatgttgccacccggttgaaccctgccagggagtgatgtgtcagcctttttgggattagcaataattccattcccagacgatttcaagggcaaggttcatggaatctagaacttgagatggccccaaaggtggagaagaccatgcggagctggcggggctggcctttgacctccacctgcccggtttctaaagtccccaggcagaaaccacaacccaataacccttattgattgcttaggtgctggcaggcgctttcgcaatctttttttttttttttttttttgagatggagtcttgctctgtctccaggctggagtgcagtggcatgatctcagctcactgcaacctccaactccctgattcgagcaattctcctgcctcagcctcccgagtagatgggattacaggctcctgccatcatgcctggctaatttttgtgttttaa

SEQ ID NO: 56198 - DNA, 738 bp, Homo sapiens
cacgccattgcactccagcctgggcaacaagagcaaaactctgtctcaaaaaaaaaagaaaaaaaaaagatgagactcgtttatgaaactggattcctcttaaaccacaaatccatctgaatggtattcatttcatgcttgataaatttcaagacctgattattttgcaatatcaatgttgataaaagttaaatattaaccagataatcgaaagttatcctttaacgtctgctaccatagaataagaatttcagactgacccccagtgacaggaaactttgaaaaggcgtgtgcctgaagaaacgtatcgattggcatgttaaaaaatacatgtattggccgggcatggtggctcatccctgtaatccctgcactttgggaggccgaggcaggtggatcacttgaggtcaggagtttgagaccagcctggccaatgtggtgaaatcccgtctgtactaaaaaaaaaaaaaaaaaaaaaaaatacaaaaattagccaggcgtggtggcaggcctgtaatcccagctactgaggccgaggcacgagaatcacttgaactcaggaggtggaggttatagtgaactgagatcatactactgcactctccagactgggtgacagagtgagacactgtctcaaaaaaaaaaagattacatttctccttttttagataaataaagaggaaagagaaaggggagggggagcaaggggtgtaagagggagaaagaaaagagagaaag

SEQ ID NO: 56199 - DNA, 1070 bp, Homo sapiens
caggagaatggtgtgaaccccggaggcagaggctgaagtgagccgagactgcgccactgcactccagcctgggtgacagagcgagactctgtctcaaagataataataataataataaagttctgggaatgggtaaggctcaccacgcagagccatcaggtcatttgagctacaagtagcgtttatttttcacttcttgctctctcttctcatggtgtgagtttgccacaggctatcaagtctaaatccagtgtatttctgacagctatgctctctccttccgttccctggctggggcccttccagccttcaccttgcctcccctggagacttttcataactatctggccttggtctctccagctcacctgcaccctgccacctgtggggtctgccccctgctcagctgtagaaaagctgaaaccagagagggaggcaggaggcaacctcagagagccagctgtggggcaacaccaggcgggatcagggtcacccaggcctgagctggagaggggccagcgaccaagagagaaccaggtgcccagcttataaccacagcaaccggggagagcaggggcagaggctggtagtgcaccctattcttcaccctagtctgatgaaatggctttattagtccagctcactggcaccaacccaggcagtttcaaagctaaagctaccacccaacacctggcatgccaggggacgctcgtgaaaacaaatactggcaaaaataacaatgactaacgtttattgaactcttccaatgtggtggttcgtcccggctccactatgtgactgggcttggtgaactctcctagcctcatctgtaatgtgggattcaatgagttgactcacgataaagtatcttagctgatgcctagcacaaagaaaatgctcaatactgaaaggtataattgctgtgaatatgattatgattaaaacaaaagtcaactcgtgtctttttcctgcgtgaaaatctccagtggaggcagagcgcagtggttcacatctgtaatcccagtgctttgggaggctgaggtaggtggatcgcttgggcccaggagttc

SEQ ID NO: 56200 - DNA, 6245 bp, Homo sapiens
cctcagccccattctccactctacacagcccagggcagcctgcagccccagccagccttcaccggctcacaatagacagttgtcctgcaggtccctatgcctgtttacctggcacctgtgtcccttgagcctgcacctccccttgtgtgtgtgcacctgcctggcctcctccctgctccctgcccttaggagagggaggcgccagcccagccacaactcccaccaggaggaagtttttccatccttgtcattccagccctcccctccccatcacccccttcccctggcccctcacatcatgctgacttccagggcagcccttacaccccaacctcagccagctggttgctttctgactctgctgtgacgcctttctccatctctctctaccccagccacgcacagccccatcccatgctacagtgagcttggaagccctgaagctccaagctctcacttccagcagcgagggagattccctcttccctccctggccaggagggactctgcaatccttgtgaaagggggctggggacagcctatgatccagtggggagtccccacacctggacacagaagcagggaagagtgggcctttacccagaaccactgggattaagacaccaactctgagggtggcgtcctataggagagggggtggagcagaacgcttggtcttgccctgtggggtagattacagtttggaagctgcctgtctgccccacccaaggccgggatctggggagggcgctgcttgctctccccccagcggtcggaccacgctactgcaggggcgtggggccaggccgctccggctctgtcgctgaagagctacccccgagccccgccaggacacgtagctgtagacgggatcagctccaggcacttccccttcccccagaacctccgctccagcccccgggggaccgggcaggatgcccctccctgacaggccgtgtgcagtgccttgcttagcctgctcagctggggcctgcacccccaaggctgtcctcaacctcccaaaggcttctggacacaaactgcgcgtgcggacatgtccaggaccgagaaactcacttcagtccttacctacaacccctacgggcccgcaggaaacctccaccaccagagcagaatgccactgccatcctctgcctccaagcccgatgacaacgcaggcagaggtgacacatccaggcacgccacaaggggaagaccttcattcacaaccagtgggatactctctcacaggcaatgacacacatctcactcagagacaagctgtgacatggtggtcacaaggacctaaagccacagtgggacgacacctgcaatgctatcagtgacctacctaagactgccagcgacagctcagccacagccctggtgggaactgaggccagcagggaggaaaaggggcttcattccttcggaatcctcttgtggcccacccacgtgccccccacactccctcgggcacacccaggaacgctggaaattgctcgtgctcaggaagccttgggagtcccaccggatggcctgagcccagggaaatgccagcctggatgaatcgatgggggacgaagagaagtcagaaggccctccatccctgccactgccaccgcccaagcagcacattctaaatcctccccagcggccatcacccttcctcaaacctaagcgtgcacagcacggtgccagcccagctccggggagagaaactttggggcctcgggaatggtgggggagagagccacactgttcccataaggagtaggactagctctcccggtctgtctctctgtctgtctccaggcagttcccaagttctaaagaaggtggtgaccacaccccagagccccacacacccctccgcccccacggctttgccccaacccctcaaaccagctcctcaggctcagggtgaccggctctgccaggacccaccagccaattccaagtcgagcaaaagaatccagcctggcagcaccgccacctttccccaggacttcctgagggctaagatgactccggggacccccagccaactccgtaccctgggctgacgctggaccttctccctcaacaggtccctgtgtcccacccctggccctggaccatgtctggctgccacaagtcctcagctccgaggggttggctcctcaaggagttcccggaccaggacccctgaatcgctgctgtgggcctccatatcagcccgcatgacttatgtggctccccatgtgtccctgttctctgaccagtgtccctgtgcataacctcttagggacaaaggctttagagaggggctcagacaccctctaacccacattcccacagcccccaaaccctgcgacctctcctagctccactcttaccctccctagctcctctcccaccctccctcaccccaaagctcacagctcagagcaaagaggtgcccctaacttgggggctcccctgtcctccccattctgcacaggccactatccacgcggtggggggtgggtgaccccgctgtccctaaggactggagaaggaagcttccccccattcagcttctgaaaggaagtgagtgccacaccctgcccctgggatttccctcacggggaggggatgaaagcgagatctctaccctgaattacagccagtataggtgcaggggcccttaaacgccttcccccactctcagcttcactgctgcagcccctcactgtattccacaaaatcaacccaacacctaccatgcactaggctgtgctgggacgggcaagcagagagcaggagccctgcaatccgaggttggattctaatgaagacgggttcgaaaccagtatttactgagcgcccagcgctgtgctggagacacagaggtagatatctcggtcccttttcctccggagactccggaggtctaaggacctgactgacttgggaggctcccacactgcctttccacaaatcccctccacagagcagggcactctgcagcgaccgcacgctccctgggagcacctcactgccacggtcgccgcggcgggagccacaccctgcgaaaccggcaagcacacacatcgcacacaaccctcagtggcctcattgtgcagaggggccagagccgttccccaccttgttgtggggcctcggctacagctgagaacacccatctgccccctccgcacccctcccagcaaggggcacagccagccctgtttgggcccctggagtccctcatggtcagcgccgccaaggggctgcgcccccacatcccggcctgggcactgctggggggcgaccagccctgccagggacggcccaggccctcgcacactgcacacacacaccccctccccttgcatgggaaagccttacataacacagctctgcacacaccctaagcacgctgcctttccaactctaggcgagacctcgcttcgggccccctctcctggcgcgcaccgctggagcgcagggttccagcgagcgcagcttagccctcctcccacgccaagcccggctcctgcccccaactcccacacacagccccttcctcctcccctttgcccctcaccactcctccctgagttctggtttgaattagtcaccggctccaaccaccacattcctcaggctgctggcgccgggccaggctctggggcgggggccatcccgcccggacgggtttgggagttgggcggggggaaagcgccgcctccggaggggaaggggcggtcccgaggactgggccgccgcagcgcacccccctcctcgcccacctcagcataggaatctccctaattttgtccccctccccacccatcccgctgggaggcgcattgcaaacttccaggttccgcggcccgagaggaaggttttctggagcggggaacgcggagaggcaaggctagggcggggcagctggaggaggctgaggggctggtggtacagaacagggtggggcctggacgactcgggacgcggttaggggcagaggtgcagggagcgcggaaggacagccgagggggcgcacggtgcggggtcgcggaggcgcggaggcgctgggggccgcggtggcgatctcggaaatttcccctccagtaaacatgggatacgaacggagcagcccccgagccaccgccccatgcagggagaggaggtgggacagaggccaccaggcccggaacggggcgccctgccttgcagtggagccaacagtccgccctccggagaaataaagagtggagcaaagcacttcggagcgattttccaactttaaccaacttgcgccccaactccagaggcagaactccgctcccagagagcgacgcgtcgccgccccgggtggccccgcttgctccaaactgcttgaatcctcacagtgacacccccaacaacgcgccctgccggagcaccgcaacccacctccccgcgacccgcccttggtgccccggaccccgatggcgccacggtgcgcctggcgcccctacctgagggctcagccccagggcacggccatagccggcgcgaggcccaaggctgcggtgctgcggctactggcggcgacgagccccgttccgggcgggtctggcagggcgggcggtgcagtccccgcggcagagcagctccgagtggccgggcccccgtgcgcggaggcggctcttgtaactccggctcgggcgggcgggtctgcccggagctgtggggagagggcggggccgggcggggccggagcggggctgggactggcgagcggggcagaccctggagggacccgggagtgggctgctggggaggggggccgctgggggacgcggggacattctttccccccctccccgcatccactgccccctgtcctgtcccggacctggacctgctctccaacatgtgcactgtgtggcttcattggcaagaaactcctgcaggctccctgggctcaccctcacagctggaactgcgaatcaacttattttgcaggaagggcctgggggctctgaaggtggctgggtgattcagccgcgaccgtcagcttgctccggacctttgagttttctctcagcttaggcaactacacttcagatcccaggccccagcctccttgcttggttcccaagctccgtgctgccgcgcccatttctcgcgttctctctttctgggggcccctccgtccatatccgcacagaactggcttggatttccaccccccaggagccggggtcaccagtgcctcgcgcaccgcggtgctgcgcaggccgcgggcatacgggggtgaggaccccgggcgttggacagcggacccgacgcccaccttcctctccagactcccgcccccaggagccagagccccagcgcttcctctgcctcccattccttctctgagcgccgcccccgcctccccacttgcgggacgctgagtctcctaatttacagcgatttcccacagccacttctaactacatcgagattttattaaacgtttaatgatggggtgcgggggccttctggctacacactcccctccacactccctttctcttctccctcatgagtccttttatcctccctcctaggtggccacccactgcccgctccaagccagtttcccctccttcccaaatgctaaggaaagagagaccccaggctggggaactaaggagacctggccaaggcaggagcgccctccttgctgcaagatcatgagtgggctggagctgagaccagctcggccctgtcctctgaaatggcaaacatgtttacaggctaaaaatacccagcagtcaactctgctgccagccctgggggctgtgtccaggtccagttaccggcacagagtacaggccgtgggggagggaagagacagccagaggaaccacagacatgggcactcatataatggacacagaaaggtggagccgcatgtgcagacatccagacaggcagagacatgtgaaaacacaaagcggagacttgggcaccagcattttctcttgctctctctaatacacacacacaggtgcccagataatgactcaaccccatggcagaggcagcctcgccacaacacatcccaagcacacagtcacagactcacactttcccaagaatcacctgctcccccattttgttctgcacccctttcctagcacctaccttatttaaagaaaaaacaaatctaaaacttttgagctatagaacacttaaaaaaaaattaccaaggccaggcgcgatgcctcacacctgtaatt

SEQ ID NO: 56201 - DNA, 2904 bp, Homo sapiens
gaattgcttgaacctgagaggcggaggttacagtgagccgagattgcgccattgcactccagcatgggcaagaagagcaaaactctgtctcaaaaaaaaaaaaaaaaaaagcagcagcagcagcaaagaaatgactgttaacccttcttagcaccatctgggatctcccagaccccgcctccaccccatacacacaccagcccagggattagcatccctgccaaacaggcccttctccattcacttccgtcacttcctaatctgtcattgtccaccccaccccccaaaagcaaatctatctggtgattctggaatccaaacattatttcctaagcaattctcaagccccaaacccttaaccctagccgaaaatataaagccaagtaaaatcatccttccccagctcaattcaaatcccagcctgtatttaaacttcaagcttcaaataaggagttcctgaatttcttagatcagagagctttgatacacagaaactctccaattacactcagtcctaatgaaatcttcaagcccaaccagaacccaagttaaagctggttagagaacaagagacatgaggctgtctccagagtaccgtctgggaggaaagaaggcaaagaaagactgtccaggcaggtggaagggaaagaaattgggcagggagagtggggcaggtggacacgatgggtcatggctggatttcaggcagagttaggggtgtgggaatgctgtggggcaataagaggagatgcagacctgagattaaggaaaagaagcgacaagacatgaggctgtgaaggaaggagggagggagagagagaaaacagaagagctcagcactgagctaaggactgggcgggctgagttgtaaacaggagccgagggagggagttggagtaaacggagcagccaacgccccagccagctcccctccccagtggggagcagggagggaggggctgaggaagcggggaacaccacctcctcacccctttcttggaatctgcttttctcctgtcctttccaacttcctctgcctttcccccagcttcctggggaaagagagaccagcctgggtttccctctctcctctgcttacagttccctaagtccagttgaaggagatcaggctgagcagggaaggaagggcctaggctgcccagagcctgagtcaccacatagttgaggttcctgtcactcgaagtcccgcctctgttacactccgtgccctgtgcccgccccaggacttggatcgctacatctgaccctggccccagggctggctccacttccacgctccttaccaagctacccttaccaagctacgggtgcaggaagcctttagatgcctcgctctccctgcccctccacacttggtatgctgtgtccaccacccttatccctcagcatttgagggcagcatcctcctgctcagctttggagcagaagtgactcagtgagtgactgcaaggattgtggaaaagctcggatgcacccttgataagtcacttcaactctctgggctccagtttccccactggtaaaataacgggttattagagacggtctctggcagtccctgcaagaggtacattctgtatgtctgagtcaaagagatgggtaattactattgaagagtgggataaaaggggcgtgtttgctaacccctgtcctaacagtaagagtgggtagggtagggcagggctgggcacaggacctgccaccatagggcagccaacaccctaggcatcttggtgactcaggtcccacatggaagaagagccggaaagcaccccttgggtcccctgtgagtcaggggaaatgcggatctccctgaaggatgactgcctgggttcccgctataaccaactatccttccaccttgaaagtctcccaggatgggtaccgtaagctcatcattccacctccctggcctgctcagcagcttccacccctcctgcctgaccttggcagcccttcttccctcagccctgaactctagagccctccttaccctctgacagctccccctgccctaccacattccctccttcaccccttggctctgcccatcttcaccatccaccccatcccagcagagcccgccagatgattgcaaaagggctgagccagcagagaggccttcacatgacagctgttcctgctgcagaggggagggggcagctgggagtggaggcacattccatgggagatcctatcagaaatagccccaaaccctaactgaccatctgccccaatgatctgcacatcgcccattcaataggcttgcctcaaaatcctgaggaaatcaagaaaacaaagaggggtggagaagggaggggcctaggggagtgaagagagcccaggaacattgagacggggtcgccaggacatcaccactgagccagtaccaccagcccaaggtattctccctctaatgggagatgcaactgatggcagtgctgccctccagcaccccccaccataccctactccacccatcccttgggtgctgaggcactgggacaccccagtaattcccctggagtaaaacaacagcctgctctgggagccatgccagcctgactggagcaaacagacaggaacaggtggcagtttctgtaacctttcaggagcaccaatgtgagctccacagcactagaggaagagaacggggtgggaaccccagaatcacattcaaacatacaggagcaggccaggcacggtggctcacgcctgtaatcccagcactttgggaggccaaggcgggtggattacctgaggtcaggagttcgagtccagcctggctaacatggtgaaaccccatctctgctaaaaatacaaaaaaaaattaacaggcatggtggcacacacctgtaatcccagctacttgggaggctgagg

SEQ ID NO: 56202 - DNA, 816 bp, Homo sapiens
tctgagtgagttcttcagggaagcgatactctgagtaccacagggaccagccgtccttatcaaagtgctcccagaaatatggcagtgccacagagagtgtgtcctcattggagtacttgcgcttaaattcatccaacacaaaggtactaagaggaagaaagcacaggggtcaatcaataaggaggaaggttgccaggctaagagaagtgaagggtgctttcacttaaaatttactaatataaaggaaatggtcattgtgctggcagatgtgtatgaccttatgagggaagtaagctcaaggggtttgaacaggggcctaggacactcctctgcataagtatgcaaggcatgtggagggtggaactcaaagtgggactctgagacctgccccaggaagggcatggctaactgctgcccccaggtggagacagagtgaggacttctttttccctgttcaggccctccccaggctgttttccatgaaccacactaagtcactgactcacccaagtctcttcccccccaccatacaggcctcttcaggttacacaagctgtaacaggaatgtaagcagtgaacattctcaaagggcctccaccccaaatcttacacccatgtcctttagtccatctctgcctataaacaagctttagtcttttccaaggttttccgatgctggaaagcccttaggttcaggttatcttaaaagcaatctggcatactgagccaagaatgccagcatcaatatagcagaggtcactccctccacgattggtgctctgttttctttctttccagttataaacatatacactg

SEQ ID NO: 56203 - DNA, 2765 bp, Homo sapiens
cagttttcaggatacgtgtacagggtctatgggagaaagagagggacaaaattaatgagtagaagggtcccagtccttaatgccactctccaggatgactttcctgaataatcccaatgtattcaactcacccttttacttcctctggtgaaccaagtcctttagtacttgtcatatgtaatcagaatcctccgaaataccaagaacagaactacacaccaactgctaaataaagcttgttgacagatttgaccttccctaaggacacctctggaagtattctcttcctctcaaatctatctccaagaaatccagaacttctagctccatcagactccatctgcctacaaacatactctcctcccttcccggagccctcgcttcattcattgatggttccgagcgcctgcctactctactgctcagctgctcaccgcttcaaaagcatcgtcctgtctctaaggcacgcacgacgatcgagagatttctagttcccctcagactagccagagataggggatggcatgccgtcttcttaaatcaactcctctctctcaaaaagcctttctttccgtgtcgcgaatatcatccctccggtcctgtcccgcagcgagttccccggcgttgggcttctctattatgccggccagcggagtccaattggtctgacttcactgtccggagaatcctctcgctcccaaacctccctgagagacgacctttaaccgtgccagccggacctgcctacaaagaccctcctcttcaacctgtcccctgtgttactccacaaaacggacacagaagttcgtcaacctgcccagataccacgcctcaaagcggcaacagagccgaacccctttctcaggcttcggacggcccagacccggcatctcttttctcctcttccccagacccttccacctctggcctccgagagccccagcctcagttcccctccaggccctaggaaccctactctccagcagtacagtctgtagacccccgaatcagttccccactcaacctcagaactcctctggcgccgactggccccactcgggcaaaggatggcggtggataggatgacccgaaccaccagagccagcaaacttaccccagccgccatggtgattccgcaaagaaagggggtggggttctcggcgctgccgcaaagtaagccgcccgggagagaagggagggggaaagaggagagccgtggagaaacagcagccggaaagcgaggacgaaacagaagacatacgtacgacagttcggtatccagtggcgctgaattggaaaaagaactgggtgggtggggcctgctggccagcgcggaaaaagctcgggcctgcgcattggagctcttgactggcccgccccccaggtgcagcgggccaatcggagtctagacgtggaggtagacagcgtggagggcggggaagttgtgagaacccgctggaaaagccgcgagttcttggctacgtggcgcggttgttggcccggcgcggccagtgctactgggggcgtccctctctggccctcccagggacaagtgacttgatggtagattttgccaagcccctcacatgattctatgaaactcatgggagcgaggaacagctgctgcgcggaggtggcagtgtgtgtgctaaatccctttagttcctgctctgcttttcctccagaaagggatgagcgtctaacaggggccccggtctgaacccgcctgccaaagtgaggtttgctcacatccaacccctgacagctccagggtgctgttactgcgagcagggcaccggccctccggcccgaagcagggcagggacatgagggagaacgcgccctgtccctcccacctcctccggactcggcccctggaggggctgacgctggaagacctgacatcgtcgcttctgatgttcatggcttttgacccatgttcaggtttgaaatctcttacccagtttaagaacgggatgaactctcctcgtttaaaggagagaatgaagaacgctgaacgcaaatctccgtccttgtgcgcataaatctgaggcgacaggaagaatgtggaggcaaacctggctcttctcagtactgctggagccacccaccgctctgccattcaggaactctgcgcgggtgccaggtgccacgcgcggtgctgcccccgcactcccctcgagctgtgcgaactgtaggaaggagaagctggtggggtggagagcaacagggagagacccatgttcggggtcagacgggagcagctgcaggaagttctgggggaggggaagggggattatgaccagatggaaatgaaaggaaacgggagactgtattaataaactagcagctttattgcccttcaggggccatgtcttcacttgagatgtcgaattgcttgagggaggaaaacctgtaagaaatgatggagatcagggaacaggccttggggatcctggagcggggtcacagtgagcattcggtcagccggggagacagacgccacaaagctcagcaggggctcagtttctggcctctcttcgccaccactcagtcctttcagctcctgggtgacctgagcctcagtcgccagccaccctgctcttgtgccagcgccacctccagctccctccttggtttgctgctgcaagcgtctacgggctcgccgccgcccttgccacactcggtgccacaaggcacagcgccagctcgctgaggagggcagggatgcccccttccctgcctcaccctgagaccattcttgg

SEQ ID NO: 56204 - DNA, 2119 bp, Homo sapiens
attacaggcgtaagccactgtgcccagtcgagagaaatactttttctaaaggcctcctcagtaaacttctacttatatctcagtggccagaattctaccacaaaaaaactccctctcaaaaaaaaaaaaaaaaaaaggaaaaagaaaaggcatttttctcagaataaaaggaaaaaaaatagaggaggggactcaaactcagctgacactaacctttttttatgagatggagtttcgctcttgttgcccaggctggaatgcaatggcgcgatgtcggctcaaggcagcctccgcctcccgggttcaagcgattctcctgcctcagcctcccgagtagctgggattacaggcatgtgccaccacgccccgctaattttgtatttttagtagagacggggtttctccatgttggtcaggctgatctcgaactcccgacctcacatgatccacccgccccagcctaccaaagtgctgggattacaggcgtgagccactggacctggccgacactaaccttttatactctgccctacaagctgccccttcttcttttctgaagatatggggcagcagtatcgtaactatgaagagccacataccaataatggcagagcaggaaaacagcaaagccctgaactgtccaggtctggacttcttgttacatgagaaaaactaaattcctattgtttaagccatttgtagtttggttgctgaatgcaatccctaacaaacacaggctccaccccattctaaaagataacctgggctgcaaagggatattttggatcacctaagccatgcctacataacaagagtacagcctcagaaccacagtatgaccaaggaacacagcacctcaacagtgaacttttttcaagggaccaaaacctacagggaagcaacacaaaaagcacaagcttgtttatctaacactctccaaaggacagggtgttctaaccaaacaaccttagtaccctcagtgtaagttaataaactgctaactggtttatcaaccaggttcttgtggagttgatccaatggtatgttgttctttaagcaccaactttcactataattacttaattgtttactttctcctctagactataggctctgtgagagcagggaccatatctaccccattcactactcagaatgcagccctaagcatagtgcctagtacaaagttagctgtgaataaatatttggcaaagaattcactgaatcaatagatgacacacacaaaaaaatcccccagtgactaactctggtgaagtgataaaatccaaagggtgggactgggagcagtggctcacgcccgtaatcccagcatttggggaggttgaggtgcacggatcacctgaggtcaggagttcgagaccagcctggccaacatggtgaaaccctgtctctactaaaaatacaaaaattagctgggcatgggggcacgcgcctgtaatctcagttgcttgggtggctaaggtgtgagaattgctggaacccaggaggtagacgtcacagtgagctgagattgtgccactgcactcaaaaatataataataaaaataaaaattcaaggggtgggggaggtgtgagaagctcccaaagctggtctagcccaagtactgtgatgtccatcaagaataagccacattaggaaccagctcaaagaggctgttggtttctctctcttgtctctttggtacacagcacatctgattcattcttttttttcttaagacggagtcttgctctgtaatccaggctggagcacagtggcacgatctcagcttgctgcaacctccacctcccgggttcaagcgattctcctgcctcagcatcccaagtagctgggactacaggcatgcgccatcacacccagctaattttttatttttagtagagatggggtttcaccatgttggccaggctggtctcaaactcctaacctcaggtaatccgcctgcctcagcctcccaaagtgatgggattacaggcgtgagccatcgcgcccagcactgattcattctttaacccgagagccattcactttaccttgtccttgtccatgacaacactggccacaggtccaaatgctaggaagtactcagagagctga

SEQ ID NO: 56205 - DNA, 2217 bp, Homo sapiens
gggtgacagagtgagactctgtctcaaaaaaaaaaaaaaaagaaaaaagaaattagccaagtatggtggtgcacacctgtagactcaactacttgggaggctagccaggggtatggtttgagcccgggaggttgaggctgcagtgagccaagatcacaccaccgcactgcagcctgggtgacagagcaagaccttgtctcaaaaaaaaaaaaaaagtggaatttgaagttacagtgaaccccttgtgtgtcatacaagaaccttgtctatttttccaaacccatcttctgtctcttcctcactggtaccttatggtctagtcattcatgccacacctatttcatccatcccctcctttgagtaggtcctctgtagggcttctctgatttagttactaattctctgtggtcccacagttctccgaacatatctataaagcattgaaactttctcattctctagacggtgagctccttcatctctgaacccccctcccccaccctaaagatcagcagaataccaggcacagagcatatgtccaatagatgatggttaaagaagtaataaaacaattaaacttgcgttgtggagatttcatatactgaggagtgtaatgtggtggaactttcccgactctccaaatcccctcggacttgcagagaaaaacggaggtgagagaccctaccaatcaacttgacaagaacgactgactacctataaccctaactttcgccaggatcaaaagacgaaagcccgcaaccacccccgggtccctcactagccaccgcttacggttggctgtagtaacgtggcagaggcagcagcggaaccccccacgcggcagcgattcgacatccgaatccaccgccgccatagcgactctcctgtaccgacaaaaacacaagcacctctgccaccaccggaacccacttcgccaaagctcaacgcgctcggaagcaacttccgccgatccgataggaagtgacataaagtcgttcaattgcgcggacacactcctccggaaaccaagctccttcgactctgggttccgtttctagccgctgtccagtccccgcccgtttcaggaaaagcggcgcgttacgatgcttatctgcatgcggtaagccgattggtgtgctttaagctgttcagacgttgattggcccaaagcatcgtgaatattcatgacagcagccacaaaggccggcgccgggtggcatcttgcggcagctccttcaccccgcagtagacacccgtgcgtctgtaccctcgacccttatttacccgacgaataaaggcggaggatcggcggcttccaattctttgccccacggagcccagggctgtccctggacttccaaccttttcagggctgttactccctccctccgccccctgtcctcccgcaaaacgggtgttctgcgacggcttctagccctggttggggagctctgccaccaccgggcaccttccggactccacgaggtcctggagccaggcccattccttccgcagtagtgggctgcgtggtgtacgccggaggcgccagagctactggcgcacctcagagcagtgcgacaagacaaaaccgagtgccagtaactgagtttagacactggagggggcgaatgctgtcaaccccctcctggtataattgtcagttcatcccaacgccgccgaggtgtaggctcaggacagggagggactacggggagctggggatgccctagggacagggaccataacgaggtggagagaactatcagatgggctcagcagcttgtgctgtggttatcagcccacagctttgaatggcgcaaagagcagtggacctaaggcagacaccaaggtctttgaccttgaacaagtcacaactgttgaggccgtttcccatctctaaaggaagtgcccaaggagcacacagcaggctgaacttcttgttctctatcctaaggtgttccttctaatgggcccagctcaggcatctaatctcagtgtcccaaacctttaaggcaggaaacagtgctacagtggatcgggatatcatcgagactggccttgaggatcctgaagcagcaggctgtacacatacacccagaggtgctagggtggttcagtggtagaattctcgtctgccaaatacaccacacagctaggtgaggggatcctcctataaccccaccaccacccccaagggggtatacatgttaccctggc

SEQ ID NO: 56206 - DNA, 1511 bp, Homo sapiens
cttagtataggatcctctcttccaccagaagttagaaacctcagaagagaccactgcgggagggagggagagggattctgctccactcaccttgttgagctcctcaatccgtctaaccaggtaaggattgctggaagagttctcaaaatagacgtaatctgtaagggaagggaggggggagaaccacgaagatcagaggagatgggagacgcagagcaccagggtaggagagaaagttggcctgagtggatcaaaaggagataaggattcaggtagaaagggcgctgagatgtgaaagtggacagactaagagaaaataaggatgtcccccatccccaccgcacctagttctaaaattagatcctttactcaaaagagagccttaaggaacaggcaagaagcaggggttcccctgcagtccccacaactcagcgatgagttgcaccccagtcgcggcgaagtaattgtccgctctagcgcagggcccctaccttttcgaatcgaggcgcacaataacgcctgggaagaggaaacctccgggcggctcccccgcggtggcaaagccgtcgccccagcccctcgcgttccctccctaccctgtcagctccttcggaaccggttccgaaggccactccgtgccccggggagcccctgacgcagccccgaaagtgccgtcggggctgcccgcagcttctctctgggagtctcggagccctgccgcgtcgcggttccccgcaccctctctcctcgtctcccggttccggttccggtccgcgctccggtccacgctgccccatacgctgcgcctcgcgccacccggtgccgagcccctcaggtccctaccccaacctctcccgccccgggccccgtatccctgcgcccggtactcacctcccacccggtacatgttggccgccatggccgttcccgccgccgcctccggccgcacaaaggggtccgggaggctcgcgggggcagggctcggctcgaggcaaagccccgaacggtgggctgccgcttcgagggagtctcactggggcccgcgcagccggcacctccgctgcctcagccgtcgcggttcatcccggcccgcgctgtcgccgccgcagctatcgcctcactcccgggacgctgaggctggcccccgtccgctcggcttcttccggaacgagctcggctcctgccaggccagagccaggctccagctacccccgcccccgcggagtcccactagtcgttgggctctgccggccgcagggaaggcttgccgggcccgcctcagggttcgcctccttccggaacaccttcggccgatccggagaacaaggcccactgctcggctcaggtcggagagcgagaccccgcagatcggctacttccggaagaagttcggctcctgtcgggcaaccgctcggctatttccgtcgcagctcggccccacccccttttccgagggcgggagaggagtcgggcttaactctgtcctcgctggagccctgcagctcctcctc

SEQ ID NO: 56207 - DNA, 1704 bp, Homo sapiens
atgtgtccggtaggactgcccctttcaggcagccccaggcttgaatgctcgtccagaggggaggagacggtggtaaaggatcaagggcctccttctggcagggcaggcgagaaacctggcaaagctcccttcctgctgccgtctcagcctccgcaaagactgggagtaccatggagtaccgggggggaaatatggagtactgccgaggaacgtgggagccacagagagaggcgccgcactggtgagggcagggaccgcagccctccccacgcgcccccagcaagctcaggtctccagcgaaagctgagtaactgagccgggggaacaccaggagagagaacggggtgcgggaatggagtcatactgaggacccagagtacaagaaaagagatccagagtgacaggagagagtgtgagtggtgagcagagtcacagtgaaggtctcagggggcagtggggatcagaaggaaaaagacctgaaataccacgagaagaggcccggagtaacgcagggggcagggaaacatcgaggggcccggagttacgtggggcgtagaatgacgctggggaagcccgaagtgacagcaagacccaagcaactagggagggcgaccggaggaactgtggaggatgctcggagcccctggggcggaggagcacgcggggacgcctccagacagccgtccagctctggcataacccgacgagccgggcgctccgggaaggggcacgccgcccgccccgccccgtactcaccgggccccgcggccccgtccatccggcccccgggttgctccgagcggcggcggcggaggaggcgtctaagccgcgggggccacggccggggagaggggaaggggaagcaccccggggcgcgcgcgaagggcgccgtaccaccaccccgagggggcgctgtcgggcgcggggaaggggcctggagggggcgctgtgggcccggggccgcagtctccagacccccccgggccctcggactctcccggggccgctctcggctcccgggggtggggtggcagggccgtccggtgccacagcgccgcagcacaaacaggcgccggacgcggagccgccaggaagcgcgggagggggggcgggcccgagggggggccgggccgcttggtaacccctccctgtccgggcctcgccgctcagtacgggggcggggctagccggctgaccccctggcctactcccggcctccggctccaggcccttcccggatccccgcccccggattcccaggggacggggaagggagcgcccgccccgatatctccgccccccagcccctaacccctcagggttgagcggaccaaccccaccacttccgcgaggggcaggggcggggtcacaaaacgggccctcggcctaggggcggagtttctcgtaaggggcaaggccaaggcatcttgtattggggctgacaggggggcgggttattagggctgaggatgggaggatgctcagggtattggggtcagggtggcattagcccagctcaagccgggccgggctgactcagcatcctgccccagccagcttccatccctgacacctctgcattcccttgggcagagatgggagatggcgccggtgttgcccctggtgctgcccctgcagccccgcatccgcctggcacaagggctctggctcctctcctggctgctggcgctggctggtggcgtc

SEQ ID NO: 56208 - DNA, 2279 bp, Homo sapiens
acactatggaaccccttttggacagtctttcaaatacctgaggataacgcagtggcactgtccctaaatctttgcataaggggcagggttcgatccattcccttggctaggtgaccaaagactcattgttaaattcattgattccatcgtaggataaatatttattgaatactcttcctaggaggcactgccttaggtgctggggatacagcagggaacaaaacagacacagtccctgccctcatcgagctttctgtttagtggaggaagcagacactaagcaaagaaacaaattaataacattattacaaactgtgatggggccatgaagaaaataatcaggatagagaataaaagggaatggaattaagaatggtaactttagctatggtggtcagggaaggcctctctgaggaggtgacatttgagctaagacctgaaggatgagaaagaggcagcccgggaaacgctggaagcaaagcaccccaagcagagggaacaagttaagtgcttgagagagtaatgagcgtggggttttcgagaaactgtcagcaagccagtctggctgcagcagagcgagggagaggggtggaaatggggttgggagaggcggacggcagcaggatcatgcggggccttgcaggctctgggaaggagtctggatttcatccgaggtgcggcgggtagccgcggtgcgttctatagagggcagtgcgcctgaggccgcagagctgtccggagggccgagcggatgaatggtgtttgccgggggttcatccccagggcgggatgcacggcggcgggcgccctcgggccagcccgccgcacccccgccccgccccgctcaccgagctgtaccagcgcgtagaggaggccggcgatcgacaccaggaagtaggcgagaaacacgttcttcagcttcagcttcatggccgcgccgccgcccgcgcccgagcaggcggggtctgcaggggacgaggggttcccgccccaaaccccggctcctgtccgcaggccccgcccctgcagcggctccgccctgcgtcccgccttcctcgcactcccctaccagctcccagctggggctggcagcgccgccagggcacgcttccggtcatctgtgcacccccccgccttgtagacttgatttccggtcccaccgccaggttccgggaaccaccgggtggtgacgtcacatccggcgtgccaaactcgcgtggccggcagtcaaaaccccgggtaggtgcagaatctcgagtaggtgcacgtggtacctacctcgagacccgccccctcatcacggaattgcctgagaaagccagtcctggcgcccagatcttcaccttattcatccatccagtcagtcacgccacccaatagctgttgctcaatacttattacacgaatgaaatctaaggcccaccacatgatcctctgggtgtctctcctggaatcctcactataatactttgagatagataagaaaccaaagttgacaaaaattatgtcattgccacagggcagttttgtgtcctttctggacacccgattccagcatctctagtgtgtcctctggcccacatttcttcaacagatgacaacaggggtgccaaggaagtgttttaactaccaggaaattgattggaaatagttcctgagctggggaattccatgaatgcatccccttcctcctcacaagcacaagccatccttctcatttttcctttaaaaaaaaaaaaaagggcccggcccagtggctcatgcctgtaatcctggcactttagaagcccaggagtttcagatcagcctgggcaacaaggcaaaaccccgtctctacaaaaaaaacacaaaaattagctgggtgtgatggcgcgggcctacagtcccagctacttgggaggctgacatgggaggctgaggctgtggtgagccgtgatcatgccactgcactccagcttgggtgactgggtgagaccgtctcaaaaaaaaaataaccccccaaaaaaagtttctggtaaaataatctctgacttgtggtcagtctacaaaatgaggggaagggggaacagtatacttcctgtcactaaaacaatgggaaactttaaaaagtgctgttagcagctgggcgcggtggctcacgcctgtaatcccagcactttgggaggccgagacaggcggatcacgaggtcaggagatcgagaccatcctggctaacacggtgaaaccccgtctctactaaaaaacacaaaaaaattagcagggtgtagtggcgggcgcct

SEQ ID NO: 56209 - DNA, 482 bp, Homo sapiens
acacaaaattatccaggcgtggtggtgggcagctgtagtcccagctactcgggaggctgaggcaggagaatggtgtgaacctgggaggtggagcttgcagtgagctgagatcactccactgcactccagcctgggcgacaaagtaaaactccctctcaaaaaaaaaaaaaaaaaaaaaggcagagtacacagaggatctttcaccttcagaggccctggtgttgactctggtgacatcagcctctcagaggaaaggagcagtaacagccagtctcagaggaaatggtagtaccatatgcgtggaacagagaaacaaagcaagccacatctttctatcggcaaggcattgggtggatgcaaagttaaagagctaaacatgaaggccgggcgcagtggctcatgtcacgtctgtaatcccaccactttgggaggctgaggcgggtggatcacttgaggtcaggagttcaagaccagcctggcca

SEQ ID NO: 56210 - DNA, 1451 bp, Homo sapiens
aggattcctaaagcatctttcagatatgacctgttggagggccctaaggaattcacggcggccttgaccaccccaagagaggtgttcataggccaaagtcaggaataagctgcagggcaagttgcacgcatttattgtttcagatcacaggctccgagggaactgagtttatgatccacgctttcttcatcgctttggagagtacacgcctaccccaccccagtatatccgttaggtcctagtaaacatttgtggcactggtgatatgtttcgaatctttttttttccccagtaatataaacccgagagcgtggaccaagccattcgattacatgttgtgtttgagcaacaccatccacgccgtgagcttactggaccctgggccgtgcccagcgaccgtggacactgaactaagccagagctggtgctcacgtgaagacaagggcagaggaggattcggagctctacagggtagagccagaagggtagtacaggcttaactgctggcccggtgcttccagctcagccgaggggccgcggggccgcaggctgcattccccgaggccaggccgcatcttttcccccgccccgacgaccccgcgcactgcaggaagggggcggcgacgttgaccgccgcaagcagccaaaggagggcggcggctgagagcggccaagaccaagaaagacgcacagctgtggctttactaaaccgccgggcgggagcccggagccccacaggcaaggcccccagcgtcgctcggatctaccacggggagaccggaggcgtctgaggccgcctccagaggaacaaaggttcctcacgaggccgggggtggcagagtgtcaagagacacacaggaaggagtggaatgggacttgggggatctgggggcgtcccgggcgcgcccccagattccgggctcctcaccgcctcctacgcgccgccactgccgctaccgccgccatcttgtgcagagtttgctccttgaccccaaacctcccgccccatcgcgcgcgctcagccacgtatcctagttcccgccccttccggccttatgattggttcgacctgagcgccgccgggcagctgtctcattggtagagtgcgcactccaaattatcgcagggggcggggcttcaggccaggggcgggaacgtccagagccaggcgctgtcagactttgcacgctctcagcatgacagaagcactggactggttttctcaagttggcaaattttatttagaaaaaaaaaagtgggagagaaaaaagtgacagcgctctttagaccaaggacttagaagagaaacctccacccttccggagcacgttagtcccttccctctctcactgctcaacctccctgggcttccagagcaagaaaaggctacgtcccctgtcgaaggagagtggacggtgaaggtgcctggaaacggccagagaaaagaccta

SEQ ID NO: 56211 - DNA, 1549 bp, Homo sapiens
ccccatcccacaacacaagcaccttgaaatctcttaatgggaaaaaaaaaaaattgtaagcaccttattaagggctctccctcctaacatctgtttcttcccatattctgcaaaatcttagtcacctaccaccacatcaaccaccaccacctactcagcaccctcaatgtgcttggacatcagggtgtcccagggcacagagtaataatgcttttcaaccctttccctcctaaaacatatatgggttcagtctcagaggttcagaagccaatgttatgggaggtggcaaatcccctttctcttatcgccttttctgtcaaagaagacagcatcctctaggtgctgataaggctctaacagtgccattcctctgtttcctccaaaaaacaccctaatataagggaatatctcagccggactgcattctgtttctgggcctgggttctcagggagtctctatgaagtcaggacactgggtttcctagggtcaaaaatggccagggcagctgggttcccaagagttcagatacccccgactcttgggagaggaagcccggggtcgagggtagttaggcattggagtctagcgagaggcaggcccgaggtcgggagggcgggcactggagccctgagttttggtgaagcagtccctgagttctgggaggacctgaccaagaatctgagaaccctgacgtgagttctcgaggtaggatccgggtttctaccgagaaggctagggatcggcgcggggccgcgcgatggggggaaggtgccaagggctctaactacctgagaggcgcgggaccgtgggtggccggggcaggcccaggtggccctggggccccgggagggtcgcacagcgcggacatcccggagcccgagccgagcccgaggcgcgagcggcggagcgcaggcggcgcatgcgcgctgacaggaaacgcgaaaggaaccagctaccaggcctcgcaggaaaattaatccggcgatgtcctcgaccctcttacattagttccgcaccctgtcggagtcccagagcataatcccgggacgatgatagcaggaagccgattcgccctatatgcaaccactttattcaaaagcctattgacatacagactaggccgggcgcggtggctcacgcctgtaaacccagcactttgagagcccgagagggcggatcacctgaggtcaggagttcaagactagcctgccgtctctactgcaaatacaaaaattagccaggcgtggtggcttatgcctgtaatcccgattactcgggaggctgaggcaggagaatcgcttgatcccgggaggcagagattgcagtgagccgagatcgcgccactgcactccagcctgggcgacagagcaagagtcccgatagacacacacacacagagagagagagagagagagagagagagagagagagagagagagagagagagagagagagagagagagagagagagaaactaaaacactcacaggggtattttaatcatttttcctaacgccaaaaatacaaaatgttcaactcaggactttt

SEQ ID NO: 56212 - DNA, 2394 bp, Homo sapiens
tcactgcaacctccgcctcccaggttcaagcaattctcctgcctcagcctcccgtgtagctgggactacaggtgccggccacaacgcctggctaatttttgtatttttagcaaaaacggggtttcaccatgttggtcaggctggtctcgaactcccgacctcaggtgatccgcccacctcagccccccaaagtgctgggattacaggtatgagccaccatccccggctttcctgagattcttaacagaatccaaaacccaaagaaaggttgtctgctacaggtattgtgagaggctatcagagcttaggaactaacagccgacagacattccccgcataagcgtcagtgcacaaggtgagctgagaggtgaagctgctccggagctctgcagggaggaaggaagactcggtggggacgaccaacaggaagagggtctagtacttacgcccgcttcttgaggtggtgccgcgtgatcagcccttggtctatcacagccccgaccacccggtgcctcagacgccgctcccgattcaacacccgccggcgtttgaacagcttcttcttcagctcctgccggggagaaagatgcgaatcagatggagtgggctcgccgcgacccggggcccctccaccaggcagccccggcccctcactgatcccatctcgtgcgagataaaagggctcaggaacgcttgaggaaacaaagtcgcggcccccacacagtcaccgttcggggccggttgatctttccccccggagctcccatagtcgcgattccactccagttcacggtccgtacttccgctcagcgccggatccgcggggctccgccccggccttccgcgggccaatcgcaactcgggggcgggtcctcgggctatataaaggagctccgcggtgcgggaggcctttcggagggtggtgagctagtaagtgtggttttagctgtagtagccagattgggcggccgggagtggtgggggtgccgggtggaaggctctgggcggggtctcaggaccctccttttcttggcggggatcgggcttgtggtgccgctccccgtaatgtacggaggaagagggaaagggctctggccccctcggcgtcatgtcttcggtgctggcggcttcccatccgctggttctatcctcaaacgccgggacaccgggaatctcggagaaggacaaccgagatccagctggctcctccatcggggtgctcacactttctcatttgatttcaggtctgcggacgctgtataccctcctccacttcccgctgcagccaataaaggccgttcctaccatagtctgtgtccgcgttcttttttccgggactgcagagttcggggaagctgtacgccgcctttcgctacgcggaatttgcagatcttcccctggacctcaggcctctccggctggagtagggtggacgcttcacataagcttctctggtcgaacttacccgaatctccagatggccgcgctgcgtcgaatgctccacttgccgagcctgatgatggggacgtgccgcccctttgcgggtagggaggtgggggcagagtggagagggcaaggtgggggcagagtggggagggtaaggtgggttcctcgtgagtcaggagtgtagtccctgaaattgtgattctcaaaccctacggtgggccgtgcgtggtggctcacggctgtaatgctaacactttgccaggccgaggcgggcagatcgcttggcccaggagttcgagaccaacctagggcaacatagcgagaccctgtctacaaaaaaaattaaccgggcacgatggcgcctatagtcctagctactcaggaggctgaggtggaggcttcagtgagccatcattgtgctactgtactcaaccctgggtcacagagtgagaccctgtctcaaaaaaaaaaaagacgccagtgtgtatatacgacgtttttgcagtggcgacatagaccaagtgacaccctccaaccgtgcccacaggctcactggctgatagttgcctggcggaccgctgtctctgggatcggctgcatgcccagcctcgtttgggcactgtccccaccttcgactggttctttggatacgacgaagtccaggggctcctactgccattgctgcaggaggcacaggctgccagtcctctgcgagtgctggatgtgggctgtgggacttccagcctatgtacaggcctctacaccaaatctccacacccagtggatgtgctgggggtggacttttctcctgtggctgtggcccacatgaatagcctcctggagggtggcccaggccaaacacctctatgccctggacaccctgcctcaagcctccacttcatgcacgccgatgctcagaacctgggggctgtggcttcttcaggctct

SEQ ID NO: 56213 - DNA, 1723 bp, Homo sapiens
caaaaagcaaaaaagaaaacgaagcaaaacaaaaagcaataccagccgggcgtggtggtgcacgcctgtaatcccagctatccgggaggttgaggcaggaggatcgcttgggccctggaagtcgaggcttcagtgagccatgatcgcgccactgcactccagccctgggcgacagagcgagaccttgtctccaaaaacaaacaaaaccacgcccacacactaacaacaacaacaaaaccaaaaaaaaacccaaacaataccaagtgtgtaccatgacgagaaaaggaataggttgtttgtaaaataaatgttaaagataagtaactattacccatttctccaaccagtatacttgactttgagtgtttgttccagagttgaggggatggagagggatgtgtatgtgtgtagatgccctccatgcgctgtgttgaaaacgcgcgggtgactgcaggaaaccacagagcacagctcgggcctctactgatcgggaaacgtcggaagacagaaaaatgggcaatcataaaacccacggcaaccatgaagacacgcactctccccctagcaatcccaccccggaattgaggacacagggtccccgcgctcagcccttggtgccagcacttcttggacacctcaaccccctcagctaaacctgagatccaagcgctccggattccaaacgtttcctcgagcaggtcctctctagccggccgcttatctatggtttctgctatagggcgctctagcctgcgccaaggggtagtgagaccgcgcggcaacagcttgcggctgcggggagctcccgtgggcgctccgctggctgtgcaggcggccatggattccttgcggaaaatgctgatctcagtcgcaatgctgggcgcaggggctggcgtgggctacgcgctcctcgttatcgtgaccccgggagagcggcggaagcaggaaatgctaaaggtagaagcaactggtagtcccgaggaagggtgggcgggtggagagccccggactggagctcctgcgaactccccttcctgccctcaggagatgccactgcaggacccaaggagcagggaggaggcggccaggacccagcagctattgctggccactctgcaggaggcagcgaccacgcaggagaacgtggcctggaggaagaactggatggttggcggcgaaggcggcgccggcgggaggtcaccgtgagaccggacttgcctccgtgggcgccggaccttggcttgggcgcaggaatccgaggcagcctttctccttcgtgggcccagcggagagtccggaccgagataccatgccaggactctccggggtcctgtgagctgccgtcgggtgagcacgtttcccccaaaccctggactgactgctttaaggtccgcaaggcgggccagggccgagacgcgagtcggatgtggtgaactgaaagaaccaataaaatcatgttcctccacccagaatgagccctgcagtcgacacctaccaatgcttagagacgcgtggtcggtgctgggggcgcggcctggagctgctgcctgtcccaccccaccagaagaggctgatcccgataggtatctgaccacattttttttttttttttttttttgagacggagtcaatgtcacccaggctggagtgcagtggcacgatctcggctcactgcaacctccgcccctgggttccagcaattctcctgcctcagcttcccgag

SEQ ID NO: 56214 - DNA, 1491 bp, Homo sapiens
gattaaaggaaaagaaaatgccaagaaagaggaaatgtggaaaggtcaaggttctttgaccagacgtgtactggggagagatggaagacgaccctcagacacgtgagattgttgttactgtacctcttagtttgttcctgtctttcctcttcactcaaagcgggtttgccttctccggcagcagaaccagatcctacaaacaaacaatcggtattattatcccttcagattctcctcggaccctcctgaataatcacaccgtggaccctcagtcaggaccttcaaggccgccttgctctgaggaagtgggctcccgtcccaggatatgtccaaggggagtctctaaaggctcgtccacatcggggtcgtcttcgtgctccatcagcctggcagggaaagtgggcggggaggttagctttgaggctgcccctcccgccagcccccaattctccgccacccgggacgagcgcttaccagtccatcgcagcctcgatgccctggttccctgtgagggccagagccttctccctgggggcagaaacaccatgaatagcgcccacgagccatggtgacggtcaggctggggcaaaggccgagacaggtccgcgaccccccacacccgcaggccggggttggggaactcccttacgcgcgtcccctggggaagcccatctcgatgagactctcaagagccgtcagctccgccatggcgccgacaccgcggcttccgcggggacctggtgtgtgacgagaaggagggcgggaagggtcagcgcgaggcaacccgccctcgacacccgccgacgggcgctcgctctctcacccggctctatagcagccgggaacaccgacgagaagaaagccgaggggaagcggaagtgccggatctgtttgggtcacgtgggggcggatgtcgacgggtgccgctgagaaccataaaacttctggccctgctgccaggactttccgtgggtgggaacagggaggcaacccaccaagccaaggcgccaggctgctgtggggaagaaagctggtgcggctctgaaacccgtgggcggaatgaagccagttcccggaacttcatcctgcctcaccctccttagaaattagaaggaatatggtcccttagcgcaatgctttgggaagttctttggcaatgtttgccaggagcagaagaaatgtcttgctctttggcccactcattctccttagggaattgagccatcctctgcctgactgccaaagggatttttgcaaaacacaatcatgtagtcctgtcttcacctccctgcttaaaaatccgtgacacttccaccatctaggacaacttacttttttttttattttttatttttgagatggagtttcactcttgttgcccagactggagtgcaatagtgcagtggcgcgatctctgctcactgcagcctccgcttcccgggtcaagcatttctcctgcctcagcctcccggatagctgagataacaggcg

SEQ ID NO: 56215 - DNA, 1946 bp, Homo sapiens
tgtcccaggtgtccaaggcagcagcagacctgatgacttactgtgatgcccacgcctgtgaggatcccctcatcacccctgtgcccacttcggagaaccccttccgggagaagaagttcttctgtgctctcctctgagctcccctgtcccttctcacaactcctcccttttccctctcctgggcccttccttaggtcagtaattgttgtgagccccttaggctccttgcatcccatccctaacccttgcctgaccatgtgaggttatctgaagcacaaggcccaccctcacctatctgtcgaccccatttcctaccacctttgtggccgaccccaagcaccccagagatatgaggcaccctttgctccacccacagcagggccccgtcagactctgccagcgcgtcctgcccgcttccctcggtgacctgctcagacaatggagagggatgggccaggttcttgctctcagtctcacctggagctactgggagggtaaagccatttgaagaataaagtcatccagagcctcaggacagctcctgtgttagaattcttggggggagaggatcatcaagcaatagatctgccatacccagggaaaagggccaatcaatgcaggctagacatcgtcaaggatcggagatcagaggggtcgggggatggcgggcgcgagagagcgtccacagtgtaagaattaagtacaaaagacgctcaagaggctgcgaagagcaaacacacacacacaaacgtgcaacgaagccaagttaaaaggtaaacaggccgaagaggggggatttaggggagggtgcgggagtgcagtcgtacagcagaggaactcttaggagggtaggggcggagcttggcttcagttaccgcgactggagccgattttatacctaagatggctgcgcccacagccactcccattccaagatggccgtaccaacatggcagcccccacgtcacggagtttaccgtacagggcttctcttaaaatggcggcccccaggcaaccggcgttctcaatatggtcccttccgccctcttctggtctcaaaatggctgcccctgccctaaccaagccggggcccgcgccctgcaaccccgaaatctggatttcggtgtcctcccgattgagtcgaaggcacacgggcggccataacgaagaatcactaaacaaggggaccccaggaagtacagcgtggccgacgctggtcgcgtggatcttgcgagggaatctaggtttctacattttgccaagaaaggagaggctccctttggagcggaaatattagcggcagggggttaacccccgaccctgtccgtctcggtgcaccgctcctcagttgcttcctggtcttcccaggagctggataagcctgaagttgctcagtttgggtttcctagtagaactggggcttgtttttgctttcattttcccctcaggccgattcagccacagcagccagaaagcagtggccgcacccctaatgtgccttgcaaaagtccagcatgctgtctgggcagggaccaaacttaaggcttaacatgtcatggtcatctccaggactcaaacatggcggaggtttacgaacaccagaatgcctcctagaatcttttccttccaagggtgcacagaggcgagatgggaccagggacaagacaaagaacgtaacaatcccagtacgtgtgctcctgctagaggtcccctaaactcagggacgcatcctccccaggaaaagcctaggctggctcctgttttgtgcctggatatacttcgggaagggaggctgctttgaaatagtagggacagctcattacctccagcttccaggtatctttgcacagaagacagcaaagtggataaaggaaaccaaaggaagaaaggttgttatcaccagcaactgaacttagcctcctaaggatatcttcatgaattccagg

SEQ ID NO: 56216 - DNA, 2508 bp, Homo sapiens
tagaatagggagggaacggcagccaccatgcaagaggagagtcctccttggttggagcccatgcgacctgagaaagaggcattaaaaaatgaataaataacccagtgacaccctccgccccagtcagtgcagccacaggagatagggtgaattcaatccaaatggttatttattctaaaactggaagctactttgcctacattttcgccagaatggtgtaatgagaacaggggaggaaaaagttacagatgtaaacaatgacacagttacattttttttttaaatggtaaaacccctttttactggccacttccaagaatgctttacaggttgtgcaaaaacatttacaggctccatgtggtgtttttctcacaagctttcctgtctacaactacaacagacgtctgataaaacactaaacaagtcttctaaggaaaacaaggctagggattcctctggttaccataatccacattttcccccttaacatagtttttcataataaaaagacagaaacaaaacccggacatctactgttgttgcaaatgatctcttggactaaaccaacaaggatgtggcagtttcactttccacccacctagaaaaacagttttgtaaaaaagattactttctagtgtcaaatatcaacagcgagtacctcccctaacccctgctggaaaaaaactcaacttgatttagtttagtccccttgcccctaagggccctagcatccccatccatgtcacagactacaagaaagatgctatttgcaggactaaacatctgaaaaggggtggcagccactgcctcaggaaattcaattttctattataacataatcttgccctaagggaatttctttgggctccagtttttacctccttgccttgacattataagcaaagctttctcaaactcccttaataataatacaaagttaatgtgttacagaaaaattcatgcaatcactccactgccacacagaaatccatttgaggacaccgcagggaagcaggtgccaagagaaaggacatgactatgagtaagcaaacttatctcctaccagccccattccagccttggggtcagaggtatttgggcggaagggtgtgtcatgacagacaaggacactagaggccagaataagggtctgtacacctgaacaagggctgcagggcagtaacagtgggaggaggagaggaagaccaaatcagcccacaattttaaacagagaactgcccaggtgaggaaatggaagtgaagcattttctagtggcacagattttctcactaggaactgctgcagtatgtggtgtctgctgagtaagctcttggctgacagtgctgagcaggaggatgaatgaaaactgaagctagacattgaaagagcattccatatcccacccatattcttgaacccagcaacctacagctgtctatcaagaactgggagggtattggtaaagtcacaaatgaaactatcccaactgaaggctcctggctagaggcctctctggggacacacagggaaagcgccccaaaaggaattttgtttctagaagtcgggaaggggtgctccctttcacacgcacatttacacacgttcacactcacactcttcccaaggttcagcagccccactgagctgcctcccacccccccccaccaccctcccctcttctattcattctctacctgtgtatcaaaaaaaccagcagggcacgagccctccacactgtagaaaatagttgctagttgctattctcagcacctgggcctgtgagcccacaccacaggattcacctatatacatatcccgctgcagtgaaaagaatcctgctgtgttttcgtgtgagctgaaaccctgagaaacgttccttctctcgcactgtaagaggacagacactctaacagggatgatttcagagacctcccacctctctcaaccttggaagacagagactagagactggcaaatcacaatctttaggctgagggctgcaatcccattctccccaagattttacaggaattaatcaatgggtctatagaaggggcaggctattctgctctgccatcaaggacagtccccaggctttcttggcctgggaatcctgtaaaatagaaccacccactggcagtctccatgcctcagccaaacagcacaaaggcacaggaaaatggagagttgggacactgtaagcctcccagcccaccagaccacatatcccaaaagggaaaggtcggtaaagaaaatacaaacggttagttggtgcaagtgattgataagagccaatcgtttattttcactgtcccagtcacaagctctccctctgtccccactcctgcctgctcctacctgctgtggagagcaccctcgcgctgcctccccaccctccccacaccacctcatcactctcctttacttggctgccagtccagctgcctcagaatgtcagaagggtgccattttcagttcttttcctgtctgactgtagggtatagaac

SEQ ID NO: 56217 - DNA, 1594 bp, Homo sapiens
tctacaacacacctcttccacaaggttactcaacggacccaacagcacctcagtcattaccattcaggaaccgagggacctgaaacgtaaaagactagcaccaggtgttcagcaaatctacaaatatgcctatccacggactcagtgggacaattaaaatttaatcataatccaagcaagataaaaaccctagccaagtaacgttaactaactctaaatgaactagattaagatttttctcttcactggttaactattaaactcgacactgttacactagaggctctcccttacagctcaaagaggagcaaggttggattttcagattctctgtggctcaagctctggtaacatgcttttaatggaacggactttgacggacttcgatttttgcttaacatttttacggcgaaaaagttaggtcaggtagcccaaagacctgaccctctaactgtgggcctagttctccgtgtaatccccaattgcttagcactttctcagctaagaaaaatataacaagcaccgtgggagactgttccacaggtagctcacaagtagttcgcatgcaaaatcactcactgccatccactatcaccaaggaaccaagttaggcaggaaccttcctcctgcaaagagtagggccacgagaggcggcctaacccctcagaaaggtgggtagagaatgaaaggagttccatcaaatggcactttgaggcaagcgagaacaaggactcggaccctgcggtgcagggcggggtgctagatcaggggcgcagccggcaggttggagccgggctcggctgccagctcctcaccctgttcctcggcggccttgtcacccggcacctcggatcccggcgtctcgtccccgctccgctcctcgggttcgtcttcctccctcttgccgaggccctgctcttcgccaccatttaccccgcctgacccggccgtggcctccgccggcttctcggaagcatctggctcggccgcggcctccatggctgccgcctccgggggctccggcggcggctgcgcggcctgacccaaggcttgagcagggggtggctcctcgtcctcgtcctcaagcagcgcctcctcgtcctcctcctcctcctcttcgtcctcctcctcgtccccgcccgggccgccgcccgacgcggccacaggccgaggctccgccttgcaggccccgccgggcccggccccgccgccgccggcctcgtcctcgagcatctcggcgtccagcgcctcctgcagccgctgcgccagatccaccttgaggccgcgcgagtccaggccccgccgctgcagctccgaccgcagctcggtcactttcagccgcttcacctccatcgccgccgccgcctcctccgcctcccgccgcctcctcccctgcgaaccgtcgaccgagtccgaccgcgcaggcgccgccgccgccgcccgcctccgcctcacgcgccagcactgagcccgcgcgagcgagcgcacgcacgcaggagcggaggccgcgcacggtcccgctgcgcagtgtttgcttctccttcgtctcccctccccctttcggctcacggagcccaaaacaacgcagcaggga

SEQ ID NO: 56218 - DNA, 1631 bp, Homo sapiens
ggctccccagaacgaagaaatactgtaatccgggccctcctttttcctcaacgcctcaacttctacccagcaacagaggcccttgaacccgccctttttctcttattggacaacttgaatcgtcatttgccgttccgattggtcatccgtgatcgtccggatttttccaattggcgaagctgccaggggaattttttttttttttttttcccaggttggtccgctgaggaggcggggtcgtttctgcgggattatttttccggagcctcttctgattgggtggtgtggcgcaatgcgcgcgaccctcaagataccaaactgtacgcatctctgaccctttcctctccttgctcctgctggtaaaccgaagcccaggagacttccaggtttgggcatctgcagagggcgaggaactggtcacggcgccgggtgggcttgcagctgtgacgcttatgtggacacctcagtgtcgctggtggttcacctcggcttcccagtttatttattgacgtcaacaaataaatgttgaataaggaagaagagttagaattgcttgaagccctctggagttttagcactagtcccgcccactcccttctacttccaggtcgggggggggcgggtccaatagaaaggcggaagccagtgtcccaggcgttctcacgcccgcaacaattcctgagtagggccttgcttgagttcttcggaaagtctcatccacccccacatcgcctctttaggaagtcacttaatgttgggcttcattattcccacatccctttccttactacttgcctgcacttcttgagaaaaagactgcagaaaggagaggtggggctttcagtagaaacaagcaaaccgcaggtccctgtggggggactctccaggaagaagggtaatttcctgcctccttaaattggctgctactgtcagttattttgctcccaaccccagagcttcacttgctccttcacttcccagttccgcaagaaccgtgggcgacagttatggagaagcgtctgcaggaggctcagctgtacaaggaggaagggaaccagcgctaccgggaagggaagtaccgagatgctgtgagtaggtaccatcgagctctgcttcagctgcggggtctggatccgagtctgccctctccgttacctaatctcggacctcagggcccggccctcacgcctgaacaagaaaacatattgcataccacccagacagactgctataacaatctagctggtaagaacggggctaaagggtggctagagagcattaagacaggaacatgaacatctgtgaacattgggggaaaaaacgctgacttttttttttttttactgtcatccatttattctgccatgaattggaataacctgtcaatctgtgcggctgtaattaagttgccatagagcagggcttctcagacttcacctggagagtctgttaaaacacaacctcctcggccccatccccagagattcggatgggtctgacgtggggcctatcagtttgcatttctttatttttttattttattttattttattttattttattttatttttttttgagatggagtctcgctctgtctcccaggctggagtgcactggcgcggtctgggctc

SEQ ID NO: 56219 - DNA, 1000 bp, Homo sapiens
ctgcactccagcctgggcaacagagggagactccgcctcaaaaaaaaaagttgtcgtttgatggctggggggcgggggtgaggggcggggcttagtggttctcgcccacgacggcgaggcccaatcagacccgcggagctggtggagttccgccctcgcggaggaggtggtgttccgccctcctagtcgcagcaagcgcggaactggggttgcggcgtctaagtgtttccggtggattcccagggactgtcggaggtgtggactctgcctgcctacctggtctgggaagatgttctaccatgtgagcagggctcagggtggcggcaagggctgggtggaaaggaagagcaaggccaggcgccggcgcgagactccccttgtcgtccaataacctgccagcgcctggcctggtcgccatcccacttttctccgcagatctccctagagcacgaaatcctgctgcacccgcgctacttcggccccaacttgctcaacacggtgaagcagaagctcttcaccgaggtggaggggacctgcacagggaagtgagtgtcgagctcaccgcaccgccagatcgttcgatgcgcacacggggcgctatacctgcaacccctccccaactcctactcgtcctgccacccactctggggacccctctcctctctcaggcagccagttgcttcctgctttgggttcccagggcgccctctgcaatgctggacaataagacttccttctctcagctgagatgggtcattcattgactcctcaaacattttaaaaacccttggtgtgtgccaggacccgtgttgggctcagaacaaggtagaatgggaacaagatagaatgaggacagcccctgtggagctcacagtgtaatcattgttcctgtgtctgctctccctctgtcattctgctggttttctcttatcccctgtgcccagggaccacacaccatgggcctctatatatcttctgaatgaatgaccagaaaaagcag

SEQ ID NO: 56220 - DNA, 1463 bp, Homo sapiens
ataccatcctttactcactaagcccactgcttatcaattaagaactgcccaagtagctgctattgcagtgggagttggagaaagagagctgtcagtgtgcgtgtccaacggtcatgcaaggcgaggtaggccagggcttgtatttggttcacaggcgtggggagaatgcgaagtaggtgcagaaagagcagaaccctggagtccggagcttgcacgggatgttcggccgggtcagaagtcccttctgcctgccgagaacacctaccgagagccccatctatcccttcaggaaggggaagtggcatgtgatgttggggaggtaggccgggcaggaaaactaagccagacaccaaaatctaaagctttgctgcagtcgcgaaaatgcgggtgctcagaaactcgcgagcaaacaagacaaagaaaatcaagacgctgtctttgagactgtttatttcctcgttactattgtggtggtaaaaaaaataaaatatgcttattaaacgtgtgttaaaacaatacacacctactcgcaaacgtagcaagagaggttgctttaagaagcgggaatcttcagcgtcacgtgaccgccggtctctacagtctgttcacactggccaatcaagagccaggaagcctcctggagggccggaaactttccaaggcgcccgccgactggctgtattggggagggcggggccggggccccgggagagggaatgagtgtgagctcgtgagtgggcgccgccgccaccgcccccgccgccgtcgtctcggtagcagccttcgccacgccggggtcttcaggtgagcaggccttgctctggtccaaggactccccattcccgacgccgactgcttactcaccagtcttggagcccgcaccgcgagggcccgcccccttggctgaccacgtgacccaagttcagtgacccctgacctcctccccccgcgcaccccctccccgatctgggctgggctaggccgggtgggaggatgcgcgttgccgaggcccggcccgcggaggtcagttcccacgcctcctctccagcgtgactagtggctgaggatgcggaggagaggaggctgaggagcgggagactttggtcacagtctagatttcgtgtacggtcatataatagggaaactccctccgtgcctttcgcgctggtggactaaatgctcccattttacagatagggaaactgcagcttcacaacgatctattggcgggtctagggtcaccaaggggtgggtctccaatccatgtctttggggtgggatccaggccttgttccccatacagctggcggctcctgaatgcggtatagagtaaagattaggagcaaggggttgagtccttgctccccctccctacttactcagtgcttacttcatgatcttggagaagtcatggaacatttagcctctgaggtttgatttccttgcctgtgaaatagacgaaa

SEQ ID NO: 56221 - DNA, 1980 bp, Homo sapiens
tccccttccagcctcccttccctgcatgagcttagcagccaagcaggcttactttggaatatttgatgggcccaggttcctcgaattttttgcctatcttagtccttggctcttacaggtggcggtagagcgactgctgaagatgaaggcccaggcagcagagcccaacaggggtggcccaggtggcagggggtgccggcgcctggacgacctgccatgggacagccttctctttcaagagtcgtcctccgggggcggtgcagaacccagctttgggtccggcctcccgctgccgccagggggcgcggggccggaggacccttctctttcggtgaccctggccgacatctaccgggagctctacgccttcttcggtgacagcttggccacacgctttggcaccggccagcctgcacccacggctccgcggccgcccggggacaagaaggagccggcggcagccccggactcggtgcggaagatgccgcagctgacggcaagcgccatagtcagcccgcacggcgacgagagcccccggggcagcggcggaggcggccccgcgtcggcctctgggcccgccgcctctgagagcaggcccttgccgcgcgtgcatcgggcgcgcggggcaccccggcagcagggccccgggaccggcacccgcgacgttttccagaagagccgtttcgccccgcgcggcgccccgcactttcgtttcatcatagccgggcggcaggctgggaggcgctgccgcgggcgccttttccagactgccttccccgcgccgtacgggcctagcccggcctcgcgctacgtgcagaaactgcccatgatcggccgtaccagccgccccgcccgccggtgggcgctctcggactactcgctgtacttgccgctctgagtcagtggccccttcgttccttgtaaataaatcccgcccccggaaatgacgtctccaccttcgtgggtcgcgccggataaggtgggctttgggcggggtgctgctgcagcggcgcttcctggtggtcagggcgccatggcgctgtcctggctgcagcgcgtcgagcttgcgctctttgctgccgccttcctgtgcggggccgtggcggccgcggcgatgactcggacccaggtgcggctgcggggcggggtcaggtaggcgggggagctggccggtctggacatggcgaggccactttcgctttccgaccgggcttgctgctgctcggagccggtggacctggtgaggcacggctggcgccggcctgtacctgaaatgcagcgaggctaatcgcgctttgtggctcctcctggccaggtcatacttcgaagttgtcccctcgccaaagggacgggtcagtagcgtcttaaagcactaggtggagtcgggtttcgtggctcctgctgcacagccttactgtggttccgaaacagaagtcagtgcagaacctgcgtccatccgttaaatcagaagccatttgtgctgagctttgtcgagaaataaagcatagtgtagtggagatgatcaagctgccacatgattgtagcacagtgtgttaaatgacaaaatgagagatggagaaaacgctgacgtaaaggtagaagccaataatttacatcgtttaccccagccaggtaatctggttaataaacatgggttcatttaatgcctataaagtaggcactagtgtgcctattttacaccatgagaaaacctcagagatccgccgggcgcggtgactcacgcctgtaatcccagcactttgggaggctgaggcaggcggatcacttgaggtcaggagttcgagaccagcctggccaacatggcaaaactctgtctctactaaaaatacaaaaattagccgggtgtggtggctcatgcctgtaatcccagctacttcggaggctgaggcaggagaatcgcttgaacctgggaggcggaggttgcagtgagtcgagatcgtgccattgcactccagcctg

SEQ ID NO: 56222 - DNA, 1300 bp, Homo sapiens
ttttcactgggcatctaagtaccgacctttccagtgccctctgaataagaaatttgtgggatgaaagtagtatttactgagcgcttttttttttgagactgagtctcactctgccggccaggctggagtgcagtactgagctcctgttatacccagtaatcttgttattcctcccaacaaccttaatagatgtccgtttccattttaatgggaagatggagagctttaaggaccttgctcaaggtcgcagagtgaagggcagccctcagcctaggctatgacagggcacggcgctcggagacatcactgtttcccaatttttttttttgagaggggagtctcgctcggtcgcttaggctggagtgcagtggcgtcatctcggctcactgcaacctccgcctcccaggttcaattgattctcctgcctcagcctcccgagtagctgggactacaggcgcttgctaccacgcccagctaattttttgtatttttagtagacacagggtttgacggtgttagccaggatggtctggatgtcctgacctagtgatccgcccgcctccggcctcccagcatttgagccgccgcgcccggccagtgtttcacatttctgtggggtaaagcccgcccgccactctcggatagggagtccctgactctccctgcctgtatagggaaggtcgtgtcccgccaccccacgttgtcacagtgggaagccagcccacgtcttaccgatggcgccgcagccgacggccagaccgtagcgccagagcgcggagcgcaggtcgaaggggccacgatttgggacctccgcatccagaggctgcaccggaaccgggggccgggacacggctgccacagccatggaagcccagaagacgccctggcccgcgcagaacagcccgaggatggtgaagaagcggccccgatcatgctcaaagagcagcacatcccgttgcagcgtcgtgccttgcaggggccggcaggtgagcaggggccgcagcacggctagcagccccgtgggccatcgcctccaaggcgccgccatggccagccgacttccggggtggggcttcctgccgcagagccgccttccgccctccctgggcgcccccgctagagggcccgcccccctcgctcagggctgggaggagacaaccaatccagcacgcagaacacgaaatacaacatcactctttatattaaaaagtgcagaacacgaaatacaacatcactctttatattaaaaagtaaggaggtcctggggttaagtacacaaagcacctaagtccttcgggta

SEQ ID NO: 56223 - DNA, 1448 bp, Homo sapiens
cttaaccagggaccctggaatgctctccaggaagatgaccttctgattcatgctgtgtaggactggcgtcttaaaaaaggtccctaactcccaaaagaggtctgcctaatacccagcactctgtaaacaatgaatctcaacaaatgaccctaggaaaaaagaacatagaaggcgcagctaacattcactgagaactttctccagtgccggccactatgcttcaggcacttgataggaatgatctcatttcccctccccacacacactcttaagaaatgctgttgttattccacattaagggggtggaaaacgagagttttaaattcacggtttcaacctccaccacgcactcctaacttactacaaagaactaacacccagtgtagtgttcagactagaatatccagttgatgtgtaagtctcgaatattaagccaaagcccaggcccgagagttcaagaccgactggacgcagtaaaaaatagggcatcagggcagcccacgagcagggcactcactcacattaaaggaagagtcaggccgccaaacctaactgacaggcatcaaccacccacaaagttcaaaggaatcccgtcaccctacccccgagccatccgctccgagccgcaggtcccccaacaccaggatgccagcaggaatccaggagtcaacaactcgggtgtccacctcgagtgcccggccccccgcgcgccgctccccgcggacgccgggcccctagcggcctcacgccccgggggctgaggcctaggccggcgccgcccacccgcgccccagatagccagttcccgacccgaagaccagcacttaccgctgtacgacttcccctcgtccgccatgccacagcgaagatcaagggcgggctcaggcgctggccgctacgccggcaaacaacctaactcccaagcgctcaggaccgaagtgtccctacgccgggcgccaccgcatttatacagcaaagcacgtcgcgcgccgctgacgtcccaggctgtgggcggtgccgccgcccggagaaagcgcggccccctgcgcgtgcgcacacttaaggccgtcgttcgaggggcggggcctggccctccacgccccgcccaagacctgaacttgcggaaccccggctggcagccagcatgtccccgcaccttttcatctgtccgctgacgctgccctggcagcttcagagttagtgctagagcacagtgctgccgccgcagcccagaactcagtgaggaagggggccgcacaaagggcttcagaggaatggagaccgcgcctccaggtgggagtgatggctcagacccctaccggaatctagccagtgtttcagctcggctccttgtctatacctcgctttcttcgcctataagatggattaacaaatcacgaagttgagaattagaatgtgagctcgaacgttgactaattaagggcttt

SEQ ID NO: 56224 - DNA, 2903 bp, Homo sapiens
gactgcaagtgagctatcatcacaccactacactccagcctgttgacagagttgaaaaacagatctcaaaacaaaacaaaaacaacaaattacttatctagaaaatgtccttaatcttacagagataaaaactaatatgtaactagattaactaattttctcatggttacagagcaaacttatggtagaagtatattggaaaattcaaggtgcatgtttctcagctaaaggctcttcctagaacttgttccttattcacaccaattatattgcagccaagtactctctgaagtactccctccagaatagcaatcctgccctccaaaggattcctcacaaaaaaaagtctaagtccttgcccctagttagccagccgacctcttctctgttgcttatagcagaccctacaggccccatccaagcctatcagttccatcaggtaccccccaaaattacttcggttaacagtggtggagcacagtccttcctagatttgagtaaggctcactcctcgccttttccactccaggtccttacctgacgggtctgcagcgacttgcaggcagacagaaactcctgggtccgatcccggcaggacatggtgtcgggagggggagggacgagggtcactggggggggcagaggggcgatgtcgctgctgctactgccagcagttgcaggggacaggacctgtgtctttgagagacccaggtagacaccctgatccgtgttcttagacccgtagcgtttccgcgggatcattgagacgcataacctcggactgttgtggaggggagagtgtcattccccaggcaacttctttacccaaactcccccgccccaccccaatcaacaaatccccgagccccttctgcacttctcgtggactttcgcgcccaggacgctcgcaaatcctggggcggaccagcagcggaaagggccccgcttttcccctgtcccaagtcgaacccgcttcagactcttcttccaacttggctctggcggccagagcgcgggccggggaccctgaagcagagacagggccagagccaaccccgtggtcctgagactccggcccggcccgtgtaactgccccgggccctaacccagccctttcgtttccgcggtttccttcggcccctccgggagggccagtgacggacctccaaagactgacacacttcggtgggcggagggggaaaacctctgggtgtttatttgaaacaggaagtcccaccccccgcccaaggtccgccttctggaagacttcaaccactcattagctaaggccgacgtctctctcaacagaggctttcctgattggacggcaaggaattcgctcacccggagccgggccggcaggacttgcccgctcgcccctgattcccttccccccgccagtcgtcgcccccgtaaaaccactgccccagagctgacacggcggccagatcccctcttaaagcgaatcttacctcccctctgccgcctgccgccgccgccacttccaatctcaccggccgtcactgcctcctccccgagcactgaagccgccgaaacccgaccaaagactggaagcggccacgtcacctacacgtaaccccacccccagtgacgagggggcggtcccacgcgtttcaagcccagcgacccgaaagacacgccccacacccaaacgcaagagcgatcccgccctcccattggctaaggcgccaccgtgaccccgccccagagtactacagcaggcgctcagggggctgggcccgcctccgggaaggagccttaaagaaccagctgcccggtggtgtccgcgcccagtcccccagagtggtcgtgcaggtatacgttagaaattttattctctggaggttggggcggactgagagcaggtctggggtcatcccttctccggctcctcctggttgccttctcggatcggactctcctgcttccgaatctggtctggttgcctcttgcttggccgcgaggagccccgacgaccgaacgtggatagtcgccgccacagcacggtaatcagaaggctttcgttcgacttgtgattcggatggtccggggagttcaagtcgatatcttcggcgcctgaggggacgacgaggcctctgagctcacccctaccctcgggaagccccctctcacactccctgggccctctttgtgtgtctgtggtctcatcttccctgccgtcctcagactcttcctccttggactgctcatcagacatctcaaagtccttgtcttggcagcagcccatggccccgcgtggccctggactccgtgccacccacgccagcctgcctgcctccaggcccggcttttgtgacatcagatatcccgtcgccccagctcaggcagcccccaccccaagctacccctcattcctttctcccatcacaaaaggctcagggtcatggtgggtgttcagcagtttatttacaaagtgggcacaggggcgtcaggggctggtggacccaggccgcttcttctttctccgtctcgtttggagagctccttggggctgctccaaacccgagagcttccgcttggcagctgcctccaaggatgcccaaagttcatctgtctctgtgtcttctaggggcaccttgttgggttcttgaggctcttggggctcatcctggtgagtgggaagaaagcttaggagtcaggggggccgggcacggtggctcccacctgtaatctcagcactttgggagaccaaggcaggaggattgcttgagcccaggacttagcgaccagactgggcaacataaggagaccccatctccacaaaaagaagtttaaaaaaaaaaaaaaaaaaaaaaaaaaagaaaagtagtcaggggcacagggacaaacccacagggaaggagaccctggctgagaaagaa

SEQ ID NO: 56225 - DNA, 4362 bp, Homo sapiens
gaggttgcagtgagccgagatcgcgccactgcactccagcctgggcaacaagagcgaaaactccgtctccaaaaaaaaaaaaaacaaaaaacaaacacacacacacacaaaactattaaatgacttgcccatggttacttagaggattataatggagtcaggtgaaaaaccttagaggatgagaactttttgaaggcagaaattttaccggcagcccctgtacttctcccagtgcctggaattcagtaggtgttcaataaatgtgtgttacaggtatgaactacataaggcagaaacccaggtccctgtcacccattcaaagccgtgtcactaagagtttgcctgtcgccatcattccagtatcctcagggagcatcaacgctctcccttcggccctgagtttagcgaggggattggtcttacccgtcggcctgggcgaggccacggaacatgccctccccgcccgggcagtgtctctgaccctggaatatgccatcctcggtgctgaagtgcttcaccgtcctgtccgcgcagcccaccagcatctgcggcaaagaagggcaagatggcgaggagagcgaggctgctgcgccccaggcccccagctccggcccgaccaggggccactcacctgggtctcgccgccggtgccccaacacagggcgctcactgcctcctcgcgccgcggctgtcctccggccgtgaagttcgccgcctgttttcgctgaagatttacccctgagagacgaaggcgtcagtcacgccaggggcgcgagtgcacccctgcacttcccgacgcccgagcctgccacccacctttcaagatcccagtctcggtgccgacccacacatggttccagcgtgcagcagcagccgccatgacaaagcctggaggcagacagttcacacttccggcgcagcgtgtgcgtcaccagcgggcgtcgagtccgatgcagcgcagtgtagttgctggaagtttgaagagccgaaacagtaaagcttccatgcttgttttgctttacgaaaatgaaaccaggaggtgcttgtttatgtagatcggaagaatacattgatcattttgcacttgggggtgaaaagcacctttcctggactgcgtggccggatcaagccagccctagtctgtctcccggctccattatgtaatatgtgttctggactgttagacaagaaacaacaaacgatttaagaaacgatttaagaaacactttagaaacgattcaaatcattaatgatgtgtggggcttcgttctggaatataagtcacgaaagaaagatgggaaaaggaaaccgacgattttttttttcttttgagagaacttcgcccttgttgcccaggctggagtgcaatggcgcgatctcctctcacctcaacctccgcctcccgggttcaagcgattcttctgcctcagcctcccaagtagctgggattacagctggtattactaaaccaccgcgcccggcctcgtttactcttcaagaggcggacagcgaggcgcggtggctcacgcctgtaatcccagcactttgggaggccgaggcgggcggatcatgaggtcaggagatcgagaccatcttggctaacacggtgaatccccgtctctactaaacatacaaaaacaaaactagccgggcgtggtggcgggcgcctgtagtcccagctactccggaggctgaggcaggagaatggcgtgaacccgggaggaggagcttgcagtgagccgagattgcgccactgcactccagcctgggcgtcagagactccgtctcaaaaaaaaaaaacaaaaacaactaaaagtactctgtgctatgctacatgagaaacgcagagaaagtcatcgctcagtagaaatacagtaatagcgcatgcgtaaataggagagggaagtcgctactttacctagagattaacacagaaaagcaacaaattaccagtttacaagtaaaccctttatctaacgcgaagatttatttattttttgagatggaatcttgctctgtctctcaggctagagcgcccgccaccaggcctgattcacttttcttttggttttttagtgaagacgggatttttcacaccatgttagtcaggctggaattacccaatccgcccgccccaacctcccgaagtgctaggatttcacgcttgaaaccccgagcgcgacctaggtttaacacatcaaacgcgaaaccaggccgggcgcggtggctcacgcctgtaatcccaccactttgggaggccgaggcgggcggatcacgagctcaggagatcgagaccatcctggttaacacgttgtgaaaccctgtctccactaaaaatacaaaacaggccgggcgcggtggctcacgcctgtattcccagcactttgggaggctgaagcgggcggatcacaaggtcaagagatggagaccaccctggccaacatggtgaaaccccgtctctattaaaagtataaaaattcgctgggcgtggtggcgggcgcctgtagtcccagccactcgggaggctgatgcaggagaatcgcatgaacccgggaggcggatgttgcagtgagctgagatcatgccattgcactctagcctgggcgacagagcaagacgacgtctcaaaaaaaataaataagaaataaaaatggaaaacattagccgggggtggtggcaagcgctcaatagttccaactaccccagaggctgaagtatgaagattgctgaagaccacatggagatactacgctccgtgctcagttataaaacaaaaccttctctcaacaagacactcaaacacgcgtcattcaacacactagcgataaaaacacctaatccaactcaaacaacaagaacataactatttagcttgtaccctaactgatcgaaatcttccattaaacaacggttgttctctccccgaagggagagtgcaccgttcctggaagtactgcaataccaggtcgatgcgtggagtggacggagcaagctcctattccatctcctatttccaaaaatccatttaatatattgtcctcggatagaggacgtatcagatattaaactgataagaacagatactacacttgatcttagccaaaaggccgagaagcgatacctttacttcggtcgcctcggcggccttatccttcccatcttccaaccagttatggtaactatccaggcactaaatgttaaattatctcccaatacattataattccgaaacacagttttcattattctttctttatagtagtggctatattttggaaacagccctatttaaacgtcctctacttcttccgccgcctgctccctgctcagtttgttttgcataaacccgcccctttcgcttttttaggatcctgggattggtccacacaccagtcgtgatttcaatgcccgcgtggcctccttttccccgattgtggcgttagtctcccatcctaggggtttttcggctttccagggggcggcgggacagtgctgcaggtggcggcgcccctctccgggacctttcttgggagaagccgcggcgcggtgtcaaagcacaggttttggagtccaaaaaaggaggttgggctccctgctctccagttcctgacttaatggcctgggcttggtatttaggctcttgtttcctccccatttaaacgggggaaatggtgacactcactctccggagtttgtgagaactgaggacataggggcgaggcacgacccgcaccttgcatttgtactgtccgccagcaaacatctggcccttcactgagagggaaagatgccctgagaaagccatttcagaggctcctgatcctcaaacccgggatcccgcggtgggagaaaggtgctgacgcctcagccccgatgtcctccgacccacgcactctttagagttactttcaggccgaccagcaacgcggcaaggcatcccacccggaagtccgaccgagaaaccacagggcctctcctcgaaggcagaggcagggtcgttagaggactggggcgaaggaggaggaggagagtgtaggtaaaattgaaatggagcgatttttttttaatcgatcaaagcaagctcgccagaatgaaagggattaatatgaggccctggctgagaagggacttaaggtcttgctttcttggaagctctattaatataaacgtggatcgttctgttggaaaccccttaacctgggttggaaatagaggcggtgtctttgcatcaaagcgtcttgcatggctgagatcctccaggcaggagtggggcgttaacattctcactgataaaatgtcaaccggcaaagcttctgataatctatgattttatgacactggtattaataaacaaaagaaatt

SEQ ID NO: 56226 - DNA, 2110 bp, Homo sapiens
caacagaggaaagcattttatgtacctaaaaatagtcattcaaagaccccttaagacctctctctcacttctcagtagtaagatgacatcacttgaaagttcagccatatgcttgtcattttgtgttcatcatggagtggttatctacaaggtctcctctgtaagagcataaaccatgtacacctacctggaacattactgtaacgctggctttgcataaagatgggtcttgtcccattccttcaccagtaagctcttgtgggctgaacatctgaaaaaataacacccttcactaacacctcagacaaatcaatagggccctgacatttgttgcgtacagtacagtgctactcagaattttctgttttctccactaatccatcagaaagagagagttcagttcgtaaaatcatccccgtagcaacttccacacactcaacgaaagagcagagattaagaaatggccgtaagaacttactgcaacaacagagctctcttcggttccaacgtgcgcgtaaatcctgcagacaggagcccaataagacattaggtcaactcagggcatttcgaaaacgctattttctgaacagacggctaagcaagaggcttgcagggcccatctcctcagagttatttatcctcacggagctcagtacaggtctgtgaaaaggtcctcatcataggaagggggacctacacggcccgccatcgccattttgtccttcacaaagccccactgctacttttaagcctcgaggccacgcacaagaccttatccgccagtcgccctggccaggcagctacaacacagaaggcatagtgcgtgctatgctatgttcgcacaatcgctcaaaagaaaataaaagaaaaagacaaagtacaaaagagtaacagctataaagaccacgaagccacttaccacgagcagtagaaaaatgagaacgaatctccccggggagacgattaaataccatgccgcagaggcccacgggatttgggggcggggctacggcgagcgcacgcgcatacgttgaccgcatgcgaccccggggagttgtgggtagagagttccagggaaggagggcgtagacaaagcgccacctgaacttgcggcgcgaaaaaggcgcgcatgcgtcctacgggagcgtgctggctcaccgaccgcattgcggcttggttttctcacccagtgcatgtggcaggagcggtgagatcactgcctcacggcgatcctggactgacggtcacgactgcctaccctctaaccctgttctgagctgccccttgcccacacaccccaaacctgtgtgcaggatccgcctccatggagctacagcctcctgaagcctcgatcgccgtcgtgtcgattccgcgccagttgcctggctcacattcggaggctggtgtccagggtctcagcgcgggggacgactcaggtactggatcccgggctaagctcgggaggaggtcccctttggtggggccatttcgggaaagtatgtcaggacgtaagtgcttcactgaagacaggatctgattttttcctaactggttccctatgtcctgccttctggtgcgttttctttagatcttggactactacgggccaacattagctaacatttatggagcaccgttttaagcacactatatgaatcgattaatccaccaaaatcccaagagctaggtaggatgacaacccccattttattgatggggaaccctaaagagctccggcggtgctgcctgctgcaactcctgcctgatcaatatggttgcagtcagctatagactgttttactgagaccggacaacattagttcagtcgtttgtggtaaacatctacgtgtacaagcacactttataaacatttttttctttctttttttttttttttgagacggagtttcgctcttgttgcccaggctggaatgcaatggcccgatctcagctcactgcattccacctcccgggttcaagcaattctcctgcctcagcctcctgagtagctgggattacaggcatgcgccactgtgaccggctaattttgtatttttagtagagacagggtttctccatgttggtcaggccggtcttgaactcctgacct

SEQ ID NO: 56227 - DNA, 3861 bp, Homo sapiens
tggagggaattctaggcttcttcaaagcctctgcagtaccagctgcctccaaggcctaacatagtgaagtgatagggagacaggaccttgggggagtttggggataactgtgggagttcctgcaaggtgggtaagagtctggccatggcatcttctggtctattccacaaaaaaggtggatgcctctgagacctagctctgttatgttcattacagccctatcagtctcttctggatgtctgattcctagctgccaaacatccaggtgctagcagctgggggtggggtaggataagaaggggggtgtctacctcaaccttcctgcccaaaccattcattttaaagtactgtgaagaaggctggattagtgttaaattcaataaagttaacaaagcaaagtattgtagtgagtacacaataaatagttgctgcatgaggaatttcttgaaatgaattcaagatgagtcttgaaaaacgagtgggagtaagccgtgcacggaagcagaggtctagcagaggtctagcgccaagtcccagaggcctgagagggcaagccttggtgggggaaaaggcagaagttgtgactggctgcctctgagagtgcaagtagccatgcaaagttgggaaaaccagacggcggccggagccgtgaaccaggggcaaatggaggatggtgttggggtagtcactagcctgccggaatggaagaagaggggcgtttgggggcggtaaggcctaaaggacactggaggggcctcgggatttggggcaggatcacaggcctagtccacttaaaggtggctccgtgccaggccttcccagaatcaggttgaaaagaactttagggttagacaggttggagatgagaaattggaccatgcaggaagtactgtcggaggcgtgttcctgactttactaccctgagccgcccacggctggggcagtccccgaggttccaccttaaggggcgggccggggcggggctccgctgccccttcccagaggccgcgcctgctgctgagcagatgcagtagccgaaactgcgcggaggcacagaggccggggagagcgttctgggtccgagggtccaggtaggggttgagccaccatctgaccgcaagctgcgtcgtgtcgccggttctgcaggcaccatgagccaggacaccgaggtggatatgaaggaggtggagctgaatgagttagagcccgagaagcagccgatgaacgcggcgtctggggcggccatgtccctggcgggagccgagaagaatggtctggtgaagatcaaggtggcggaagacgaggcggaggcggcagccgcggctaagttcacgggcctgtccaaggaggagctgctgaaggtggcaggcagccccggctgggtacgcacccgctgggcactgctgctgctcttctggctcggctggctcggcatgcttgctggtgccgtggtcataatcgtgcgagcgccgcgttgtcgcgagctaccggcgcagaagtggtggcacacgggcgccctctaccgcatcggcgaccttcaggccttccagggccacggcgcgggcaacctggcgggtgagtgcagcgcgcccccgtcccgggtacctccggttgaatctggtggcttgcaccgaccccctcccctgtccccagacggatctagatggttcttccctccatcccgtaccgacgactgttcccccttcccccaccccctccccggcacattgtccttccctcctttctttgaagaaagccgacccgcccctcactccgtcacgagggtgggtgactcagcgtcctccttccccgcggcgccagaagccagttgcaaccggtttctgaagtaatgtgcaggactccttacatcagctcctctgagtctcgtgattcagccttgcctccctctctccccctttgccccctccccgtcccacccttaggcgctgggagaagggagggtggggaggtcaggggcctctcagaggggcctcacttgttaacccagcccccatttcaggtctgaaggggcgtctcgattacctgagctctctgaaggtgaagggccttgtgctgggtccaattcacaagaaccagaaggatgatgtcgctcagactgacttgctgcagatcgaccccaattttggctccaaggaagattttgacagtctcttgcaatcggctaaaaaaaagagtgggtatcctggggttcccaaggaaacagctagaaaggacttggccagaggaaaagtaggctagaacttttgtctggtttcctgctaactggctctgagttttcctagggcaggtagaggggagatttgttagtcttcagcctaaaatggatttgtccagtcgtctgggggctttctacttggctgtggaatcttgagcaggtcatttaacttctgggcttcagtgcccttatttgcaaaatatagatatttactaaaccagtggttttaaacttgtaaaacagtaggtttttttggggggggggaatcccaaatattgttttacgactcgatatagacacatgtttaaaaaggttcactttgggagtggggaacacaggggccacttctctgcactataaactttctgccttccaatatctttttttttttttgagatggagtctcactcttgtcacccaggctgcagtgcagtggaacgatctcagcttactgcagcctcctcccccagggttcaagcgattctcgtgcctcagcctcctgagtagctggtactacagccgtgtgccaccacacccagataatttttttatttttagtagagacaattttcaacatgttgaccggtctggttttgaactcgcctggcctgccttcccatatcttaaggcccttccttgctcacatctgtttcaatggaatgaattttgcccgggttcaaattcaagcttttgtaccaagtaatacataggaaacactcagtgacttgcatttgtgatttccttattttcccttaactcatagactgtctcatgattgcgtcttcctccgttgttttaggcatccgtgtcattctggaccttactcccaactaccggggtgagaactcgtggttctccactcaggttgacactgtggccaccaaggtgaaggtgagtgttggagctgatggctggtggaagtcagatgctggggctgggacagtcctttcacagcaagccctgtagacccagcctgactccagctgagggtccctttgctccttaggaccaaggaggaatgcctcctcctatagccaaaggataggccaatagcacacctgtttttcttgttccttttctgacctcttatttttcttatttccttgactctgaggatgagacagtgccaggaagggaccttctcagaagtcagtctggaagtttgatttttctttcttttgggagaggaagccctttctctgtgagaatcctgtcctgactggtttcccagttcttgtttgatgtgtttggaatagagcccagtctgaaattataagcactggggtactcctatgtgtctgggactctatgccaagtattttatagatgttttctaattctctgtataaccatacaaggtatataatttgccataggttcaaatgtgtacccagcaggctaggagtagggctttgaatgtcacctagctcctgatgtctgggtcctaggacactgacctgttcagaatgggtagaacaaaaatggaagcagatactgacactgctggtagctgtgattctaagatagaattctggactcccagcatttgggtaggaccccgggatcatccagtttaggccttgccagttactaggggaccctttaaaagttgctgatgagggaat

SEQ ID NO: 56228 - DNA, 1261 bp, Homo sapiens
tattttttgctttttaaatttttttgttaaaaataaagaccaaactctcacattggcctaagcctacacaaggtcataatcattaatatcaccattttccatcttcacatcttgtctcactagaaggtcttctggagcagtaacatgcatggggttgtcatctcctgtgagagcaaggcctgtctgtgtaaatggtactcccatccaacctgttatgcaactagtaaattagcactttatcctttgactatttacttttactcattccaaacaagccagcacaaatctagtcaattctactaacttacacaatgagaccataaaaaaaaatttgtagcattgactgacttgatatggctttagctcaaaatgcagaaacaacattcatgctatcttgtcatgtttaactgcaggcacatgaaaatattagtatttgtcttggttgggaaagaaattctgaggcagaaatgtgtgtgcaaggggtttactaaggcatgctcttatgtaagtgcatgatgaaatatgattgattggagctaattgttgaaccataatatagttgcaaaacaggcctgaagccattccatggggagatgtgaacctggaatggcccttcagaaaagtctggaattgagccacagaaggaaccctgtttgcttgcattggagaggctaatgacagagcctggtggacttcaactctgtcattatggatatttgattggttagtgcttctctccttcttccacggtgttccatgtaatagaaagaccttcacacctcatgcccactccacaggtgcatccccatgcctctttcccagacctctttccttcctattatccaatctttctgtttataggtccagtccatcaaacaaagtcatctggagctcctagtctctgtattcttacctcaggattatcttatttatacacaaagtagataatcagttgtattacttgaagctcaatgcattgagagggttaacagtcatcagtgactatcaaggcccccagagggaagcattacttcactaagttttacttttcccatataccaagtcattctatatctgaacctagaaaggctattttcttctgtcatctgatcacaacagacacccaagcacctgagggtatgcactgaggtgaggcacaacattggtgggcaacagggtctctgaaccaccagactgtgcagcttaaatggccttttgttaagtactgacaataaactgagattgtagcccagacaaaaag

SEQ ID NO: 56229 - DNA, 2829 bp, Homo sapiens
ggtgtgctgcacccattaactcgtcatttaacattaggtagatctcctaatgctatccctcccccctccccccaccccacaactggccccagtgtgtgatgttccccttcctgtgtccatgtgttctcattgttcaattcccacctatgcgagagaacatgcggtgtttggttttttgtccttgcgatagaggcattcagttagtaaagaggttggagcaacaactctttttttttttttttcacaattgtaatcgaacaggtaatgaagccatttgttaaaatatttgcctttttaagtaaaaaagaaaaatcagaatggggctactttgaagaattattttatacacagattatttcttgtttcagagtgcgaaggttgaagatggaaaaaaatttaagagtctcttatttttcattttgttttattcatgtgtttcacggagtgtactgctattttgtaaacatttttatagtatattattttattgcttaaactccaagtcctgaaatagatggttgagataagagttcttcatattggaaaaacccttctgtagtttgtcttcttctggttgcatattcatggttgttgttttttcttttctctttttcctctgatcacattcatcagagacagagtgttctttacctcgggtttactggacaaaatcaacaactataaaagacaatgattcacacttttgttttcacaataactcacaaccatacagtttctgcttgggagtctattagtgtgaggaacagagaagcagggtgaacagggctaaactccttctcaggtggaaggcagggtggtctcaatcccagggacctttttggtcatgaaggccactgggctcccattttgactctggtatgctcattatgatggaaaaagtacactgaaccaagggatccttcctcccctacaaggaagatgttcagtacagacatttatgcagcagactaggacgtcataatttgcacttgggtaccaggtatcaggaaacagactaaaaggaattccagcaggctatatgtggatcctcatcttgtagctttttcaaaagcagggcatcctctgcattgggccctttcatcttgaaacattttcctccatcttcccccttctctggaatggacactgagttgagggtcttctctacagttttcctaggtctgaatctgtgagtagatgaatctgcagcatgcagtatttgcggtgcttccttctccctcctctgtctccaactgcacaggcaagcactatgtaagcccagattctctgctaagtggttttcaggttttcaatcacactgaattggcaggacaagaaaaattgttcagagaagtatgggaagatagttgaagggagatgaagaggctgcttctctatagagatgagattccagataagtcagtctcttgggaagtgtgtttagaagggttcaagactttgtgagtaagcatgaccttaaaattctaggggatttctggtaggacagtgagtggtgaattctgaagttttggagaggaaagtggaggagccagcaagctagctagccagttttctaaaagccaactttgcacagcacactcttctgggccctaaggagtcccacagaatggggaaagtgggagccctggagttcttgggagtcttggagcctaaagagaaaacgaggtgcaaattcatttcacagtgactgacccttgagcttaaacagaatcagcaaatgaaagaatctgacaaataaggaaaggcacaagcctgcccgactactggacaataaactcatgacctaaaaaaaaaaaaaaagaaggaggtggctgtcagtaaatggggctgaagagaaccactaatgaaagccaaggctcacaagggaggccactcacagccaccagaagcttgtcacataaacattgagagagcgagggaacacattctttttaggctgggtgcagtggctcctgcctgtaatcccaagcactttaggaggccgaggtgggtggatcacctgaggtcgggagtttgagaccagcctgaccaacatggtgaaaccctgtctctactaaaaatacaaaaactagccaggtgtggtggcacatgcctgtaatcccaagtacttgtgaggctgaggcatgagaattgcttgaacctgggaggcggagtttgcagtgagccaagatcatgccattgcactccagcctgggcaacagagtaaaataaattctgtctcaaaaaaaaaaaaaaactttttagcgcctagttattctaaatatttacttaaaagaaaaagcaaggtccctatgtgggagggaggtaatgattatcttgcagtctggggtgattcaagagagagactactgcttagatggaccagcaccctgtctctctctctttttttaaatcagaaattaaaactaagagccacgacttcagaagactaaaagtctaaaaacaaaaacaacaaacaaaactacagcacaaaaggaaaaagctgtaggtggctacgaatctgaaaaataagtaaaagaactttaaacttaagtcctgagtaaacaccaggtctaccaaacatgatattagccctatattacttactgatttagaaacaagcccctagatacaggggggaaataaaagctaattaaataaattacatatacatacataatacaataaatagataaatgaagtatatgtgtatattttatataataagttaaaacaaacttccataatttgactcaattagaaatccaaaatttatatactaaatttctatactaaaggacttatataacaaaatgatttaaaaaagac

SEQ ID NO: 56230 - DNA, 1094 bp, Homo sapiens
taaatttctcatagtcatagaatccactgccttaaaatattccatattcaacataaatactctaacataataaataataaatttagcctttgacataaattggcttgataaaaggggaccccttcaatccccagttaaaatagttaatctgacccaatgtaaattaatacagggcctcaaggattcaaatttattatataaaagctaattaataaaagactgattttctcctctgcttctccatttggcagcccaattttgcctgttcttaaatctgaaaacataaaataaaagatatctcactatggattaacgcaggcttaatgtcatgatcctatccatcaaggctttcatatttaatgtccaatttcattaaactgactgcttctatttaagcaataaccagtaaatatttgctcttattgattgcctttcatgtactgttcagttcctatttcaacatcctctcaggtcaaagtttgccttgacctctaaagggacaccttttccaggatacccatggggtatctccataactttgtcattccatgcaatctttgcagacaagattttgaggatattcacctttctccaggaacacaggtgtgacattactttgagtacatcctcctccaaggagactcatgtgacacactccttaaagacatagaagtctagtatctcttagcactttttgggttctgatggtaacacatcctcatttacaaaatttacttacaaattaaaatcagcaggcacttctgtgagtgaagtcagaaacatcttcactgtaaaggctttgacaacttcttcatacatcttctggagtttctaaaccacttatgatggtcatcaattgcctcacagcttccgatgaaacaaaaaacaaaataaaataaacaaagaactgcccctcttggcctgcatcactcactattaaaacaacaaatgattgactatctgctgggacctcctggaagcagaggctctcacagatcctgaacctgtgcttctccatacccagctccagttatggtttgggaaacagcaccccacaaacttggcaaggctaccgagggctccctaagacagta

SEQ ID NO: 56231 - DNA, 1209 bp, Homo sapiens
agaggcatagtttataacaataaaataaacaatttatctggattcccaaaactaacatggaaaagatcttccaatgtgctatatataaatgaataaataagcccaaggaaataaactcctatatgagctgaacactgcctttctcttctatttatatttcatataatttaaagttatgtgagttcctcatgtgatttaacctgaagcataatatcagttaacaaaagatagtaatggcatcacattccaatttgctttaaaaagcaaaacatggtaattgggatttgcatttattcatcattttaatctaaattcagtactaaaggagaaaaaccctgactttctgctcttttcatggaaaaattataaagcagtttacttttgtgtctctcaaatttcacttcctagaaataacaacactgtttaaccgatttcttttagcttatttagagaacatgtacatgccaaagtccaatgtaaatttcatgagtcacttgaggacaaacatatttggagagagtaaacctttaaacggattttattgtcaacagctagaagtatctctatgaaataatgatctctatgactacaaaataacatctacctcctgatagcaaaagaactgaggaagctctttccactacggctgtattgcactggtgagtccgggcccatggatgagaaattgatgcgaggatcaatacaagcttaatttgaattaataaaaggaaatattttctccctttgaacttatctccgtaaagccattgtgcctcctcttgggggtcacgtgttcacaatcaatggcctttgaggagctcttgagtcaagttggaggccttgggagatttcagatgcttcatctggtttttattcttccctctctcatgttattaatccctcatatactgctagagaactttgctgcagccattcctggtcatcgttgctgggtccacatgctggacaataatactggatctggtaatgaaactggaatcctcagtgaagatgccctcttgagaatctctatcccactagactcaaatctgaggccagagaagtgtcgtcgctttgtccatccccagtggcagcttcttcacctgaatgggactatccacagcacaagtgaggcagacacagaaccctgtgtggatggctgggtatatgatcaaagctacttcccttcgaccattgtgactaaggtaa

SEQ ID NO: 56232 - DNA, 1707 bp, Homo sapiens
taatagaaattttagtcctaatcaaggtgacattttctcccatattttgcctccaattcttccacagcacatagtgcatctcacataatatttataatgttggagtgcaattgtttatgtactctctcttacttactcaactataagatccttgaacttgtcacacacgttactttaggaactagcatggaaaaggtcttcacaaatactatctgaaaaatcaataagccagtaaaagtaaacctccatatgagcttactcctctgcttttcatcaccatctattctgtccacatttcaagcaatgtatttccagcatgaatttgtggtgtgatttgacatgaaggagaacatcagtcaccaaaatgaaaggattgtaccacagtacccttattttagtttaacttcgacttttttagattaactcttaatcaaaaattggtacttaacaaggaaaaacttgccttctgttgttttcagagaagtaaaaaaagcacctcacctttgagtcgccaaaattatgcttcctggaatgaccgcataccatgtagcaggtttattttagtttgtttacagaaaagtgtagaccaaagtccagtgctgactttgggagctactaaagacatgaaaaagtagaattttaaacacatttcattgtaaacgactgggagtatctgagcaaattatttcttacgtgactttagagaaaacggctacctatctgaccccaaaacgacttgaggaaactgtttccacggtcctgctgcagaggggaagcacagtcgtcaagaagagagtggggtcaggatcaaaacacatttagtgtgacttagggaaagaaaacattttccctctttgaacctctctggatacagtcattttgcctctacttgaggatcaactgttcaacctcaatggcctttcaggacctcctgggtcacgctggtgacctgtggagattccagatccttcagactgtttttctctcaatctttgctgttgctacataccttcattttatgctggagaacttcactgcattcatacctggccatcgctgctgggtccacatcctggacaatgacactgtctctgacaatgacactggggccctcagccaagatgcactcttgagaatctccatcccactggactcaaacatgaggccagagaagtgtcgtcgctttgttcatcctcagtggcagctccttcacctgaatgggaccttccccaacacaagtgacgcagacatggagccctgtgtggatggctgggtgtatgacagaatctccttctcatccaccatcgtgactgaggtaagaggctctgttctcgtctcatgagtatgtgacctgggtgtttagaataacacaagtaataatcatgcttccagccttcagtcacatgtaggtccttagtcttcattctttcagcaaatactaattgcttctttattaaatgtctgacacctacacattttgagtaatgaattccaaagtagaaggcatcctgctattataatgctttaagtcacagggagaccaaagtttaaacaagcatttatatataatatgttaaaatgttctgctaggtcagtgatgctcagcctgtcattgcaaattagaaatatctgggaaattgagaaaagcctccatgcccagagtataccctaaaacaatcatatgagaaggtctaagagggaaattta

SEQ ID NO: 56233 - DNA, 1151 bp, Homo sapiens
atgcaaatgtcttggaaatctgctgtacaacattatgcttacagtaaatactgtactgtatctaaaaatttgttaagtaggtaaatctctcagcttaaggagattttgggctgagacgatggggttttctaggtaaatctcatcttatgtatttttatcacaatattttaaaaatgaataagtgttttgagagcccccaactaaatttggatttcagtaccagagtggttaaaaaccctgccctaaaaagaaaatgaatgggagctggatgtaggggtttacagtgttcacgcaatacttttccttcagtggatggcctgatgcctagttgtttgacccttgaccaggggaaccttcacacaggaagcttgtttatactggcagatgcccttggggctcttatccgacccatgtacagtttatgtctgcctgaccattgctctggcactggttgcctaacattgtgttctcactgcagtcctagggaaaacccagcctgaaacagcccctagtttttcagacagaaagcgtaaattcagtacaccaccacaagaagaagcaaattcaaagatgtctacttacagatcctgggaaaggagagaataatgaattgggagggcagtgttctgtccccatgtcagatgaggcagaaatgaagcaactggctgagaaaccaaaatctcagaaatcaccactacaggacttatctatgtaaccaaacaccacctgttccccaaaagctattgaaataataacaataataataataataataataaaaggaatacatggcaactagcagtttatataaagaaatcaggtgtgggtcacttaaagtttgcaggtaaatgcctgaatagttcatttaaaggaagcaacaggaaagcagggaacccagtcagctaaacaggagagatgactcaaagttatctctggcttctggtttgagcaatttggaagtggtgtgagaactagaaactgtgtcaagggcgactaagccctgctgtgctgtgagaaagttaaacttgtaatcaaaatgaacgatgagacaacataaaattgtaggaattccctctaacaagatacatatgtattctgaaaacgtaataaaaactattgactcctttctatgctaataaacaaaaccatca

SEQ ID NO: 56234 - DNA, 555 bp, Homo sapiens
ctgttaaaatgcagattcctggccccagcttccagagagtgctcctcagttggtctggggtggggaccccaaacttgcatttttaacaagtttccaggtgaggctgatgctggtggcttgtggaccacagcttaggtagcactggctaagataccttatcccaggacccttcatgcactctccctccatccagggagctgcttactctgccctcagcaccccatgcgcttgagcctttgcccagcctggtcctggtccaggaattccctgctgccaagtctgatgcaatgggtcagatcctggaacctcctaactcaggataaagttgagaggttgtgctgctttttaaagggaaagccttattgggatttgaaccagaactggaaggactgtagtaaaatgcagatatttgggcccacccccagatacaggcctcgctgtgggacatgctgctatggtcactttctccatgtacagatgaacaaagggtggcccagagataggaagtgactttcccaagggcacacagcacattagacgagaggctgaagagga

SEQ ID NO: 56235 - DNA, 543 bp, Homo sapiens
ccaaggtggggcctaggaattgggatgttcaaaatgccagcaagaagctaccactgaccagccgaatgggaacatgaggagctgtaaaggccagggctctgcccacctcccaggcataggtaggggattgcagtggtcctaaatgctgctgattcttttctctctttctgaacagccatttgtggagggcagcagagagtacccagctggacatgtgagtttcttggcagcaaggtctgagcagccacaccagctgacccgcccttctggactgctgctcccattacacaaggcccagctgccccttccctcactgctgcggttgccacggacatggctggctctgcttcagtctctggagggcctggattttcctctcccagcccctctccaggcccagcttgggaagatgaatgggggtgggctgcatgcagagggggcaagaccccgtattcctagcaggagaggccttagttgaaatgctcatttctcaaaccacctctgcaaggtggctggggttggtcttgcgggacagaaggggag

SEQ ID NO: 56236 - DNA, 1420 bp, Homo sapiens
tggtgaaaccccgtctctactaaatatggaaaaatgagccaggcatggcagcaggtgcctgtaatcccagctacctgggaggctgaggcaggagaatcacttgaacccgggaggcagaggttgcaatgagccgagatcgcaccattgcactccagtctgggtgacaagagcgaaactctgtctcaaaaaaacaaacaaacaaacaaacaaacaaacaaaaaagaaaaaaaaagaaaagacctttatttctcaagcaagggcagaaattcagggctccccttcgactctggctgctcccaaggtggctttaaagcaccaatgagtccatggcttgtgtaagaaatgattagtccttccatctagagaaatagctcctttttaaacagttgtctcttttaaacagtgtttagtatttaagtgaggttgaaacagtgtcaaaaggaaagtgaaagtgaaattctctccttcagcataaaagctgatccacaaacaagaggagcaccagacctcctcttggcttcgagatggcttcggtaagtttcccagggctttgcattactgactctacagcagttgggcagctccccctaggaaaggcctcagtccaggctcctggccttgggcacacagctccagagctcgtctttagaaggctgtcatggaaaactgtatttgtcttttaaaagtgcatctgcccagctggacagggagtcctctgggcagagtccacctcctctgcgtaactggcacagtgcggggagcccgggactcccatgtagtagagagctgtggggtgccgggtgtcaaatctacctcagcctgaggagaagccagagtgtgggcaggtgggggactctgggttgtgggaagcaagcaaatcccaacatcgtctgcttctgctgtgactggggctcagtcccttctcggccccaaacgatgctttctctctcctcgttcctctgtggcatcatccagccttctaaggtgcattctaatctcagcagctttctgaaaactgaaatttctcctcctatcagcccagatgtaccgattggcagaagctctagggagagcaggctgagctcggtggtgtgtgactaaaaaggaacagcggggctcaggctattactagaaacaaaaccattccgggaaggagtcctgcaaattctggagggcagcccactccaacagcaccacctgatcctggggaagggctttactgctgccaaaacaaatcagggcttttaacagggagcccaggccaaagctcatatctcactggccaccagctgaggttgccagtaccttgactgtggttttagacattcagcattgcagttaaaagcccctctctctccccacatggaaaccatctcctgtggtgccctgacatacagaggaggagctgggagggagtcct

SEQ ID NO: 56237 - DNA, 1464 bp, Homo sapiens
gggctaggggattcaggttgtgtttctttttaggtgatgagaaggttttaaagttgattgtggtaatagtttcatgactgtgaacatgctaaagggcatcgaattatatactttagtaagtgaactatatggtactgaggcaggatagatagtcaaggagatgaccacgtccttgggacatggcaaccacactgtcaacagcacaatgagccctgtaaccatgttcattgggacatagcaaccgcaccaacaacacaacaaacctcagcactcacattgtaatcaagctcatccaagcagaactaccttcactggggactttcccctgtagagagcatgtgcattttcactttgcttgtcctcagaatgaccctttgctcattataatagtaaaaaacacacccctgggtagagatttaagacggcaatgagacatgcaatgtatgaacaagcatgtacagcaactgctcatgtgcacccagaggaccacccagaacatgattactaggaacacacctcttcccacccactatgaataatcacataagactctcataaagggagttccctcagagccagtctttgctgactcactcttgatcagcccactctgacttatctttcagagtgtacctttcagagtgtatctttcagagttttatctttgcactaaattactttcagctgtttctttttacactcagctttcagagtgttctttctcttttgcaatacattgctttctgttgttcctctatggttgtgtctcttgttaaaattattttaaccaagaagacaagaacagaggtctcacaatcaccgtcaacagtatgtaaattatacctcagtgaagctattaccaaaaaaattaaccctgtgttcctcttcctcctaatgcagttgtagccactctcctgaattttgtctctattgtcctattgatttttaaatttttttataaacacatcccttaataatatataaatgtaatccttaacaatatacatttagtttataatttttaaagtttgtaaaagtagaatcaaacatcaagcattccataacaatatttttggttcaatattaggtttcatacccatgttgattggccatagctattcattcatttgcatggtactcccatgtggcaaatgggaatgtgccacagtttacttatcctgactcctgtcaacaatcactggaggttgtatatagtccattctcacactgctatgaagaaatacccaagactgggtaatttataaaggaaagaggtttaattgacccacacttccacattgctggggggcctcaggaaacttacagtcatgacagaaggcaaaggagaagcaggcaccttcttcacagggcagcaggatggagtgagtgcaagcaggggaaatgccagattcttataaaaccaccagattggccgggtgcggtggctcacgcctgtaatcccag

SEQ ID NO: 56238 - DNA, 1040 bp, Homo sapiens
tttcaactcagctgaacatctacagactccagctgctgagtctcagaggccatcctagatctagttccgggccaagggtcctggctgtctgctgctttctgttcttgtgtattatgtctttctgtctcccttccgccccgcatgtatcctgacgaccagaaacgccctctacttgagataactggagctggactctgcctcctgcaatgcaaagaacacagcacgcaaaaagaaagtgaaagacaatccctgaccaggaagacagcccggctgttccctgaacagacttcacaccaggcagttcttgctgcacttcccccaataaaatcctccctcgttttgctttattttattctgtgaaaataagccttattataaatcacaatgaaatccacaaaccaaaccccaaactctctagcaaaacaagacccccttgatgtataaagtcatcgctgacaggacagtctttttcagttattgcttttgtcgcttgtttcttgagaacatgactccaataaggctcatggctgccaagcccattcctgcaacgcttgcagcgatgatgacatctctgacctgcaacaaagaagagggtgggtcacactctgtgtcaggatccagagtacaggctgcacattcagcagaaacattcagctcgggatacctcacatgccccttggcctccctggccaaactaaggagtcaacaaacattggtagggaagaggggaggagagggctggacgggaaaagaattcgtggctggagccagctggcctgaaatttacatggaaccaaagatggaaaactggattcaccgtgtgggtattcaaagcatataaatcctcagagcgtggctgtggaaaggacagggagctgatgccaggatggtcaagatcttggctggccaatggggagctctagaagcaaaggtggagtcagggaggaattgttattgagtagtcagtaacctgtgacctccataagagcaaggaactcggctgtcttgttcatcactgtatccccagtgcctggtcctgc

SEQ ID NO: 56239 - DNA, 1383 bp, Homo sapiens
aaatggggataggtacagcacctgatttgtgggattatcctgaggatgaacagagttaatatctaaaaaacactcagtaaatagggcttgataacgtaggagccattcactaactggcagcttttactgccaccgttccccaggatgttgtcattatttttgatttggaaaggtcacagaccgctctcggaccaggtggagacactgtggaggctgtgaaacccagaatgaaacgaattctccatgtcccaaaaccacattctgtggtgagtgtggaaacccctaaactcacccccttcacttctgacgccctggggggaaagcctgtgataaatggaaaggctaaagtccaaggtgggtactgagaaaagacttcccagttgggagttttggtgccaaggttttaggaaaagaaaaacccataagaagctaggtctctattttctgaggctgcattcccagaaacagggcccagcccacctccgggggcctcaactgagcccctctgtactctattgctgtgtgatctccaaggatcacttcacctctctgaacttctctggtaaacagggctaagacccatctggcagggtttgtgtaaagaatcattgaaataatggaagtgaaagctgtaaaagcacttatgcctacgagagggttgagaccccatgccgcacgcaggctgggtgaggacagggaggagaaggaggcctggctgcccagattcccagcctcgggcagagagagaaggaggaggagggatgaacagcagctggcctgacacattacactttcccttattgccaccctgtgcccaggcctcttagcaagtgggggaaagatactggcagctctggcaggcaccaggcccagcctcagcagcccaaaggtcataaacatcctggaaaaggaagcaaaactcatccaccctcccagactttgaccaccaggcccaggcctattctcctacagggcaaacctcaccttctggtgagtcagaactgcccctctactcacccccaccactaccaccaagcactactgggggttttcacctgttacctggaatccttataagagccccatgttaccaatcgggaaactgagctcagagatgggaattaacttccctaaggtctcggagctccccgaaaagtagcaccaggattccgcagcagatctgcctgagcttaaaggtgaggttcttcccaccacaccaagtaattcactccaaggtactgacgttcaacaactgtgctcccatggcaaaactggcctctgcctcaccgcactctcggcctgaaatgcccttttgccgttcacctggaagattcctactcatccctcgagatgggctcaacatgtccactcctcaatgcatcc

SEQ ID NO: 56240 - DNA, 1629 bp, Homo sapiens
gcgggcgcctgtactcccagctactcggtaggctgaggcaggagaatcgcttgaacccgagaggcggaggtcgcagtgagccgagatcatgccactgcactccagcctgggtgacagagcgagactccgtctcaaaaaataaaaataaaaataaaaataaataaataaaacaaaaccttcactctgggaaacagtggatttgaacttgatgagagtctcacaaccagatgctcaacactaggagggtccacctccaaatcccatcctctgaatccctctgctgcggtccggccaggcggaaggggggcagtcgccaagcacagttaacgctgggactccgctggcagggctggtcatgggatgagtcagctgacatagcccccaaggcctgtcccgctgtccgggtgtggctccggagggcagcgccagatttctgcggacagacctgccctggccacctccctcctgagggtcccgccttccgctgggcgcgtttcaggcagggcgcccccacaccggcccccggaaggacgcgccgagacaactcccaacaggtgcgcgccgacccgcagctgacaccgatgcctcgcagctgacagaggtgcgggccccacatcctcgaggctcctctctcggaagcagtaattcaggctccgagacaacgagtccccactaacagggggctcccagccccgcccagccccgcctcgccccgcacttacaatgggcgcacgcatcttccctcgcggtgtggaccctcaaggccaggctcgatttcgctgcgtagatgtctgaggcagggggagcagggatttattgtcattaacaggaaactgcgtctccagaccccacgggactgcggcttctgttgggcagggcgtgagaggcgcgcctcggaccccaggaacaaccacctcgctccctttaacaactttctcgccggggcccggcgggcgcccaggaggctgcaggtgccagcgggcggctcggcaggctagtctacacccgccctacccaattagatctcttcctcgcggaaggggagaagcatcccaggcacctcgcccggccttatcgcacccttccaggaagacccgatccacccacctcgcggtctcggaggcagcgctgcagccccagcaattggaccgggtctaatggccgcggtggccgggccggcgtgaggtcacccggcccctccccgcgccgccggctaatgagagcctcgcagagcgcccggccccggtcccgagcccggcgactgcaggacgcccgcgcccccggcaccgcctcttcccgcctcacccatgccctgcgcgcccagcatccaggagtcgcacacactcgacctctgcacacacatcacactgcagggccatgatgggtttactttcgccttcactcaagaatgggcttatagtttaaaaactgaaggagttaaaaatataccaccaagggccgggcgcggtggctcacgcctgtaatctcagcactttgggaggccgaggcgggcagatcacgaggtcaagagatcgagaccatgctggctaacacgatgaaaccccgtctctactaaaaatgcaaaaaattagccgggcgtggaggcatgcgcctgtagtcccagctact

SEQ ID NO: 56241 - DNA, 2189 bp, Homo sapiens
agccgagactgcgccactgtactccagtttaggtagcaaaaacgaaactccgtctcaaaaaaaaatagccgcgcatggtggagagcgcctgtaatcccagctacccgggaggatgaggcagaagaattgcttgaacccaggaagcggaggttgcaatcagccgagatcgcgccattgcactccagcctgggtgaccagagcaaaactccgtctcaaaaaataataataaaacaatgtgctggactactgcaatactgagatccttctcagccaagtgtttacaggtgttagagcggcaacaggaatttctggagtacaagctaatctctgtgggaatggaaaaaaaaaagcactaatttgaatttcagtacctatgttgcaatgctaaattcttgacagggattagtactccgtaggttatgcttcttaaatctccaaaagtaagccaatatgtgaaatcgtacatttttggtccgttattctaagactgacaaaacgttccattgcttcgtatttgaatttgagaactgagactcatttaaaaattcttcactgttcttttcctttttgctcttcgatttcgcaagtgaaacggtcatttcaacagcacacacattacactagaataaagccaagtaaaatgacagactaaatcagatccgtgaatacacggtgactccttatttggtttttaatactttcactatgtttcatgtcttcgggaaagcaaaagaacaacgtactgtgccaaaagcactaacttacgaaaaaccaatttagaccaattctttacagcgttaagtatgggttgaaaaccaactttcctaatacttgtggtcagtgcctcaaggtcgttaggataaaaataaagcttccaagacacttcgcagccttccagcacttccagaaaggccaaataaaccagcattcaccttcccgctccatccaggccccgattctccgaccagagagggcgctgagtgcccgggcacggaggggcagcgccctggggcgcccggctctgcccagggcggggctcggcggggccgaagctccggacgccgcccacggggaccaccggcccttgggccgcccaggggcagctgcagcccaggggaggagctggaggagcccccggcggcaccagggcccgagccctgacggcggccgcccccggccgaaaagtaaggaaggtgccgccctcgctggaccagctgggcccgaagaggggcccccccaccacaaattcggaaaccgagtgaccccggcgagggacgcgcggtcccagccccgggacgaggaagggcggcggcgcgggcgggggttcttttcagaactacagcagggaaggcggcgggggtggccgcggggcgatccagggaaaatcggcgcctcacctgctcctcttgaggcagctgctgccactcgctgaggggacaacatggagcctccgccttcaaagcagaagcagcaggggtgcagaggagagggacgggtgcgggcgggaacgaaccgggccctggaagcgggaaacgggcggagcctgggctctagaaaaaactagccagaaggtggggcacgcggagccgcgacggagcgagcgcagcgcggtctgcgtggcccaacggacagcccgaggcgtggcgagcgcaggacgaggctaggcgaggcggggcgggaaagcgcacgcggcagaatcccgccaccgcctgccgcgtgtgcgcgaagcgagccgccgggtacctgttggcggggcgctgagtgctaccgtcctttgggaattgtagtcccgcgctcactgggtcccggccagcggtcctcatactgcgcactcatctggggcggggcttggcgtggttctccgacgactgaactacaactcccagcaggctgtgcgggaaggggcgggctggctcgggtcctcctgcgagctgcggccggcgcctaacgtgcagaccaggccccaggccgaggctttatcctggaaccaccagtgtgagagacagctttggtgtttaactaggcctgggaccacaggtgggcagaagagaggcctcaaccctggatggcatgaacgtcactgggtctttaatgattttgacttcataagggcaggtggccgtgacttcattaccacctttattatcatctccctatattcctgtccctggccatggctgatgcgcacc

SEQ ID NO: 56242 - DNA, 1656 bp, Homo sapiens
gctctggaatgtacgggaaagagagtttccataatggaagcccaaagacatttctaccgttaaaatacataatctgccgaccctaaaacattcacataaagaggcaggagggaatactatcccgcagctccacgattagccgcagtcgtgggcggggattggggcttggatacgccttttgcgtctggtccccaagggacgctccccaaccctcggcgcgcgaggcgccgcgtgaggccggctttgcccctccttccctgcaagagcgcagaggagcggttcttgcgcctgcgccctgcgccgctgcgcgctttggcacccgcttggggccctttgtgcgcatgcgcgctcgcgctcccgccctctagctgcgctcggctgagtcagtcagtctgtcggagtctgtcctcggagcaggcggagtaaagggacttgagcgagccagttgccggattattctatttcccctccctctctcccgccccgtatctcttttcacccttctcccaccctcgctcgcgtagccatggcggagccgtcggcggccactcagtcccattccatctcctcgtcgtccttcggagccgagccgtccgcgcccggcggcggcgggagcccaggagcctgccccgccctggggacgaagagctgcagctcctcctgtgcgggtaaggcgcgcggggagcccccgccctgggaaagagggcgagcgggagcctgggggctggggggattaggaggcgaggcgggaggaggacgaattaccctcgactactgacggcttcagccccccggggacgagcgtttggaaaatgggcaaaggggaaggggaacgtaaggttgtgcaggcggtgaggaaatagcggggtgtgaggaaaacaggttgggggcggggagatagtccagtgggcgttaacgccaagactgggcaggtggggaaaaataccagctcgtgggataaaatggagagttgctcgatgcatatggtgaacctgggtgatttagtgaggattagagagattgaaaggatacgggcaggtgggtggtgggagaaacaatttgttactatttttgaggggatggtggtgaaagggttgcattgcaggtttgcagacaggtgttgacataatcaagcattcatgatagtcctccaaaatatttttggctgcccatgggaaggatgaggaagtttaatggaagcattgtagcctgttttttttgtttgtttgttttgtttttactgttttcggctagactccatgaatgccggatttttctgaggctccgaggtagaaggaggcgtgatgagaatagctcagggaagatttgggagggagctgctaatggtccaagatggatccgtggctgcatctgcaacagcctgctcttccctggcgctgcgtgggggtggggacacgcaatcagtcgcttatattctagaaaatagagtcatgctaagctatcaacatgttttgatttcatgttttctgtgggctactattgatcgaagtataacaaaggggggtgtttattgcagaaagggggagggggagaacattcagacaaagcaagggctggttgagtccccttctcccatctctgtgaaagactaagaacgaagctgcagacctcctttagtttgcattgtatacgcgt

SEQ ID NO: 56243 - DNA, 3047 bp, Homo sapiens
ggcaagaggagcaaaggaaaaaagtgctaatccctttacaagagctttcctggagggcgtggcagcggcctgggaggagagtggggccgccgggcgcacggttctcactgagcctgccggggaggtaagcgcagctggtccagcccgggccccgggcgcgtagccccgccctcggtccaacgcgccttcccaccccgggaaggctcccgagccctgcggcccagcctcccgctggaagccccagtccgcagccggggcctccgagaggccgagaatcccaattagggaagggcagccagcagcccccaagccgggagccgtgcctgccagcgtgcaaggctgcagggaactgggcccccagccagggccagagccagagcccgcacggccccccttcggccctaatactgactgacggcgcccccagtcccggcctgcggagaaccccctcgcggggtgcggccgggagcgctcggcgctaacacgtggaggccactgaggattctcggaaaacgtgggccctgcgcggggagggcagggctccgggccgatgggagagtgcgcttcccgcagcgcaccgactggctcagggacccaagtggcaccgcgcagacgccggtggccccacccgatcccccgtctccgcccggcccggccagcggggggcgcggccgcgggaagcgctaacaccggacgcgagggtctcccagccgaagggccgggcgagcacagggcggggcggggccgatccgacccgacccgacctgacccgggggcccgctaggccgctacgcccgacacacagcgccagacttgaggtccgcgccgccgtcacgcggcgccggggcgggcggcccgaagccctcgtggccgtagcagcgcagcgccgcctcctcgtaggcctccaggatagtctggcgctcctcaggcgtgaagtccatggagaaggggtgcacctgcaggatgtggcgcttgatggtgctcaccttgagcgtggccagcgcgcccccgcacaccatacacaccaggccgcgccggctgccgtcgtagtccatcaggtactcgccccgccaccgcggctggtagttccgccgctgctcccggctgcggggcgggggcggaggcgggggaggaggcggcggcggcaaggcgagtcccccaggctcctggccgtcctcttcgtcctcctcttcttcggcgggccgctccaagggagctccaggggacagcggaacgtcgcctaaggagggacaaaggaccgcattggcgacggcggggggcagcgggctgggccccgcgtctcatctccagtcaccccatctttgcccttctatcccatcctccagtcccttctgccccagcaactgcccggctctccctctccgcctgctctggccccaccgctcaccccactcctcctcctcctcctctggctcctcctcctcgtcccctcccccctcgtcggaggctgcggcagtgccgggggggatggggccctggggggactcggggcggggcggccccagggccagcaggtgggcggccttctcgctccactcccgggcgatgagggcctggacaggcccgccgaggcgcgtggagcccgggtggcgccggcggatgtggcgctcgatggtgctcatcttgagcgaggccagcgcgcccccgcacaccccgcacaccaggccgcgccggccgccgtccaactccatgaggtactccagccgccagcgctcctgggggtggcggcggtgggcgcggccccgcggcgaccggcccgggacccccgccctctcgccctcgccctcctccagctcctcctcctcctctgcgggcccgggcctctcagggacccagccagcctcttcctttacgtctggggggctgagatcctgagaggagggggctccagcagcggaggccgagtcccggctctttccggtcaggtcctggggggcgaggtcatcgcctgttggggaaggggtgagggagaggggctcagcctgctggctgggttgcccttgcccactcagaggggtccatcctggctcctcaccccagccccaagctagaggccccagtctgtctctgtctgggggcagggggaaagtatgtgtgtggagcaccagctcctggccttcagccctcagccctaagtccctgcctcccagttttggccacagaccccacttcagagccccagtatgagggggtctcagcctgggatgggcctcgcacctggtggggactgggtgagctcagacagcgcctcgggctggcccccccaggcctgcagcagggcactgcgctgggggccgctgagccccagggagccagggtgcacctccagcacgtgggcacggatgtcgtccaggtgcaggctgggcagtgcccggccacaggccatgcacaccagccggttcccccgcgggtcatagtccatgagacactcggcccggaaccagttctgcagggactccttcagcctcctctccaggcgccgggcccccagccccctgctgcccccggccctccgggaggctgagaggcgcagacgccgagcccggggtgccactgggccccctcgccgctggcgccggcagcccccaccagctggggctttgcctgaaagggttggagggaaggaactgagacgctggccccacgggagcatacccactacagccaggtctcccacaagcctctcactcacttgggccccaggcctaacctttgcccttctcttcctctctcctgaaatcctaactccctaaaccctcctctgctagcatttcaagcaccacccacacctcccccagactggaatctagccctgtccctggccttcaccgtcagccacacctctccagcaccctccccttccctcacccaccccagccaggcctccctgctccaagcctttccactgcctgtcacccaacttctctccttgatacttcaaaaaccacagaatgtacaagctgtcatggacatcggagaccctctcaccccactgtccttcccccacctttgtataataagggcaa

SEQ ID NO: 56244 - DNA, 1997 bp, Homo sapiens
cctttaagagccgaaaaagggggaggagccgaggttctttaaaaacaaaaggggatggggcgtttctgggaggggagagaccgggaggggagcctggagattcgggcagagtctccctggcctggaggaaaccctcaagggtcttaaggcgtgaccctgcagccgggaaatgagtcaacagtctcctttgagagcgaacgaggaggactggttggttccgctagagctgacaaattagggcaaaaaaaaattctgaaaagaagggaagggagaatgcaccggccggaggggtgcctgcctttgtgggcgaacccatcgctttaaaaactgcccgcggtgggaaaagatggtgtgggcccccggggcgcaagcgatgcactttcctagggagaatgtgggagaaaagaaaaagggtgcatgtctctcacaaggccacgagacgagaggagcagcccgatttaaaacagcagagttcggagctgagctcagctccgctggggaaaagcccccgaaggggacccagggtctgggcggacttttgagagaaagcccgattagggagaccacctgggagtctgaaagagaaaggggcgggggccaaagtccagcctcgctccgtggcgccctgccccgtggggcccctcgggcctggcccccaaggcggggcgctgcgggcggcagcggggccctttaagggggaggcgagccgcccgagccccgcgagccgaccccgggagctgggcggggggctcccccgccagccctgcagccgcgctccgcgcccaccaggtggcgcccccggccgccctgcccgcgtcccccgctttgttcggcggcggagaggggccccgagccgcagccctcccttcccccacgccggggcccccgcccgggccgccggccccagctcttaccgccttcgtcttcctctggctccgcgctgccgctcgatccggcgggcggcagccgtcggccccgtgccgaggccactgctggcccggggccgcccctgccgccgctgctccggctccggtggtccccgccgggctccatgcgctgcgctgcggagcggggccccggggcggcggggcgcggggccgcggggccggcggcagcccgcgcggagcgctcgctgcgcggggccccggggcgcggggcgcatgcacggggcggccggccgcacggacggcaggctgctcgctcggcggcgcgggctggaccggggtggggattcctgtctggggcccctggggctcctttaagggctcctgggtaaatttaaaggggccgcgcgctatttcctcctgccagctcgcggggggctggggggaaaggcgggaggcaacgagcccagccgaggctcagcagcctgcgcccgctccggacgctaggggcacggacctcgccgcccccgcgggcccgcaccgccgcctgcggggctccggtcccggctcccaaagggtcactgaggtggcgaggggcgcccgcgtccgctgcgacgcgcttccacccgggctcggctcgcggccaccgccccctcggggcatctcagcgccgggagcgcccgctgaggaggccggggtccctgcccggggctgcctcccgccgcgcaagcgggtcgcgagctccgtgcgggccccggagcggccgctactggcaggggccccagatggctgcggccccgccgagagggtggagccgtgggggcggccgcgccccctcccgcgggagccgcccgggagcgctgagagctcgggcttctcatgggaggggcggacaagcgaggctcccccgagccagccaggggtgggggcggcggccgcagtgactcgggctggggagaggggcgcacagcagacccgcagagagccggctgcgccggggcccgaccctgcgggctggaggtggccccaggatggaagccgggaggagagggcgtgcgcggcggtgactcaggatcctgcccccgcaggcctgggggtgcctgacgaggccct

SEQ ID NO: 56245 - DNA, 1139 bp, Homo sapiens
tcacccaccgcttctcttcctgcccggggcatctgctggcggaggaaggcttgtccacggaaaggcaaaagcgactcccgatcaaaatccgggggcacctggtagcgctctccacgccagcagaaacgcccaactgacttcttaatggagggaaaccccgggcttggcccgcagactgaggggcccgcgttgcgggttttgggggcccctctgcctctgcgcaccgggtggccccgggtcccctcggcccttcccgccgcctcccgggtccagggtttctaacggggccgcgtgcccggggcggggccacgcgcgattggccgcgcggcatcgggggcgggtccgcggctggccggccgggcgggcgccgacaatgagcctccataaaagggagcggcggggggcaggggccccggattgagccctccccgcccgggctcccgacgcgccgaggtctcggggaggcccggacgcgccggtcgcaggcccggccggcgagcggcgggcgggcggcggggagggggctgcgcggggcgggcggcgggcccggcgctattccggccaggaggcgggaggcggttgccggctgcgcgccgaagcctgcgcgccagtcctccggccactgctatcgcccacggccgcaccatggccctaaaggccgagggcgccgcactcgactgcttcgaggtgacgctgaaatgcgaggaaggggaggacgaggaggaggccatggtggtggccgtaattccgcggcccgagccgatgctcagaggtgaggatggaggggattccacttccgcgtcacggtgcggggccggggctggggccgtccctccccagtcggggtccgggacccgggcaccttctcacccccttcagccttggggcccaggtttccctctcggatctgggtccagggcgcgctcttgcacctcccccaccatggtttagaagctcaggcctcctcgatttccccctcccttcccctttcccccgcccagggtctggagacttcgatccacgccccgcacgctccggatcttccggtgcccaagcgccccctctcccgggcccagcaccagaggccggatccccagaggcgctgggtggttgcggccgccgtctcacagcctgggaag

SEQ ID NO: 56246 - DNA, 2019 bp, Homo sapiens
atgcacggatgaatccacagaagccaagatagacggtggcagacaggcaatagactgatgctgcatttgacaggtatattgataggctagatgataaaaagaagatgaattttatgagctgaccgacagatggacagaaatgcagacaggaagctgctatagaaccagaggatgccaatcacagggacggctaacaatcttgttttgtatttagtcaaatcacaagcacagacaggtgacccacgcttcctgttcaaggtttgaaaatgcccgaaaactgacggaaagacacgaagcgaatcagactccgagagccacccggggaaacgaccgggtgctcggagggcctcgggtgttgccggaaatggccgacgaccgccctcggcagggctgtgggagggggcgtggccggctcagcacgcggagcagcttcgggtatttccggaaactgccgaaagcccccttgaagtgggcggggaaaggccggtgggcgtggctggatggccgtggacgggggcggggggtaggcacccggggtcgcttcgtggatttccgtaaacagagccgaagcttcgtcttcggaatcgaggaggagagcgcgtccccggggtttaccttcttcggctgtttccggaattcacccgtagtctgtggccgggaggagaaggcgcgccccacctcccgtttctagccgcttcggatgtttccggctgctgccggcgaaaagagccgagggccggcggtggtggcggccatgttgggagcagcaggtccggcggcggctgcctgtgtgccgggcgcggagcagtgccgctgagggcaggggaggagcgaggcaggcggccggctgcggcggcagagagtaggcggagcggcgcggcccggccgaaaggcggcacagcccagccgggggtcgggggggtgcggtccggagccgctcggagccggcgcggcctagcccgagcggcgcatccccgggctggcgtgagcggctgcccggcctccccgcacccccggccggggcccatgcggcgggtgctcctgctgtgagaagccccgcccggccgggctccgcgccttcccttccctcccttcctccaagcttctcggttccctcccccgagataccggcgccatgtccagcgctcggacccccctacccacgctgaacgagagggacacggagcaggtaaggagccccgagggctccccgaattctctggctgggccctttgcaccttgcggagcctcctccctcttctgctctcctcgtgcccctgctgccatcctgcaagcctcggctgccctgtcatccggctcctggctccggctccgcacatcccgcttccgagtcctgacctgggacccacctcgtcctgactccaagctgcacacttgtctttctgccaacccccgtctcccctcaccgccctcctgcgctcttccgtgtcacctccccagcttccctttctcttccctttttctctcaggggcctttctggtcttcctccacccacgcttaaagcagccaccctcccgctcctcgaatagcagcaccccgcgatttgccacagatcgttgtccacctctcccttcgtctctcctgcctcgcttcccctccgcccgcaccggttctgccagtctctgggttatcaccctcagggtccttgccctggactgcgctctcgatccctggccccttgcagttcccccagctttttctaccctgcttcttcgttttccaaattgtgctctccctcttgcttgcaacccaccagctccaccctcatcacctttccaaatccttcgcctactctttgctcatcactttcccttctttgctccaggagctccctggatcctggcgctggcatttgtcgcttccgtgtttccccacagctgtcatgcgcatagttttcccacaggttgcgtttggggttccaatcatcactcccttcagagtctttggatccctcttgttctcttcccctcgggtttggcttttaggtccctgggcct

SEQ ID NO: 56247 - DNA, 550 bp, Homo sapiens
aggacaagcccctattccctctgcttggttaagctgtggactggagctactaggcctctgctttgagaggaagtatagaaaggatttgattctcttttagccatggtggggccgccagtttccccactttcccatcaaagcaaaaattgagaaggatgtggaaagggtgggtggagtttaaagctggcccttcctccttcagtggaagttcagcaaaatgacaaaccagataggtggctaaatttccttctcttgatgggagattccagtatttgtacgttttgtgcttgtagcttggattctccaggcctcctcccagctttcatcaaacatgagtgagtcactgaagtgttgtctatgcattttctcccttctgtctctgcaaagggaagagtaagcctttacaaacctgtgggggaggaagtcaccctcttcccactgctggagagccaggctatccccaggttaaccctgaaagtgctaactcctgagcagaatgttactgccacccgcccccttcctttttgttataggccattgaaggtcattg

SEQ ID NO: 56248 - DNA, 492 bp, Homo sapiens
ctaaagtgctgggattacaggcctgagccactgtgcctggccagttttaattttaatacaataaatatcagtagctatcacccacatgaagaaagccatttgacgtcatcagtaagagtaaagggattccagacagtgtgagaactcttttgtaaacagagataggactgataatccctgtcctcgattggttgattacttgctatgacctcataatgagcctctgttttgcaatttctggggccctggctgggcctcaggaaggcacttgctgtcttggttttcagttgttctagctgaggaagctggttctcagtgacctgatggaccttggccaaagttggctcatttcctcctttgaatacatagcattactttatgtttttttattccattaaaaagatcatttggcttacttggattttattatgaggtttgtgttttattatgaggtaggtttgtgtttttttgttttttttttaacttatatgt

SEQ ID NO: 56249 - DNA, 738 bp, Homo sapiens
tccaggatttcaatccttggcttttgctctgcagcaagggctggctgagggcactgtgaggcttcttcaggcccaggagtcaggcccactttcccttttctcttgagggaatgactcagagaacactcctgccaccggaggttctgcaggcttttgagaggcagccagtggaggctgatggtagcagttggtgagaaagaggaagtatgtagtggccattcctccggccactcctgacaaatatttctgtcactaaacagcacctctctgtggcagccttgggctgtgttctggaaagggaggagctttcctctccctgtgggagggcctgtcatctgtggcttctgctttgcccttggccacagactagattgcacaacacagccaatgagagtccctcttccctcacaagtgcttggagtgcagaccttaacttacagggttgtagaagtgaccgtgttccacactgcagggtccaggtcacagccggcaaagcacatgaaaattgacctaaggttagaatgtgattatcctactgggaaaggtttactgggacagcatttcacttctgactccataggctgtcgtctcctgccagggagtgagttttgtttccatgcttgtccagtctttactgctttcccagaggccataaacctgccttttcccagaggccataaacctgcccacctcctgctatgttctagttctgataggagtaccattcagagttcttgg

SEQ ID NO: 56250 - DNA, 1611 bp, Homo sapiens
tgtcagcttgctggtttctgcttaccctcctccccacttcgttcttgagggggtggtttgctggtctttggcagggccgccactctgggtcagcacatctgagtcacacatgttcctccccagccctattggaggctttgttaaagtcatctgcccctacccaggtcccacctgccacaggtgagctagggttttatgacagccgtggctgcagtgagtctcctcgacctctcgccagctgttacccagcaaagcaccttggggagggtggggctgcccacttccggggagggggggagggggaggggagaaggaagttgatctaaacccgcctctttctctgtctcccttcctgccctattcccctcctgccccttccctcccaccttgcttctggtgtgctgtcctggaattgcacgcgcttcctgaccaccaggctctggcccttgagaagccagcggggctttgtccctgttgctctccttgccaaacccagtctctctgctagtggtggtttcggttgcgacaccgtccaggttcccaggcaggaaccgctcggcctggctgcttagctacttttcactgaggaggtggtggaaggtgtcgcctgctctggctgagtaagggtggctggctgagccggcagcccccgccctaggcctggctcttcccggcctctgtactttgccctcgctgcctgacaggttctgctgtgggctctgctgaatggaagtcgctggtagtccttttccctttctccagtcgggtatgttgtccccctttttactctaggattgcctcctcctctttctttcctctcatctcaaacataggatctttagagagttgctaaggggcgccctgcctgagtccagcatagtaatattcatgggaagggtgtccagatgtggaagaggcattgactaggaaaggaagagggggcacataccagaagggtctcccctgagaacaagcagcttgacaagtgggcgaggaggggctggtgggaggcagaggcctgaggcctcagagaggatgctcccgtgctacagtgagggggagcctaggatctggggccattgcccaggactggtgcccaagggacacttttctcccccaactctatagtgcctggcttactctgcttctggccagggaatatcacccctcctggtttggctccttctcagccctcgggaagccaaaggacacttgaagccagccctgaatgcagagccccaaagcatgagcttctccatgggacaactgttggtaggagcctccagcattagggcaggggccctgcctacctgagtcagcgccaggcctctcggggtggaggctgtcttccgggcaagcctgacaacacacctaggccgagtctgagatcccaggcggaaggggcctgacaggcccagtggatgcaaaactatctttttattttctcctccatgtcctgccttctctcttcctctcagtagcagaccccaaagctgtttcagccctacttctgaatcaggcctgcttagtaactacttggtttgccttttggttccaaataactgccttgcagggtgaccccttattctttctaaaggctacttgagagcc

SEQ ID NO: 56251 - DNA, 562 bp, Homo sapiens
cctccccccggacaagcacgggcagagtgacagacagggaagcgggtagagcggcacagacggagatgggggagggggtgggcagagactttcaaagccagacccagccaccctgccaggcacacaaagagccagcgcacacaccggcggcggctccgagcctgcgagctgcgcccgtgcccgtccccgccgcccggggcacgtgctgcagcgcacacaagctgaagcccccgcccgccgcccctcccacccggagccccagtctcctggacacacctccacccaggcacaccccgctgtgcccagactgagccgagcccgcactcgcgccctcctctcccttcccttcctggtccactctgtaatcagattcctaaatttagaagcagcctagggcccagccagggatccctgcccccacccgctgcctgcggccgagtggccggggtgttgcggtcgggccacgacccggctggggccgcttgttcccggggactcctgcggacagccagggaaagccaggctcgaccccacccggctgctgcgccgtcgagccacatgg

SEQ ID NO: 56252 - DNA, 1172 bp, Homo sapiens
ggaggtgctgccaaccacccggcccccagcggcgcgcgactcacggcctgggtgagcagccaggcctggcgccgccgttgccatagttacagacgcagccctgcgagggggcgggctctggccgcacgtcattcccggcgcgacgctcctccgcgctcccgcctcctcctggtcggagaccctcggccagcctagcgggcgctccacctgcgcgccggctcaccgctgccctgcgccggttctgcgccggcgcggtacgagggcgcgcggttgggcggggggggggggggaagctgcgaggcgcatgcgcgttgcagggccgtccgctctgctgccgccgctgttgcagccaccgccgttgccgcctccctgccggcaagtgtgtgaagaagaagctgagcgttgtcgccgccgctatgggggtgagtgaggcagagagaggagatgggaggtccaggggcgctcctcgctaccctcgccccctttgttcttaaacccccctctcacgtgaccccgaccccctccagcctcacgtgacccctgacccccacatgacccgactcccccattctaagggtccctacgctaggcctagcccgggaatcctctggagagcccctggtccggggccccaccccctcggcgcccccagcgtcacgcccgccccttcctgcttcgcggacccgttactggcctccccaccaccgtcccccgcggggaccctggggttagcttcccgctcccccagggtcactcatcacctggctgtcaccagcttcgtcgcttttcacatccgaggtcaaccctggcttggagggaattgaggcccagaggaaagaaggcgcctagccaaggtcatattgtcgggggcgtcagaccccaccttgggcctcccgaatcccagtccactgcccttcccgttactcgagtctcagcgaagccggttcccctacactctttcgaaacctctccaccaggttcctgctgctcctgataaacacagccttcctttcccatagactcctgccttcgacgcctcctggttgcaatgaaatggttcttacgaccgcttgggttgttaggggttttggtagtgcaggtgttttttgcaaggggagggctgtgcaggtgtgcggggaagatgcggggaggcgggggcggcggcccagccg

SEQ ID NO: 56253 - DNA, 1135 bp, Homo sapiens
aagttctgagattacgggcgtgagccaccacgcccagcctgaatagagagagatttaacagtatgaatgaagggaggagtcaagaacagtttaggcttctcgcgtacatgattgggtggccccagatgtcattcacaagtataagccttggaggcggaacataactcgaagaagagcccttttgtgctccgcccatagcgtaggaaggtgtcaattggctgtttcgaggaacgcgccaaaaactgccaagggctgtgggaggtgtgttcttgcgtcatttccgagagacttccgcgccgcagtttccctgcttccccagctccagaacttccggccagcgcagccattttggcttcctgaccttgggctacggctgaccgttttttgtggtgtactccgtgccatcatgtccgtcctgacgccgctgctgctgcggggcttgacaggctcggcccggcggctcccagtgccgcgcgccaagatccattcgttgccgccggaggggaagcttgggatcatggtgaggaacgggcctggaagagcgcgggaggcgccgtgggctgaccccttctgcctagctgacctcaggtggtcctgagaatgcctcgcgccccgcagcgtagcggggagcagcagtgccggtttgggcatgtctggagggcgcgaacgacggggacagtgcccgggcgacagtcggggctgtcggcgttaggtctttccccacagccccaggatctcgggtctggtcctgtcaggccctccctctcctgtcgcctcctcgctgcgccgcctcctgccgacttctttagccgctctgagcccattttctcgttggttcactgggggatgcctgacgctgtcagcgacgaaaatggttgttactgctatttattttattttattttattttacttatttattttgagacgggttctcgctctgtcgccaggctggagtgcagtggcgcgatctcggctcactgcagcctccgactcccgggttcaagcgattctcctgcctcagcctcccgaatagctgggactacaggcgcgtgccaccatgcccaactaaattttgtatttttagtagagacggggtttcaccatgttggccaggatggtctcgatctcttgac

SEQ ID NO: 56254 - DNA, 1452 bp, Homo sapiens
acgatgtggggctccgcgggcgccccggcgctggccgacttcctgtctcctgggtcagatgctgctccgcactgcagctatggtcgcatgcagtgcctgccgaagcccgcagcaggaatgctgccttcggtgattttaatttcacttttctacttctctcaataacaaaatccgcgtttcaaactccagggaaaagaaaacggaattggctccaggaggatctgcaatcaccaccgggaactttgggaggctgggaagatggagccaaaccaatgtgtggggtggaggtgcggatctggggcggccggcctctcctacaggtctcaggtccgcaggcctggcgtgccagcacctgccacgggactggaagcccattccttgacaacgcctaaggggatcccgttgctagggctgttgccaaggcggggcaacgaggaggggctcgcttccgggaggacggcaattggcaacccggaagcggtcggtagtgcggcgctgtttaaagatggcggcggaggaacctcagcagcagaagcaggagccgctgggcagcgactccgaaggtacagatccaaggagggatgtccggcccgggctagtgggggcgatgccgggccagctgctcccgaggagggaggggaggcagggccgctggctctggggtcgaggtgcgcgaggggtcccttcctccacctccgctgcctcccctccccctcacaatggaaggagccaccgccgcgacccccggccgggagggagcacgggcgaggcgggccaaggcccgcggcccttctccatcgtgtgcgcccggggcggggcctgggtcgctccgccctctgcccaacccctcggctcctggctccaggggccccgagccctctcgcccctgtccttgcagtcaggcagagaggcctacgccagggccgagccccccggcctgctccagcggcggcccgcgccgtgagggcctcgagtttcgctgggctacggagcacaaaggtccgggcgggccattcgggatgtcgtaggcggccctgggatgtgaggggcctgcgggatctgtccctgaggcctgcgactttttctggtagagccgcctcttctggccttgcagcccctttccgcctgcctagacattgttagtctccttaggagatgggcctttcaaaaatggtcccactctgtcttttcccgcctatgagttgggccctggggaccgcgtaggtcattgggtggcagggacagttcttttgcagagtagtgcgaaaagggtaggtaggtcgacgcccagccaagaatttgggatggcgagccccaaaagggttgacctttaaagtcattcagcccacgcacctcattctcaccgaacacttgagggaacgagaagtgggaaaacggccccggaagggacttgttcaagatgacattaagagagagccaggactaaaattc

SEQ ID NO: 56255 - DNA, 781 bp, Homo sapiens
ctgaggctcagagaggttcagtcattgcacagatcccccaacatatcagtaggtttcaagcccatgcagtggggcaccagggaggattgggggttctgggcagaggatggggcttgagggcagagggcagcttggaggagcacgcccgagtggacaggtggggagctggaaggcttagcggggctccttggagagcagcgctgtccctgggcaccacggaggtggttcctggccagagctgattctgtcctgttcaattttgaactgaagtgcaaacaagcctcagcgcccgctgctcccaccccaaatcgaattcgtgctaatatttctctgggggcggcgggctgcctgccttccggggacggagggcgggggagactggcagggaggccaggcccaaccacggggctgccgggaccaggccatgtgtctggggcggccggcttagctggctgggattgtccacccaaattaaattttaacccagctcataaatcttccactaagtacgtcccctgccgcccgcccgggtccaccccaggccgcagcgtgggccagcacagcgacagccttgttcctctgccccacatggctgtggggaggctgggcctacctgccttgggaagtgggacggtcacccacagacaggcccaggggcaaccttgcaggctgtcccaggaggaagttcagtgttgtccattgggggcctgcttctcccagcaaccttaacttctcaggcctcagtttcctcagctgggcaagtcggggaataacagcatcc

SEQ ID NO: 56256 - DNA, 2228 bp, Homo sapiens
gccgggaagagtcacaggatcccaggaggcaggccctgaaaggcaggggcagctgggtgcccggcagggctatttggggctcagtagcggcagcttgggttctctctctccccaggccccagactcatgccccctccaggagcaagaggaagtggtgtgattcttgaagggtgtcatcagttgtcacagggacaagaccccacctctgccctgctcctctaacctctgttcctggcatgagcaaactgctcacaagtggccagaggccagcgagaaggggaaaagggcgccagaccacgtgcccaggaaggcatcagagtgcgggcttggggtggggtggaggcaggacaggccagcccaggaaggtcactctgtgaggttacgtgccccaccaggtgggacgccagccccggagctgttccctcagccccattcccgaacacttaagaaccacactgtgcaaagtttggagagtccgggatcataacctccactttgccaccagctccgagtgaccttggggaagccagctgtggcactcggcctcagtttccctcctgcacagggaaggaagttggtaggtcctgcacaatctctggggtgccctgtgacccattccaatggggtaaggaaggccgccttcctcacgctgccccctgcgtggacacttggacctggtctggagtgaattgttctgtggggctgggaacacgcgcgggggcggggggggctgtcaatggggaggaggggtccgttccagggcagatggggcctcaacttccccaggtctctcgggtggaaggggctgctcgctcgttgggggccgcccagccgggaagctccacgtgaggccgccctctccctcgcgccccctcgtgcttacacttacatttcgcctccttccagtcggtggaggtgctcaggtccaccttcgccgccatggccaggggggcccaagtgcgcaccccggctgtccgccccaccgccgccgccccccacgccccaactcccgccgaggtccgcgcacggcggccgaacacgcccaggaacgccgggggaccgcacgtgctgctgcgggtcctcgtggcacccgccaagtgtccgggccgggggcgcggggggacgagcagctgccccgccgcgcgcagctgtgccaggcggccggacagtcggctctgtagagacatgagcgggcggcgcgggacggctctccgcccacttggactctatttacggcgctcgggagtgtctctcccttatttactctgggaccgggtggcgactgccagccagcggcgacctgctcggagccagcgggaggcgcggccagaaaacccgggagcgccgctgggcaccctggaacttgtagtccgggccgccggatgggcccacgcactcgtatacacacgtgcgcgcccgcccgggctcccagtgtcgcggatggagccccgcctgagcccttcgacttctcccgtggccgccaggcgcctcccctccgcgagacctcggccgcctctaactttctggttggctgagcgtcggcttccccggcacgggctgaagcccccgggccttccacgcagccccgggcccctctgccgctcggccccgcggcggagcaggcgcgccggccgctgcgtatcgagctgggagagcctggcgcggcttccgcagtgccgagcgttttgcagcctgggagacccgggcttctctccccgcgggtcagcagggcaccgcctccacaccccagcctgccctcctagggacaggtgcgacgaacgggtaaatccggtttggggacttctccccagagcctctgccttctaacagccccggggccaaggctcagctggagcagaatctaggacagctggggaggagagtcgagggtggaaatagtggaatttggaggcaggaaacttaggcttcaagtggcgttcaagggtggaaggattggggtgatgtttttgtgtgtgtctgtgtgtttttttttttttttcttttcttttttaaacaaaaaccggccgggcgcggtggctcacgcctgtaatcccagcactttggtaggccgagttgggtggatcacgaggtcaggagttcgaggcctgcctggccaacatggcgaaaccccgtctctactaaaaatacaaaaattatgcaggcgtggtggtgcatgcctgttaattacagctactcgggaggctgaggcaggagaatcacttgaaccc

SEQ ID NO: 56257 - DNA, 2442 bp, Homo sapiens
tccagcctgggagacagtgagattcgactccgtctcaaaaaaaaaaaaaaaaaaaaaaaaaaaaaagcaggcggttagattgcacaggccctgaaccccatcctaaagcctccagcactttcaagtgagggattaccaggtttgcggatctgctgcaacttggctgcagtgtccaaaatgggtggggcaggtggaattaaagatgaggctgtggagacaagctactggcagagaggacacactttaaaccctgggaagatatcattacccagagagggggaaggatgaggacactgcagagcccaacatcatcgccagacccgagtcatgcggctcctttgttccaggaaccaaggctgaccctagaagcaatagcagcattttcactccgcaggtgcatctcttccacgctttggggtgcctgccctgcctccgacttctggggctgggatttaaggccctaccagggcacagctcgccagctcacaggcggtcaactactgattcagttcttcgtctccttcactcctttacatcggactcacgagggctgaggggcagctccctttcgttaagtgcttcccgcgtgctcaacaccgcacgaattcccctcggccctacaggaccaaacgaccggcgcgctgagaaagggtgtgcggttccactgaggacgcccaagcgggacagccgggcccgccgcggtgagatccccggcctgtccagcccaagcccaagcgccctcgcggtcacgtggcatttccggaacattcagaacctaacagccaggaggcaggagggccgggccgaggccggagcgctggacaacgcgggtagctggcgctcgagggacaggcagctcccaccggctaggacccccatcccgatgcgcgggcgaagggctggggccctgtgccgctggcgatcccggggaccgcctggaactcgcggcactcgggagcgagagggaaagcaacccagaggccccgcagccgccggcgacacagctacagaccccgactgcagccggtactcccatatatcaggggcggggcgaaacccggccttttgaagggcagcgatttaaaccaatcagcgcaaagagttggcaaccctccgcccaattggaatcgctctcattctgaaggcggttccgacatggagtccggcagcccaatgggagaggtggaaatttccagaacgatcagaaccaatgggcgcggccagcgcggctacgattggcagtgcaaaagaccaatccgtgtcgcagaagttcgctcctccctccattcgtggagcctgagatgggtgggtttatagaggagcgcccaatcctgaggtgcgggggaggcagggttgagggaattactccccgctgtccaatgagaaggaagtggagatgatgggctggacctcaagccaatagtagagcagcacagacattccccctagaagaactcgaccagtgagcaggcgaggaaggggcgggagccggggtcccggtagcttctagtaggttccagaaggcggcgcgtgcggttgggaacgcggagcggacggattcgattcaacggggttccggaccgcgctgcgctatggagcaggtgaagggggaggggcgggctgaggccccgagcctgctcggggaccggcggtggccaggccgcggtaggggggcggggcgggcgccggatccaggagaccggagctcggcgctggggccggacggggcggcggcggggaggtgagggccgcgggcggcgggcgggagcgggatctttagcgaggccggccgcggggagcgcccatcgccccctggttgggcgaggagggcccggcggaggccacagcttgggtgagtccggccggcggcgggaagaggggtcgcgaccgggccctgaaggcgtcccgagggggcggctgcgggccatgttggggagggtgcgggccgcagggggcggggtggaggtgggccgggggccggggtccgcacccgcgaggtagccctccgggagatctcagacggccgacggagaaaccgctcgggacttagccacgaggaacttggacggatccagggagcggggacggggatacactgggagtagccgaggatcttagcagcctgggatgcagttggggcaaatgttactcttctacatctgagaaggtcagggtgggagagcgttgagcgggggtctgaggagcgacagaccgactctacctgatgcgggaaagggaagggtgccgcaaaagtccttgggacgaattccatctctgacagtgttttacaaatgtattgcggcccctccccctctttttgtatgcttgtgtgtgtgattgtcgagtgaccgaggaccaacacttccgaaaggtgggtctgaaagatgggtttctgacgacccgggggtggttgtagacaatttacagagatcaaccgctgga

SEQ ID NO: 56258 - DNA, 1661 bp, Homo sapiens
tggaggcagccatcagggaggagtcgcagacaggctcacgtttctctctgggctcaagccccagcctccaaggcccctacttaccagctcccatgggaagccccagcttcaaggccccatggcgcagggcataggacagagccttggacagctgcacgtctcggtcctgaaagaacccagcggtggcccctagtctccatggtgaccctgccctactgcccatcctgaaccctcaatgacccactgcagagagagcccagagagaaaggagtgccagtggtctccaggaatagtaggacccttcagctccgccccccagcaactcccagggagcctggactggtgggagggggtggggaggaggcgcgcacctgttctcggggtctgggagcccttctacccctggaccctgctgcttcctgcctccctcctccagagaagttcatggttaagacctgtggggggcagtgacgaggggggactgctttaaggccccttccacgtccccatccctcccagaaagtcacaaagcctcaggaagtgagcgctgggtgggagtatacggctcattaagttcaccacccccaagtccctgctgcagagagggaaactaaggcccagcaggccagacttgcccaaggtcacacggtcagccaggagcgcagggaggccgagccccgcaccccagatcgctggtgcgccccgcagggtggtccgggaggcagggccgacgtgccgacggaccgggcggaagcgtcggggcggcggggacaaacctccaggatcctcgaccgcggcggacccgccaatgaaaagccgcgtggaaagggggcgggcacttccgcttcggggaaggggcggagcctgagggacccggcggctggtgagcgcccgctggaggctggagcttccgggccctggaaaggggtccccgcgcgccccgggtcggaggcagacccctgggtttgggggacatgggcatttggggcgcctgaacccaagacctctggatggtagggatgcccgggcgtcctggataccctgcgggactcggggctcctgcggggaagatggcacgttttactgcccaaggagtggtcaggggggtggagaagcgctgcggataccctcaggaggtctgcgacagagggggctagctgcgcagcccaggagtggtagtggcccccctggatgacaggcctggccgtatcctcccccagagctgccccgttcagaccatggatcctgaggtgaccttgctgctgcagtgccctggcgggggcctgccccaggagcagatacaggccgagctgagccccgcccatgaccgtcgcccactgccaggtggggacgaggccatcactgccatctgggagacccggctaaaggcccaaccctggctcttcgacgcccccaagttccgcctgcactcagccaccctggcgcctattggctctcgggggccacagctgctcctgcgcctgggccttacttcctaccgagacttcctgggcaccaactggtccagctcagctgcctggctgcgacagcagggtgccaccgactggggtgacacgcaggcctatctggcggacccactgggggtgggcgctgcactagccacagccgatgacttccttgtcttcctgcgccgctcccgg

SEQ ID NO: 56259 - DNA, 1139 bp, Homo sapiens
aagcagctccgtaagatatacctcgctgcagaggggagcaacagcggaacggagacacggtggccgggccgaaaacgtcacaaagccgcagagagcgggctctgtcccgcccgctccccaggtgggcgcccgcgcctgtccagcgagtccgcaggctgggggaccggaggcaccaaaggccaatagacatgtaggggcggggtctccaccgatttttttttttttcctgacaggtggacgtggtcttggcatccacgccaatgagaatgtgagggcggggcctgaatagacgcaggaaatggcgacggccgcgggtctgtgagcagcgggggcggggcctggttgtggcccctccttctcccgtccccaagttccctgggtgggaacggggtcttggggtccctggctgggtggccagaccccgaagccagcgctgggaagggctgcggatgcccgggtcagaggaaggggcaggtccaaggacacgcgggtctggtcctgggcaagaaccgccccctctccgggcctgcttcagtcttcctttgcagaacaacgggccaggccccttccctctgcccccgggtgcttgaagtctagccccatcctggtccaatgcgctcttggtagcctcctttcccagctgcccgcccgccgccatgccgcccttactgcccctgcgcctgtgccggctgtggccccgcaaccctccctcccggctcctcggagcggccgccgggcagcggtgagttgggcgcggggggccggcccggttgttcaatgggtttctgtttgccctacgtgctgagttagttgtggtctctactccgtgtcaggaggctcccaggtttgtctcaggtaaccctcgccttccctgctgaggatcagagatagagaagacccccaaggtcatacaccgatttaagcggcagaggaggaagtttgagtccaggtcaaacccaacgctcttaccacagctctagtggtttccaagcatcgctgtatcactgtgcataaccctctgtggggggtgggagatggggaggtgtcgggtacaaaatccagattcctgggctctgctctggagattctgaactggaggaatcaattgggtgggggtcaggaatcagtttctttctctt

SEQ ID NO: 56260 - DNA, 613 bp, Homo sapiens
actcttccttcccaccccagacatgtcgcttctcctccctagggctgccactccccaccaccgtccccagccccgttctgttccgggctgggactctgcccccggagcaccctccccagctgacatcacccatcccactccagccccaggcccctctgcccacgctgcacccagcaccaccagcgccctgacccccggacctgccgctgccgctgccgacgccgcagcttcctccgttgccaagggcggggcttagagctcaacccagacacctgcaggtgaggcgtctgtggggtggtgtttgtttgggaaggcaccaaggccctgtcctggagcaggtccagggtgagcctgccagtaggaggagggccagggaaggggaaactgttgaatgtgttgaacaaatatttaccaaacagctgctggcacctggagctgtataagcaagtccaacattctaactcaggagtcagatacaggagggacaatgccagcagaggatgtcaagggctgtggtgaggggtacctggcctcgtctttcagaggtcagagatctcttggaggaggtgacatctgcccggagtagaaatgtaggacacagcttttccagctt

SEQ ID NO: 56261 - DNA, 2874 bp, Homo sapiens
tgtgggtatgatcttagtgggcctaaggcaggagtgggttgaaccaggagacaattcctgacagcgattactactttcaaatcattttctcagtcatgatgtcactggacatgccataggtcaattagcatgaggcagaaaggggttagggccccagagctaccgcctccagagcccagttagccccaccagtcacgcacaatgcttcacatgcacctcctcactttctcctcgctcgattctgaggtcagcatcatgattgtcttccttttacaattgaggaaataggctcagaaaggctaactggccggggggatttgacctcaactcagctgtctccctaaccttcaacctaggtttagctgcctctcaactgcaggttcattacttcagttgacagatgtttggtggctgctggggcgcctgaaaataagtctggtgggggaacaggcccagccagatcattccagtcatgagtcacagcccaggtgcacaggtagaggtaagcctggctcctgggagagagatgtgggcaggagcattggctggaagccagggcttgtcattggacatcatctcggtcctgcaggggccctgtggggtgggtgtcatcaagcccgtgttacacgcctgtattggatgacaaattctaccaagcacacagccgaccgggagttcaaacgtgagtgtcactgtgaagcccaggctccacagcgactgagggccgtgggccatgatgaggcccgggaaaacaggagtgctgtgggagaggctgggggcgacttgaaatggcgcctcaagaccccctccgggaacccacgcccgcctgaccttactatcacctcggccggaagtgtctccggccttttcggaagtcactttcacctaaccttacagactaccgctccgccggaagtgacgcagggcagcggcgtcgcgggggcggggctcgggaaagacccgtgccagcgggcgtgtggccgcgggtttcgcacggtccaataagggagggcggcgtggcccggcctggtagcgacgaggacgcgcctgcgcagaggcggcagcaccaccggggttgactccgggggcgcggcgaggaggtgagcgggggccacagcccgggctggggggagccggggtgcaagagggcaggctggatcaggccgggcagaagcggaccgggctccgagtgtcaacgagagctaggtgacgaggaaattgggggtgggggccggagctgtccggagatgccgcagggggagggttctcacgccgcacggggcggagtcctgggactcggggcgggacgtggaaccgggacgggtgggacctccgagctggtgccagtggaaggcggagcccggcggcggggggcggagctaggagggtcgggggacggagcctggctcttgaaggaggagctggaggaggtgaaaggcggagcctcggggtcggaagcagagggggacggagcggaggcgctgggggcggggcttcagccggtgagtggcgtggctacggctccggaaaaggggtctagttctgtcgaaggcggggctgcaggcccgggggcggtaccgcgtcctccgaagggcggtgccaaggagccaagtgaggagcctggcccgagtaatggccccgggcgtcctcgcgggggtggtctccgtggtggccgggcttggggacgccgtaggccgagaactccaccgggagaggtggtgtgggtggagcgggctcggcggccagcagacacagggccagtctgggtgccccggagacccccaagggctcagagttggggcggcgccccgggcggaagcacagggccaggctggggggtatctcccgaggacccgggctcctcggagccacccagtggggatgtgtgggtgcctcggggccggccccctgcagcggccgcagaggtgttggtgtgctggaccgggggcagctgggtgtggcgtgagtggggccgcccagtcggggcaactgcagtgcagccagatagggtctggactttgcgtaaagggacaggcgggaactgaagagcggaggtggggactgggagggagggaaggtatgggggtgagcaaaggggcgggtccctggctgctgtggcctcccctgaccccctccccccgctgctggggtcctcggccaagcccccttctcactggactggtaagtgtggccccggagcccgggggagagggcggtgacccgggacaaaggggatcccccggggcaaggaagatacagtggcggtggaaccctcctgttacctacccgtgttccatactctccctgccctcccccacgttcagtcggtcggtcggggtctgtgcccacagagacatgaggctgagctggttccgggtcctgacagtactgtccatctgcctgagcgccgtggccacggccacgggggccgagggcaaaaggaagctgcagatcggggtcaagaagcgggtggaccactgtcccatcaaatcgcgcaaaggggatgtcctgcacatgcactacacggtgagtgggttgggcgggccttttgggagtgggtggggcttccgaggaccagagagtgcttgggagtctggttctccataagccaggtaggtgaccttgggcaagtcccctctcgcctctaagccagtttccatggttctgccttgcccttgcctactgcccaggtgggcaccagcaggcagtgacagtgtactgtgagctgcccaaggctctgtcctcttaaagaactatgaccagctgggcgcagtggctcacccctgtaatcccagcactttgggaggccgaggcgggtggatcacctgaggtcaggaatttgagaccagtttggcctcatgatgaaactttctc

SEQ ID NO: 56262 - DNA, 3166 bp, Homo sapiens
ccaagatgacaggagccgggctcccctcaccctgccacccccgccagccccccaggaaatctcttacctctgtgggtttgtaacagtcaaccagcagctcctagcagaggatgggggaggaaggataagtgagtcctcaggagtgggggcctggagctcgcctatacccacttccaagagactggggccaccctgaggcacaggagatgccacaacaacctcacagctaggcattggccccattctgttgaggcaggagctggggcttgagggcctggctccacagcctcactttcccggggcagtgcctcaggcaacccatcgccccccagccccctcaccttgaccctggcagcccgggcatcgtcactctccatgtccaggagctcatccacgtcaatctccagttctgggatctcctcttcctggggtgggggtgggggaggagggagagacataagcctgagttggagagagggtgtgagaggggctctgggttgaggcccctgcctacctcggaggaacccagccctctgcccagcagacagaacagcagctgctctggggaggaaaacagatcaggcccgtgccaaggcaaactgcccaaagcggggtgggggggggagcttcctgtccctgccagtgggcacggggggtgacagacaaggccagacagccagggttggggaccttgggctgggaacccagcagatgtgtctccccaacatccgggccccccatctcaccagagcaccggtgggtgcagctgtcccagcttatcatacccccctcccctcccccaaacacctgtcacagctccccgggagtgaggaggaagtgaaggctgaggggtcactgggaaggacccaggcctggcaaagaggaaacaaagagcccatgctttggtgagggaggggatgcccaccaccctgccacaccctccccaggaagcccctatcctgtttgtagtcagctgcattccagggctgggctagggtaggcaggcagcaccgggcaaacccactcctccaccctgccccccggggcctgagtcaccgtctgaacaaccagggagtcatgggggtggagaagcagagcccagaaagcgggctagcctgcacgcacgccaagatggagctccaggctagcccacagaacagcccagccgcagccgtcctaccagaccagcaccttgtaaccacagtctaacccagcgggcaccaggcggtgagacctcctgccgctgccagcccaggatagcccccttgcctcttgcccaaggctcaggctaccccttgaggcgtctggaggacactaggcttgacctggggagtggcatgatggggggcagggtccgaggcaacggagaaggcagaagtgacttaggtcaggcaagaaagagtatatattgggggcgggagtgcagaggggaggggagcgcgcggggaagcaaagcgccctttgactccagtgacaggcgagctcacagtggagctgccaggcggaccggcgcgagaccgattttggggtgtcggcgcggggtgggaacacacctggcagtcgtagaggcgcgtgagctgctccaggatccactcctctaggttgaggcgcttccgtagctccttgcggtcatacttgacggtgaccttcccttggcgcctcactgggccctcatcgtccgccccgcccgggccctctcctgcggccccgggggggctctgaaagtagacgcgtggtcctgggccgccactgcccggcccgggggccggggccgccaacgccgcgccccccgcggtgccgctgtccgccatggcggccgccggggccacgtgcgagcgtcgggcccctccctgcgccaccgcctccgggacgcccgccggctggctcgggttagctcgccggctccgctccgcgcggctccgcggcgagggcggcggcgggggcgcccgggggcagctgcagcatgcggagcccccgggcttggcctggccgcgccccgccccctccccgccgatccgcccgccctttgtcccccgcggccgccgcccgagctgcagccgccgaagcgctttctctgtctcgctcttcctccgccccccgaccacacccccttaaagggccagcccctctacaggcccctctcccctactccgcccccgggcaggggtaggggagggtctattcggcagggggtggcctagctgtccgtactccccaaacgcaaccttccagtcccaaacccaggcgttctaagcgctcaggacgacgatttgcgctcacgccaggaccctagtcttcattggacccttcctcattctgtcctcattgaggccatctgagaataggggctatctgagaatgcaggggagtggacatcgtgtgcagacagggagtctggtgaggagacgctgcggtccccgatgtccaggtcctccagccctcggccagcgaggagcgaacgggctcctccgcacggaccgacacgtggactgggctcctgggaaaggaagagtggagaaggcgggcaggagctgtccgggtccctagactctccgagtagcaggtcccacgcccccagcggaagaagccggggctgggggtgagcggtggcacccggccggcccaaacggccaaccccgggcagccaccgcccaccggcaagatggcgcgaggctcgggcttgtgggaaacggagtccgctcccggcgccgcccctcccccgccctgcggccaggccgggaagcgcaaagttgtttggggcgtcctctgcgcctcgcgacccgagtgcgcacagagggggaaactaaggcgcaaagagctgggcagtgcgggggccgcgacttataataataaaggcggtaattgcggctgaccctaggagcgtgcgtcgggaccgccgcccagtcggctccgcagagagggcgccgtgccggggctcctgcacccccgccctgcggctcctcggtccttcacatagccctggcccacctccaataagccgacggcgcatcccattccctccctctattttattttctgcatctttaaatggtctcattcattcgtgtattgtctgtctcccacttctagattgtgagtgccacggggctgaggcctgcgccgacctggtctgctggtgctaccaggcttgaacagtcttcaaatc

SEQ ID NO: 56263 - DNA, 724 bp, Homo sapiens
ggctaagtgctcccagggaggggggaccgcgcggcataagagtgggtgaggcgaagccagggcagaggggggcggaagaagcttttcctgcattcagctaagtgcggcagaagagggtgggcgacagggctgtgcagcgaccccccggcccaagtctagccctccgctggtactgcagccctagtcgctcggaaacctcagtgggctgatcccggaccgccttaagcagcgccctctacacccagtccctccagctgctccccaacagccacttcggcccccagcgccctccttccaccacaggcctgaagaatcaggttctgctgagccccgcagcaaagcccccgacccgtccgcgtgcccctgccccaatccccgctccggctgcagtcgccgccccggccgccagggggagccgacgcggtgggagggggcggggcccgggaggccccgccccgtccccgccccgcccgggccccgccgaggctctggtcggtccgggacagactggcgggcgggcgggcactgacgccgcggggccggagcgggccgcgcggtgggagcagcggcgccgtcggtccccgtcagggctccgtgggtccccgacccgcccctggccgggccatggcgggcgcccagcccggcgtccacgcgctgcagttggagccgcccaccgtggtggagaccctgcggcgcgggagtaagttcatcaaatgggacgagg

SEQ ID NO: 56264 - DNA, 768 bp, Homo sapiens
aggtgcacgtctcacccagctgcaccccaactcctgactcccaacctcagcctctcacctctcagagccttcccacaacccggtgatggctctgaaggctgacctctgacctcagtaaaccacatcccacactgggtgtgacctcagacccctaagcccgcattgagttcacctgcccagttggttatcatttcagctgacctctgacctctcacccctgactgttcacctcactatgccccctccttagacatggctctgacttacccctgacctgtaacctctctatgtcatcccttaccccgctattagggctgtggtatgctacttcctgacttctcaccccactgaaccaccctatctgcctccctgctgaatatcactgcagacctttacctttgacctatgacccctctcaacccatactgggttaataccatctgacctcgacctcttggcctctccccaagccacactgccctgagagtaccccttgaattccccactgagtcacctcggcacacactgggaaaaacccctccagacttcctaagcagctgtgtggtcctgacccctcaccctgtggccctgtcctctgcagggtctcccagctctgacagctgcccaggcctgagcaatggggaggaggtagggcttgagaagcccagcctggagcctcagaagtctctgggtgacgagggcctgaaccgaggcccctatgttcttggacctgctgaccgtgaggatgaggaggaagatgaggaagag

SEQ ID NO: 56265 - DNA, 2718 bp, Homo sapiens
aaataggtgggcagtaggcctgcctgtgactctgggggaagggaagtggacagtcacagacacgcaggggctgggccacccagcatcccctcatccctgtgagggagatgttatgcctgttttacagatgaggagactgaggcccggagccatctgtcgtgtgctaggccacagctaagtcaagacgtcctgacctggaggcagggcaggcctggaccctccgtggtggactgtcttcagccagcctggacctgtcccatgcctcaagaccagcgaaaagtggcagagagcccacagtgcgggctccagggcggggctgggctcgcagcagggtcggcttggcacctcttcaaggcctctcccagcttcctggctcttcccaggctgcccgcctgcatccctcctccaggggaaggcggcctcttatctgggcttatctcctgccaattgagtatcttctttgctttgtttttgctgcagcctcaggcaaacagatggggtggggaggccagggaaacaggctccggagtagggccctcctccctcagggtcaatgcaatggccccagacttcctcacttcttctgtgggacgctgccctatcccccagttctgctcactccagtgtattccgtatctaggctcctcagcagccaactcccaccttcctgactctagctggtgtccactgagggacacactccaagtcagttcccaggtcctcaaataccagctgaatgtctaacttctgggtgtgacattccagcccctagaagcctggcctctgctgctcccctgtccttccatgggtccactcctccttgcgccgggggggatgaccctcacctcaccttccggtcgcagctctagctgcctcctccctgaagccctctctgactgccctgccgattccgggccctcgggagcttccgcgagcagggccgtggcgcaatgcatctctgtgcccggcaccaagaaccggcccgggttatagggggcgccaataaatctttctggaacggagcccccgctctgtccgggtccccgcatgaagcctcagtttccagcgaccgcgctgctgccagcctggctcagccgctccctcccgccccgcgaggtacccgggcggcgctggccccgggccggccacacagtagctgctggaaagggctgacccaaataggagcgagtgaccctctctggggggccgcggcacggtttgcagagcgcgggatcgggctgccggcagcgctgcggtcccaatgcgcgtgctggggacttggacctgggccgcgcagcccaggcccgcgagccgccgcgaccccttccgtctctgtcgctggatgtcaggcagagcctaagtttccctcgtaagacagcggcctcttttgaaagtatccgtgagagcactaccccggcctgccggagccccagtcgacgcacagaaaagcctcggcggcacagacgcgggctttattaacatttggtagtgagcacggcccccagggcatcgcgggggctcgggtcccggtgacgcaacggttaaacctggctcgcgacttagcgcaggcgcctgggggaaagcccggagcctgagggcggggccacggagccacttccggcggctgtgggcggaaaacccaaaacttccgatgggaccaagccttccgtggcttcacacgcaccggaagggaatctgggtcagccctccctccaaaggagacagcacggatcctctttttgcataggcctgagggaagtacttccgcccatattcaagatggctgcccagggcagtgggaacgggtggagtttcgggatgtggagcgaaggtcactgggagggggcggagcttcccctgcccaagttccgatcccaccaggactggaagactcgcgtccagctggagctttgccgcatctgcgttgctgtgcccgcgctcttcgggcgaggaagtcccttctggtggagggagaaaagggttacatgagttagattaccatggcagctcgagccaggctctccacttccgtgagccttcctctaagtgagatcgggggggagataatgaaggccacaactcccaggaggctccacgccgggcggtcagggacgctcgcgaggacgcatgggcccccaggaatgggaactggttagatcccaggaactccgtgccggagacgggaagagaggatgcctagggccctaaatggaaaggccagagctggagacctagcacccagaagatgagaccgcaattcgagaatcaaagggccgggagcgatggtgagcgcctgtaatcccagcactttgggaggttgaagcgggaggatcctttgaggccaggagttccaggctgcagtgagccgtgatcgcaccactgcactccagcctgggcgacagagcgcacaggtgccagcaaggagcacaaataccagcatgcctggtcttccaagaattcggggaacccaggagctttggcctggagtgggatctagactacagatcccagcatgccctgtgagacacacacacacacacacacacacacacacacgcctggagtgggatctagactacagatcccagcatgccctgtgacacacacacacacacacacacacacacacacacacacgcctggagtgggatctagactacagatcccagcatgccctgtgactgacacacacacacacacacacacacacacctggag

SEQ ID NO: 56266 - DNA, 1142 bp, Homo sapiens
cacacacacacctggagtgggatctagactacagatcccagcatgccctgtgactcacacacacacacacacacacacacacacacacacacacacgcctggagtgggatctagactacagatcccagcatgccctgtgactctcacacacacacacacacacacacacacacacacacacacgcctggagtgggatctagactacagatcccagcatgccctgtgactcacacacacacacacacacacacaccaggcgggggaagagctggggagtgggggcggggaagtcttgtgactacaaatcccagaatgctctggagctaggaaggaacaggacggctttggggaggggtcgtgggactccagatccgggcgtgccttgggacaaggcagggacagaccggcggggggcggcctggtacttcaggtcctggcacgctggggactggcgctcaccttaaaggagtccacaaactcgtcactcatcctccggagctcgcggccatagcgctgtgctgcccagaggttggggggcgccgagcgcgagcggccccgaaaggggctgggctcctcccccatcccttcgtcgtcctccgtccccgcggggtaggagctgtggcgactccggatctccacagccccagcgcctgcagagggtcagtgggtaggggggcgacgttaatctcagctcctctaagcccctggccctgcctgaaccctccccatcagctctgcaggcccactcgtgggtcttccaggggcgcatcacagcccacctctcagagccccagtcccttgtatgtgaatcgaggggaagctcaggggcctttggtgaagatttaggttaacttctcattaatcccacgaatccttaccgagtgccaataatgggtgaggccctgtgcctagcacaaaataagggcataagaaatactagttacatcacaaggtcaggagatcgagaccatcctggccaacatggtgaaaccctgtctctactcaaaacacaaaaattagctgggcatagtggcacgtgcctatagtcccagttactcgggaggctgaggcagaagaatcgtttgaacccaggagggagaggtcgcagtgagccgagatcacgccactgcactccagcctg

SEQ ID NO: 56267 - DNA, 705 bp, Homo sapiens
caggagaactgctttaacccagtgggtggaggttgcagtgagccgagattgtgccactgcactccagcctgggtggcagagcgagactctgtctcaaataataataataataacaaaagaaaaaagaaagtgctttgtaggctgcaagtgcactatgggttattattcagaggcccgcctactatggtctatttgaactgtgctctgtgccatctcccaactcctgccaactccactcctctacccagaccgataaagacttagaaccactcccctgagcaaacactcagagtgcaatgacagagtgagaagcaggtggggggctgggcgcagtggctcacgcctgtaatcccagcactttgggaggccgaggttggggagatcacgaggtcaggagtttaagaccagactgaccaagatggtaaaaccccgtctctactaaaaatacaaaaaaattagccaggcgcggtggcaggcacctgtaatcccagctactcgggaggctgaagcagaagaatcgcttgaacctgggcagcagaggttacagtgagccaagatcacgccactgcacccatctcaaaaaaaaaaaaaaaaaaaaaaaaagagaggcaggtagggaaacatgctgggtgtttatggcaagatatgtctgtcagggaggctctttggaggaggtaaattacaggccaggaactgaaggcgggg

SEQ ID NO: 56268 - DNA, 2009 bp, Homo sapiens
tcctatatgttcctgctaattaactcaacagtcctacaatggtggttattaattgctgttttacgaaagaggaaactggggctctgagagtttggggaccgacccaaagcattcagtgcctgtggatgcaactgggatgcagggagccagtgggctgggggtgaggtgtcccggcaggtggaggtggtggggtacttacctccatgatggctgctgctggttggctgctcctgctggtgactggcgtcccacaggaggcctggggcctggcgatgatgcttgccggagcctgagggcccgtcccctgcggggctggggcccaggcccctctctgcagagctggagtcttcctgctcactcggctcaaactctgggatctggaacatgctctgggctgtgaggacaagatgttacgtagtcaaggcacagctggggccaacggtggccctggaaggcagaggcaggtacccctggcttcctctcccaccgtagcgcccccaggcccgccaggcctcctgggccctcatctgtctgccgggtctggcctggcagggagctgaggctgtcggctcaggacctcagtctcccctcagaaccccggtggacccaggccccgccccgcccgtggtgacggcgcacaggtctcaccccaagcccgatctcgaggcccctgacccgggcctgccgcctccctccagcaccccgggctccgggccctagttgcttgggcaacgggaactgtcagcgacctggcccaatcacctctcggaacgtcactcgggtaggtccagaggcggggtcaacccggcccggccccgcccccccgccggatccaaggctcctcgtccgcatcctttttcctccctccttcggccccggggctcacatcctcgctgcctcacaccttgggcgtgtgtgggagcaggagagggattctctggggtccccatttggaacctggagacccacttctgccaacaagtccttcagcccctctgggccttagtttccccccagtgaagtggggatagtgacagctcccccgggagccagtgaaaactttgtgaagggagtgattactgcgggcgaaggcgcttggcacagccacaactgaagctcagccgtcggatgtgattattgttgctattgttaccgctccgcctggactgggtgcccggtcggaaagtcccgctccccgctcctcctcccaggcgcggaagcttcgcgccgcccgcctcgggggacacctcccgcgccatctcgggggcactggagataaggaaaggaacctcctccctggctgggatggctgcccgggcgcgggaggagggccggggacccggtgagggaggaccgtagggcccgtgggggcttcacgcctggcaggcggccggccaggtgagcagggccgcgggcgcgccggggcgaggggcgggcccgcgcgggggattcggggctccgcgggttcaggcccgggggcggggcccgggggccatcttggctatgggcggaagttttcttcagagaccgagggacgggaatccgttgccgcccccggccgggcggcacgaccccgatttgggtataggagagaggagcgtgggaactggcggacccccatacaagtaaaggcgggcggcacggggcacggcccacccggggaccccctggatgcggcacggcccccgcaactcggccgccctcctgccgcctcccgtaaccccgggcgcccgccagcggcgcagctcgcgccaattctcgtacggtttcacgccgggtgcggcgctggactgcggagccagccgggccgctgcgcaatttgcgtagcgaacggcgcccgcgcaggcgcggagggggaggggggcggagcagcgggagccggggagccggagccccgggtccccacgacctgagccggctctcccatcagcggcctgaggacctggcgtccgcctcctccctccccttgaggctggagcgtggacgcggtgggggagggtggggcgggg

SEQ ID NO: 56269 - DNA, 834 bp, Homo sapiens
ccaacccggcccggctcagttccccagcccgctcttccttcccgctccagccatccgcgacccttggctccctccttgtatgtggcccacaggtgtcgctcaagtcttccgaccgccaaggctcggacgaggagagcgtgcatagcgacactcgggacctgtggaccacgaccacgctgtcccaggcacagctgaacatgccgctgtccgaggtctgcgagggcttcgacgaggagggccgcaacattagcaagacccgcgggtggcacagcccggggcggggctcgttggacgaggggtacaaggccagccacaagccggaggaactggacgagcacgcgctggtggagctggagttgcaccgcggcagctccatggaaatcaatctgggggagaaggacactgcatcccagatcgaggccggtcagtgtggcctcgccaggccgtgggcacccgcagggcaataagctggccagggactcaatttctggagctgtaaaatggggggaagctgatgggatccaagtttctaggattctctgggagaggcgcccgcgccaatctttcgccctttaaatccgccaggcattcttggagcgccccctcccgggcaggcgttgtaacaggcctttcggtcgtgacgcgcagagtccggggaaggacgcaccaaataaattgcgcaaagaccccgtggtaggacctgcggggtttttttgttttgtttgttttgttttgttttgtttttgagacaggatctcactctgtcgcccaggctggatggagtgcagtggtgcgattatagctcactgcagttcaagtgatcctcccgcctcc

SEQ ID NO: 56270 - DNA, 3390 bp, Homo sapiens
gacccagtgggggacatgtggtgatgggcagaggcctgggctccaggctgagtgcagcccctctccagctgagggaggcttttctgtggctgtttctccacctgcacagtgggatgaccgccttggtgtggcctcgactgcctctggttggggagttgtgaggagcctttggacagtggattatgtgggtgaacttttgctgctgtggtaggaaagcccagcggtgataaagggccagctgatggcttagagtgggtggctggtccagaaggtgggcaaactgctcgctaccaccgccctagttcaggcctgcaacctcttccctagccttgacctcatccatcctccaccttaacactcagcacccttagagatgcaaagttccccaggctaacacagacctgagtgccctgcgctactgctacctcgaatcatctgcggttcctcgaatcacacatgcggcgccccctggtggggagacctttcggttgctcactgccctgagccgagctctgccctcctcctaggctaccagttagggatcggcagggaccacttcctgactaaggagctgcagcgatacatcgaagggctcaagaagcgccggagcaagaggctgtacgtgaattaaaaacgccaccttgggctcgagcagcgacccgaaccagccccgtgccagcccggtccccagacccaagcctgaccccatccgagtggaatttgagtcctaaagaaataaaagagtcgatgcatggtccgtgagtcagtgcaggacagcccgcgtgaggcggacgcacgtggccccgcccttccccgtgaccttcattcggtcaccgcagtgaccttcattcggtcaccgcagtgaccttgagctttctccgtccgggccctatcggccctaccttccgggactcgcaatccaggacttattgcatgttttaagtcggcttcacccaccccgagttccgcagctctgtggggctactgggtctacggttcgagtgctcagttggtgtcgctttgggggaagggggtagggggaacggggcagcacctccctcctcgcgacggcgcgctaggctccgcccctcaagcataggtagcaggtccagcctctccgctcgtcccgcccttgcgttttcatctgtaagtggtctcttggctccgcgactgcagcctgcaccgcctcgcccactcctctcgcgcgcagcaagccccgcctcctccgttacgaaagagcgcttctggccccacttgctctcggctctattgtccccgccctccgcgtctccggccccgcccctcccaggggccgcgtacgcatgtgcgccgcagtggctcggcgggctgcggggcgggacctgcacgaaggcccgcccactggcgctgccggctccgccccgactcgtccgggcgcgcaggcgccgcccgccccgctggtctgattagcataggaccccgggccccgccccctgctttgcatgcgcacggccggccccacccccgctgtcagctggaggaagcggagtaggaagcggccgcgatgtccttttgtgtcctacaagcagccggcggcgccgccgagtgaggggacgcggcgcggtggggcggcgcggcccgaggaggcggcggaggaggggccgcccgcggcccccggctcactccggcactccgggccgctcggcccccatgcctgcccgaccgcgctgccggagccccaggtccgggggcggaggggagcgctgccgcgggggtgggcgggcggggcgcgggggccatgtgcgagcgcggcagggaggcgggcggggcgggctgcaggcggggtccgactctggggccagtccgggccacggttgggacccagtcgagggtcggactggtcagggttcaggcgggatccggcgtccgagtcctggtgggccggcctggggcaggatctggctctggctgcgggtcctgactcgggtcagggttgggcctccgatccagcccgctccggggcagggttcaatcccgcatttgccgaagtccctggggctggccggggtggaagacggggagggctctatgtctgggaaggggctctgaagaccacgtgggggcgctcgaaggggcctggggccaccctcctctctgggtcaaaggtcatcgcaccggcaggggagaacttcctcctccttggctctccccacttacttcctgataacctggtagaggtctcccgcgggcggggagggggaggcgtagcaactttaggcaacttcccaaaggtgtgcgcaggttgggggcgggacgcggcgccccgggaggtggcggcctctgcgacagcgggagtataagagtggacctgcaggctggtcgcgaggaggtggagcggcgcccgccgtgtgcctgggaccggcatgctggggcaggagggcagccgcgtgtcaggtgtgaaaagctctggaggtgttttcatgagtccgtgcctgtgcgtgtggatgtggggagacctagtgagagtgtgtgtgatcatgagccttgactgagttcgtggatggggtgtgcgctccaggagaagtgtgtgagcacaagtgtgagcaggagtgagcacgggtttgggaaggccggtgcaagtgtgaaagccctcagcagagagcgagcctgcgtgggcttgtggggctcctgagcaccccggtgagtggagtgtgtgaactcggtgtgagcacgtccactggccttgggtctgctctccaatgcagaatacccagatgagggcagggtctcagaggtccccccaacatctggagaaaactgggaagtatcctgctcctggctagggattccaggtggggttgaaggttgcctgggggctacggttaccctgctccctggcctgggtgggagtaggggctttctaagcctcccccaggttcccaagggggagacctgctgtcagttactggccctgaagactctgtttccatggcaacagctaggagggggcagtgttcctgggcagtccttccttggactctgccccccttcttccccacttgctgggcttggaagcctggccctaggcccgaggttgggcaacccgtgtggcagggtgtctcccatcccccataccagtgctttcctgcgaacctatgggtctctccgtgcaggtgaccagcgccatgtccagccaggtggtgggcattgagcctctctacatcaaggcagagccggccagccctgacagtccaaagggttcctcggagacagagaccgagcctcctgtggccctggcccctggtccagctcccactcgctgcctcccaggccacaaggaagaggaggatggggagggggctgggcctggcgagcagggcggtgggaagctggtgctcagctccctgccca

SEQ ID NO: 56271 - DNA, 520 bp, Homo sapiens
ctgcactcccagcctgggtgacagagtgagagttcgtatcaaaaaaaaaaaaaaaaaaaaaatcttgagtgcttaccttgtgctaggcactgtattcttttatgatctcagttagtccccacagcaaccctataaggtgtcagtactgttataactgaaactaagagaggcatttgaaactttgttgaagtctcacaactaggaaatggcagaaccaagatttgaacttgggtcagtataggtccagagctgagctcttcaatgttagactgcttcctctgcttattactaataacaccgaactttggacagacgctgaatgactgattgtgacattccagcacgtttttttttttttttttgagacagtctcgtgtggtcgcccaggctggagtgcagtggcacgatctcggctcactgcaagctccgcctcccgggttcacaccattctcctgcctcagcctcctgagtagctgggactacaggtgcccgccaccacgcctggctaattttttgtact

SEQ ID NO: 56272 - DNA, 2776 bp, Homo sapiens
cagcagcatgttggggatcccgcggctgatggggaacatacgtccagattccgggcactgcagggtgccctctatcacttccacctgcgggcagggagggacagagctgagcactggcagcctcagtgcgggaggcaggtggcccgggaagcaagtgatgggccgcttctcacctccagcagcaggtggtgcatggtcctcagaaactcctcattctcctcatatccctcaaccggccctttcggcacctggatcagacgcaactgtgggcaagaggccaaaattatctccgggcatcccgaactcccgcctcagcccggctgaggtgtgcccgccccgcattccccgggatatgctggggcggggtaaggatcctcacgttatcggccgcctccaggaacgccgaccactccactttaggtatcatacgcgccacgaagttggggttgaattccacagggcagatacggacctcggtggcctgcagggcggaggagtttaggcaagcactggaccccggcccaccatcccgcccgaaaagggaagactgccgccggcgggtacctggaggcgcagggggaagccacgggaccccaccccccgcacatgcgagctcagcagattgtgggtaagcagtttcatgtcgccgcacaaactctcgccaggccggaaccggaaaaaggtcgtcctccgctgcctcacttccggggatgctcctctcgatgctattggatagccaggagaaccggaagtggcgaacttgctggaacttctcgtgtttgtgggagctgaggtaggtaggtgaaagacctgtcgggtcacgcgccgctaccggaagcgtctcagcaggaggttcctacggcgcacgcccagcttttttttgccacaaattcttcgtaagatgcaaatcatatgcaaaatagctgcaatgcaggagctctcgttgaatgcaaaataaacacattttactcctacacaggcgcctaacaccgtcgtcctctgtatcccactttcggttaaggggcagaaataccgccctatctgtaaattaggcccatggaagccgagccgcacctcattcctatatgcaaattagctgctccagtgccgaaagctccgccccatttgtagttgcgtcggctgtccagcacccagtgcaaacgaggcgtgggtcccggaagctctgttctgcgggtggccgctcgcgcctgcgcagtggaggcggcccaggcccgccttccgcagggtgtcgccgctgtgccgctagcggtgccccgcctgctgcggtggcaccagccaggaggcggagtggaagtggccgtggggcgggtatgggactagctggcgtgtgcgccctgagacgctcagcgggctatatactcgtcggtggggccggcggtcagtctgcggcagcggcagcaagacggtacagtgaaggagagtgggcgtctggcggggtccgcagtttcagcagagccgctgcagccatggccccaatcaaggtgaccgctggcccggccgggcctgacatcccccactacccccatggcaatccccgtcccgctagtctgagagtatcgctttatttcctgcctgccagacccctcccctccgcccgcccggctcatcccttcagaaggccctcgtggctgcccacctttctcgccaatcgtgggggcctcacctcccgggacagtcccgaggcattgtgttttttgttttttgtttttttttgagacggagtctttctgtgtcgcccaggctggagtgcagtgacgcaatctctgctcactgcagcctccgcctcccgggttcaagcgattctactgcctcagcctcctgagtagctgggactacagatgcgagccaccacgcccagctattgtatttttagtagagacgggatttcaccccgttgttcagattggtctcgaactcctgacctcaggtgaaccccccccgcccccccccgcctcggcttcccgaagtgctaggattacaggtgtgagacaccactcccggcctgatttcccctatcttctgaaacagctgtcccttagcgcccccgcgggggcttaccccatcccactccatgacctcccctccccccatggcgaattcccacctttctgtctttcactcacttcctggaaccgtccccagggccttggaccttcccccttctcctcccaaaccttgtgagaccccattccctttctacttcatcctgctctcaacctttgggctcctcagaggccctcacctctgactctctctccctacccactctggtcccatgaagccctcaagtactctggggatggatccttcccccttcaaaagattccttcttttgttctacacctcctgggtgtaggggcctggacaccctcccccaacgttccacctgccgctgcccttcctcttcctcctcctgagggtgggaccctcagacctggccaagatcctctccctccatgttgtcagggactcctcctcacccccaaatacagccctctagcccctgtccattttattccactcctttcctgtaacctagacagcatgttatgcaaccctttgcgacacatggggaaaccttccctccctttctctgttgtcaccaatggccccttaagaggagcagggccaccttgaaacttggaggatatggggtaacccagtgggagcgggcagggagggcccttggaaactgacagggctggagtatcctgctgggtttcagccccggttcctgcaggcacagctgccaggc

SEQ ID NO: 56273 - DNA, 1339 bp, Homo sapiens
aagggtgtgtgtgtgtgtgcgtgtgtgtgtgtgaatgtgtgtgagcatgtgtgaatgtgtgtaagcatgtgtgaatgtgcatgcgtgtgagcatgtgtgaatgtgtgtgtgtagggagttggggagtgtgtgactcagacatgttgagctccaagttgagtggtcggcgatgcaaaggtgccgagtgggggagagcgattgaggaaccagcgtggccagagtggaggagaggaggaaggatgaggtcagggtggtgaggcggcacctctccacggccttgaaggtcatggtgagctgctgagtcaactcagggagaagccactggagagctttaagcccggcatggccgtgagccaggcagtttctgaatgactccttcagtgctgggtggatgccccctggaggaggattcgtgcctgcaccccagcatggcttggaggcacagggtgaggcacagcaagtgcccccctggagcatgggagtgcccggggagaacaggaagggagagccggcctggtgtcaggtagtgggggctgggccgggcctcactctacagtagcgggaccccaggccgcgcaggctgcactctgagtcacggggcacctggacgggcactgggcaaatggccctgggccccacccttcctggctctggcttcccactgcctcctgccacctgggtagctctttgggaccactcccctgggcattactgctaactccacctccactatttcaccctcaagtggtgggtggggagacgaccccttctcagacacttgggtgggaaggagggggaccccgaagatctagcaacagagggtcagctgcccagaaggctttggaggctgttttttgttttttgagactggggccctgaattatctgcttagagagctgggccccagccaggccgctggggtgccaggcggagctccggggctgcctgcagcagggagaaagcctcactctgacctggctctggttggctcagggctcttgctggatctgggcccccacctgccctggcctccttggcttccccttccgcccaaaccccagagccctcctgcttctggcctttgagactgaaccagagctagctaaaaaattcgaacccaggccgggagtggtggctcacacctgtaatcccagcactttgggaggctgaagcgggtggatcacctgagaggtcaggggttccagaccagcctgcaacgtggtgaaacccccgtctctactaaaaatacaaaaattagccaggtgtagtggcgcacgcctgtaatcccagctactccggaggctgagacaggagaatcgcttgaacctgggaggcggag

SEQ ID NO: 56274 - DNA, 787 bp, Homo sapiens
tcccaagatgcttggattacaggcatgagccaccacacctggcctcattcttgacacttttgatcatgtgctgtatctgaaaaaaaattttaagggaaaagtccaaggtaaagggaccacttccaccctttaaagaacacccctgaacacctaaatgggccttggaatccccggatctcagcgtcagctgatgagcaaagcccctctccagcctcccctcctccccacagattccctctgcctgactcagctgaggcgagtcagataaccagatggaggtgcagccaggcttgtctggagtgacagatgtgagagcaatagagacatggccctgcccctaaggcctgaggaagggtgtgactcagatattgagcaagacagaggccctcagtcaccaggaggtgagcccctgtcaccacacttggataaccccgtgggagctgctgggcgcgcacaggacaggtgctcctgagggatgcccgtgcgggggtgggtatgcaaataggaacaagctttgcagagtggacggatgcttgatattattattattattttaatattataaaatactttattaaaattcaggaagggttaggtcaggtgtggctcatgcctgtaatcgcagaacattgggaggctgagtcacttgaggtcaggagtttcagaccagcctgggcgatatggtgaaaacctcatctctacaaaaaatacaaaaattagctgggcgtggtggtgatgggtgcctgtagtccctggggaggctgaggcatgagaattggttgaagcc

SEQ ID NO: 56275 - DNA, 942 bp, Homo sapiens
acttcccttctctgacctccttcctgcaggagcctcagcaccccctccccttgtctgaccccctccctgcgtgagcctcagcctccccccattctctgacctcctccctacaggagcctcagctcccgtcccctcctctcaccccctccctgcatgtacctcttgcagggtccccttccccggcacccatgcgccgggcccagagctccctctgcctgcgggatgagaccttggcaggcgggcagcggcggaaactcagctcaaggttcccggtggggcgaagctctgagtcattcagccctggggacacccctaggcaacgattccgacagcgccatccaggccccctgggggcgcccgtctcccacagcaaaggtgagggacaagggtcactgtaccagccagccccccaactctttgtggacccaccagctccttgggggaggaggcttccttcttgtcccctgtgtctcctgcaagctctgtccacttccgcactggccctgggcccagtggttgccttgtgcctcccaggacctggtgtgggatgggagaactccgctgagaccctgcaggaacacgaaacagatgccaaccgagagggtgagtgggggactgtggaaggagtagtattctttgtcctgcctggggcccctggcagaacctcattcatccattctttcattcgacaatgatcctttaccaagtgccaggtgacgtgctggcaggggacacagcagggaacgttctggtgtgaggaggcagatagtaaacaatttgcctaaaaataattattatctacaacagccctgtccactagaaatatggtgtgaaccacatgataattttaacttttccagtaggcttaccagaaaaagtgaaaagagacaggtacaatggattttaataacatttaactcaatatgcctacgctattaccat

SEQ ID NO: 56276 - DNA, 2008 bp, Homo sapiens
gagggacgctggctctctgaccagggcctctagcctgatgcctgagaggcggggcaattcggctggggtgcaggatgtgagtcagggtacctggggccacccaggggagggtggagctgcccagggctgagataaggcagcctgaacttggggggtgcagagctgggagggacggtccgtccggcctcccaggtgtgacctgcagcagcttgagttcctcctcctctcagccagggcttcacaggacaggggcgtggggtggacaccctggcctctccagctggcagaggagctgagagcccctcccaccggcctcagggtgtggggcctcatggctgtcccactctgctaggtggccccattggtggtcaggaagggaaaggcaggaagaagacggagcaggggctcaggaggaccagtcagcaggggccctgggcctcatggggagagggggcagccccgtgtggcactgacatctcttcttgaggcctgctcagggctctaagctgggtactgcaccaggctaggagacaacaggagcagaacacgtgaggtgcgcatggcacctggtgggctctgcacggtgactgggggctgaagtgcttctgcaggcacccccgacagaaagctggtcagaaaactggccactcctctccttgccatggggtcccaggccgggctccagccccctcttggtgatgaggctcctccttgcaaaggccagtcctctggggagaggggccctgctggccacccccaggacgatggagtggggtgggctccactgcctgagagttgggtgacttccaggatccagaccccctctcagcctgcccagcaccaggcacctcgtcccccaccttggggcacagactcctaatgtcctccagccactggctgcagccggcattcccgggcagattcctggcttggggactaatgccccagaggctccaggttacccacgggctcagggatggctcccacggggtgtttccagttcccgggagagtcgagtaaggtcccggagcgcacggccctgaggcctggcctgggggctcgggagacagggcggccccagccggccgcccaccggcagcccggcgctgtcacgttccagccgcctgactcaggccgcgcagggcggggagccgggaggcggtgccggcgcccgcctcggccccggaggcggcaccaggaagcgcccgccccggccggagccgccatgtaaccggcgccgcccggagcccgagccgcgcgggccccagcgacccgcccgccatgggggacgaggacgacgatgagagctgcgccgtggagctgcggatcacagaaggtgggtgtggggcctgactgcggctgcccggggcaggccgggacgggtcatggaccggctgggctcattcgccccctgtgcccacagccaacctgaccgggcacgaggagaaggtgagcgtggagaacttcgagctgctcaaggtgctgggcacgggaggtgaggacccccatccaccgggcaggcgtcccaggcgcggtgcccctgacctcctgcctgctcactcttgggcctgggccaggccactgagcaggccccccaccctttcccggcacagcctgccttgcctgccccgccctgcctcgccagagtttgcatgcccacttccagggcactccacattgacatcactcctccctccacggtcctgtgcgtgcatacccccctggatttgccaacaccctggggagggggactggcgcccctctcaagtgatttgcatagctcctccctttcttccaatatgggatccccctcccacattttgcaaatgccccagcgctggtttgcgcatcccttccccagccaggtgcacacctctgcctcccttccttgcactggcatcttttcacatccatctgatctctcgcaggtttgcatatgccccgcccccatgcctcgcagcaggccccctggagatgcatgctccccagcctggtttgcacatccttt

SEQ ID NO: 56277 - DNA, 1523 bp, Homo sapiens
cagggtccagacacccacccacacctcacccacacttccagcacttctcggacttctctccggaactgactcagccgcttccctctcgcactctgggaggtgacttcaggctggccctcattctgacccaaatcctgaattctagcttttggccgggatttggtccatgacaggctggagaccacacagcagctgcccaggggcatcagagaaagctcaggctgtggcgtctggctctgatctggactgcggcgagtgaccttgggcaagttgcctgccctctctgagcctcagtttccttgtttaagggaatttgccttgtttctctcctgggctgccataaggagtgaaggaaggggtgcaggcagtgaggtcagcccagagctgagcacactaagaggcaccacccagatggccatgggggagggctggcttcactctacctcgcccggagcctggaagcggggctggcctcagatgctgggtcacagcgtcgtgattttgctcacttccccaaccgcccgcctgctcagctgcgggcccacgaggggcttcaaagagaagccaggaaatggtagccatggtttccactgggggagcttactgtctaataaaggcaacctaaaacctcggaatagaagcttcccgaaatagtgagtctgcaagctggtctccccggcactgcctggtaggaggttcacatcaggaaagaaaagagcacagacttgggccttcctgccagctcgtgcccaccccacgtcctctcccacgcccaccagcaccatctccccagctagggaaggcccttcccaggccccacatctggcttcagagccttgaacagttgtcaggagggatgaagtttaggctgaccgttttctgatttaaagggcctcgcgtagaaggttctaaagatttaagaatgagatcagctggccagcagggagtggctgaggcctcaggtcctgagacatgaactgccttcctcactcagaagcccacgctgagattaaactttaaccaactcagtgaggcaacagcccagttgatatttcttccaaactgtaattcagtaacatcaaagcaccctgtctttttaaatagaatctgcctgactttcacttttggtgctggagaactcagaaggtggctcagccctctggtccacacttggtgggcagctcggatgccccaggcagcccgggcacagtgagcttagtccccttcaccccctccgcagagctctggggcatccgcacagtcactcctggacacaagataaggaggagtttccccgaggcatcacagggcttcccgggactgagggactgactcaactggttattggacagtgccccacccccaatccggctgaggggcaggaaggcagaaggtcttggtggccctggatcttgtggctgcaatcggttccaaacagcagttaggtcagcagtccgctcagccgaggcagctctgttcatggcgttctcgaagctcttggagcaagccggaggcgtgggcct

SEQ ID NO: 56278 - DNA, 640 bp, Homo sapiens
ttatcttgaaataaaactgaagtttaggaaaacgtttcttttatgctatatttaaccacatatgggttatgatggcaaatacttgctacatcttagaacaaagatagatcaaatgccttttttaaaaaacttcaatttttttctgataaatcagaaggagtgctctcactgcaaacacccgggaccagtttttttttttaaaaaaaaaaaaaaccttccaggattcctcagttctcccaggggccggctctgcaacctttgttattcaaatcagaggctttgaagctggtgaccttgtgggttttcctgtcttgttaacccagttgttatctgtccaaggctccagtgtcggccgctttgagcaccagcccagtgactctcacgtcactcacataaacttcatgaaacaccgcggcttgtgcgattttactctgatgttgttgggctggtgttgtccgatgtttattgggtgatgcaatcaggtgacgcctaaggggagggctgggaggagcatctgggttaagcagggagagcacagattttaaacgtggccgagaagaattttaccttgcagccagttgtggatccaaatcccatctccaaaccatgagaatttaaataccgtaaattcagctactcg

SEQ ID NO: 56279 - DNA, 2291 bp, Homo sapiens
gccacccctgttcccgacaccagcggactggacagcaatagtgggcccccagtctatacagttgcgccgcacagcccggccacctcactgcgtctgcgcacagagcgcctcccgcccgcccagccctccccccacagcgcgcgtgcgcactcgaggccctagaaccaggccgcgcgcgcccaggggcgcctccgcccgggcctccccgtgcgcgcacgcgcgcccctgccgcgtgcagccgccgtcgccgccgccgcgcgcccctcaggcggccgggcccgtccgcgcgacgcctctcgcgctctctcggcccgactcacctcctccgccgccggccgggcccggctgctggtccttacgcggcggctggggtggcggcggctgcggcggcgacacgcgctggtagagcggcggcggagggggcggctgcggcggcgggtacgaggcgccgggggacggtggcggtggaggcggcggcggctgctggggaggcggagggggcggcggcggaggcggcggaggcagcgccgcgaaggggaaggccgcggtcagggcccccatcgagcccacgggcgggggcggcggcggcccgggagccagcagccccgccccaggcccgggtgcaggcggagggcccggctcgaagcctcctttgggcccggggagcgggggcagcccgggggggcccagcttacccaacggcgtggcgttcgctccggtcgccatggcgcccccggggacaggcaccggcacctgcttttcctctgcggcggcttctccttcgcaagcctcccggggggaggggacccgaatgcgctgccggagcgcgcggagcccgtcctctcacgcggcgggcggcggcggcgcgagacgcacaaagagggaggagagagggcaccgcgggggcgggccgggggcggcggggccggggcctggattgggccgggccgaggcgaagggtcgaaatcggcggcctccgattggcggagcctcagtccttcttgatgcgcgctgggattggccgaaccgttaggccaagcgaggaaatggcggcggagttcggtgggctgggaggtgtcgcagcgcgcacttcatttgttactgcgtgaactgagctccgagtccagaaaggaggggatggggtggggcgaactctatgacggagcgacggcgagctctctcattggctgcggtggtggactcaatcaatctcgcctgcgttgtagtgtcgcgggattggctgtcgctggttccagcctttttctactcccctcccccagggggcagtttctccgggattaagcgagagtcgcggcggaaaaggcccagccggaacgagatttacggcgggggagtcctggagcaggaagtgcgcatgcgtagatggagcaaaaccgcctctccacccgtctcccttcaccatcgacccttgggtccagcaaggaagccctaagtgacgtcaacctttgttcccatggtaacgcagaaccttggggcgggagcaggggaggggctggcgcgcgccggaaaaccggctcagttgacgctgcaggtaaaaagacttcctgtttttttggaaaaaaaaaaaaaaaaaaaaagtgacccaaaaagctacgaatagagacgacttatcgaaggatttaaaacagtatttgaactgatgcaacaacatattagatgaaaggtaacagaaggttgtcagttcaaaaattacaaatacacacttctattggaatctccacggagttcagaggatttaattaaatgatcttaaaatcgtataaaacaataactacggccgggcgcggtggctcacgcctgtaatcccagcactttgacaggccgaggcgggcgaatcacaaggtcagaaggtcgagaccagcctgaccaacatggcgaaaccccgtctctacgaaaaatacaaaaattagttgggtgtagtggtgcactcctgcaatcccagcttcccaggaggatgaggcaagagaatcgcttgaacccgggaggcggaggttgcagtgagccgagatggggccactgcacttcagcctgggtgacagagcgagactgtcaaaaataaaaataaaaataactactacagtactgggaaaactttacaagacggagcaggagcttgcctttccagatgacaaacatagtatataaaacacaataggccagtgccaaggcactgggaggccaaggcggggggatcacctgaggtcaggagttcgagaccaacctgaccaacacggtgaaacccccgtctctactaaaagtacaaaaattag

SEQ ID NO: 56280 - DNA, 1427 bp, Homo sapiens
gcggcgatgatagacaggtcggccacgggaaagtaggtgaggccgccaggcgggtcgggggcggggctgggctggaaggtgagctcgggaacgttggtagggatgacgcggttgacagccagaaaatgctccacgaagcccagcaccaaggaaaggagcaccaggtccggctcctctcggcccagctcggcagcaaacaggcgcaccacgtcgtcgatggagcgcagcgggaacagcgtcttctgggcggccttcagccccatggcggcgggcggtgggcggcggcctgcaaggcaagccgggggagggagggtcgggcaggttcggccggggagcctcctcccagggtccgctaaggttccacccgccccgacacacgcacagctcccctgcttccccaccctcttcagcctctgctcaccggcttcccctcttttgtcggtgagacccctcagccgagactgcagagcctttttgtcccccacaattccgggacgcccggtacccgatggggtgcgccccaagcaccccaatgaggagccccaatggccgccccgccccctctctacgactgtgcccccggggctgtaaagtctgtccagaaagcgcacccaggtcaagcccccaaaccccaaggagagtcctggcctcggtccccctcgcccacctccgcgcttacatcccacactaggcaccgcggcgcacgccgcccggagcctgctgggacatgaagtcccgcccctagggtcgcactacccgccgggaagtggagtctgggcccacccctgccccgctgagcctggaaatagtggcgggccgggccgctgcgctgtggcttctgggatctctaggtccgcggctccggacacctccttcccgagatactcagggattggcccttcccttcaggccgaccaggcaggaagcgtgcccgcagtgccttctggaaaatgtagtccgggggcactacctgcagactcggggtgggaggtcgccgagcttctgccggttttgctgtcacgggtcggtcggcaagttatgaggaaaaagatcaggttgcttgatccagaaaaaattaaaataaaacaatatgagaaaaacagatacttttaaacactgccagagagtaaatgtgttcagccgctttagctgggtatcagtgtctgttaacatataaagatgcctactctgtgtgcagcactcgtttcccacttccgcccgcgagatactctaacacgtgctaagagtagcttttgtttgtttgttttgagacacggtctttctctttcgcccaggctggaatgcagtggctcgatctgggctcactgcagcctcgacttcacgggctcaagcgattctcgtgcctcagcctcccgagtagctgtgatcacaggcgtgcgccaccactcccgcctaattttgtgtgt

SEQ ID NO: 56281 - DNA, 1095 bp, Homo sapiens
ttggtactgagggacatcactagctctctcacccagctctgtggggagcactcatgctgataacagcttgcaagtgtaaggggcctcttggtaacttaaagtgactttagatctattatcttcacaagggccacactaggagagagttattaccctcctttatagactaatgcatggaagctggggagggaggtggtgccagccttgagctccttccttgagtgcagactcgccctgcagagggcaggtgtgttggggcagggagaggacctgagaacccagcatgaggaagtggcagggaaccctgtgtctgcccccaagggcatagccctctgtggctgggagcccagacacaaggcaggttgcccaggtctgtggcatcctggccacattggagggctgctgagcccagggttggagcgcccccttcctcaaagtcctgagaatcagccttcaggggaaggcctaggatgagagtctccagccgtggcctcgggaagcagctcccaccagatggttcttcagggctggcaggaatggcggccgccccctgcccttagccactctggaaacgtgcacatggcatagtggcccgctcctacccaggaggtcaggacatgagaggctggccttgggtcctgcagccctgcccgctgctgaccaggcgtggggccttgggtagatctcttcctcactctctggacgctgtctttttgtgtataatggagaactgcacctgttcaggtgtgagagacaaatgagcttcccagtatggccaccaatggccgtcccaacctttctctgaaggagcacgggcggcaatgtgattggagccggggagctccctaagcccacccttgagcctcagatgcctggctcttatttgaaggtgcgtctgttgggatggctttgggaaggagctgatgcaaatgctaggggtgtggaccccccagtcccccagctagtcctggcagccccctccccaaccccatctgcccagcaccaggggcgtgtcctatgaaaagtccaaagctccaaatgggtggacatatggtggtttcatcatcctggtttttcttccaaaaaccttccctg

SEQ ID NO: 56282 - DNA, 4284 bp, Homo sapiens
cccacggtcgcagtcgctgcactgtccagctccagccacagcaaaggccggggggcagaggccgtgcacacagggctggcacacaggggaggcggcgacaaagaacgcagcctctaacgttatatattaaaatagccacagttcttgtgcacacaattccatcctctcacccctgcctcccccgccaggcccaggaacagccttaaaagaaagatggtggttttccttttcgagaggcgaggaaacatccgctcagtctttatggaccttgagaaatggtgaggcttcccctccccccgtctctgcctcccggccgggcgtgcaaatggcaggtgcggggccgggcgccatcactcatgtctgcgcttggagggcggcaccaggtgcgggggcaggtcggcaggcagctcgtggccctccagcttgaccttgatgaggtggttggccagcgcgaactcctcgtcgtccagcagcccgtccttgtccacgtcggccagcttccagatcttccctagcacggtgttggggagcttggacttcaccatctccttcttggcgttggcgcccgtgatcttgccgttgacaggggacagcgtgtagaagatctcgtcgtaggtgggcttgtccttgcccaccacccactccacgtcgtcgatgccctcgccggccccctcgccgtagccgtgcccgaacggcccgttcatggtgccgtcaaaggcgccgcccttgaccacctgggaaggcatcagggactcctcctgccgcaccatcaccatcagccgcgcgatgtcgttggccagcatgtcatccaccgtgtccagcagcttgggcttcagcgcctggaacttgctgaagtcctgggtctgcaggagttcctgtgggcgggggaggaaggacaagggctgggaagggaggcccctcccagactccaggccaagtggttccagtcagggcttcacaagcataaagtgctgctcccccacactagcaggggcgactcggcaaaaccatctggcccttggctctctaacctgtacacaggaggcacctccagctctttccttgcagggctgcggcaaggattcatggacagggcaccagagcgcctggcatggccctgccctccccccaccacgcagggtgagtcaccacattcccctctgcagtgtcaccgcctgggtcaactctgagttgggtggggtgctggtgattaacccagctgcttccgttcagggaggcccttccccatggagatgggattccctccaaatccagtgccctgggccttccttctgccctgatggccaccagcctgcatggggcctcgggacagccgtacctgcatcttgcggaggctcgggaagtccccaggggagatctggtgctcgcgctcaatcttctggtagatctctccgaggttgttcaccagctctttctttttgctctctttaccaaagacattgggcatctctttcttgagggagctgatgatgtaggcgtgaacctgtgaggacggggtgagcatcaggcgctctcttggcccaggctgcccccgagagcagagcctccaaggacactccaaggatactccaaggtgctcgctcaggaacagggaagcaggagggatgggtcaagctcaaggccgctaccaccaccggctcccacagtcctaggagcagacacaatctggcaagagccacagctgtccactgccacaggacagaggacaggacaggaaaacgcacttgaaacagaagacaacagccttggccttgcacggatcattgtgatgattcaggaagagtaaaacccagtctgtcaacccaaagaaggcaatttgtcgtgtaccactgggcacatcacacaccctctgttcaaccctcaccacgcatcacacaccctccgctcaaccctcaccacgcatcacacaccctccgctcaaccctcaccacgcatcacacaccctccgctcaaccctcaccacgcatcacacaccctccgctcaaccctcaccacgcatcacacaccctccgctcaaccctcaccacacaccctccgttcaaccctcaccacagccctgcggggtgggattctcccaacccggccctaagcaaggctgggaaaggctgcctggggtgcttggctcccacatggaggagctgggattggaaccccgggctgctgaaggtgccccacagcccatgttcttctgtttctctgcaagcccccttcccccgagctgccccctcccacgcagcagagcagggagcaggcttcctgcagggcccaccagcctgcacgtccaaatccctgctgagtgccgatggagcccacagaactccaatgggcccgtgccacgctccactccatcatcacagctcggatgacgaaggatttgaaaaatcccaaaaaggcttctcctggtggttgccagctttatccaagcatcaataccttgcttaggcatgtgcctgttcagggcggcacccccttcatttccctgcagcaagctgggaacctggcagccctcgagagtagcccagccctcagatccctcggccttgccaagtcgtgtccagccacagagggctgcggccagccagccttgctgcccttctccccggctccagcccatccaccaccccgctcagcctgagcctgtgccctgggtgggggcctggctgagaactgcctgagggaggcagccccgtgccatgtgggtctggatctagagtctccccagggacactgtggcaggcagatcccaggccggtgggagtcatcacagagagcaccactcactccaggaaaaggaagtggcaggtgtgaggcaacactggaggccacagggttttccaggcgcggtgactcagtgtgcctggggcctggcagtcacacatggtctcacagacgaccaggcaggggctcatgcctgccccttgtcctgtctgtcctcaaaggtggctgagcaagggagctctctctgccctgcaaggagagaaactcagctagggccacacccacacccctcagctcaggacgtcctttgtcctttgaggccagggtcagtcacctgggtttttgtatgggttcctctctcaaagctggctccactcacagggaggctccagaagggagagatctagaaaaacatccagccagccgggcgcggtggctcacgcctgtaatcccagcattttgggaggccgaggcaggcggatcacctaaagtcaggagttcgagaccagcctgatcaacatggtgaaaccccgtctctactaaaatataaaaattagctgggtgtggtgacgggcgcctgcaatcccagctactcaggaggctgaggcaggagaatggcttgagcctgggaagcggaggttgcagtgagccgagattgcgccactgcactccagcctaggtaacagagtgaaactccatctccaaaaaaatcaaaaaataaaataataaaattaaaaataagaaaaacacgcagccctctgtcctccagagccggcatctgacccacgcccgtgcacacagctcacggaggttcaggccagaatgagaattcctcatctacagggtgaggtggggcccagggtacttggggcacaatgggaggacagtggtggcaaaggatgaagggtcagttctcactgctcagaccaggtagcacccacatgccctctgactggcctccagacagagtgggtacgagggccactgtgctcaacgcctgcagtctccatgcctctgagcaggcagggacatgggctccccaggaagtgcccatcctcagtcctcagttatattctggagatcaggggactgtgaccctggccacaggcacatctgtcactgaagccttcatgcccacatgatgtctaccctggtaccccctgcatgccatgaggtgggggcaagcaccctgctctgttgaagaactggggacgtatcaccaaagggcctggcttggcaggcaggacagttccccagccacgctccggcctggctggcctggagataggagctacggcaagggcctttttttttttttttttttttaaattaaatagagacagggtctcactaggttgctcaggctggtctctaactcctggccttaagggatcctcctgctttggcctcccaaagtgctgggattacaggcgtgagccaccatgcctggccagagcctatttcttttctttttttttgagacagagtcttgctctgccacctgggatggagtgcagtggtgtgatctcagctcactgcaacctc

SEQ ID NO: 56283 - DNA, 2509 bp, Homo sapiens
cctccactacacgggttcccccttggtggcatccgctgctcccaccctgcaaagccctccaggacaaaggcaggtccacagcccaggctcctgagaggctgcctctacgcacaagcacgccaagataaatggcaccacagggtgtgcggagtcaagctcgctcatgggataaacactcctgccgcctgccccggccccaggcccaagcgtgcttggcgccatctgtgagcccaaagccacaggggcgcggagcccctccccacacctggcgctcccagaaggaactcgggccactaactaagatggctctgcactccactcccgccccctgccactgactctgtgacctgaagttcttttcctaacttctcagttactttctccatctgtgaaatttaaataccaattcctcagccgggctgcagggaggagggcgtgtgggagcactgggcctccagcccaggacccgacagggacagcctccttggcaggctggggcaggggaagccagggctctgtgggaacaaggggccagcggcctggacccatcaccggtcaaggactttcatccttgagcaaagtcaccaaaatgtaaggaaaatcccaaatccacagcttcagccacacagcctcggcagcctctccacaggtgatgtgcggccgttccctgccccagctcaacaggaaatagggcactctgaccagaagcagccccgagggccaagcttcttaacagggtagcagtgcaggggagccggggtcctggcctccagcctggacggggaggcccgatcagccttccagaggctcaggtggatggtcggagacagcagagctgccaggttccctgtgcccagaaggtgtggaagggcatcgtgccagggcacctcatgccaccacaggctcctgcttccaaagtacaaggccccgggcacccggactccctgcagctggctctgagctccacaggagaggatgcccaaagagtgaagtctcggcagaaaaccagaaagagaggccaagggcaacatgagggaaacaggggcagggagaggccgcctctgcccccgggggatgaggccacactagctaagcctgcagcgcctgcctggggcccgcagcccacagccttttatggccagctctgggaacgcaggtcagtactgaaaaggcgatgactcaaggactgaggttcctcgctcagcaaaaagggggcccagcttctccccttgtcaaatcatttgtcttcagcccgccacaagctgaaactagaattcacacagctggggaggctgtgatgccaaaaccgagttcttgggaatgagggcgccctgatgggctgtgctcagcccatgttagctttggcctgggagtcaggacggcgcctggggagctgaggtcaccctcccaaactccacccagcaaggccccactcccccctccccctggatggctggggggccctggggaaagagagaaaaaggaggggaaggaagaaagaagagtgagcactccaaaactccctgccccaggtccagaagccctgccccacctgctctgaaacccagttactggccgtcatctcaagctggagtcaacagaggtaagcccatttctttgcaggtgactaaaatttcctgtttattacagaaaatgtgcttttgctgtgagggaaacacagtgactggccagccacacccacaggtgacaaaaagggccacagcactcaggcctgtgccatgcaggcagtgaccacgtaactgcacgccccaccaggcccaccggcgctccttagcccaccaggccctcgctgccctcaaaggcacctcactcagcctaaaagacgccgggtttcaagaggtgccaaaggctacactgcacagcggtaacactgagccactctctagatcagagctggacggccggtatcaagtacagaacagggcttgccagcacccccggcactgcccaaggcaacaagacttcaggctttggcacccaccaaggtaggggccttgctgttagcttgactagctcaggccccagtgggagtgacagaactgatgccgagcaaaaggacacagaaaacatggcccaagcgggtgggctggagagaaaggcccacctgcagagggagtggttttagtgagtaaaagccagagccccctctgataagggatcataagccaccaggaagctctagctcagaaaatcctgggacctagaagacatgatgctaagtgatgaaataagtctgtgaccttttccaaagatgacacacacgcggccaacgagcatatgaaaaaactctcagcatcactaatcattagagaaatgcaaatcaaaccacaatgagacaacatctcataacagtcagaatggctattattaaaaagtctaaaaataacagatgctggtgaggttgcagagaaaagggaacatttatacgctgctggtgggaatgtaaaccagttcagccactgtgaaaagcagcttggcaatttctcaa

SEQ ID NO: 56284 - DNA, 2752 bp, Homo sapiens
gaagcaacaaaagaggggcgggagggggcagaggaactctggaatcaggcccacatttccatcctgaaccttctactcaacaacgagctgtgtgacccagcaggtctctgacctctcagagcctcggttcccagcttctcagtctgtaacacgaagatagtaggtttccagcttggagggccgcgggaggatggagtgagcctggcacactgcgagcaggagtaaatgtttgctcttatttactcgcaggatttgtattttgggcttaagaagctcagattctgatgggtgtgtaggcaaggacttcaaatgcatgaagaatgcctcatcccccaaatataaacggaatgtttgcaggcgctcggccagctgctccccagcccaccgccagtgcgcagcctggggaacaggtgctgagcgcgggcagcgcctggtacgcctcctctgtggcagagcctgcacgcccccagcagaggctgaggccaaaagctgtcttggcatcctggcctgctgggccacagagggagaccacagccaggtggggcgagcagagggttttgggaggcctggagctgggagcaaaggagggcctggaacccaacgggaaaccccggctgagtcagcacttccccgaggatactccccaggatgttactcagatcaccgtctggaaagccctgggcttttcaatctcttgactatgaaccagctgacacttgaacacttaactgtgcaccaggcactagggcaagagcttaacatgtaaattctggtaatctacaataactggagaggctatggtgtttcctgatggactgatgcagctcccagggactacagcaactccctagagccacccagctccccaagtactaacgtgggacttgaaccttctgatctacttgtgctatggatgctgaatccaagagggacacagcacctggcctggctcatggcctttgggcagcccctgggagcatttgatggtcttcggagcaccctggtgaaacctcagcctgggggtgctgctggcagcggcatctccatctcaggaggtgtcggcaggaagtgggggcggcccacggcgcaggcctgcctctgggccggagggctcaggacacacaggtgggagtgtgggcagggaggccccatccaaccactaaggatcaggacagctcccaggcttagagggagcctgcagaccaccagagggcaaacgagagcccaggccaccaggctccctggagaccccaagggatcatttatggctgggaacagggaacacaataccagcactgctgttcaaagccccagacctcaggtccatttcaggactggagtctaaccttgggtgggagagaaacagagggtggcctctgtgtgtctcaggagggacacacattactgtgtgtccacagtaatgacccaacaggggcaaaggtctgtctgacccaagctcccggcactccttcgcccacagccttcatgccaaggcacccttctcagctccgccgcagtaggagcacagcccctacctgggttcaaatcctagcgccgacacttgctggcctgcctgtcatcttaggccaattacttaactttcctaagcctctgcttcctcctctgaaaggcaggagcttcctcctagatgcagctgctgtgataactcaatggaactcactgatgtggcagtggccagcagaaagtcagacacaaagctggccaggtctctgatctgctactgcaagtagaaacactaccctgctgatgctgatacagctttcatggggagattgagacacaaaaactcccgcttagttcacagttgcctagtgaccatggtggggaacgaacgaactggccgggctgcccacagaggccccgccgggggatgactcggcatgaggcactgccgggaccacgcaactggtcggcagcccctggagccaagggcaccacccctgccggacccagctgccctttggaatgcccttatcagtcacacaggcagcactcaagaatgaacgcagcccccagaggccacctttctctgctgacacaggagaacggtatctttaaagtcactcagattagcacacaggcaaaggcagcccaagagaccccaacccggcccccttctcgtccctgaggcagtcctcaggggtccctgacagagcctggctgcatcctgactgctttgggcctgcaccagcccaccttatcttttcagaccgtgtttcctgcacacattaggaccatggggaaaggggaaaaaaagtcaggaggggccaggcggggccagacggggtgggaaatggaagtaaatgcaattagcaaccccaatgtccatccacggcctccacaaggacatgtttccagggaacgggctggcaggccaggggaggcgtgttgtgctggggccctggtgcgtgctctgccggccccatctttccgagagggaaacacctgctttccacgccaccagcaaaggcagtagcaggtggccagccctgccgggaacgcactgctccactccgacctcctccgctggacaggccacacgggcctttccatgactgacgggcggggcctccaggaaacagaaatccactcctcctgtgtacacctagcggggctcatcctggagtttacacccagcacctccaagaggtactgagcgatggtctttctcctgacaataaaacaccatcattcaaaccctaaccaggtaacttttagtaaaacacatcta

SEQ ID NO: 56285 - DNA, 789 bp, Homo sapiens
caatagcagtaagaaataaaaatactagccctcgcttttttttttttttaaaggggtctccaaatctactcccttaactcctaggtgcatcactgtcaccaggggtgggagaatctaacagcttaactggcagctctgaaaccagatgagggccagtgatttcagtacgctctgatgcagtcccacacgggcaaggcccgcaaggctggaaggaaagagaagcaaggtttctcagctccaagaacagagtccccatgccctcacagccctagcagagagacatgtgcaccccaaatcctagctgccggctttgactgcaaggctcacccagcaaaggccagtccagagggtaagggacacgggaaggatctgcaagttaatcatcaacaaacttgctcacttgtcctcaacccctctttgagtttgatcttatttcattttcacatttggagctgtagactccactcctcacctgccaggtaccagcctaccctcaagctcctcccagaaagcatcaggccccaaagcgccccacccgtctgtgaaaaaggggcagtgacagatggaggacccagttcaggctcatcctgaaccagatcttcaaaagagcttggcagaatctaggcaggagtttacacaattggaatgggcacggtgcactactgcatagcaagaaggcctcagccagggaggctgctgtcaacctctaagcaaatgtaagcaaatttccaccagcccgtttcatgaatttctaccagcttctccttttgcttggctctctctcagtcc

SEQ ID NO: 56286 - DNA, 3234 bp, Homo sapiens
tggccttgacagacaaacatcaacagccgtaaaacaggagggcgggctgaaatgcctggaagtgaacagaccctgctgaaggtcagctctgtgcctggagtaggcctggccaccagcttggctctagggcaagctgccctgcacagctggatggcgtctggaaaggaatgtgaccgtgcagggcggggacctggaaggcaggattcaaagattccttcagaggctcttcgctggtgcagaattatgaaaggcatgtggagtccgtgaacgtggggtggcagggaggacagggtctgtgaagtactttggtatgtcgcctgggggttgggacgggcatgtctcgagtttctctggagaaaagtgagcttgggcattgcactccttgaggggcgggagcactgtgtttcattcacagcactgagacaggcagagtcctggagctcactctcctcgcgtgcagaggccacttaactggaaaagtgaggtccaagtgggtgaaggaacctcagattctgtccctcagtgcacagaagggcttagggccagaatctcattgcagggctcccactgccaccacctcatcctgcttcctgaaacccctcagggcagcactgacctcttgagagctgccattgggagaagtgttcgaacctcaactgtcccctgcctccaaggggctgccccaaagtcagcaagccacagccgatcctcctcctccctcctacacaaaaccaccgtcccaggggaggcagagcagacccacaccgcaccagagaagggaatggctaaaagtttcattgtgttttgctattgacacttaagaagacagggaggggagggttgatttccgtgaattaggtgcatccagcctgcgggacggaggtggagaccaagaaaaggagcgcaggaatggctcagcttcctactgcggccctgctgctgaggggagtggggctgggatctgcaggagggcttggtggttaccctggaagattctggggaggacagaagctgggggagccgacaacgcccactcttagacccccagtgggtttactctgggaaggggcagggcccttggaccagggagtggtcactgagggtctcactggggcctcggagacaaaggacggcggggcgacagccacgggagggtcaggctccgagtgaggggtgtgccccggacgcgccccccgccccctggagtgatgggtgggtacctgttgaggaaagcgttgccaaacgcgttgagcttgcggaaggggcgccgcgggtccaccacgagcgcgttgcccggcaccacgccctcagtggggccgtgcatgacggcgatgaaggagtcggtggtgggctcgggcccgatgcgcatccccgggaagtcctgctcgatcaggtgtcggatgaaggtggtcttgcccgtgctgtactgccccacgaggagcaccataggcttgttgtcgaagtcagcgtcctccagcgcgggcgagtggaactcgtggaagcggtagtgctcctccaggggtagcagcttctgcgcgtacagctgccgcagcccctcagccaccgtctggaagagctccggctccttcttgcggcgggcatccttgctgacccagctgaacatactgccggacacggggctggctgctgcggggcagagcggcggctgagagcggggcgagggtgcggagccgaggcggggccggccggggcagggaatcgggagcgacccacactgcgcaggcgcacagcccagcccgtcgaagcgccctctgccgaatgctgcgcacccctcgcggagcggcctttatagggtcggtccctcagtggcggctagcgccgccgcggcgggggcagggcggaattgggggcggtagggaggagcccctcccagccccgcccctccgactggtgccacgtcttcccctaccccgcccccattggctgattccaaatctcgcgaggctgtggtccgggtgccgtggcaaccgcacctgtttcgccccgcccctcgtagggaggctcgcgaaagtgctgcggttaggaaggcgaggagcgggcgttcggcggagacggcctctgggccgcgcgccttccggcaccgtggcccccccacacccccgcgggatggctccacgagacacccagtcaggcaccctggttccctgactacgcgccgcgcccgccgttcgccacgtgcggtcctccagctggctcggaatccccggaagcatcggagtacccccaggcggcggcacctcctcctctcagcccagcttcccagacacacactgtctttgtcccctcatcttttatctgctttgggagagggagagacaggaaagtggtagcagagcaagctgagggagtagagaatccggggcgggctggtgactggggaaagaaaaatgggcagcgagaggcctgacctcccctcaggccgacggggtgggaatgggagagggacgcaagcgagggaggacatgggtgacaccggactcgcgcgggagaagagaaggcttccccacaaaggctatagctggggcaaggcagggagggcatgaggaggaagttgaggctctctggccacttgcgtattgggaagtgaaatcggaaattccctatgtggggaagaggggaagtgtgggggcaacaatgaaatcttgtgggaatttagggggaagtttaaaaacccaaatacttccactttcctctcggggtcaccaccatttaccatcatttactgggatctgtgccctacctccccttaccagttcctggctgttccatggggctcactcccccgccatcctccccggccacacacagacccctttggctgtccaggctggtgagaatcttcagtgggtgatgtcagagctttggggactgattgttatgtaaccagtatcaagacaccaacctgtggtagcaggaccctgggggctcttaaagagatctgaattgaacctgcgactttgaaagcctcaggtccaacttcctcgcttctgggagatgtggaagcctggagggctaggggcctgtatcaggggataacttgggctggtaggctaagaggaagaggcaggaactcaaatctgagaacgggggatatctcaggggaactgagtggtggaatctagagaggacacgatgggaggtttgttcgcctaccgcttgtaagatcccttccgagggaatagatagttcccttgccctcccctcttgctccct

SEQ ID NO: 56287 - DNA, 2139 bp, Homo sapiens
taacaagaaagccagacaaaatgctcgcagactgtttgggaaagtgtacggggtagtaaatcccagagaaaggagaggaagtgattaccttaacactcagaactgtgctgaccatgggcgggggggacctggaagggcatatttgggggctctgcaggttgttacatggggactcattgtgaattctatgaatatacattatacagtgatgttttatacacaccacagcgggaagagccccaccagggccaccttgggtaaggcagtgcgcgcctgggacccgcaactgtgtgtaggacgctggcacctgggctgtgccctaggcccaggacagtgtcctggccaggccaggcgcagttctaggcggcccggggaaggcgaacccaggggctgctcccccaggccttgggagccgcgcggtggggagggttggccccgccccgcttgggaggggtgcccggggcgccccctagtggtggccaccgggagtaagccttgcagaagaggaagctgtccccgcccgccccgcgcctccgtccggtttctgcatctttgcccctggcattccttcctcctccagtgatcacgacctgtttctggggttcacctcagcaaacgccgacctcacactcacctctcccagggaggctttactcctccccgcctgggccttctctctctgaggctggcgtacggtcaatctgcacaacctctcagggcctctgtcagcgtagcgtttcacacacgtgtggtgtggacgatgggacaaagacaatactactgaggcctcccaccgccagctctgtgctgaccgccccactgtgtctaggctccctccctaagcaactttgctcatgcacaaggtcagtccttctgtgtgcatttattaagtgcctcctttgagtctgaggctacaggaaaaaagtcagtggccgccactcctgggggctttcaggctggtgggggaaatagcccggtgtgggtgatggggcatgatgggggcgctaacatcccagccacagagcatccagggagccagtgagtggggtaatggggggcggggcggggggccaggcaggtgtccgcgagggagtgacccttgggcaggtcttgaggagttctgagaggggttggaggtgagacccaggccagggaaatgtgcatgggcccagggcctgctgggtaaaggacacaggtcagtgggctcaaggagctgggggagggtgctggatccgccttgctcatgcattggaacaggtctccaatagccctcgcaggcctttgtgggatcgcagtgctctgcagaggcagatgcaggaggacccccagggcagggtggctgctgtctgctcccctttcaccctatgccagtgctctgagtctgaggcctgacagccccaagagggttagagtccagggccctaccatccagcccatgtatcctgaacacctactatgctggtgggtgggggaagcagccagggaggatgagtaagtcatggaccttgccctcaaggagtctgaaactagcacaggattagataagcacacagggctccttaactctgtagggaatgagataagggtggcgggagaggcccacgaagccggggtgtgggcagagaggggagcagcgcctgcagagtcatgggatggtctgcagggaggggttgctgagctgggccacggcaggggccaatcggggcccagggattcagagcagccaggacagtgtgagcagagctgcctgtgggaaggggagagagacagtgtcttaggggccagatgtttgttggctgcctacagtccccaggagaaggtccaacttgctctgtgacttcagcaaatgtgcaccctctctgagcctgtgtcctcctgtcccaaacaggttcatgatggatgccaggaggaccaggtcctggatgtgcgtgcccagcagacagaaagggctcaatagccaacgcctgttattaagcaatttgacatttattcctaggtctctatttcccattttacaaattttattttgtagtaccagaaacctttttattcaaatgaaaaattctgacagggcacagtggctcatgcctgtaatcccagcagtttggggggctgaggcaggactgcttgaggccagga

SEQ ID NO: 56288 - DNA, 1307 bp, Homo sapiens
gaactgagctcacagatggggagaggagcgagacataagcagaaaccagcaccggggctccgagagggcagtgctctgcggcagcactgtgtgggggtgcccaggtggggacttagaagcttcaataaggccttctggaggcagcaaatgcttggacagagcttgaaagggttagtaagagtgagcctggcaaataagctaggaagagtattgcagcccaagggaacagcatgggcaaagcatagaggtgccacagggcaggcagggcaggggcaggactgaagctgttcaggctcattcacggggaatgagacagagggaggtgggaccatgagtgctgcactggggtcgcaggatctctgctgactgctggacacccccggccctcccctatccctgcaggtcctggtggctggcattgaggcgaacatacctgtgacctatggaattggcagccagaggggagacgagagcactggctgtcaattcataggtcagagccctgtgcactcggtctcggcagcccaccgacagccctccactacccgccaccatctggcctgggagcgtcgccacggtagtcctggctggtctgctggccagcacctgcctctccttcttcgtgggtactggccctcgccccagataacagcagccccactggaaccagtgggcacttccacatggagttgctgttacagggggcgggaaccaattggagaccggggccctgcctggcgtccgccttcggcagggctctggagagtgtcccatgcccactcacctgggctccccagtcttcgtggccccaggtccatggtcttttcaccgaggcttcttatcatccggggcccacacctggcgccccgtgtgctgccagcactccttcctgggcaaagtccaggctcaaccccaaatcggcctcataaagccgggagcggctcggatttacaactcctgggcagcctttgcccgctctgatgaccccacgccctctgtccccaagttattttgtttccttgtttctttcccaaccagagctgggcctcagtttcaggtttggccactgtcacctctgccctttgcccaccctccctgctgcagccatggggcagagagacagcaagggacagctggcacttgtcagtccccagggacctcccagtgcctgatttcatgaggatggcctcgtatgggaagctgaagatgagactaagaagaagtgtggggggctgtgtgggggagggcacagaaagagggatagtgaggcagaggggctgagagaggaagagaagagtaaggccgag

SEQ ID NO: 56289 - DNA, 2471 bp, Homo sapiens
tgcactccagcctcagtgacaaagaaagaccctgtctcaaataaaaataagaggagcaggtagagaactagaaaggaacagagaaaacaaacagggatagtggatgacgaggtgtaggaagggggacgacagggaactggaaaagatgtagatacacaaacctgccgcagaacatgaggaacaggctgtgagcagtggctcgcctggaaggacgcttaggacctcagtggcctggaagacagcaggggcctgggagctgggtgaccttgagcaagtagcgtaacctctctgaaccactgtccatatgtcaatcaggacttacgaggccaccctgcacgctgggctggcctggtgggaagcatccgccctgggacccttgggtctctctccgctgtggggagaggaagcagctgctggccagggtccctgagtgagcccagggctctgtgaggcagagcttcctcttgcaaagcgtgttctcgtccctcccagacaggttccggtgacaggtgccagtcctgcagagacccagcaggcattttgggagactccaaagcttctggagagaaaggggagcttttagagtagacttgggccctgccccctttgccagtggtgcatacaggcctagagagacagagggggccgcccaaggtcacagagcagggccccagggcctgtgctgccccaacaaccttcccgaagtggcgtccccccttctcaggatgcagtcagggtgggatgggggatccctgggctggaatccttctgcctggggggacagacctgcgaaggaagacaccgtagctggtggctggccctccactcagcctggcggcccttcccacagaggcctgggcgagaccagcctcctgcagcgtggtgtccaagtgccctggcctggcagagacagcgcccgatcaggaatcctggctccacagctctgagcgctgatgctaaggcccccttatcccacagtggaaaccaaggcacagagaggaaggggctcgtcccggccaccccatggctgtccaggtccctttcttcctcaggattggccacccttcagagaggtgcctgggttcaggagcctcctaggacagggagggcggcaggggtcctaccactcaggaagcctcttacctgagtgccgggctggccttcggggcacaaggaggaagtggggacaccctgggcccagggccttttgagccgttgacccagcccctggtggtggttaatgattatcccaccaccgtcaatactgatcacaagtgcggttcgaagggcaggaagccctggactgtgcccgggcagggtggggcgggtccaggaagcatcaggctgggccccatctgcctctccgggtggcatcagcaccgagtctccacagccctgtctcctccagggcctcgccctcctggtctcttaccagcctgctgccccagctgtccgtgggcagccaggaccccagggtccctcgggacaaagcttctgctctgttcccagtacccagatctcccccactcagaaggggccacagagcagggctgggggacctttgctaaccccagaggcctgcggaacctagcaaggtgagggttccctgattcccaacccgagccttggtttccccatggacccacccacctctgtgcagcgccactgggaagcagggcagggaggagcgcgatgggagcagctcacaagaaacaagatgtgtggggggcaatgggcgctccctggtcctgtgtaaagctttgtgcagtgagggttgggattccggctgcagcgctgctccagcacccctcccccctccaagtgctggagctgggaccccagatcagagtggaaaccaaggggccaaggcctgggccaccccaaaagcccccactagggatggtgagagcaacatctagaatgcctcaggctcagccttccccgagtggcctcaagtgacaaccaggcagggtcagctgggctccaaggaccatccctccctcccctggcagccccacgtagctcctgccacatcaggagtggggctggagtggcagcctcctgggaggggcaaggcagagcccagagccaggggaaggcgtgcagggctgggtgcctctgggtccccctgtgccctgatctgctgggcaaggccaggaggcatggcgacccctggtggtgacatgggaggtgctgggtgcagaggtgggatctggggcggggccaaggtcaaggctgaggccagggttcacagggacagaggatctgagaggggggctggcggtgggcagtttattccacttcatgcagacactgacccacgcactcacggagcttaaaaataatacatcgaaccacacggatatcatcccctcctccccccagacacagaaagacacttggctgagtgggatggggtccgagggtccaaaagcctccgtcctgggagaaggcagcagtgtgggcccagg

SEQ ID NO: 56290 - DNA, 2160 bp, Homo sapiens
ggactaatctagtcacccagtatacaacagggactgagactgggatgcgggcctctttcttttcatgccacttcagaggccccagatactcagtttctttgggggccttcaaggcggggcctgcaggctgagctgggagggaggaggggctggttatcaagaaagcgcctgcattccaccagggccctagagaagccaattcaatccccaacaagagggcagggaacaggagtaggggcgttttctggagctgaaagtaaaaaggggaagcctagggctgggtatggtggttcatgcctataatctcagcactttgggaggctgaggtgggaggatcccttcaggggttcaaggctagcctgggcaacatagcgaaatcctgtctctataaaaataaaaaaggggcagcctagagacggccttagaggctgaggctaaggttagaggtcagagagggcttcctacaccagaattcacagacagcaggccactggggggtgcccccagttcagggcccacgattatcctaccccacatttgctcaccagggcctggcctacccccaaagcctagctcttctgcccagattagcagccccctgagtccagccacaaaactgagaagtccctgcctccatgcccacccctgctgctctggacctggtggatcgaccaggacgcgcctctaattggtggctccttcaaagctccccaggtcagctgagctgtgagtcagggctcctcaccgttcccagcctcaagcctctgaccttacacctcttggcctccctagcatctcccttggcctcctcccggcttgaagccagatctccccacctttcctccagggcctccctccaggcagggacactgagccgggggggtcggtgggagatgtaggtgggggccatccagtccctccctagacacccacttggcccatcccactctcccaaaagcaggaagtaggcagcgacccaggcacacgaggtgttgatcaacactggtactgacgtactgacgcggttgttgacatacacatccggtggtttgttgatcccacctacgggctcaggaccgtggggtcaagaggtcagggcacatgatccacaggtgtcctcgccagggctccggacccctaccagcttcccccaccagctgcgcaggcccaagtctgtcactgccctggcccagctcagttcctacgctccctccccagcccctcctcagcccgagagccaacctccttaactcagcccccaaactcgacgagtttgtcttgcattctccagacaggtgatcttgccctctccagcctcagtttctcctcccgtggagacagaaaccccttcccgctcagtttctggctctggtaaggaactgaagaggccagccggggtgcctctgacgcctggagagggcaagattcccctggcctctctacgcccggtgcctgatcccccagcccgatcctgccgcagggagcctcaggtcgctgcgctcccaccctccgcaccttcctggactcgggcctggctcctcacccagatttccaggtggatgtctcgcagggcaacgctgcccttgtacagatcgaggctgagctggtccaggctgaggtgctcttggaagaagtgacctaagtagtggtgcagcaagtagcggcagacccgctctttcacacagtttgaccatggccacagccatcgtgacatctcggagaccgccgggcctgggccgcctccgcttgccgcccgccggcgatccccgtccggctccgctgttcactagagcccccggctcgccccgccgcttctctaggcgccaggccgcgcctccggacgcccagccacgccccctacgctcactgtcattggctattgcaaagggcgaggcctactgattggctgcgcggggcggagccttcgggcgcgaaaaagggactgggctctctgcatgatatagggctctcaatcatgatttacgcttgcgtaaagtactgtgtgggaggacctttaacctcccctctacaggctctgggaaggctgttgctccaggtgccggcccctcaaaggaatgcgcatgtgctgattcgtccaaccactttaagtggttggggaggatttaaagggacagtgtcccatcaaacttcgtagaagcc

SEQ ID NO: 56291 - DNA, 1586 bp, Homo sapiens
ggacgggggcccaggactgcaggctgggaacttttggttagcatgccaaactcctggactcccacctgtgccttgcatgccagcagcaggattttgagcaagagacactgacccacccagcacatcttagggtccaggggggctgaaaggtccatccgggaaggccaggctgcctgggatgaggtggcagctcaaggagaaaacctcctcctctcgggctttgccactccaagactggccctttaaactggagaccatgatgtcaccatagacagcaagggacgggagggggactgcaggcctgaggatggactgcatctcccagcaggcttgggtgcaccacacccctcccagcaagcactgactcatcgcagacttttaactagtccagtgctggtttccaaggggtttctgaagtgtctggtggttctggggtaagggtgaggttcctggggggatggcctagggcatagaaggcccaggccaaatctgtgggcctagcgtagcttgctgcgactccttcctgtcagtgtcctggcatcaccctactttcctggtgcaaactcctaagccctcctctttccctatgcagcctcccttctagaatccaggcttcccgcccccggctagagcccatcccactctgctctctggcttcaaaagcttcggccttcacccccgagtctgccctcaggggtgtcccctttggtctggcagctcactttaaacggcgcggggactacatctcccagcggccccgggccttcctgacgcagccccccctttcagcccgcggggaggtgcgggccgggtggggggaggtgacttgatgtcatcctgagcagctgggcggcgggtgccggtgcgcacggagccgagccggggctcccgttgcgctgcaccgcgttgggtcggagtcccaggacttcagcggagatccgcgcgctgcgacggccggtgcagagcccgccgagcgcccagtcccggcccggggctgagttgggggcatgctctagccgcccccccggagcccgggagagaacccaggagcgccgccgcccagccccagcgccccgagcggaaccgctgcgaaggggccctgaacggccgtcgccctccctacgggcagcccccgggggttggcgaccgaagtctaggttttcgagaagtgagtgtcccccaccccatgaggtttggggggccaggaaggaggagctgaggtgggggagggtgccaggttctaggagcggggtggcatcgggacagcacctccagtcttggggttgtcccaagtggccgggattagtggagcagcgatgcgttccattctgaaaggggcagggatgacgatcggggctccattctgagtcggggctggcttgggggataggccctattctgggaggggttgttttggaggctttctgtctgagagaagggagggacatgtccaggatgggagggggctgcacccctattttagggtctgggcaaggataggagggaaaagacctgggcactccacgcagcctcccggctctcctgaggaactgatgggctttctctgtctctttcttgctgatctt

SEQ ID NO: 56292 - DNA, 1322 bp, Homo sapiens
ctggagtgcagtgacatgagctcagcttactgcaacctccatctcccgggttcaagcaactttcctgcctcagcctctcgagtagctgagactacagacgtgccctgccacacctggctaatttttgtatttctagtagagacggggtttcgccatgttggccaggctgatcttgaactcctaacctcatgttatctgccggcctcagactcccaaggggctgggattacaggcatgagccggcctgggttatttggagaaggaaggaaaggctgctgtgagtgtagtgaggggggaccaggtacgttaggagagagcaagtacacagaggccaagttctaaaccgaaggctggatctgcaatgtgagagctggaaacaactcattccaatccaatcccgacttcgggggaggaaagtgagacccagagaggggcatgcagagccctctgtcacactgctcagagtatagagctgggactaggagctcccgactgcagccctcactgcctgggcactgaggacgggatcccagctccccttctcatccccgatccccaatcccctgtactcactgtctgggtcagcagcccattgcccccacagaggtgcatggcttaggcgggggagcagagtggtccctcagcagctgtgacttcccagtgccctctggaggcctaaggaagtggcagctctttaaatccccagtggccactccgcccccagagggccaagtttcagtttctcctaaagccaccagctgctcagaatccctggctcaggcttgctcacgtggctagaatttcctaacatgaactggccttccggttgggccccttctctggaaagaggatggtggagggtggagaggagggaagaccaaaggccaggtatgaggagggtgttctaggggagggaggacaggcggccagggactgagatgagagaagaagccagtggggaccgatgctcatgtggggtagagagagcccttgagctctggaattgggggaactctggatcacagcacacattggagctgtccaactttcagaaagtgactctccttctctgagccctagttttctcatctggaggatggtacaactacccactcccaggctcattgcaggaactaagccagataatacaaccacccccaaaccttctgagaccactatggaagcatgtctgcaaaattaagcaatggctgttggatagaacagatggatacattactgttttcatacaacagaccatgaagcagtggaaagattgatgtccagtggttaggagcccagcttccaagctatgtgacttgggt

SEQ ID NO: 56293 - DNA, 1800 bp, Homo sapiens
ttacaaaagggcttggtccttgacctatttcctcacttcttctggacttcttgagcgctaaagtaaagaatgaaactcttggacaaagccattcattcaacaacaaatatttattgagcacctactacatgccagccactgtgctaagcaccatctgggcctcagtttttccatctgcaaaagtaggaactgtgcttctgaacagggaaacgctgggcctctgggtgggggcagcctttggggcgggactgcaattccgtcattggaacccagggacgccccgcatgtttccgaacggcctccagggggcaccgccgccctgaactgagagccaccggagccgggtagggggaggcccaactttccgctctgtcagaggatgatgccgagggcccagatgagcaggatttggactgtgttgctgggaacgggggcctacactggccccaggatgagttcgtccgtacctgggggccctgggttctgactctcaggtcagacgcagccaagatgcaactcaggaacttcaaggtttccgctccggccaagagccccagtccggcaggggaaagggtgggggagtcgcccttgctcccccagcctcagccctcgggaggcgcagcgtcagggcgggcggcagcacagaaaccccccgcgccgctagagggaccctcgcagcagctgcgcgggcgacctcgcggtcacgtgcggcaagggcgggaccaaacgagcgtccggccaatcgactatgccgtcggcgagcgtgatagccaacaggaaccgggagcggggtcccgggactgggaagaaacggcggccgggagggggctccggggaccatggggctcctgaccattctgaagaagatgaagcagaaagagcgggagctgcgactgctcatgctgtatcctaccggacgccggaaccgcgagggtggcggggtccagccgggcaggcggtgccgggcgccccctgtcgggagcggaacgcggcggccggcgcgtcccaactgcccctggcgtcaccacgcgggccccatcaatcgccccgtcgggccgggaggagccgcaccccaggactggggcaggggccagctccgagggccgcagaagcggtcctgcaggcgcagcggcggggctaggcggcccgagtgtcaggggtggtgggtcccggagataactcggacgccaccacccggcggcctggcccaagcgtggggccgctgccctcccggctctgatctcctcccccgggcccgagggttccaggccccggccccgccctcgagctccgaatcccgggggcgtgcggggtggcgggtggcgcgtgtgggctccgcggatcctttcgagcgtggatccaacagtccgtctctttggtgttacgcggcccgtggttgtccctgcggctgaggatgtgtgtgtgtgggcccgagtgtcccgtgcgccctgtgcgccttctgagtccagttaggcgcccgcacctgttcccccagctctgtgccaggctccgcgggggaatggctggggagataagacgcttacgtgcacatataacttaataatcacatcatgactgttttgttttttgagacagggtcttgctctgttgccctggctggagtgcagtggcacaatcaaggctcaccgcagcctccagcttctaggcttaagtgatcctcctgcctcagcctcccaaaactctgggaatataggcatgagccacggagtccggcccatgtctgttttattttgttttgtttgagacggagtttcgctcttgttgcccaggctggagtgc

SEQ ID NO: 56294 - DNA, 1085 bp, Homo sapiens
agggaatcctgtggagggagacagggaaataatttgacgttgtcctgtacatactggacacaataagagttgggtggatgaacgaaagcagggatttaggaagcggggagaagtcgtttggaagtctgtgacaagggtttacgcttggatagggtgggcttgatcacccggcagaaatgagacgagtgatcccagccttcccaaccaatctttccagtgacctgggtttacgcttcaccacagagaaggaacttttcagacgctcccttggccgcgcacccgggatcggaacagcgctgtcacttgcgacaaaatccctaggccagaggaagaagagcgcaggcctggcgaggcggcggcgggcggaggctgggccggaggggtggggacggcgaggaggtggaggccggcgctccgctccgctccagctcggtttcatgtcccgccaggcgaaggatgacttcctgcggcactacacagtgtcggaccccaggactcaccccaagggctacaccgagtacaaagtaaccgcgcaggtgaggtggggcccagcgcgtactttacccttttaactagaggggcgccgagttttaccttaaggaaaggcggtgcagccactgctccctttttagacgacagaaatgggtttcccctttaaggggaggttgcagtacgaggcttagtttacatctttaaccaccagggggcggggtcctgggtgggcgctgtcttttttaaaagggcgttgacggccgttcccggacaggcaaggcgtgtatgcccacgcccggagtgtagtgtctgggcatcaggctgtgaatttctctaaattaacatgaaaactctggtttaatccaaatattagtactccattctcgtagagtaagttttgtttattggtttgtttgatgttacataaactccctttaacgagtttaaccatttttaatttttcaaaaaataatactgatcagtggttgaaaaaaattgatgcagttcagaaggacttaaggagtaagtcgccatatcaaggtcacagcaggaagatagataggctagagttgatatatgaagcgataacaaca

SEQ ID NO: 56295 - DNA, 1441 bp, Homo sapiens
cgatggagccggtttattgggtggaagggacgaaggagaggaacccaaagcccgggtacttgtctcagaggccccaaagccaaatcctgattgctcagcgggctggaaggcgtggcctcagccccgccccgccccgcctcaccacaaagcggttggttgcggcagggactacaccggtgtatcatgggagcggcccgggctacacgttaaaaacactaaggggagcgcgcgaagctgaacttggcgctcgatgggggccgttagccgccctagagcgcgcggagccgcagaggcgtagctggactacaacgcagtgcatctcgggaggccaactcgactggactgggtgagaggacagaggtggctcgatgggcggcccgaaggccggggatcatggcgggaaggcgggcccagacaggttcagccccgccccgacccgccgctccccaccccccggccggcctcgcgtgccttcccgcagcactgccgtccccgggatgctgagcgcccaccgtctccccgcagccccctcatgcccggctgcgagctgcccgtgggcacctgcccggacatgtgcccggccgccgagcgcgcccagcgcgaaagggagcaccgcctgcaccgcttggaggtggtgccgggttgccgccaggacccgccccgcgcggatccgcagcgcgcggtgaaggagtacagccgacccgccgccggcaagccccggcccccgcccagccagttgcgtccgccctccgtgctgctggccaccgtgcgctacctggccggtgaggtggcggagagcgccgacatcgcccgcgccgaggtggccagcttcgtggcagaccgcttgcgagctgtgctcctggacctggcgctgcagggagcgggcgacgccgaggcagctgtggtgctggaggcggcgctggccacgctgctgaccgtagtggcgcggctcgggcccgacgcggcgcggggacccgcggacccggtgctgctgcaggcccaggtgcaggagggcttcggctcgctgcggcgctgctacgcgcggggcgccgggccgcacccccgccaacccgccttccagggcctctttctgctctataacctgggtgagtcgggatcctggcggctgggcagagcgtggggacaggagcccaccatgacagtggaggtagggaaaggaaggattagctttaacatctcaccattagccccctcccaggacagcacaagatccaccgagccccgacgtgggacctcgggcccatctctgggtcttagttgtctcaggaataaaagtggagggggcaagggtggaaagggagaattggtctaaatagtgattttcaaacttttttttttttgagtctcgctctgtcgcccaggctggagtgcagtggcgcgatctcggctcactgcaacctccgcctccctgggtcaagcg

SEQ ID NO: 56296 - DNA, 785 bp, Homo sapiens
aggtgtgtttgcatcactgcactccagcctgggcttcagagcgagactctcaaaaaaaaaaaaaaaaaaaaagctgaagttaatagaattgtggctatttttcaccccggtatttttcagaatcttgtgcatctactggccaagtaaccacagacatggtccttcttcacactgagtccacctgcgcctctagatccccatggacttgtggcagggggcttgtggcctgggcttgtggctgtgttatattgtacctttctaggcagcctaaaattacacaattcctgaccacgtgacataaaccgacagctctgcagagggccccgtaaccctggaaagtcccagagctccagcgtggtatggctgctggagaataggtagctctgtcaccaggagaacctggctgcgtataacaagatccacagaacgatggagagtcatgcctctgagaacctcactttggaaacggcttaaagaaacaactccaaataaaagtaattcacatggacgaccacagtagctgatttacaccatgaagaaaaactggaaggggcctaaaaggcccaaatataagaagtggtaaggaaacaaagacttcttcacatggtaggatacaattcactcatgcgcttactggtccctgtaaacattgcctgtggcgtaggccttgggaacatatagatggacacaacctggttctgcgcagaagtttccggaagatgagggaggcctcaggtttgcagctgaccacagtgcggggggatgagccacacagaggtttgtac

SEQ ID NO: 56297 - DNA, 1508 bp, Homo sapiens
tgggacctccgcagaggcttagtaggagatggggcccttggccctggaaagagaaaaaagttaagtggtagaggaggactctagaccttagagtccagagaacaggttctagagacagcgagaagattcccaaacaagcccttttaagggcgcctcctccggcggcggcagcgggagggaagaggccatctttcaccggactgcgtcccccaaacggctcgacctcacgtctcccgcgcgccctccgctcaccggagcgctgagcggctcctccggaccgcgttcgcctcccagacataacttaggctccgtctcgagctcctccagcgccgccgccccgggcgcgcgccaaccgggaaggccactcgctgcaaaaaacgttcgaattacccgccctgcgggaaaggaagcggaagtgacgtagggctagcggtctgcggccctcggaaccccgagtcttttccacccgtcttcacctctagcggcagcggaggcgtggcccaggggcgcgatggcgtcatcagcgcgcgccgcacccggaagagacgtggcagcggagggataatcggggcggccggggctgaagggagaggcgcaggagccctggggagagtggtccctgcccttccgcgcctcgagccatcgctaccgcccttcggaaccagtgcagcggccgatcagtaaacacagagactggggtctgtagagaaggggcgggacttggagggggtggggctcaggagaggtcttgggggcggggccggtagtatcggggagcctctgatggaggggcctggccgggggcgggatccagaaggattgaggggtcgccggaggcgggatttatgcagggggtgtttctccgcataaggagggacagtgggcaggaatctgagatcggggcgaatatgagaggtgtctgggggagttaagagtggaaactgggctggtgagagcgtagtggtggccaccagaacctgacttcctaccaactcatgcccctttcccaggatcgatcatggggctttgtaagtgccccaagagaaaggtgaccaacctgttctgcttcgaacatcgggtcaacgtctgcgagcactgcctggtagccaatcacgccaaggtggggccttcaggggagcgactgagcagggcactgggtgggcaaggcggtattggcttcctccaaatccatgaggggccccgcgctagaatgtaagccccacaagggcaaggacttgatttattttgttcactgatatatcccccgttcccaagagagagtctggtgcacagtatgtgctcaataaatatttattgattaaacaaacgaaaggatgagtctcctctgtggctagagaaaaagagacagtcggaccttggggtgataggccgagcagccccagcaccagttgtgacatctctctcccactccagtgcatcgtccagtcctacctgcaatggctccaagatagcgactacaaccccaattgccgcctgtgcaacatacc

SEQ ID NO: 56298 - DNA, 1768 bp, Homo sapiens
agtgcccggcgcagctcagcgcagagacttacaatgcgccacagatagtcctgaaggcaattctgatgcacgtcagaggaccaggccctaagaagaactgcgctagaggcgtggtacagaatagtgtacatgcatttaatcctcgtagcccccctgtgaagtatgtaccccaattttaggaatgggataaactgagccactgccagtggcaggatcccaggaacactctactctggcctcacgtcccgcatccgtccattgcatctgggcacatattccgtgggccccttgcctgcgagagtgcaggttggggagccactacccgtcccccttctgggacagcagcaaccccaggcagttccacaaaatgcttccacccaggaaactgggggaattcagggctctcccggaacctttgcacccggggaagacaggtgcgggggaactctagtctcgaaggacctagggctgcagggggacgtttcacctgaaggactgcctcgtttcaacaacaactttatggctcccggaagtgcctcctccccgtccccttcctttccagcctcacgcccgtgggctgcagttggaacgatggcggcggcagctgccgccgggcctagcccggggtctggacctggggactccccagaagggcccgagggggaggctccggagcgtcggcggaaggcgcacgggatgctgaagctttactacggcctctcggaaggggaggcggcgggacgccccgcggggcccgaccccctggacccgactgatctgaacggggcgcacttcgacccggaagtttacctagacaaggtgtgtgcgcacggggagtgggggggtgcggggaggggggaagggaaccaggcccctgctatattgctcccccagatcatgcctccgactttttgtgaggttcaggagagcaggtgttcataagaggacgaacctcggccagggagtacgagcagctgaggcgtctgaggggatgtgagtaggactggactggcctgaggtgatgcggcatctgaggtcttctgggctgatgtgataggcccggaattgggggcgtggcccaagcgttgacaggcgcggggctgggcttaggccgagccccaggatttcaaatgctgacaaacaccaaacacggttgaacctagtaacccctgagctaggccacttagggccccctgcctgggattcctgacagccggcgggggtttgcggggtgggtggggatcagagatttcttgccctgaaagcctatcagctgcaggcaaggctgggggacatgaatgcctcctgacccgaacactaaccacccaacttcttcagctgcgtagagagtgccctctggcccagttgatggacagtgagacggacatggtgcggcagatccgggctctagacagcgacatgcagaccctggtctatgagaactacaacaagttcatctcagccacaggtgatccccacggggacacaccctccaaagtctcacagcccccattctcccacctgtgttgggaaaaccagcaagggatttagaggggggagactcagattccagtcttgtcctgacattattccattctcacctcctttcctttgagccttcgttgtcagactactatagagataatagctactctcagagggttgtcttaagtaccaaaggagagaaaagacaaaaggagattagttgtttattttttagagacaatgtcttgttctgtctcccaggctggagggcagtagcatgatc

SEQ ID NO: 56299 - DNA, 905 bp, Homo sapiens
accacccagtcccctcccaaggtagccaacatcctcgcatccagatggctttcactctccctggttacaaactgcttttcttaacaagcttttttttttttttttttttgagacagagtcttgctctgtcatccaggctagagtgcagtggcccaatcggctcactgcaacctccgcctccggggttcaagtgattctcctgtcttaggcttccaagtacctgggattacaggcacctgccaccacacttggctaattattgtattttcagtagagacgggatttcaccatgttggtcaggcaggtgacctcaggtgatccacctgccttggcctcccaaagtgctggggttacaggcgtgagccactgtgcccagcctgcttttcttaacaagcttgaaatgcaaagataaacagtgtagtctttgtgactgaatggtgtggatgctttcactgttgtttttggatatggtacaacttttatctccagtgtaatggctccatggctgggaaggcagcgacaatgacagcacacagcactgttgggttttcttttactctattttcctaacaacttagtgtttggattttaccctttagaagttggattcaagcttccttcttgaggtagcccctaagtgtcatgggctcaaacacccactaccaaaagagtctgctcttttcatggtagcttttggcagacctggaaggagattgtgtcacatggcctgtaaacaaaaccagtaattcactgggtgaagaccaaatgcctcatcaactgccaagcctctgtctgtctcccttagatcagtagcccatgatccctttacgaacctcagcctcggctctgcttttattgtttttcactgcatagcgctgcctttgctatgtcctttagttcaccat

SEQ ID NO: 56300 - DNA, 730 bp, Homo sapiens
tgtggagaagcagaggctcagggttacccaggaagtcagggcagggttggtgctggtgctgaagattagacctcagaccaactcttgtatcctgcctttgccccactccactggttctataaatagcgaccatgtacctactaaatagcgggccccgcggtgattaccctgtgatccttgtgatgcttgagtagctgacttagggcatcctcagcaccgatgggctggtggtttcccctgactcgggcctccttgcagtacctctttttaccaccaggtggggctcctgtacgaagagggtgttcgcaaggcccagagcagcgactccagcaagaggactttctccgtgtacagcagctctcggcagcagggccgctacgcccccagctatacccccaggtctggctggtcaggggagccccagggggaagggacaaaagagggcgagggtgcagggcgggctctgattccttgtcttccccaatccagtgccccgatggacaccaacctcttgagcaatatccagaagctattctctgaacgtattgatgtgttcagccctgtggagttcaacaaggtccgacttccaacgtgactcagacttccagggatcccggggagggttggctggagcagccccacacctgcccaaggagccccaggactctgtgaccaactgggggtgaccctgaccctccagtctctgtctctagggctgtttttaggtagt

SEQ ID NO: 56301 - DNA, 2567 bp, Homo sapiens
cgctgccatgcaccggtctgtccctgcaccccatggcacccaggatctggtctcggtggtccttccccgcaggcaggtgtcaggaccggcctaataaacatgtgtggcctcctcctctcgcttgctgggcgggcctttccgggggcggggttttgaagctgaggcttctgaggcgcccgcgtcgggtccgcccccgagcgccgattggctggtgtgctgggcccagcatgggcagggggcggttccacttaaaaaccctgggacgagagcggtccttgtctgcgttccgtgtccaggcaggtgcaggcgccgcggggccggatcctccgcgcggccgagtccatctcctgggaaatggggcggacagtgtttccttgactgactattgtgagcgccctctctctccggcggagcggagaccatggcccccactcagggcccccgggccccgctggaattcggagggcccctgggtaatggggcagagagatgggacctggggcaaaggctaagcgaaggagagctggagcgggtgaactaagagcgggggcgagatctgaggatggaaggctttgggggtgtcggaggcagagggacccgggggtttgcagcgaagggtgtctggagagggagagctgaggaggggccggttctgggggctgcagaacggggatttatggtgtcgactgggagcaggaggagggtcttcgaggggcctgggggcgggggactaagatggacgcctgggaagggaactgggaggcagcggggtgcctgggggccgagggctgaggacggggtgcggaggcgcactctgggaatgccgagagggtcccgcagagacgtcagggcgcccgtgcgggccggcggggagctggggggctaggggcggacgcccgacgtgatggcccttcccgcaggcgccgcggctctgctactgctgctgcccgccaccatgttccacctgctcctggcggcccgttcgggccccgcgcgcctgctgggtccacccgcgtccctgccggggctggaggtgctgtggagcccacgggcgctgctgctgtggctcgcctggctcggcctgcaggcggcgctctacctactgccggcgcgcaaggtgcgggccccgctcgcggacgctcgggggagggaagcgaatgggctcggcgagggaaaggacgccccgggccttatcagagcccccttggacccgcaggtggccgaggggcaggaattgaaggacaagagtcgcctgcgctatcctattaacggtgcctaggggacgggccctcgcgctggagttaagcggccgggggtggagctccaggcctagcggggaggtccacggagattggcccccaccccaggctcctttgtgtgcctctgttacgcccaggacagacgccgggggctctccctatgcccctcgtccccacagccttaccccatttactgctactccgtgcaccacagcagtggctggggtgatcctctgaaggccagggtggcagcctaatgcttggggcagggtctgtggcccccctgagttttgggctctgcgtgtgtttgcggggtggggatgtggaggcgcgcagccccagggctcactgtgcgctgtggttcaggcttccaggccctggtgctgacagccctgttggtggggctggggatgtcagcggggctgcctctgggggcgctcccggaaatgctcctgcccttggcgtttgtcgccaccctcaccgctttcatcttcagcctctttctctacatgaaggcgcaggtagccccagtttcggccctggcacctggggggaactcaggtgagaggggtcctggggtggagacggaggcagattggggcgtctgcctgtacattcactctccaatattctccaggcaatccgatttacgacttttttctgggacgagagctcaaccctcgtatctgtttcttcgacttcaaatatttctgtgaactgcgacccggcctcatcggctgggtatgttgggcttgactgagctggcctcaggccagggggagggttagggtgggtgagcagcgcttgggcagggcagggccaaaactgtgcagatgcgagtcattaaccattcatattccacaaacatttgttcaatccacctgtgcctaggtactgggagacaaaaataaagttagaggcaaaaaagcatctttgctgcagagagcctacattctggtgggaaagacagaaaaaaataagtaaaatatatacagcatgtcagggatgacgttaggagagcacgtgcaattctcaacagcagtcaagcacagaatctatttccagggagtgaccgcatgctgcttgatggtcaaggcagtgcagaacctgaaattgatcgctggggttagcaacctacccgtcactagtggccttgacaacattccaactgtgatctctggttctgtggccaagattacccaaagaaactcttgggcaaggcctctcctgttgccctggaaattatcttacccgaggcaggagtgccaggtgcccaccctgggtctgggtcctggcctgatgacaggc

SEQ ID NO: 56302 - DNA, 2087 bp, Homo sapiens
atccaccagcacacccaggaccaggagcctcgacacacttgggactcaagggcttgcaccccacccagccctgaggatgaacaacctcagagaagaggtggtttagagcaaggaaaaaaatgaaaccagtgaccaaaatcggagatgctcttcctcctttggataaacactgggaacccttggtgcacttctctcccctaggactggctgggtcagcactgatcagggagaagctgagcagtggcttgtgggcccaggaatctggggtctggtgggacaatagctatccctcagaaacaagcaacagggctgaccagtcacagctttattaatgaccagggtaacccgttcagctagggagctcctcaatgagagttcttggggcaggtggcacggggcctccccaaagccgctccagctccccagtgagggcggccacctcctcggctaccacagcatgggcttggtgagccctggcgcagtctagggccaggggtgtgagggccgcctcattttcgttggtccaggccaggaggaactggcactttttccgggcccggtaaagatgatctcgctcttctctagccacggcctgtttccgggcacggcccagggtctgtgccaggtcccccagtgctgccagcgtgtagcctttctggttggtcgggccctcgcccagcaggatgcgggcgacctcgtgcatagcccctcgtgtgcccaggggccccggcgggtgctcgcctgcttccagcacgtgggctgccgcctgcagggcttcttccgcagaggcgaagacttgctgggcacccagggctccggaaacgccgagcagtgtggcacagaagtcagagagcagcgcgtcgtcaccgccgtgatacagggcgagagtatgcgcgtaggcgaacagcacattgggcagctggaagcgcacgagcggcgagactgggccgcggctcaggctgactatcgcggggatgcgggtgggtacgacgggcgtgcaggcccccgggacatctccaagaacccgctcggcggccgcgggctccgcggcggaggcatctttcacagaatccggcggggtcctcgcaggggcgagctccagctccgcggcgtcactacccggggcattatccagctcctccagaagctgcggtccggctccgcggttccaccaccacggccgccatggaggcagcagccgcccggcctcaccgcggctcagcagccgctcgaaggcagctttttcgcccggcgccagccgctcccagagtcccgataggccgccgggcgccgggccggagctgaggcctgcttccccaggctcgtcctcggtctcgcgttgctgacgcagccggcgtagggcgcttgctaggcggctgggaggagcgctgcaaccgcggagctctcccagcacctggtcacggtagaagttttctgcgcaggtgccatgcgtccggtagcagcgcagcgagcagtagggcgcattacagcgagggcaggtgtaacgcgctggctggacctcccccgccgggcagaagccacagggcccggccggctccatggcaactggcaccgcgatctacctgcgaacgcacgccggtggtagttcgaaacttccggggcttcttcgattacttccggttcgcagcgcggccgacggcgcgctgtgttttcgcaaagcttccgaggattctcggcaatttccgcccacgcccgaaagccaagccccacccctttccctagtagggcgagagcaggcccagaagccgggcgtcaggtacgagccccgccctatgcgatgacgcaaggagcgaaaaaatgggtctggcgagcgcttcgccggtgccacgtctccccctagtggtcacaccaaaacgtggcccgatcatctaaagagaaaaccctctttttagcactacaatgtgctgtggcataaatccatctttactaggcacctactctgggccactaattgtgccaagcctacgggaggcgatgcatccctgcgctggacacagacaaataaaatgcactaggggacacagacaaataaaaggacagttagggccaggtacggtgggtcacgc

SEQ ID NO: 56303 - DNA, 1874 bp, Homo sapiens
agaaggtgccacccagcagaacccctcttttctcaattcaagcctttaaagagaagctgcgcccaataggtaatgagaacaaagttgcagatatttgaccttgaaatcttaagtttcatttcaggatcttccagcttctaattttatagagcactttgggggccctggtctgacctaattttagtgtggaagctgataaccagactaggatctcgtgatgtgactgaaatacaactacactctggctcagtctcccatggacgtctgtgttcaacatgagggatgtaaacaggaagaatcactctgaactgaagacagtgagaagtactctattaccataggtgtgacactcagctgtcaggactatgcaccccacactcactagacgcttaccggtacttcaaagaacattcctctctcactcacctccaagcatgcggcctgctacttccagggtagtcagggcctccaccccgcactggcccagagtggcctcatcctccaggggcgcgcctgccaggagcacgacttgatcttccggggcaatgccctccagtgaggctacatgagcctacagggaaagataaggctcgtaagcgttccctcgggccgcgagagtgaagagcacaagaaaatggaacccagggcgcaccaagcagccttaccttgatctgggcgaccgtttcctggccggtcacctcgaaggtgtgtagctcctgggcgcggacaaagagctgcatattggcgactgagtaaagaaaagacggcttgtaagagaagccaagaaatgctctgggataaaggagatttgggagtggaaagcggtccagaaacgatcgcgacgggatggtggtcgcggcggctcacgtggggaaggccaggcctcccaaggagttcggatagggactggagcagggccacggagcaggccccgttcttcggttccccccgcgccttctgaccccgcagccaacctgctacaagcccttcggatccagccaaggccccattcttacctgaacggcggtcccagctaccgcgaagatggagtcgagaaagaggaagaagcgagggcgcgtcagtacagaccgtgggctgcgtgtcacgtcactgctgagcgaccgcgcggttccctgctatttgtaccgcccaaggcagtcctagctccgcccctttacgctcgcaccggcgaacctgcctgggcaggcagctcgcgcaggacggggcgggaccagacagttgcgcgcacagaaggctggcgtagcaggtaaagatggcagctaccatgttccgggctacgctgcggggatggagaaccggtgtccagcggggctgcgggctacggctgttggtgagagcgctgagcgaggagctgagggcatcgcgtgggtgtgaggctcagtgttaatcattgttaaccccgaaaactaaggcattcctacttggggccttagttttgccgttttcgatcaggagaacttgtcccgagtgtacatatagaatcgagagggaaaatggtagactggggtgctctttgggagcacttaacacagtgcctggcagtgtctatataagccacaacgtttcaggtaaggggcggggtcctagcatatgagtgtgcgtggggaattatgattgccttaattctttttttttttttttttgagacggagtctcgctctgtcgcccaggctggagggcagtggcgcgatctcggcccactgcaagctccgcctcccagattcacgccatcctcctgcctcagcctcccgagtagctgggactacaggctcccgccaccatgcccggctaattttttgtatttttagtagagacggggtttcaccttgttagccaggatggactggatcttc

SEQ ID NO: 56304 - DNA, 2766 bp, Homo sapiens
gactcatcatgcaggatcctccacatcctcatcacagtttattcaaagttaggcagctggcggctacttccctacttacctgacctctagccccgccccttgcccaggcagactcctccttccctcccagggagttcctccctccctgagccctgaactcactgccatgctggggctggacttggtcaggtacaccacagtggggtagaactggtgtttgaggtagtaggcgtgagccaccacagccccggtcagcgccaggctggccgccatcatcactgccgtgcggaacattgccctggcccggagacctgcatggggcaagaaaataacttatgtgatgctcgtgctgtgcaaaatagcccggtgcctggcacagcctcaattcataggagaaagtgggggggaaatcacatttcgccctcgaaatcatcagacaaagaatagcttacgctaccccattttacaaattagactcgaaggggttaagtgatcacactgacgcaaggcctggaacctgggtcagtcttgcttcaaatctagggctctttccacgctgcctgccaagccgcctcctctagggaggtgatgaggaaaagctgcaatgttggaggagggggagctgcaccgctgaccctccggtggagaagatggggtgggaggcaacagcagaaatctgctccaggggcgggaatgcgcagccagggctgagagcagccaaggcacagaggatagcaggctgggcaggcgacagcgccggtgacagctgtgttagggtgggcagttcggacgcccgccctgcgggagcgggcggggaacgtcagcctggaatcctggggtcccccgacccccggagtagtgtcaactcagagcaccacaaaaacagcgggacgggagagagcagcagcgggacgggaggagccgggtcgccctcgcggccgcgcacctgtgagcaccaggagttgcgggcgtcgcaggcagggcccaggcttgagcaaagcggccgcaccggcgtctgaggtctccggccagctgacaggccgaaagcgtgcggcggggctgaggggcgtgccgactccggagacctcaaggggaaggttcgggtcccgaccccaaccacaactcgggccagacttcgccccactcaccaggaacccagcgccgcgagcccgctcaatccgcgcgactgcggctgcccctccggttaacaacactccccaccccctgcgaaccggaacttcgggggtcagacacctcacttccggcggcgcggggcgcggcgtgggtcgtaccaagtgcgtcctgccctggctcgcactgcgccctacgtgggcccatagcaatggtgtcaccaccgtatctggggtgatgtctacggggaagggctgggcaagaggtccgagaggtggtcggaaggtaataaggcaacaggggggagtcggaggtccccctattatttattagtcacagatggtatggctcctgcgctgagtggcctcctcggactgggggactcggccccgcgagcagctgggaaggggagccgcttgcgggctgtaccacctggagcggggagtaggccagggacagactatacaagcctgaggggaatgaaatgttttcttaaacatttagggagagtcacaacagtttgacaaatacggtgctctctgagagaactggatgcggaaaacaaaaatttgtcttctccatgatcacccccacaagttgtgtgggagtgagttgggtcccgtggctgccactgattggttgcgataagttacgcggcccaataagaaaaagaatgtacctttgctggcctatagaaaggggaaagcaggtgagtggttgttaggggcggacagctgcgttgcctaggccctggtcccgctccagttggctgagagtagggaaagctcagtccttgggcgagtgatccctggctggcctccgggaacgtttgccgcgccaggacagggagggacaaccaggtgtacccgagactgggagattaattcctgctaatcttgggacggaagtgttctgtttgttcaaaggaattgacttcagcgtcgcaggcctgcccgcatctcagtgtctgattttgctgcccatgtgttgttcagctctgagccataagcaagacccccactggtcctgggctgcactgtattttagttcgtgtctgggtcgcagccaactaagcctgctgattaacaaaatggagctaatgcatccactttgtgccttgcgttttcctccgtcatctcatttaatcatcaatcactaaggtttatgagctagggggtgctaccccctcccccgaaacgtggggcaattgaaattcaaaggcttaccaaaacctgtcctaggattggcgccaggtctgtctgcctctaaatctctgtgctgttggtctcagccatcttccctgccacctgttgacttgacagtttcagcttataaccagtcagagttggcttccccgtaaggccacgtataactttttttcccccttttctttttatttatttatttattaatttttgcgacagggtcttgctctgtcgcccaggctggagtgcattggcgccatcagggctcattgcagcctcgacctcccgggctcaagcgatcctcccacctcagccccacaaggtgttgggattacaggcgtgagccacaacaccttgcctatctgtaactttctagtgactgcatccaatggttggctttcagcccttgcttgactcaacctctctcccc

SEQ ID NO: 56305 - DNA, 670 bp, Homo sapiens
aacaaaatgtaatgtacccacacaatggagtattatttagccataaacaggaaggaagtactgcttcatgctacaacattgatgaaccttgaaaaccctgtgctcagtgaaaaaagcattcatatcactgcacttacgttacatgtccagaatagacaagtccatacagacagaagtagttagtggttgccaagggctggtggcgtgaggaatggggcctgactgctaattggtatggggtttattatttgaggagtgataaaaatgttcctgaggagatagtggctatgcttgcacaattttgtgagtatactaaaaatgaccgaattgtacactttatttattttgagacacagtctcgctctgttgcgaaagctgtagtgcagtggcgcgatcatggctcactgcagcctggaactcctggggtcaagtgatcctgccacctcagcctcccaagtggctgacattacaggcaaatgccatcatgcctggctaacttttttatttttagtagagacagagtctcactctgttgcccaggctggttttgaactcctgacctcaagtgatccttccgcctcaacctcccaaaatgctgggattcaaatgtgagccaccacacctggctgaattgtacactttaaaataatgaattgtggtatgttaatta

SEQ ID NO: 56306 - DNA, 1159 bp, Homo sapiens
cttaagcccagacagggtggccccatggcccttctctcaacccccgcgctttgtaacaggtccattttctcatccccatggcaactagtcattttattactgagaaaacagatattcttgaggttacagaaaggaagaaaaataagaaaagaaaacagatgttcgaagaggctaagaaagtcagccagagtcaccctgctggcgtgtggccgggaggcactctatctacttctctgacactgcgctgcacctccagtgagggcctgtggtgacttcttcctcctattgaagcagtgtctcggggctgagtcattcccaacagtttctgtgcaaagccagggaacagccacctcaggccccttggcaggctgccaccctaggcagttgtctcgagtctgggtgtcctcggagggcagagcagggacaggaggctgatgtcccctccctctgccagggcacgggcagccaggcagtgaggccacattaggactcaattcaggctggcctgagcatctgagaaagggaagtaggatagaggggcaggctggggacagatccatgggcaacatggatcacccaagactagtacaaagaaaggggctggggcactaaggtacagattgggcaatcagcacacagtatgtgccaggtgcagggctgggtgctgggattccagggtgagcaaaaagacacctaccctcatgagactcctgcccagtgcaggaaattcagggcacataccttttctcctaccgctcacacctgctcctcctgcctcctcatttttccttccagctagaatgggtggagtttccctcttcccattcattcactctattattcacccaagtatttatccagtgcccaccttgaaccaggtcttgttctaagtgtcatgaatgtattagcaaatgaaatagaaaaaagtcccttcccttatgaagcttacagaatactaaagacaaaaaataaaccaggaagcacgtagagaagtgtagagaagtgatgactttgagaaatcaagaaggaagaggagtcgagcagaagaggaggacccagaagctttgaaaggaagagagaggttgggcatggtggctcatgcctatgattctagcactttgggaggctgaggtgggaggatcacctgatcccaggagtt

SEQ ID NO: 56307 - DNA, 2178 bp, Homo sapiens
ctcgggaggctgaggcaggaggatcacttgaatcccggaggctgatgttgcagtgagccgagattgcaccactgcactccagcctggcgacagagagagactccgtctcaaaaataataataataatgatgtctcattttattacactgtgctcagagaatattgtttgtatatttctactttttttaaggtactgatgatttctttgtgacctaagatatgatcattttttgtaaatattttgtttctttggaaacgtggttttttttttttccaggggaatttttcttggttggtgtgtgttattttgttttcagattttttaaaatatcagctccatacggatctattcatcttctttctattcgtttttgtggtattggatggtttacaagattcctagctcaatagcacactgttaggtcaatatagcaaagttcagatggtttagaagctttttatttgtttgtttcggtgtgggggtgggtagggttttgtgttctcccattgcttggttctcttcggaccctcaatttctcccttctgcattttcccacttcacttactcaattgcccacggatgcttctggcccattttagcccttttttttttttttttacccctcccgcggaatcagtggactttaacgacctccccttcctatcgcacatacttgtaagccccttccctgaggtctgagctctgacttcccaggacgtcttcttggtattttcagattttagaatgtcgcagtctttctgatagttgctctcgaccaaccccagcccggatcgatactcctttctcccctccttccccagcttttcttggcacaaagcctcgtgcctgggagaggccgcagcgcacgacggcgtgcggggatatggtcgctttctttttatttacatttatcttgaagtttggaccttctctgctttcaagttatgccgacgctgtggttttggcagcgttttatttttcctttcttgttgtctggggctgtgtggacagcaaaagttggcggatggggacccaggcagccccttgggcctcaggacccggaagtccccctggctggcttgtgactttttaagatggagttcagttcatcagcgtgacagcttttcttattttctaacacgcgcgtttgaggtcataaattcctctctaagaattactagttgtgtcctccaactttgacagacaatattttctttctttctttttctttttctttttcttttttttttttttttttttttttttttttttttttgagacggagtcttgctctgttacccaggctggagcagtggcgcgacctccgctcactgcaacctccgcctcccgggttcacgccattctcttgcctcacccacctgagtagttgggactacaggcgcccgccaccacgcccggctttttgtattttcagtagaaacggggtttcactatgttggccagactggtcgctaactcctgaccttgtgatccgcctgcttcggcctcccaaagtgctgggattatcggcgtgagccacctcgcccgggtacatttgattaatttttaggaagatgttctgtgcgtgctttcctgcctttgttgggtgcagtgccagcttattcgtccactaggtcaaatttcttcatcatattcttcatatcttttactgctttgctaacttttttgccttgcatgtgccatcatatctacaattatgattgtgatttgtttttccgtgtggttctgttgattttacacacacacacacacagacacacacacatgcggtttcttgcttattgactttatttttaggagtaaacaaattactatatatttttttctttacctggattctggttaggtaattatacacttttttttcttccttccttccctccctcccttctttctttcttctccttcctttttccttttatttttctcttcctgcctctttcctttcctttattttccctcccctccttcccctcctcttcttaccgacaggatctccctatgttgcccagaccagcactacaggtgcacaccaccacatccggctgtatatttttaaaatcactacataaattctctttctccctagttatgctttttgtccaaagttgtgtttttttgtttgttttttgtttttttttttttttgagacaagt

SEQ ID NO: 56308 - DNA, 2384 bp, Homo sapiens
taggagctggttccacccatcactcaccaggttaggtatttcaggcaagtcacaccctctcaggcctcagttttcctcttttgttaactgagggtgaaagtggggttagattagatcagcggctcttaacttttgaggggtcgtgggccctagagtcctgggaacgctatgcagtttcctcagcaaaatgcttgcatccacaacatgcaagactgcagcagctgctgggctggggctgcgagaccagcgaaaagccctgacttgggggggtctcgggagtctctgcagtctccccacccacacccccggcctccgcgccgaatcctggccccccaacttcttgcagcccgtgaagcaggatctcagggtcctgggggtggggagagggggctgccgtcctgctcgcagcctctgccgccctctcctgggtaaggtgacacatgggcgcttccaggtgggtgggctgagagcctgggggagagaacagggatgtccacctctctaagtttccaggttcaagaaaccccagaacgttagagaaagatgggctcccacaattgcccaaccccatcccataggatgcacgcatgcggaaagtcgggccgaacggggcagggacttacccaaggtcacgcagcgagcccggtccccctgcgttccccggggagcgctgagccgggacgcggcggtggggtggggaaggggagtggcgcggccctgcggggtgaggctgccgtttgctgagtgtccggcaggggtctgctcgctgccagcccggcccctcctcagagcagctgccgcagcccgaggtaatctcggccccgcgccggggctggctgggaacggcgggagcagctgcggtcgcgcggagcgaggggagctggggaccgggcgggcccggggctgcgggaggcggcgccgccgcacaatcgccccggaatgcccgccagggcgcgcgtggggtgcggccgtccggccctgcaactcgagctgctgcccctggttaaaaataccccctgcccggccctccccctccgttccccgcggtgcccttccgccgcgccccagcccccccatccccccccgcgctggcccctccccggggactgctctgccttttactaatttgtcctctcgcggaattggcccccggcctgcggagggaggggcggggagacaccgtgagtaagagatagtcagagaccgtgccggagagataagggagagccgagaggaagcggggtaggagccccaggaggaggaggaggagaaggagagagggagggcggagggcggaggggcggcgggaggagggcggggaggagcgctcttcctggttgggccctgccctgagctgccaccgggaagccagcctcagggactgcagcgacccccaaacacccctcccccaggtaagaagctgggtagccgagccgggattccttgaccctggccactgctcctgggctgaggggctgccccagcacggtcccttctcgggggcctctgcgttcctggagcaggggtgggggctggcggagcggcacagcccaggcgcctgtcccagcctggctcaccgctgtccccaggggctgggctagggcccaccagctctgatatcgagcctgctgcgggggcctgaggagggggaccccgaccgtctggggttttcagcccacggcaaggggccggtgcaccaggagcttggttagtttggggagggggttgcaggcctgtgaacaggatcaaagaggccttccctgctgtgtcccacctgcccagttccttgtgctgtctggaggctccgccctgccccacctgacctgctggctcactacagagctgcaagcccctgacaatgggatccgggaaaggagaggtggccggcacgcctgggaactgggaaatccctttcctggattcactgggagcaccgggaggtggctgagaaccctacttctgtgaggggagcagtgaggcagggaaaccctaggtttggggatggataagcaggggcaggagagcagagcttgcaggcaggagcccaggttctagtcttgggaaggcctgggttctgagcaggcccatctgtccggcaggatgtcggaggagatcatcacgccggtgtactgcactggggtgtcagcccaagtgcagaagcagcgggccagggagctgggcctgggccgccatgagaatgccatcaagtacctgggccaggattatgagcagctgcgggtgcgatgcctgcagagtgggaccctcttccgtgatgaggccttccccccggtaccccagagcctgggttacaaggacctgggtcccaattcctccaagacctatggcatcaagtggaagcgtcccacggtgagaggggccatcct

SEQ ID NO: 56309 - DNA, 657 bp, Homo sapiens
aggcagcgcagttccggctctggggagcaagggggctcctgcgaacccgagtccaggaatgggcgtcttcctgcggtagcccctgccggcctgggcttgcccttcgtccaccttcctctttccgcgagggagaaacagatcctgagttcaaaattccagagctgaaagtcctctcttggatccttctggaaacagcaaaagcccgtttttgctgagaaagtgactcggcagctatccggagctctctgcctgcaggtggggccattctcctatggagccgacccgacccgctcaaagctgccccgggaaccgcaggtttggttcgcgcacgccgggacttgccaaccgcacccgaaaaatcggggccatgtccaaatgtttcgcttcgctgccggcagggagccgcgccgggctcgctcctgggatcaactgcacagtcctggctttggggagcgggaggcggtgagcctgcccgccccccgaccccttcctcaccagtgtgtctggggtgaggtggggatggggagtcctggggttcgaaaaaggatgggggaggagaaagaggaagtgttaggaactggtgaactttcacaaacttccacaaaccctattgtaaatgccttcaattaactgggatttttttctttactggttgat

SEQ ID NO: 56310 - DNA, 1618 bp, Homo sapiens
gagttttgtctgtggctcgtcctgctacaaagtgatccgcctgcctcggcctcccaaatgctgggattacaggcgtgagtgaccgcacctggcctgggatggacattttaaaggttcctgatacatattgctaaattgttttctcgaaacgctctataccatcccaccagcattgtatgacgcctacggttgagatttttggctcaaagaattacggtgtatttcaaggggagaaccctcttctcatcttacccctaaactctatccttgagtgacctaccttcactcccaagcctccagtcacccactgggaatctctacctggaaatcccagaggcactcaaacttaacgtgtccaaaactaaattatccgtcaccttcccacctcatatccccccaaatgccccagattcagaaaacatacccatcactgtggctggcaccacggtgataagcacgataataaccatggcaaccagattccctactgaagccattcttttaggatgaaccaagggcacaacaggcagagatgacaaggggaatggagaagggggtacagtaagttttagatagtcgaaggcacgcgcacgacaacgcctgcgcaccacggaacagggcaaaagggtgacaaacatgcgccactgagttttatcgagcagccgatgcccagaaaacaggcatccgcacacagactcagtttccttgtaggcaactcccgggcgttgcgagtcacaaccggcattctcgcgccgtgagagagaactgcgcagctgctgactggcgggccgccaggcgcgtgcgtagagacgcccacacgcccgctgatgcgcacgcgccctgggccgcgcgtgcgcgcgtggggttccggaatgagccggggaaagcaaggggaaggtttggggttggctcccggtttcgcgcatgcgtgcactgcacaaaccatttggcgggtttttccggccactcagttctgccaccgtcactgagaagctcagcggtagcttttgggaagcaggacgttctcaccaggagagcgtcctctcgagatttctgctccctccattcagggcgtttgggagccaccccttcattttttaaaaaaagtatttctctgtgaccgacggccggggccttctgacggtctgaggtcttgcttgggccagtcacctcctgtcacggtccgcggaggggggaaggataagagggcgaggagctcatcgctcgccacccccgtgggcttcttgggcgcaggtcggagctgggtgggccggctccccggcccctggcttgggcgaccatgtccgcatccgcccagcagctggcggaggagctgcagatcttcggcctagactgcgaggaggctctaattgagaaatgtgagtcccgcacccctcccgccctgcagccgtgctccacgctctcgcccgagttcctcggcgcctagaaccgaaagtggagcgcttccaatttccacttcccctggagcagagttctcggtggctgtgagatgaagaatcaaacttgagttttgagatttaggatgtggggactttgaaatgcccaccgggtaccgcttggatgccaaatcaaaaataggaatatgcagcacgatttt

SEQ ID NO: 56311 - DNA, 1340 bp, Homo sapiens
atgagccaccacccctggcctagaaaaatattaaaataccattaaggaatattcaaaactggttattatatcagggtagtagaataagggattttttttttaatctattttccattgcagctggttttgatggttttgaatctgttctctggcattctgtcctgcagttgccaccagctgaccactctgcaatataacttcttaaacttgcagccaggaggagccctagggcagggaaagctgcagactagctggcttcctggctgctatccaggcaaggattttgttttctctattacagtcgattatcctagactttagggagcaataggtctctggactgtaggtttcagcctccgttctgggcttatctttggattcttgttgatgagtcaaaaaaaaaaaaaaaaaaaaggagtgaccatcagatgtttgctaactcttcaagtatgagctcaaccttgttatctgcctggagtcatttcctttgaaaatgtatggtagactttgccaaagtaagtagtaatgtcccattccttctcaggaaaatgtgtacacatagatcaaaactatgcattgtaaaactcatatctgtttgaaaacatagaggtagggacagaaagtaaacatatgaaggatttgacaggacacattaccagcctggtggtcctttttggaaaatgtttgctttctcgtaattgccttcaaaatagggacagtgtcctgaatgttggttacagttgttgaagatttctttttgagattatgcttggatgatggggccttaagaagagaacccacccagtcctattttgtgccttcgtttggacatgttctcccttttcttccaaggtactatacacttaattagtattgggtctagtaggactgagattttgttttccttttttttccctagggttctcagaagcgagctatctctaccccagaaacccccctaacaaaaaggagtgtgtcaactcgtagcccccatcagctactctcaccgtcaagtttctctccaaggtatggatcataattcattcaagtgccataaagctggcctcccctcccctttctctggctatctgaggaaggctaacagcagagttattaattaactataggtgggcatgtacctctgcagtgaattggcttgaaagcctattgctctctgccttccttgctctccttttctttgtggaaaattactgtttcttacggtaattaaggaaactcactttccacccacttttctagggctcatttcctagatcgggaactgatatcttgtattgaaaacaacctgtctattcagaagtctaagagtcttaacaggt

SEQ ID NO: 56312 - DNA, 618 bp, Homo sapiens
cagcacaggtaagagttgttctaatagttctcactaattaatattacgtttttaaatcgatgaccaagaggcatccttcttgcttcctttttcacttcttgtctgtgttctagtttgaacatctgtcttggttgaatttgggaaaatgggcccttctgaagaaagatttgtaagtgctgtctggttttgtggccagagagtgattttcttcccacttggattagagtcttgcacataagcagagactcaaggccttgtttcccttggtggtgagtcaggtagctccccggggatttcccacaaatagaagcattcacgtatcgagataaaaggacagcagcgacggtggggttttcagaatcttgttctctggacaatgactcacagtctctcccctggtttggtctcttgttatagacaaactgctgccaatagtatctttatatcatagtttaatctggcatatataccagtgctttctctctagaatgttttctaatctaaggggaaatatattctagaagtttctttaaagtacctttgtcaatgtttacattcaaagaatgatcagttggggaagtgatgcagaactgtgtcatagaaggaagtgttagagga

SEQ ID NO: 56313 - DNA, 1792 bp, Homo sapiens
atgaatggaccaggaactagtctgaatatgagccccaccttcactctggaagcctgacagcaaagacgggggtccaggccacgcggcctctgccttcccatactgtcttttctagtgggaggtaaactgatcaactagcttgtaagtttgtagtattctaacgtaggcgcttccaaggaagtcgctgaatatacttgtgccggcgcttccccgacgcagccctgcagggaaggatccggtccaaggtctctctgcgatttctgaagaattcggtcttcccggagcctctcccccggctcttctagaaccgaaggttttagttcccatgggcacagccggaggccgcctgcgccacccggccctcagccgccagaaccaggacaggactccagggcgcgcgcgaccgctggacccgggagcggcacctcccacgccgggagccccgggcggtgcccggagtggggcggggcctgggcggggatggggaggggcttggctggcgcggccccggcattggctccgcgggccggggcggggctgcggggtccgcggtgcactctgtaagttcaccgccggtcgggtccggccgccgcgctgtccagctcctgagaccttgctgtccgccggtctgccgtctgcgcgcctcacggtgagttcgggctgggattttcgcagcttcgcgggggtcccccgagaggcccatctctgtggcgccccgccccagctcgcgccctggctctgcctctcacctcactcagttcctttcgagggctcctagggctccatggggcttcccacccgcatctgggttcccgcagcctcgcccgtgcccgccacggtccgtgggggcgcaacgcatcccgaccccgaattccccgttctgccctccattttgtgtccgggcccccgcccccctcccgagacccaggggtgccccgccgcccagcatccccaccggggctgggggccgtatttttagccgatagtgagttgttctcctatctttagctgcggccgcgaatgtcctgaaacggatccgggctgggctgggctccgcccgggtaggagtggggaggggtcggcgcaggaacccgagccggagctaaggagccggacccgtgggaggggcgggggcccgcacgcccgagctctggccctgtgccgagcggacactaggacatcgcccaggccggaaagcacaggggggaggctcctcccagagcttggagactagggcagggtccccaatcgccccctttttccccgattgtgggaccagaaaccccgaagcaaaaagatctcgcaggtaatccccatctggtacttgaacgcgcagctccttggggaccgcctgcctggagcccgggggaggggcgctggagaccccggtgcgctctcggagtcctccgggacacgaggcgatcaagggagcacgcgcgccacctggcggccgcggagccgggcacctctccggaggcaccgggaccccgggagacccagcggccgctagagggtctctgcatcctcgaggtctaggagggcgggaggaggtggacgcctggggtcaggagcccttcgtttttgctattgttcaaagcactggccccggagaatcgaagtgcttgaggaaggaaggccttgtagatatttgctgaatgaatgataaaacctacagtgacccgctgaaccccgctattgtacattggcgctctcacctgcaatattgcagtgggatctccagtggccctttagtggtggcttcgttgtcagcccattttatagatgggaaagg

SEQ ID NO: 56314 - DNA, 1432 bp, Homo sapiens
tcaccgtgttagccaggatggtctccatgtcctgacctcgtgatccgcccgcctcggcctcccaaagtgctgggattacaggcgtgagccaccgcgcccggccccggctcctgctcctctaaatattagaggcaagcctcgaaccggagctccgggatgcatgccaatctccggttgcgcctgcgcgtcgggctcccgtggggtccacgcatttcctacccggcccccgcgaacaggcgtaaagctctttcttcagtgctcgctctagtgcgcgcgcccggacggcgcctgcgcagagggcaaggaacctggtaccccggtgcggtcccggcgcctgcgcgctgcggactgtggggcttctcggcccgaggcagaggaacagggaagatggcggctgtggtggagaatgtagtgaagctgtgagtggtcgtttctttctctcctagggcggcaggttttgtaaagggcctgggagtagggggcggtgggggaagggactaggcggagagagggacatccccgggaaagccatgttgcgactcctggtggggagggcaacaggagactccggagaagacgttgcgcttctttggaaacttgtggaggccctggtgggggcacactggagccccgacgggcggcatccctgcggggctgtgtggcctcagcgttcctcggggctgacggtttccagagcatggcgccctgcctgcacgcgagactcaccgtcccggtcctctcccgagacgcctcagtccggaggagcggggccgaggcccgggcggccctacggctggcccgccgcccaccccgccccgtcccgtcccgttcgctgcagcaacaggctcggcggcccctgcggagtgcactgcggggctggctgtttcagttccaggcagccccgtgatgtttgggaggatcttgggtggcaggtacctaagactacaaatattcttgggaagaatttatcgaggagcggatccagaagggaaggaacttcaggggagtgggccttggccccgtccagtagcagccatcaaaaacctgcaactggaccgaagccgttcaggacagcttagcctaaaggggcatctaggtgggcattcttcctattatacgataccattgtgctggtcagatttcaagcaaagttaaagttaatagctgttggggccatggacgctggcctatgaactgcttcctgtgagttaaagatgctttgggacttgatttattcctacagaagaatcagaatgagttttagattgggttaatgcatggtgggcgaatagagcttcttttaatgggtatgttgggcttggtgcaagggtgggaaaattgagtggtgtctagctgtccagtcagggtttttgcattttgactggatgacgaggtaaaggttcggtaactcttctaagggactcacagcttc

SEQ ID NO: 56315 - DNA, 846 bp, Homo sapiens
attttcatgggagaagggtaaacattttccattcagatttggaaaattaattgctgatggtcactgcggtgcagctgtctgtccatgaccagtagggatcctccttttccagatattcagcagcaaggactctcagggtgtgggcactgcttgtgggctaccctcctgagagggaagctccaggacagacagatcccagctactgccccagataagctgcagctccaatagtttcgctctcagattgtgtgtgtttggggttgggcaggctacggacatgtcagggaaacagaaaggagccggaattggaatggaatagtcattcattctttcttttttttttttcatttgcttatttcacaacatcacttcagcaagacctcctatgtgaacaaggttgcaaagatgatgtctcttctggacagaaccttgcagccaatgacagtggagtgtgattaaggctgtgataacggctgtgcaaagtgcctggccccatagagctagggagactccagggggaggtgagctttgagctgcagtttgaagggcgtcccaggccaagggacagcgtgtgcagagtctgattggagtgaaggagcacagtgtgctgggggcgggggcaggcagttctgccagagcatagcatacttgcggaggtaggggcagagtacaaggagagacctggagagtaggaagggcctttagccaaccaggcttaggggtaggacaccatcagagggttttaggtaggcaggaacaagtcattcttggggttctagaataacggagtctgtgtagggtgtgtcaaagatgtgaaacctagaggcagagagcctctgactgatc

SEQ ID NO: 56316 - DNA, 1272 bp, Homo sapiens
tttgggaggccgaggcaggcagatcatgagatcaggagttcaagactagcctggccaagatggtgaaaccccatctctactaaaaatacaaaaaattagccgggtgtgatggcgggtgcctgtaatcccagctactcgggaggctgaggcagagaattgcttaaacccgggaagcagacatcgcagtgacccgagatcttgccactgcactccagcctgggcgatagagcaagactctgtctcaaaaaaaaaaaaagttaaagtacatgttcagatctgagacaggaccagggctgtgctgttaggattggtaaagagggagtcgaggccagatgcagtagctcatgcctgtaaccccagcactttgggaggctgagacaggaggatcacttgagcccaggaattcgagaccagcctgggcagcatagtgagacccccatctctaaaaaattgggaaggagtagaaatctttcaaagggttaagaggagttagagactcttttggcatggcgggggtgaagagggagagctcctctgaggcatcggcctgggctgggagctgagggcagcagggcgggctggggaacttgaggtgcctttgggacatctaaggatgtgtgaccagagacagcagtgtgggcctggcactcaggagcctgagcaggctggagacaccagttaagtcacattcacagcatggacccccttggctcagctgtttcctgagtctggtcaaagttatttaagccagagtcatctcgtggttgtgtcatttccccctttccctgcgcatgtagctttccccaggctggagtgtggtggggaaagccacagggagtgtcactatacacataagttagtctcctggaatttcttcagctgtggtcattgctaaaaaaagaagtatgacgctggacaacaggagtccaatgggactttatttaacatgtttgctcaagttatcagctctttgcaagtgactgacagacaccacctcctttgtaacctcaaagcaggttcacagactatctcctggttcttagggatttcttctgtcgaaaagagttctcaaaaataacagcaacctgagataccatctgttaaatccttaagcaatttcgcatgccttatgagaccctgctgattaaaaacatctagttttgttttcttttttttgagacgaagtctcgctctgtcatccagcctggagtgcaatggcgcgattttggctcactgcaacctccgcctctctggttcgggtgattctcctgc

SEQ ID NO: 56317 - DNA, 3231 bp, Homo sapiens
agccgcgggactctgggagaatcacccaggttcccacctctccgagagctttactcttctttcttcaactcataatgtcgtcgccgggatccagagcaggccctgctgccagctggccacgcagaactgcagggccctgatgggggtcatgcctgggcacctgcagaggagcttctcccctcccctccacctgcccactgcctagccctgccctccacagcagaggctggttctggagtttgggggaggtcgcacccccaggaggcaggttcagaacgtccctctctttctcctaagaggaatgccacccagaagctgggctgggaccacagcacaacaggcctcagggcccgggactgcggcccacagccaggtggggcagaggcccagaggggactcaggacagcaggtgaggtcaaaggtgaacttcctttgtaagcccaacagggtgggcctggagagcagggctcaaggtatagggtgctcacctggctctcccgccctctgcaggtgtcaggcagagtggccttggaaggcagaggcagcaccctcccacctgtgccttcctctcttcttcccatcggccactccccagaggactggggacagctggctctggggtgctccacggaacccagactttttttttttgacacagggtcttgctggtgttgtccaggctggagtgcagtggcatgatcatggctcattgcagcttcaacctcctgagcttaagggctccttccacctcagcctctggagtagttgggaccacaggcgtgcgccaccgcgcctggctaatttttgtatttttagtagagacggggtttcaccatgttggccagcctggtctcgaaatcttgacctcatgatccacctacctcagcctcccaaagtgctgggcttacaggcatgagccaccgcgcccagcctctcatttcttataaagacagggtcttcctatgttgcccaggctggtctcaaactcctggccccaagtgatcctcctacctcagcctcgcaaagtgctgggattacaggtgtgagccaccatgccctgattctttttttttttttttttttttttttgtggcagggtctcattctgtcacccaggctggagtgcagtggtgcagtcatagctcactgcagccttgaactcctgagctcaagcaatcctcctaagtagctgggactacaggtgtgagccaccatgcccagctaattattttgatttttttgtagagacaggggcctccctatgttgcccagactggtctcaaactcctgggctcaagtgatcctcccgccaggccggaactcagactttggtctctgctcctcccatgtcacccatcttcccgaggaagtgacctaccattgggtgtgatgtgacagaaggaagaaaaatgtctcaccagagatccagccagccacaaattcctccaccggcattgtctgggcttgcgggaactggtggctccagcagaggagacagagttgaattcccccctctccctcccctggcccacgctgataacctcccactaatgtttaaccctggcgggaaggtgagaattggcctggtgcccagacctccggcaactggcagaggagagcgagccagttccggtgaccctggccacctggaggagtcgtgcagagtacagtctcacgggccaggcgtgccgggaccacagaggccctgatccccgagcccggccaatgatcctcgctctgaggatggcaactgggttcctgccccatggtcgggcccctccagggctgccttagtcagcaagaggcaagcccctgcctgcccagccagcccagctccactcccattcatctccaccaaggggcatggccgcccccatgccacagagagaggccgggtgcggaggtagcgtggccaccagggggtaggcccagcccgcatttgccgctgcgtggcagggtggggaggagccactcccaggagtgactcaccaggcctggctgttctcttcagggttgtttacgactcccccgactcccccgtgtgagtcagaaacacagccttcctcggcttcctccttcccaggggaaagataggggttttgattatttaaagtgcgtgttgatctgcaatggcaccattctgctcagtcaaaaccaaaaccctttcaaggatctgtgagccacagggtgccgcccattctcctctgacctcacgtcctgccacccacccccttgctttctctgctgcagccacccgagcctccagactcttcttcagtcagccttctgtctccaggcctgtggactggctcttccctcttcctgggcactcttgccctggcacccctccagctggggctcaaatgtcaccacctgggtgaggtctgccccgcctccccagccggaggcactgctggctcttcctctctttctccatcacagttatcacgccaacatacgatgggaagaacttgtctgtctggacagggatctctgggtgttctgtgcacagcgggtggcacagggtgggctctcaataaatcctgagtgactgaatgaacggaaatgtcagccagcagcatcagcggcagcctggggctccagttccctcttcccatcaccaaacggccctgggaaacatcaaggcccagtgacacctgcaccctcccctccagatctccccgcagctcctagtctcccatgggggacgcccaaggcccagtccttctctcccttctcctctcactgtggccaaggcagaacccacccacccctgctgctttctcccgggtggacagattcgggaaacaggacctcctacctcctgcctctggagctgcctggggctccttgggccacccccaaagatcatcctaaaagaccatccccaaagactggcctctcgtggtggcttgggctgcagtcctggttctgcttcttattcctgaaactgcctttgcaaaaactataactgatacaggccaggcgcagtggctcacgcctgtaatcccagcactttgggaggccgaggcggaaggaccacctgaggtcaggagttcgagaccagcctgaccaacatagtgaaaccccatctctaccaaaaatacaaaaattagccgggtgtgatgacgggcgcctgtagtcccagctacttgggatgctgaggcaggagaatcgcttgaacccgagaggcagctgttgcagtgagccaagatcatgccactatactcc

SEQ ID NO: 56318 - DNA, 1859 bp, Homo sapiens
gtgtaagatagtaagggctcatgtcactgctccctggaaaaacagagtgtctgtcctggttttctgatttagacatatatatataaattttttttttttttcagacggagtctcgccgtcgcccaggctagagtgcagtggtgtgatctcggctcactgcaggctccgccccctggggttcacaccattctcctgcctcagccttcccgcgtagctgggactacaggcgcccgccacctcgcccggctaattttttgtatttttagtagagacggggtttcatcgtgttagccaggatggtctggatctcctgacctcgtgatccgcccgcctcggcctcccaaagtgctgggattacaggcgtgagccaccgcgcccggccgacatagacatatattaataatcatttagagagtagggatagtccttgggggtcattcagttcaaccacctcattttacagatgaggaaaactgaggcccagaggagaagggacttgtccaggatgagtctgggccaggactcattctcctgaccactgccgagagcgccacggtacaggccgctgccagcgccgcatggatccctggcacgtgccaggaagtgtccatttcacaggcagggaactagcccgaagacccagcgtgggcaggccaacgcccctagcctgattctcgaatcttcgccaaaccctcttacaggccaacagtcggggcctttgtgaagggaaactcgctctgggtcactctggtggtggcggggctggtacgtgacgcggccaccccacgggcgtgatgagacacgcgaggctggcgtccgggcatgcgcgggccgcgcggggcggccctgggctcccattggctcccccgggtcgaagggggcggggcctcgggcgccgcgcttcctcccgccgtggcttccgcgtcgcttcccggtcagctgcgtccttagcgggagcccgagtgcgggcggtggcgggcttggcggcggggcaggattccaggcaggagccttgcctctcaggtggcgggctctgcgaccctgcgaggtgagagcacagcgacgtctggcccgggcctccgtccccggctgggcgtgcgccttgccctgcctgggcatccaggtcgacccccggttcttgaccgtagcaacccgcacccctcccaccagcgcccggtctgcactcttggcccctccaggcagcgccgctcaaccttgcggacccagcctgggatcccttaccgtactcaccgagagcttgaggagacctccagccccccatccctggctcccggtaactgctgtttctctttgcctttgcagatggacgggacagaaggcagtgccgggcagcccggccccgctgagcgatcccaccgaagcagcgtgtcctccgtgggagcccgaggtgggtcccacccgcatctcctcttccacaccctcctgggaccccagccctggagaagtagctctggcttgtcttctttttcattaaagataatttatgtatcgactaagaaataataaggtacattcagatgtggaaaactcacagaagtcagaggctctgtcactagtttactggccaggttgggtcctcgctctcatttgtaaaatgagcttgtttaacatagctgtgaaattcaaatgagattatatgaatgaaaagtgaaggctgatgtggttcatgcttgtaatcccagaactttgggaggccaaggtgggcagaccacatgtgcccaggagttcgagaccagcctgggcaacatagacaaaaaagaaagtgacacgttcactttctttgtgtcatttctttttttctttctttcctttctttctttctttgacagagtctccct

SEQ ID NO: 56319 - DNA, 17292 bp, Homo sapiens
ttttagagctacctggcatttttctccctgtccaaatccaccccacatttcaaagaaagtaggcagactacccaacttcacccagaatgggggtgcagggctgggcctgggtctgaggacttcagttttaagcagcaagtccagtgccgtgtggtggcccggctcctctcgcccccactgggcggacagcgtgggtggggcggagcctactcccatctgcaggttgctggttcggctgcggccagcagggggcagctgagctcaccctttcctcctgccgggctgcagggacagtgacagtgagcagcactgcccgcccaggcaacctggaaccagggtcgtgccccacgacagaatctcgggggccttgggtctggcgctgcgggctcacccgctctcagagtgggagtcctggctcctgactgccctgaccttcttcctgccactgggcccatgatgggggtccccaactttcaagaacacagggtaaggggtttgtttccctggtggtgggcgggggcattcctcagcttcgtgatgggtcctgagttttccaaaggtcaggatccatgtcctggaaacggattctgctgtagatgtgtgcttttctgtgaaatgacagcttagtaaaaatacttaaactggggctatttggagacatctaagaggtggagtgagcacaacctggcactagtcgcctccctcctgaggcagttgactgtccggcctctgcccctgggcccttcctccttcccagctgccctgagccctcttccagcacctcctgtccccacctcacacactaagtcttcctgctatttttaactatttgacataatttgcaaaagagagaataatagtcccagctcttcccaaggacttctttgtccggtgcccatctgaccttggcactttgttgtgggggtggcagtgaccctgacaagttctcccagccagcgagagcacaggcctcccatacagtatcgtcaaggtcagcagcctcccgggcaggggggttctactccccgcagaagccctggcaccatggccaacttgctcacagagggcactcagtcagaccaaggtgggttggggcagaaaaggctccttcagagattcaaggacagtcacaactggtgctgtgatggggccaccgggacaagcacagtgcaggccattcccatcagcagggacccaagaggaagtggtaggctctggcagtgggggcggctggcggtcctgaagacagagggctttgcaaacctaggggtggaggtagtgggatgtcagcacctgggctccctgctcagaggagctggcgccaggattcccagtgggtgggcttggggaggaggctggaaaggttagcacaggcgaaagtgtggggcctaggaaagctgggctcgcttatttggccaaggagggtggggagggttggaggaggtctaggggccgctggaggtgcagggcagcccggggaggcagggctatggggcccagccacgcattccacaggccttctctctgcgggaacaggagtgaggacacaggcgctcagcgtggcagggtgggaacaggaaggtctcgtgagctctgtgacaggatggggctacaggagacagaggtagcagtgagctggtgaagaggcaggaggaggcaaggaggacagggtgttctagggtgccagctcaggcaaggctccaaggagtgggtgagtgctcaggaggacgggggaccaaggcctggggtaaggggcaggtgcccaggcactctagcatggcacggaacaggggacagtcccaggacatccggatgcagggggctgacaccgcaaagttctttcctgtaaagcacagcccgaggcctggggcttggccctgggcagaggaagccccccttagatctgccttggcagtagtgaggaaagggcgtgcacagaccccacgcagcccgaggtgacgggtcaaatgcaagagtgagaagccccctcctgagggtcctcccctgcctcgccttcctggtgggcggcctgctttccagcacatgtggtggaccagcccacattaggtcaaagtgttaaaaatagccggagggctcagtatgtttgggggtggggggggaatgggaggtgctgagggagggcccaggacagttgggaaggaggaagggcccgtggggctggggttgggacagtcggctcctgtaggtgcagcagccctggggcatgctcacctcacctcacctcagctttgtaaaccagggccatgggagaccccctccctctgatgccctctccctcaaatgcctttgccaacgtgtggctgagagtgcaccccagttccccttggccaccccaggcagtcccagtccactgagagcagccgctgtccttcttccctctcctgcctcctgacctgggaccccacagagctgggcctgtcatcacatttatggggctgcagctgacctgggaactcccttcctcagtcagtccacaaatatttacccagagcctcagggtgctcagtgacctttacaaaacaaagtgcagagtcacgtgccagggcacagcaatcccgggcaaaacagaccgaaacccctccctcgaggagatcaagttggggcggcgctttagagttgtggtcaggaggctggctgagtggtgaccttagggcagaggcctgaaggagcagtggaagtggactaggcagcaactaggtgaagagtgttccaggaaacactacactgtcagaatcaagagatgttagggccgagaggagcctcaaaatgggggaagcaaggctgggaggggtggcctaccctggtcacatgagaggtgggggcagagcaggccggagcctcacaggaagaggccggttagagttgggggtggggcccagcttgtgtttcctgcactggctgcgaggcgtgaaaggcgggctcccggccagcacacagtgacagtgcagtttccagacccaggccctgagctgaggggcctcagggctcagaaagggcctaggcctcagatctctggtgagcggggagcccaaaatggccctggaggccacagctccagaactagacccgtggagaatggagggctggggccctgcacattctcaagcagtagtagcaacactgtcattgtcctgcccttggtataagcctgaagaaccaccctttcttacccggcttctgctccccttttccaggggctcctgtgggaaatcccgggtacttcctgggactggtctgtctatatgtttggaaaccacagagctgacctggcttcagaacaagatgtggggctccaggcacccgggagaccagtgaccctgattggcaatagccgcaagaaagggcttggagacaggggccaggcgcggtggctacccctgtaatcgcagcactttgggaggtcaaggcaggtggatcacttgaggtcaggagttggagaccagcctggccaatgtggtaaaaccctgtctctactaaaaatacaaaaaaaaaaaaaaaaaattagccaatgtggtggtgtaagcctatagtcccagctactcgggaggctgaggcaggaaaatcacttgaacccaggagggagggtgcagtgagcagagatcacaccactgcactccagcctgggcaacagagtgagactccatcaaaaaaaaaaagaaaagaaagaaagggcttggagacagggccctaaccctggaatccagatgttgccaaagcagccccctcctgttcctctgtctgcctgggaagaagcaggagttggccacccacacaggcagggcgggcccttcaccacccagctccaccccggaatccaagggcctctgtttgctgctgttttctggaacaacttgttttgatctagagaaatctgctgacaccggccttcctgctctcaccctccagctgggcagaggtatttttagacttatttgtagaggaagagagcagaacccaggcccaatgtgtaccctccttactgtgggcacagctttggccccttaaggcaggacagagatatccatgtggttgtctaccctcagctcatctctccttaaatacattcctttcccgagaaaaacgagctgtgtggaacttggaggccagcaaagcttctacataaggaccctctgaaacagtgcccttttgtccttgaaaacccagggtggcaaaggcagctccagatacaagggcacaaaggagacttggttccctttgtgacagggaagcctatgctttacagaatcctatgttttgtatgtcagtaattgtccctacttaaaaaaaaatctatatatatatatgtattagaaagggtctcactcttgttggccagcctggagtgcagtggcacaatcatagctcactgcagcctcaaaatcctaggctcaagggatcctgctgcctcagtctccccagtagctgagactacaggcagtcatgtgcacctggcttttttttttttttttctttcattttttgtagagacagggtcttgctgtgtttcccaggctggtctcgaactcctggcctctaggcaatcctcccaccatggccttcaaaagcgaatggatcccactcttttttgaaaaataaaatctaccatagtttgtttctgggatttgggaatgatgtgtgtgaattagagagatttcgagacctgaaatagagaaaagcaagttaagacatcaactggggcccagaaacagcactacagcggggacgacccacctctcagatgcctggtgagataaagaaaggtctggctgactccactgcccagtactgtgaagcagcagtgaagactcctccattggtttcataagctgcccagctttctagaacattttgacagacaattccctctttccacacggttctttcaggccaaatcaccccaccccaacccacccctggagatacagtcaggaagagactgatggggcagatcctggaggaggccgcactgccggaatcttcccctggcagagaaacagggctaagcaggcgccagggagcaagcctgggcttgccacatcaccaccttctgtgctgaaggtcagatgacacacagtcaccagttttccgagaagcacagggaggggtgcatgtcaggcccagccctgcctgctgataccacctcacagacgcaggcgaaatgtcttcaccagcttcttctcggttgccaagggggcctgctttcaaggggttgttttgtatggggtgtgggtgttaaccagggagaggttcctggcaggagttcctgtcagatgccattttccattctggttacttgaaccggggtcctttttcatcctctacctcaggggccagagcttcctcatcaccctgcaccccctagcaagggaggtgcccgctacacggtccaaagtcctctccagacattcgggccctgcccgccttgctggagggctcaggagttcaccaggtttgcttccagaagagccaggctggggatgcctgcttgcaaatgcagcaaataaaaaataaataaataaataaaaatcacctttctccccacccccacccaaatgtaaaatgagccgacagcctgtccctcggctatgtcagatactgctttccgcacaatatcttggttttacattattttgcaacggcctcttcccacttaatccatcctgaacacacttcttgaatgttctaccccggcagggatgcgcattctcaggaaacacgtcccctcgccaggcccctgggaagagtcaaaaccacgatgcctgcccctgaagcgcccgcgcggctccacggggctccatgttgtcacccactagctcctggacgctatcagcccgcagcagggtttcctggccagagaaaccgcctgttggggtgcggagcgttccacgtcccctcgcagcaccccgctggccttctgggccgccccgcccccaacccgcgcccgggcgctgacgtcatcggccgagcccgactcggaaccaccgcccgaaagtcacgcgcgcctcccggcgggacgtgccctctgcagagatccctccgccgccgcctggaattttccagatgtcctgccggcccttctttcgggcctcggctgggcgtggtgacctcaagcgaccccggcggctcccgtcgcccactcaagagggcgcccccgcccgccacgcccccagcccctctcggggaagcgcgtcccccgcccgacctcaacaacatccgggaagaaaaggggtcttcttcctcatggcattcgcctcccaaatgtcaccttgagcgctgtccgcgatcccaaaaagcactgttaaagagaagcggggatacactggggtccttgcgtgggggccgcctgggagaccatgcaccgcccgggagtctctccgggcagggtcggggagggacttttttgccggtggccgtggaggaatcgtcccgttgagcaatgaccccggtgacgcggctgagggctataaaagcaaaagttgtggcaagtccagccggagttagcgacagggagggatgcgcgcctgggtgtagttgtgggggaggaagtggctagctcagggcttcaggggacagacagggagagatgactgagttagatgagacgagggggcgggctgggggtgcgagaaggaagcttggcaaggagactaggtctagggggaccacagtggggcaggctgcatggaaaatatccgcagggtcccccaggcagaacagccacgctccaggccaggctgtccctactgcctggtggagggggaacttgacctctgggagggcgccgctcttgcatagctgagcgagcccgggtgcgctggtctgtgtggaaggaggaaggcagggagaggtagaaggggtggaggagtcaggaggaataggccgcagcagccctggaaatgatcaggaaggcaggcagtgggtgcagggctgcaggagggccgggagggctaatcttcaacttgtccatgccagcagcccctttttttccagaccaagggctgtgaacccgcctggggatgaggcctggtcttgtggaactgaacttagctcgacggggctgaccgctctggcccagggtggtatgtaattttcgctcggcctgggacggggcccaggccgggcccagcctggtggagcgtccaggtctgggtgcgaagccaggcccctgggcggaggtgaggggtggtctgaggagtgatgtggagttaaggcgccatcctcaccggtgactggtgcggcacctagcatgtttgacaggcggggactgcgaggcacgctgctcgggtgttggggacaacattgaccaacgctttattttccaggtggcagtgctccttttggacttttctctaggtttggcgctaaactcttcttgtgagctcactccaccccttcttcctccctttaacttatccattcacttaaaacattacctggtcatctggtaagcccgggacagtaagccgagtggctgttggagtcggtattgttggtaatggtggaggaagagaggccttcccgctgaggctggggtggggcggatcggtgttgcttgcctgcagagagggtggggagtgaatgtgcacccttgggtgggcctgcagccatccagctgaaagttacaaaaatgcttcatggaccgtggtttgttactatagtgttcctcatggcgagcagatggaaccgggagacatggagtccctggccagtgtgagtcctagcattgcaggaggggagaccctggaggagagagcccgcctcaattgatgcctgcagattgaatttccagaggcttaggaggaggaagttctccaatgttctgtttccaggccttgctcaggaagccctgtattcaggaggctaccatttaaagtttgcagatgagcttatggggggcaatcttaaaaagtccacagcagatgcatccggctcgaggggccatcagctttgaataaatgcttgttccagagcccatgaatgccagcaggcacccctcctttcctggggtaaaggttttcagatgctgcatcttctaaattgagcctccggtcatactagttttgtgcttggaaccttgcttcaagaagatccctaagctgtagaacattttaacgttgatgccacaacgcagattgatgccttgtagatggagcttgcagatggagccccgtgacctctcacctacccacctgtttgcctgccttcttgtgcgtttctcggagaagttcttagcctgatgaaataacttggggcgttgaagagctgtttaattttaaatgccttagactggggatatattagaggaagcagattgtcaaattaagggtgtcattgtgttgtgctaaacgctgggagggtacaagttggtcattcctaaatctgtgtgtgagaaatggcaggtctagtttgggcattgtgattgcattgcagattactaggagaagggaatggtgggtacaccggtagtgctcttttgttcttgcttcgtttttttaaacttgaactttacttcgttagatttcataatactttcttggcattctagtaagaggaccctgaggtgggagttgtgggggacggggagaaggggacagcttggcaccggtcccgtgggcgttgcagtgtgggggatgggggtatgcagcttggcactggtactgggagggatgagggtgaagaaggggagagggttggttagagatacagtgtgggtggtgggggtggtaggaaatgcaggttgaagggaattctctggggctttggggaatttagtgcgtgggtgagccaagaaaatactaattaataatagtaagttgttagtgttggttaagttgttgcttggaagtgagaagttgcttagaaactttccaaagtgcttagaactttaagtgcaaacagacaaactaacaaacaaaaattgttttgctttgctacaaggtggggaagactgaagaagtgttaactgaaaacaggtgacacagagtcaccagttttccgagaaccaaagggaggggtgtgtgatgccatctcacaggcaggggaaatgtctttaccagcttcctcctggtggccaagacagcctgtttcagagggttgttttgtttggggtgtgggtgttatcaagtgaattagtcacttgaaagatgggcgtcagacttgcatacgcagcagatcagcatccttcgctgccccttagcaacttaggtggttgatttgaaactgtgaaggtgtgattttttcaggagctggaagtcttagaaaagccttgtaaatgcctatattgtgggcttttaacgtatttaagggaccacttaagacgagattagatgggctcttctggatttgttcctcatttgtcacaggtgtcttgtgattgaaaatcatgagcgaagtgaaattgcattgaatttcaagggaatttagtatgtaaatcgtgccttagaaacacatctgttgtcttttctgtgtttggtcgatattaataatggcaaaatttttgcctatctagtatcttcaaattgtagtctttgtaacaaccaaataaccttttgtggtcactgtaaaattaatatttggtagacagaatccatgtacctttgctaaggttagaatgaataatttattgtatttttaatttgaatgtttgtgctttttaaatgagccaagactagaggggaaactatcacctaaaatcagtttggaaaacaagacctaaaaagggaaggggatggggattgtggggagagagtgggcgaggtgcctttactacatgtgtgatctgaaaaccctgcttggttctgagctgcgtctattgaattggtaaagtaataccaatggctttttatcatttccttcttccctttaagtttcacttgaaattttaaaaatcatggttatttttatcgttgggatctttctgtcttctgggttccattttttaaatgtttaaaaatatgttgacatggtagttcagttcttaaccaatgacttggggatgatgcaaacaattactgtcgttgggatttagagtgtattagtcacgcatgtatggggaagtagtctcgggtatgctgttgtgaaattgaaactgtaaaagtagatggttgaaagtactggtatgttgctctgtatggtaagaactaattctgttacgtcatgtacataattactaatcacttttcttcccctttacagcacaaataaagtttgagttctaaactcattagaattgttgtattgctatgttacatttctcgacccctatcacattgccttcataacgactttggatgtatcttcatattgtagatttaggtctagatttgctagctccaagtaattaaggccatgtaggagagcatggtaaccacagatagaactggtattatcccaagtggtctgcagactgctgagtggggatgggatctgctctctgttgagagttggtaatcattggtttgaaatgtgatgaaaccactcaagccaatgaaggtgggtgtgtaggtggggagtactttgccataatattttaaaacattacctggttagagttctaagtggtacttatttttgtttggttaggggaaagcctgaataaaaacagaaatggacacataatatgcatattccatagtctttgggaggctggaatgtgcctgggatttgggtctaagtgtatgcgtaattcttacctcactaaagaatttgccttgtttttttccttttggtgagtgactaaaacgtctgggcttccctgtgtgcgtgctacagtaagcaagcagaggctgtgcaaaggtgtgagcaggatcacgtggaatctggaggatacatcttggcttgcaaactgcctctgtctcctgggtgggactgttctgtccttgcactgctgttctgtgttacctcttggggtgtaaggttttgcttacaggagacaaactttgggcgtagaatggaagccactgccagcctctgtgctgagaaggaaggtgcttgtttcaaagggagcagcaagggaggcttgttctactcacctgggcctgtttgcctgagaaggggagataagggctgaactgggactagccagggggaccaacacaaatggtgggggatcatgacctgaaggattctttccttcccatgagctgcagggctggttgccgtccttgcaactgtgtcttatttgcctgtgccgttatatcttggtgacccctccacgtgtacactactgacaaacgggtggagtgctggggagaagtcactgtgccgcccacctagtaaaccttctgtctgtgctcatggcatctccaagatggggcactgctgtgtgcagaatccagggtcctctttctgcttgcaactcctttccctggatgccccagaaacaatccaggcctcctttcctatcttacccctttgctttgctttttaccccagcacctctataaccgccttctcttcttttcagaactccttgtttctcgtcctgttttttatgattacaaaactcttgcttccaccctggaagataactgctatagatgcctgtatgtaaatggtgctgtctccagcaactggcatgctgaagaagaattgattcacggggtataaatgttggggattggaagtggggatgaaatggcacttgttgatacaggagcagagaggtgaggccgactgctgaagacagctcgccaccctccttgcctccactccaatccaggggctggggccacattctttgccttcatttatcctcagatcaggtgagatcgacaggaggtgttgatggcagtgccagcaattattgctaatccgtttgcatccttatgcatagatctgaattcagactttgtgaatttccagaggtgtgggtaatataatagaattcagtgagtgggcatggctgatcttgtgcaaattaaaagttatggggcataagaatagcaaaagttgaacttcttttaaaaaggaaagtaccctgagagccagtattggttgaggctcttcagtatgcccaggttggcagcactgagaaccgcaggaacggcctgttgttacaaaaaggagattgactcagctgcccttggtgcatctgactgactatgactgctgagagattccaaggacccttaatgccagggctaacctctccatgtgcagtgagacctctggaggaagtgtcatcctctggctttgtgtggtactcattatggtgcagtgcgggcatgaaatgaagacacccaaataggcttacagatacgatatgttttaaatgttcgtatttaacaaaaacatactgacactgtttggaaatggcaacaggaagatagcaaaatgaatactaacattacgaaaagatgaacaggtacatgttccaaggcaggtggctgtgaacttcctctgagtgaaggcatcccctccagcacctttcagcctgctagttaggacgacccgccgccaccctccaggacctccagccctgcactgcctttcctctcttttaaataattcttcattgagttctaatatgtaaaaaaaaaaagtttactgtaaagtttgcaaataaggaaattttttttaaaagtcctcagtaatcttaccagtaacaattgttatgggcacatttgcttttggaagatttcttttgtatgcatgggataagtacatttttaaacaaaaatgggattatgccataaattctattttgtgactttaatatatagtgaacaccttttttaatgatgacaggatgttcccttgcatggctgtatcaatttaaacaatcttgtttcaatgggcatacagggtattttctagtttttttttcctcttagaaaataatacttgcgatgactttccttgtagctcagactttttcacgtctgttgttatctctttgggaatgctgaatacatacatttcgagaaggaaatgactgttaaactcttaagacttcaggttcatattgctaaactgcccagcagggagggattttttcaattagtgttctcactggtgaggcaaacctgatgccttcccctcttcctcagaaccggctttatcacattgaaaacctttgctcctccgacggatcgagtctgctttccctctggatgtgagcattgctttgtctgctggtgactgaacatctctaccttgtgtcaattggccatttgtggtgtgtgtgtgtgtgcgtgtgtgtgtgtgtgtgtgtgtatgattttctaattcctagtcatttttctattgattgttttgcaaaagccatttacatcttaaggatattgataatcttttgttatatttgatgcaaatatttttttccagtttataggttgccttttaattttgtgtttcaggtagataaaagttaaacgattttcttaggttagtttatcactgtggtttctgaacttgttatgtgtagatcttttccaccccaagagtacataaatattaatccatactttcttatggaacttgtatggtttcgttttttacatttaaaccttcttccccgtggtgtgtgttgtggaatctgtgtttgtgtgaggaggggcatggtgctctcagaacccacctcctgtggccagagagccctgtcctgtgagggtggttgtcacagtggcagggttcaattcagaagaccttgagggcaggctgatgtttcctgaatgggcccctggttgttgcttgtccctgactctccatttccccatctgagtggatttggacctaatagggcactggagctggttcgaatcctgactggactacttggcaactttatgtctgggagcaagttacttaacctccccaagcctgtgtctgtgaaatgcgggtaaatgaatgtagatgtttggcagcagctactccttgttgagctctcacagtgaactctcctgcctctgccctccttccccgcctcccctggtgcctagcgtcaggtctagccacttcctcctgggcccctctcccttttctgtggctggctgcctgcccgcctggcgctggacctttcatgtaacgggaatcagcatgtatattctggtctggtctgtttctacacttaattttgtttccagtagtatttccctgtaccggcagagttcacaaacacatttgaagaggctttttctcaggattcttaaccttcccaaaggaagtcccatggatgggtttctagaagtctataaatgctctgaaattgtatttttctgtggaaagcataactttcatctgcttgttcgtgctcaaaaaagatcatgaatgaatgattgcatgattttatgccattgtgcttatactaaaggatatgtagcccatctcttgagctgttaaactgttttgactactttaaatcgtgcagctgtgagcatctctgtaaatttagtgtacacatgtatcccctggagtggcattgcctcggcagtgagcacttatggttttataactctcttcacagactcaaatgactccagaaagctacacttcctgttgtgagtatatgatatccatttccctacatagccactaacatcaggtttttacaattttatttatttcttgctactttaagaaatttttgtggtgaaatacatataatagaagttgactatctgaatcatttttaagtatacattcagtagtgttaagtatgtcgccattgttgtacaaccaatctccagaactttttcatcttgcaaaacaaactctgtacccattaaataacattaaacattccattccctccagcctcagcaaccccattctactttctgtttctgtgagtttgactattccaagcacttcatatcagttaaatcatgaagtatttgtctgtctgtgactggcttatttctctgagcacagtgtcctcgagatgcgtctatgttgtagcatatgtcagaatttccttcctttttaaaagatccaaataatattcttattttatatcttttttttatccattcatccattagtggacacttgggttgcttttggctattgtaaataatggtgctatgtacaaatatctatattattgtatttacaagtataatgctgtaatgtacacacatctttttgagatcctaccttcagttcttttgagtatatagccagaagtggtattactaaatcttacgatatttctatttttaatttattgaggaaccactgtagtttttcatagcaactgcaccattttacgttctcaccaagagtgcacaagggttccgaggttcccacatcctccccaacacttgttattttctgctttttttagattgcagccatcatagtgggtgtgaggtgacatttcattgtggttttgatttgcatttccctaatgaggagtgatgctgagcatcttttcatatgcttactggtcatttgtatgttgtctttggaaaaatgtctattcaagtcctttgactattttaaaaattgggttattagagttatcgttgttgttgacttgtaggagtttctttctatattctggatattaatcccctatcagatatatgatttgcaaatatcttctcttattccataaggttactttttcactttgttgattgtgttctttgatgtatagaagtttttagttttgaaatagtctaatttatctgtttttacttttgtggtctgtgcttttggtgtcatatccaagaaatccttgccaaatccaacgttataaggtacttttaaggtattttagttgtcttagtctatatttctgtactcacctttctttatccactcatcagttgatgggcatgtaggttggttccatatctttgcaattctgaattgtgctatgatcaggtgtctttttagtataatgatttactctcctttgggtagatacccagtagtgggattgctggatcgaatggtttttataattttctattttaccacagtttctctctgcatttttcctctttgaccactaaccatgtgaaattctcatattgacctttataatgatcatgaactcttagtatcattgggaaggccacatttgccacttatgattgtaaaccttatcctccatttttcctgttattgttggtgcaaaaagcacctattataccaggactttaaaaatcagtctgataagtctttgataagtctaataataataactgataagtccattgaatttgcttctgattactttttctttagtagctaaacatgtatgtactcctatgattacaatgaacactcctctccatttaaattaattatttacattgatgaaatagcaaaatgttaatgactaaatactgtcttggttttttcgttccaggtcagtcaatattaacttcttataattttcttttttttctttatgtgtgtgtgtgtgtgtatttttttttttttaatttcaatggcttttggggtacaaatggcttttggtcatatagatgaattctacagtagtgaagtctgagattttactgcaccggtcacctgagtagtgtacattgtacccaatatgtggttttttataccttgcccccctcttaccctccccactttgagtctctagtgtccattatgtcactctgtatacctttttgtacccataagttagctctcacttataagtgagaacacacagtatttggttttccattcctgagttgcttcacttagaataatatcctccagctccatccaaaattgctgcaaaaaaaaaaaaaaccacaaacattattttgttcttttttattgctaagtcatattccatggtgtagagataccacattttatttatccactcactggttgatgggttggttccacatctttgcaattgtgacttgtactgccatcaagtgtctttctggtataatgacttcttttcctttgggtagatacccaggagtgggattgctagatcaaatggttcttaacattttctctctggatctatttctggaaattttaggctccagtttttgttgttgttgttaataaaatgcaatggaatgtaatgatcatcacttttcattatgctttaaaatctggtaaatggaggctagaacactcctgtaaggcaagaatattctctctgttggaactcaaatacacagaactgggtaaatctcaatcttaatctttgattcaggacacaacatggctctcttttacttgctttctttaattgttttttaataatgtggtaagcatttctgaatctcctatccaatacaaaaactaggacaatacagacagtaactcctatggttacaa

SEQ ID NO: 56320 - DNA, 5467 bp, Homo sapiens
aattttaatgactaaatactgtctttgattttttgttccaggtctgtcaatattaacttcttataattttctttttttttctttatgtgtgtgtgtgtgtgtgtatatatatatatttaatttcaatggcttttggggtacaaatggcttttggtcatatatatgagttctacagtagtgaagtctgagattttactacaccttccacttatgtggtcccacaccacccgcctcccctgccgcctcctgccaccccctaggccaaggtaataatcatcctgaatcctgggtttatctctcacttgctttcttttcatataattttgcaaaagaatctgatctaaatgtgtttttcagagtatatatttatattttagctgttcttagagaaaatttattattttgcatgtaatcttatggaacattctcatttaataccatggtaagattcagcccttgcccaggggatagttcatttagtttgtttactggatagagctcatcatgtgactatacctcagttagtttatcagttctcccatccatggtgactaggttgcctctcagcctctcaacaacactgtttctcagtgtccttgtagaagtgatatgtgggtgttttctccttacacagagttgaaaggtgacgacaacaacgttggcactaccaatcccccaccctccagaggggtaaccagtgttaccagtttgctgtgtttcctgctacacctcgccttattcacttccatttgtatctgaaaaacgtgttgcatggtttcttttctatagaagtggtaaaatgctattgtgtcctgtacattattgattactttttttcatttaacagtagggagatgcctgggagtacacagagaactgccctcattgttttcaacttctgcactgtatgtctgtgagtttagccattctgctgttaatggaaatttacagtattctaatcttttgatattacaaacagttctgtgcgatcatcgtcatacacaaccccttgtgcacaatgcatgagtgtttctcagggtaggtaccaagaagtgaaattcctgggtcatagggcgtgagtccgacatttttctccattctgccctgttgccctccagagtgggtgtccagctttgcatacctaagtatgagagtatctgttgttcatatcctctacgacgctccatatatgaaacttaagtttctgctagttgccatctttgatctatcatgtatgcagtgacctactaagactgtaattggtacagtagattcttgtcatctgtgtgtgaatttagcattcatgggcttaatgctgacaaggcccccagggtccaagacatataatcatgtataattttgtcaaggtataattttttaaattgcttttgtcatgtgtctgctggtgatgcccaacccagtgctctgcacccaggtcacactgtggctttgtcctctgcttatgcctgcattgcagcaactgtcctgaagagaccaaaattatgcagatttaggtaagtccatggctaatgttattatattatgtgctattgtaatggatggggctgtggagtgtatgaatttataaatcactggtcttgtaattaaaattcaaacactatagaaaaaggccatgtagaagataaaagttcctctataatcccggacccctaagataactactaatgacaacttcatttatattccttcagacattttctggctgtggatgtactaaaatgtatcctattattctctgccctaaaatggaatcatacaaggtgtactgttatttttatggctctataacatgtcatattgtacgtgttggtatggtcattttaaccatttttctagtgatggctttgaggttatttgcagtttcctagccatctcaaagtgtgctgcggggatctcttttgcatccctctgggtgcagagctgaggcacccagaggcagtgtccagaggaggcagcatctgtaggtgtcttcacctgctctggctcttggcacatctggttggtgacactgttttgtgagatgggttgaaagcacgtgctgccaaaatagaataatgttggtcctctcctcatgtgccgtggaactggggtaaaactgcgtagtggctgcagctgcctgtccataccggaatcgagtataacacggtgcctggcttagcacaaaacagtagtgggtcctgcaggccccagagtctaattcctggtattctttcccctacacagattaaataaaccaaaaacaaactattctaggaaagcgtctgtgacatttgtaaaaagtggtatttaatgatcttttattcacttgtctgtttagtttgttgaaatcttaagtggcatcctggtctgggaaggagtgctgtctgcgcctgccctccgctgggcacagcgtggctgcttcaggggctaagcacacactttctgtcttctaaagggccgccacatgccaggagctcaggtgtgagcccggctctggctcttacctcatagggtcactcataggggcacagggagcagaacattgtacacagcgaggcaccacccggcttggcatctgcctcggtggacttactacctctagaaggaaatacctgagttcctctggcctcagctcctagagtgactggtgtgctgtccctgttactcttctgtcaaggtgacaactgtgtgacccatcatctgtgtgtcaaagcaaggccctgcctgggcctctgctcctgtgctgaccccaaaggcaaatgctttgctagtttccttccagttaatttcacctatgaatagatgtgtgaaaactgttcaaagccatacctgcacatgtttgaacttcaaaccctgtgggtgattcagtggcatctttctctaacccccagcctcccttcccacagaggccaccgtcatggccagttgctgcagtttctttccagagaacctgtgtatgtgtaaagctgtacaggcgtgggtacaccacacagcctgtcttgcactgtggactgttgagttactagtacatctaggtaagcaccgcatatctgtattcatgtctgccttggtcttttcaacatctgtgtggtagccgtgtttgaattacccattccctttttggggaaccattaagttgtttcagcaatttttactgtagataaggctataccgcatatctgtgtacatgggtttttatgtacatgggcaagtatatctgtgagagaaaagtttcctcaggaggaattctgggcacagcatgtgtaaatttctaaatatgatggacacccccagcttccacctcaaggaggttggtcccattgacatttccccacaccttcacccaggctgtgcccttaaacttggttatttgtcaatgtgagaagtggaaaatagtatttaattgtagtttggatttgtatttctattgggttgtatacttactgattaataataagagctctttacatattaaggaaattaacccttttcaaatacattcctatttctcactaatctttaagttttattgtaatattttgctctttagtttatatatatatgtatatatatatatatgtatatatatatatatacatatatatatacatatatatatactaattttcttttatggttcctggattttgtgagtagtttgaaaaggctaatccagctgaagattttgttgttgttgttaaaccccatgttttctcctaactctttttatttttattttggaggactctatctagacttaattttagcataacaagtgacagggttagttagcctgttgtccttacaccattttctggctaatacagctattaactattgatctgtctattcacgtgccagttcctaatggttttacatagtgtaatctgcacttcaaaatagcgaagggaagccctacctcattattctacttttccagaattctcctggctattccaggctgcatgtttaccttaaccttccctgtgatgtcttcatgccgttgtcttcttatgcaagaataaggtacgtctttccatccactcacgtctatttaatttgactttgcattacacagaaagctggtcttggtctgtctacctcggcatctagttgtcctcactgccccctagccgaccccaccccatctgactgactaccccatcacagagtacttttatttacgttttgctctgcctaatggttacttgatactgtcacgccgacagtgtccagttcagtggtctttgcagttgaaatgctcccgtacacactgtcttgttaaaaatgccagtaagttcatacaaacccagcttgcacccaaggtcacattcagagagcgtagggctgggatgggttgttttccaagcttctgccactgtgtggctagctcttcccactgggaagttctgtgtacccggaatgtcggagtggagtcctgttctagtgtccagcacctgaccctgtgcccaacccctcaacagcctattcctgctgtccacagcctgctggaactttttacaaaatatgttgccatgctggaccctgggcactggacataagccccctggcagcctttttcatgtcacccaaaggggtaattgtcctactggtggtctgtaagatgagttagggtgacttgctaatagacattgtaaatcttaatatttatgtatgtattttattattaccggttttccatttatgatggtaatattgtttcttctaagaatatttatttttccttctaaatattgagataaaattcatgcttttgaaatgttctattcagtggcttttagtatatttgctatgttgtgcaaccatcgacactatccatttctagaactttttcgtcatcccaaacagacgctctgtattcataaaaaaataacttcctacctgtctctccccctagtctttggtaacctttgttatactggtaaactttgttgtgctctctgtctgtgtgaatttgcctattctaggggcctcatataagtgtaatcatacagtatttgtctttttgggtctgtctgatttcacttagcgggttttcagggttcattcatgttgcagcatataacagtactgcgttcctttttctggctgaataatattccactgtatggatagaccccattttgtttattcacacatcatttggacatttggattatttctggtttttggctattatgaacaatggtgctatgaacagttgcgtacaagtttttgtgtgaacatatgttttcaattctctcattatatacctaggagtagaattactgggtcatatggtaactgtatatttttgaggaactgccaaactattttcccacgtccatgcaccatttcacattcccaccagtaagtaagagggttccaatttctgcgcattcttgccaacactagttattatctgactttctggttataatcattctaatgagtgtgaagtagcctc

SEQ ID NO: 56321 - DNA, 1453 bp, Homo sapiens
aaggggagctgctgtttcctgtccctttatgatgggaaatatctagacaagttcccaaccctctgcactgcaggctgcatggcacggagggtcttgtaacaccagctggggctggccttcttttaggagcttcagtggttctgaaaacttttatttgtttgtttgttttagtagatgtggggtctttctgtgttgcccggactggtctcaaacttctggactcaagtgatcctcccccgctcaacctcccaaagtgttgggattacaggtgtgagccactgtgcccagccttgaaaactttttcaggttcttccagggttactgggctattaaatatttctatttcattataagtcagtttttcaaagttatattatcttaattaccttttttatatgtattagtgtagagtagcattttatattttgatatcctccttatgcatagtttttcactttttattcctagtttttcgtttttaataagactttcaagaaatttattttattggccttttgaaaaaagcagctttagataaagtaagcagttctgctttcattttataatttatttctacttttgtttcattaatcttttcctccggcatgccttggattttgttgtgttactctttttctagaggctcgcattgtgtgtctggttcacttatgatcacgcttgcctacttttaagaatggaagaggggaggtggagggtggctgcacagtcgagggtgtgaggcagtcttgctctagccccaccatgccctcagcccgctgtggccacgctggttcctcaattgctggggcgtgcagtgtctgtaagggaggctactgatgccatccgaggaagatgtaaggtttcgtgtgggcagcgagagcctagcaggcatgtggggtgcccagcaaagggtaacagtggacagttgttgcctcattccacagagttttgattttttttttttttttaatggtcactccatcaacatcccccatggccagagcctgagctggtccccagagacacaggcattcagctgacagcctcgccttcacgctgctgctgttctcatgggggacaggcctcaggtggcaatgcacaaatcattagttaagggcagttgtgacagttaccaaggagtgtagtcccccgccccccgcccagtgaaaacagccctaaccaggggtggggacctttgggctctgacccgaagggtaggagaagctggaaggacagcattcctgtctgcgaaggcaggagcaaagctgccaggctatgaaggaaatggctggagcctgaagtcatgcaagctggggctggcagggacagggccaacttccaggcctgggggccaccatgaggattcaggacgtgacccccagggcacatgaaggccttccatctgtatttaagaaaagactttatcagacgagtatggtggctcacgcctgaa

SEQ ID NO: 56322 - DNA, 4755 bp, Homo sapiens
atttctgcttttttaaatgtgtggctccctttcttcattgattaacgtatgattatttttataaatgttccatggcagtgggaagggattctctgtcacattccacatctggatcagttcctccccattttgttggtcaaatccgatctgccatatcctgtgtaatgacaagtgagttgcattctcaccgtcactcctggggtctctccgcttcccctgagctggctcagcagtctgctccatgtgttttgatgcagggtgacccattggtattcccgacactaacgcccccgtctgtggactgcttgctgcttgggcttcactgtgtctggtgttgacagtgcagacctaaaggtgtgcacacatgtgcacacacactccgctgtcttcttgtttgcactggacttaaatatctatgagggttattttcaactgctgaatttggaatgatttttatatcttttctgctttctgcccatgtacatgtgtttattttacactgttgtgattggtagttactatgtggggacacaattacttgggctgaaataatccacctgttgtggttggggtcctctggggcattccagggtgagaggttgtcactgccacctgggccatgtgggccggcaccagcattttgtggttacgaattctacagtcacaaatatctttgggcaaatccccttctatacctcaaggcagcttttggtttgcaaccccactggccagagggaagggccagtcacttggctctctcactgccctgcgccccagatggttctagggctgctgttttcccttggccctgccaacaccactgtttttacttctgctcattggctgagtgcagtggttcctggaagccagtggcacgtttccccgcgtagctcgcttatcccacagcacacacccaagggttctgttgctaacacgctgaattaattctttgctcatcttacagagtgtgttttgactgcccccatttctgaggccttgtaaggccagagctttgttgcttcatcggcaggttgggacttagatggccgtgaatgtttcctctctgctgctgcagtaagtaagtgcccgcaccatagtgtgtttggaggctgaagttgaagcgaggctgtgaggggagatggacgtgtgaggagggatgatggggcttgagcaaagtgggggagggggcaaaggcagttggcccaacacattccccacccctttgagaggtctgaggcctgcagacctggctcggagcccacctggtagtcctcagactgtgtgtgtgtgtgtgtgtgtgtgtgtgtgtgtgtgtgtgtgtgtgtgtgtgtgtgtgtaaaagagagaagttgtggagaaatggggggctgattctgctcagattcatcaggatgagtagaaggcacccagctctcaccctggcctgacatgtgtgtccctgagcaggttacagtcctctctgagcctctgcttcccatctggaccctgctgggcagggcttctgagctccttagcactagcaggaggggctccaggggccctccctccatggcagccaggacaggactctcaaatgaggacagcagagctcgtggggggctcccacggacccgccgtgggcccaggggaggcagagcctgagccaacagcagtggtgctgtggaccgtggatcctgagggtggcctggggcaagtaccggctgagggtccaggtgggctttgtgtacctttgggtcctggggccctggtgacttggactccaggttagagtcaagtgacaggagaaaggctggtggggccctgtgcttccgacttcatttcgagtgatggcagttcccaggaaggaatccacagctgacggtggctgacagatcagagaatggaaggcgaggcaggcgggcgtctgcgtgacctcaggtgcttggggcccagcagacccagagaaccatttccactaggccagggtgccggaagtgtccacaggtcttagattccctgttcagatgaaaagatttgtgcctttaatgataaaagtgatctgcatagagtcaaaaattcaagccatgggtataaaatgcaagtaaaatccctgccctcacctatcccaccctactacacagagatgtcctctcgagtttcctagactcactctggaaatttctgtatacacacagaagcttgtgcctctgctcgtgaaggcagagggagggagagctgaagggccagcaccttctcacctgtgggccccctcagtgctcggtcccagagcatgcaggactgtgcctcgtgttcagtttgctggtctgacttcatgctccttgggcaggatatgcatgtgccatgctaggagacatgtggatgtgaagctgggggacaatgtcccctggctatgcctttacaagggaagtaaggaaggtaggaggtgagcctgggagggagggagggaggcgcggagccgccgcaggtgtttcttttactgagtgcagcccatggccgcactcaggttttgcttttcaccttcccatctgtgaaagagtgagcaggaaaaagcaaaaggcgctggtggtggcacgtccagcacggctgggccggggttcgagtccccgcagtgttgctgcttccttccagctccctcctccaggcctctcctcccaccccaccagggatatcttgtctcctagaggggtagcattgggtggggcaccccaggcctctcccagaagccctcctgccctgctatcccctccctcatcctctggggccctgggaatacagcaggggacgtggggccacaggcagctgataacttagccccctcagccactcctgtgggagcgggagggggacagcttggcggctctgcacccaaagctgtggggcctacctggagtgtccccacccctcagggcatactccccactgccctcttcttcccaggatcaactcaccgctaccctcctctccacatctgaggaccagcgtggctcttccagggagggcttggggagatgaggtccaaggggagaggccagaaatcctgaggcctgggctggagatgggtgggcggacagggcccaacgaaccggcccttgtgcaggaaggccaacagctgggaccacaaggtgccgggtgggacagggaagtcagcctgtgctctccaggcacctgggacccaggagatccccccggctcagcaccagcagaggcagctgctgtgatcctgggcaggcagtgtcctcctccctcagtctctgccccctcccatccccaagagggaggccaggggctcacagtccatttcatgggccatgatactgatgctgtctgcagttggggcagcttgcctgaccacaaggctctccagggagcccctgccaatcactataataatctcctttaacgagtcaggccccataaggaacagccagaagcaggagagaggtatgcagagctggcctatggaggcttgccatctcttctgaccccacagagcccactcagaataccacgccctagtgggtcttcccagcccaaactcaagtcacaggatggcacaggtcctctagggagagctgggctcccatggggtggagggagccccaaacctcaacaaggctgaggggatgcagtatgcagggccagggaagggagccaggagacagaggggccgaaagccagtcagctttggtggagagaacccttcatgaggagccctggcttgggcctcctggtcaaggagtgtttgcagcaatctgtagtcccttagcccctggcaagttctggtgccagaaaatcccctccggagctggtgtctctctcattcaaggggtgagaagaggcagcgtgaagccgaggtcttggccggccatgcctgggtggtgaggccacaagtccacccctgcaactgcaagggcagcagggaggagctgcaggatctgctgtccttggatgtgatcagcctgccactggggaccaacaggcctagactcatacatgagccaaggcacagagcccaggactgaagacagagaggagccaccacacggcaaaagagcatggacatctgagtgccacctagcctgtgtgagactccgtttctctatctctaaaatggagtccgccaggcgcagtagctcatgcttgtagtcccagttactcaggaggctgaggtgggaggatcacataagcccaagaggttgaggctgcagtgagctatgactgcaccactgcactccagcctgggtgacagagtgagaccgtgtctcaaaaacaaaaacaaataaataaaatggagtcactgatagctacctcacagggttgttgagaaaattcgggataacatttactgcttgccacagggaaggtattaaaaagttacaggtgggcacggtggctcatgcctgtaatcccagcactttgggaggtcgaggtgggcggatcacttgaggtcaggagttagagaccagcctggccaacatggtgaaactccgtctctactaaaaatacaaaaattagccaggtgtggtggggtgcgcctgtaatcccagctgctactcgggaggcggaggcacaagaatcacttgaacccaggaggcggaggttgagatcgtaccactgcactccagccttggtgacagagcgagactctgtctcaaaaaaaaaaaaacaatacctgatactgaaatttaggtctcacaattctggaggctgggaaatccaaaatcaaggtacaggcatctggggagggccttcttg

SEQ ID NO: 56323 - DNA, 1608 bp, Homo sapiens
caccatgcccagccacaagctctttttataagggccccagtccatttgtgaaggaggaaccctcatgacccaatcccctctcagaggccccctttccagtatgtcatcttggtgattaggtttcaatgtggcttttggagggaacaccacatgcaaaccatagcaggtggcttgtccccttctgtctggggaagagaagaaaaaagcacaccttccttagagtttcacccattgaaaagcagcacctcactctggacctgagctgaggccggagtagccgtggaaggaggacattcttgtcctgggtccccaaagtgctcttaactcaccctgcatcaggcaccagccacagggccctgggaaaccactccagggtgctatgtcagggcagagaaaggggacctgaagtcaaagagacttgtggggatcaccccatgacccatcccctgccctgaggcaggaccttgctgccagagacagaatggggcccctccattcaaggggggctgttctctgggcatgccatgtggggcatggcctcagtcacatctatagaagtgagatcacagggacaaggtggcctaggaggaaggggtgtgaggcccgctcccttccagcaccacactcactgccagagtctaaatctgcctcctgctggagtaggactgagacagagggactggtcaccctatctagcctgaacagctgagcccagggacccccatgaagcaggaaggaactggacaaaggagccagccaatctcctaattgacaaaggggccaatccgttgccagactgctcctggtggggctccacagacaacagcagccttgctgttgactccgcccccatcttccctcctcctgctgacacctcttcaggttcccacccccacccttcttttagggcaggcctggtctcaaagatctccacctactatgctccaggagccatggtttcagcacctcccccattcagaggcccctgggggcctgtctatgggagacactgtgatgcaggctgcttggccacttcaaaagcccttctctagggatcaggacatagctaccctcagccagcgcagtccgcatcacctcaatgatctgagtgatggtatcaaacccagtactgcactgaggaagccctccatgtttttctgcagggccagagaaaggggggtcaatagggcccagcaggggcctcatccctccagaggacaagaagggcagcccctcccgggccctcactccctcagcccaaaagggcaaagaccagagtctgacccgcccacccacctcccagatgtctccctgtcttctcatcaaggcgggtgatgttatacgcatctgggagccccgcagaaagcagcgcagattggatggagggctctgcagaagataaggattataagctaattctcctgaggcctcaaccccgccagctgaggagctgactcctcaaagtctgcagagggtcagtgtacctagctggccaatccacctcaatgctcccaaagtacacatgtctcttctcaaggtctttccccaacaccccccaaccacaagcccagatgtgaaggtagcttttttttttttttgagacggagt

SEQ ID NO: 56324 - DNA, 980 bp, Homo sapiens
ctttcccgttttggctttctgcagacacactcatcactgtgttatgtgacagtccatacatttctcgaaatctttcaagtcaataattatttttacccagcattacagaattgaaaagttaggctcagaaagggcaaattctgatttgggcttcagacctagattttttcctacaataaatgatgtaactattctgccttaagaatcttctagcatttctctttccaacacgacagccagggctggactagccccgagagttgcaacggaagatgggctacatacaaagcgggatgtaatcctgggccgccccaacatgccccgcatgagccaaaccgaacggctggctccttgtagttggggccacctacttgggacctccccttccctgtttgcgacctctacaccctggccacacttggagcaccgccgcacagtctgtgggcgacccctcgccacctctattgctcggcactccaaccctgtctatgtttaagcagagatgtccagagagcagccgctctcaacatctaccgtatcccaccgtctagcaggaagcccgctctctgtccaactccgcgggaccgactagagtacgacgaggaccgactagagcacagtgaggaccgtccagagcgccccctcggagagccccagggcttccaggacggcgcccgcgcatgcgcggacgccgacgggcgtggcgaggggcgtggcgaggaggtggggctgctgacctcagtctcctctgtcctcaagtcgcctacgtgcgcgcccgggagctgcacactcttgaagtgaccggcctggagacggttgcccagagcaaggtaaagataatgatgtatccctgatcatccttaccccagccactacttgcctttcctcctgtggcttccccagacaacactcttgactctccctttcctttgaaggcccatgtagcatccctggagggcctcatccctgaagataaggtt

SEQ ID NO: 56325 - DNA, 3871 bp, Homo sapiens
gaggagtatccgcagggcgcggtggctcatgcctgtaatcccagcactttgggaggccaaggcaggtggatcacgaggtcaggagatcgagatcctggccaacatggtgaaatcccatctctactaaaaatacaaaaattagctgggcgtggtggcacatgcctgtactcccagctacttgggaggctgcggcaggagaatcgcttgaacccaggaggcggaggttgcagtgagccgagatcgcgcctctgcactccagcctgggcgacagagcaagactccgtctcaaaaaaacaaaaacaacaacaagaaaaagaggtgtgttatttaaccttttcttagaagcttctctgctgcccccaatctttctcagcaatcctaagccttgctccagttactggttagagctgggccaatagtggtctgaccacacgtggtggcagcattctgagctctgaggagacaacctgggctcttgtcttgaggcctaaactgggcctgagagagcaggaacaaatctgccctctccctaagctcagggagtccacagcgggaccctcacacccagtctaaggagaccactgggcagagctgagatcttaaggacaagctggagttccctcagttttgggaaaggagttctggggtgagcgaggaacatcaggagaagctggaacagagaggggcagccaagtcctgaagggcctgctgtaacccaagagagaggcctggctttatccagcaaggccagggtgcggtcggagcaaaggttgttttattaaaagcttcctatggctggagcccaggagttcgaggttacagtgagctatgatcacactactgcactccggcctgggcaacagagccagaccctgtgtttaaaaaaaatcctaaaaagccacaaaacttcctgaatgcagacaatgtaggggttcaaggagctagggagtacagcggagacagtgtttgaacaggcccaggcctgggcaggtggctgccttggatgcccgaagggaaaaacagaacaaaatcaggaggaattggagcctaagtgagggagcagaggatgaagggcgagaagggggcatggggctgacaaagccggggtggcagcccgtcccaccccactcagtgtgggttcccgcggtctgttcggcgcagccacagggtcctcccaccaccctcgcggcccttcgccagcccagataccgttttcccgactttggaacggagaccacaacacccgccccggaactactgaaggctcaagttaggtcaacccggcaggaaaccggttcccaaatcccaaggcggacccaggcccgcggttccctccctcaaggctggaacagcgcgcagtggccaccgccgccgggtctccagcccccaggagcgcggcctcctcccggactctctccgatgcggtcctgccctggggacacggcaggaagaagggacctggctgggggacgtggccccggcgcgggggcaggggaggcagcgcgggactcccagcggcccctgcgcgggtgcccacccgccgtcacgtgacacgccgggcgctgagtcaccgggaagcatctggctgggcggccgggattggccaatctgcgggaccgtctggagcggaagggcggtggtagctggccctgcttctccctccccaggatctctgcactggccttacgaactggggagtccaaggggttccaggacgggaaggggagtttgagaccagcctgggcaacctggccagacccggtctctattaaaaatacgcaaaacacacacaccacacaccccaccccacacagcccacacaccccacacggccagcagccctttctgtcaccgactccgttcccctggccagtgagctctccgtccccttttcctcccttttcgcacacgtgcctttcctgcctgctcccacctggtgcctgaggcgtctctgcgcctcagcactggctgttcggtttgcactacggagggcagtgtaggtttgaaaaggaaagtttcattatatagaacactaccaaggcagggcgcggtggctcacgcctgcaatcccagcactttgggagaccgaggcgggtggatcacttggggacagtagttcaagaccagcctggccaacatggtgaaaccctgtctctactaaaaatacaaaaattagctgggagtggtgacacttgcctgtagtcccagctacttgggaggctgaggcaggagaatcgcttgaacccaggaggcagaggttgcagtgagccgagatccggccactgcactccagcctgggagacagagtgaggcaagactccatctcaaaaaaaataataataataattaataaaaaaataaaaataattaaaagaaaaagaaaaagcactacagaagagtgcagaggggcgcctcagctagaggacttagggattttccttaggggcatttatggaccttaaagagggagcttaagggtaacttggaccacactagccacataggtcatgataaatgattacatttgtagacattttggtgcctaatgccagtcagcaagggttgttgcacaatgagtttggacaggcatgcatttgcagagatgtatagaaattctaattacttggaaattttgttggaccggagctaggaaccaaatggtatagggaagtctcattacttctgaattcctcagataaagagttttgcctctgcctgggctgctcgatggccaccaggtgacctttgctctcctcaggggctgctgtgggtccagagctggaaggagaatgggccgcatcctttcctccttccctccccgcagcagcaggggctctggctgcgggggcgggctgagctccgtccggggtgatgcgaagggggtcatgccgagggggtgactcccagcttgcactgcgtcccacagtcgcgcctcgcctcgcctcccggagcccgagtcttccaagggcgctggcagctgcgtcagctcccgctgcccgccccaagcgtccagagctaggagggagttacggggcgaggcccagggcttttcagggccgggggtcgtgcggccaggcgcgggtggactaggccagcggccactgaggggcagagaggtctggggttctaagtttagcccactccgcgaatgtggattgctttgtttggatgtgattccctttccaggtgactgtaggttacccccacactgccctggcatggaagagatttaggctgtcctaggccttcacccttccctaagacgagaatccagaggaggagccatttaacagctccctggcttctctcacttacagggagctcactactactactaaaaacattttgaagttaacacccccttatgcctggctcattcgtgcattcaacagatgtttactgagcacagactgtgtgttggagactggccactggtttacataacgagctgtgataaaacaaagtcccaagcctcttggttgatgttctcaggcttttttgaggtgtgaatcacttctccctggaagccctcctagctatgccaccctggcttaagactgacttttgtgctctagtggcccctcagggattccccacatcagcactgactaaatgtccacttccatgagctagaggaaggtggcgcctcttatttggcctggagcagggagctagggctcctgcagcctccagatcccttactgggcgtcagctcaagggtgggaaggccgggggcctgcaccccctgggaaagatgtgggcatttgtttcaaggcaggtggtggtggctgaagtctggaggcagggagaacggctgcgtatttcaaacttgtaagcaaaggacaggggacctattactgggaaatttccc

SEQ ID NO: 56326 - DNA, 3816 bp, Homo sapiens
gctagaccgaatgcagcctgaccccttggataagcttccaggagaaagcccacaggatgggcagccagggcgtgagtgtccctacagctaactcagggagatgtccgggccccagaggccatctgcctgcatctctaaaaagtgctgtgggaatgtaacttttctgagtcttagattcttcaattgtagcatgaggggctacttagaattatggattttcaggattggaagaaaaatctcaagttttcttgaccagcttcttcgcaatgcagggatactgcggaaccctaggaaggtcacccagcttccagaggatacctgtgggaatgggaacttgctacctagaggtttattccactcaaacactgggtggctctgatccactattaccagttcaggagaaggccctgtcattctgcgggcttctgttttaatccggcattgttgagaaacacaccccgacaaagtgcctgaaaccttgtggccgctacccccttgtcccaggagatgtgtgtctgtgggatgtgggccacacttgcatgaggaagaatgaatatacgtgtgtgtgtgtgtgtgtgtgtgtgagcatgctcatggaggatgtttaatcagcttcatgctgggtgtgccaggccaatacaaacatctgccagggacctgaagcatgactgaaaagatcagggacacaagaacgcggctgcgactccctgagagcttcattgttccttcaggccacttgggaaggttcactcagcaggcgtctcccgcggtgactcatcatggggcaaggacagcaagggctgagccgggctcactaccctgcactgggcagggggcgggtaggaggtagaggggtgaatgctccatcagagctgcatggaaaccacaggtggcctctgggttttctcccctgtctctgtggatggcagttggttcagaagttctgaacagacctccagagcaaagcagttcccagtttcccacgcagtacagctagctcagtcccattccactccatcctgatgggcattcgaatttacgtcaagtctaaatccgttctgttcctgtggaatgatctgttcctgtggaatgatctgttcctgtgggagcttttcagtattctggttgtgtgtgtgtgtgtgtgtgtgtgtgttataaattccaaaaaagatactattccaatgtattcattgagtcattactcagtagacacacatggagcttctactgtgtgccaggctctagtgatctggcaaatgacagctctttgcctcagtttcctcatccgtctaaggggaaagcaacaccacctcccccacagggctgttgtgaggcacagcactcaatacacgttacagaaaataaagatgcacatggagtggatagacggttctacagacgcagcccccaggaaggcatgggggacagcccagttgtgcccctcgatgtcaatctgtcctcctacagcccacagtgctacagctgggctgccacagccaggcctttcgggaggatccaccaataggcttcagggcccagggccaagtacattacgcagcaaatagaccaaggaaggaactaggagcctggaactctcaggcagggggtggggaattgctttcttaagacactttctcctaagaaagaacaacaacaacaaaaaagacactttctcctttattcccctccccgaaagaggattctatctaacaaggaatgcttgctagaagtagaggtgggtacatttagaagatgttttcttgtctcaggaagagagaatctgtttcccctaccctcctgccctggtgattcagggctgtgatggaagaggccccagctgcctcttccgcatatcattttgggaaggtcaatgacacagccacttctagtttctgtaactcattcttgctggaattgccctcagctctctgtgaagtgacaggcctgtctgctgggtttcaagggataattttacatgttctacagggtaaattattagctgtccaaaaccccctagaaaacaatgctctgtcttccatatcatagagctctgagctgcatcatctctgtaggttttttcctgctgtgggggcggtcacagtaggtgagggagcctaagtttgtgcagcagctacggaaggtcacattgttccagaaatcggctctgggaaggtgggcagccaggggatgggattgggaactgcaaattcctaaaatctttagaaaacaagaaagtttgggctgggtgtggtggttcatgcctgtaatcccagcacttttggaggcagagacaggcggatcacttaaggtcaggagtttcagaccagcctagccaacatggtaaaaccctgtctctactaaaaatatgaaaactagccgggcatggtggcaggcacttgcaatcccagctacttgggaggctgaagcaggagaatcacctgaacccggaaggcagaggttacagtaagctgagatcccgtcactgcactctagcctgggtgacaagagcaaaaaactgtctcaaggaaaaaaaaaaaaacaaaaaccaagaaagttgttttcttgggactgtctttgcccttcatttctgacctgcatttctagagagctctagaaatgcagaattaaagaaaaaattacaggattagataaaatcaaaggaggcctgggaggaatccaggtgccatgaagactcagccactgcggcctctgggctccagggccgtagatgacggatctctcagaagcttgtctcttgactaagcctgactggacttgccaatcagggaaggggtggagtggattctggcattctctggaggtttccggcctggcctgagtcaggaggattaaggtagggccttgctgactgtatgcttggaggctggatgcaaaatttttgcccttttagtccttttcagcaccccgccttctcgaaggtacagccaggaggcctaagatctttcctttttctttttttttcagacagtcttgctctgttgccaggctggagtgcagtggcaccatctcagctcactgcaacctctgcctctcgggttcaagcgattctcttgcctcagtctcccgagtagctgggactacaggtgccctccaccacaccccagctaatttttgtatttttagtagagatggggtttcaccatgttggccagggtggtctcgatctcttgacctggtgatccgcctgcctcagcctcccaaagtgttgggattacaggcatgagccaccacgcccggctccagcctaaagtctttcatgtcctctccccaaccctttgtttactgtattttatagaatcagcatcatggcttcttgcatggaatcctctcattttacatatctcagttgctactgggaagttatttgggttggtgcctgaggtcacagggctgtttgtcagtggagtaattgccagaaaccagaaccaagggcattctatttttagcctgggcttttttgaggggagcatgagatgactggctaaaacaaatttgccctcttatatttgtgtccttaggcccaaatgaagtctaggtttgagactaaagtgaaagggaacaaacatgatattaaaggactagtggagggggcagcttccatcagacattatgaaattaaaaggagcacagacgcagtccagagaaaaggtgcttgaaaaaattcagtgttatgttaaaaagatccttagttccaagagtgctgagaaggccacataatcaaatatattattaatctcctcactaaagtacatggcaattttaggctgtctttttttattatttcattttttagag

SEQ ID NO: 56327 - DNA, 11635 bp, Homo sapiens
ttcaagaacagcttctgctattaattagctgtgtgtcatttcaggcaaatcacaaaatctccaggcccccaaatccccatttgcgaaacgaggtgacctgcctcagttttccttcatccagcgataaaattctactaaaaaatttccaaccccagagcaagcatcaggactgtgcctgaagggatccggctgcatctcagtaatattccactcttacaggcttaaaaataaaaaagaaaagaaaagaaaacaagaacagtttcaccagcgtcaattgagaacagctgcttcaacaggccctgctttatgtgggcaggtggggacagggagttggcccagaaaacaggaccctcatttcctggagcccccagggcagctccccaacaccgtacacaacctgcatcatttacaggagccaaaggagttttagaaatcaacttcatagagttgctgtatcattgtgttagttttgccatcctaacctatacagcgtcactaatctctcccctcggagttgactgcctaaaaacaagccatggatacaggttccaaagacccgggggtgagggagcggagagggtgggtgtcaccaccccgtccagctccaagctttgtgtgccctggaactctccattttaggtcattgcttcagtttcttttctaaaaaattaggctgctgcaaggtcagcctgagaccacttctgccccgagaattctagactagtaagacctggtgacatacaaacgacgaagatattttacaataatgccatggcccttgatagctacacgaggtttgtgttctgattttaaattaatggatgacgtcgagactatatggaggaaatgacaaaggacaggagagaggtgggaaaggaagacctagactgaaaatggaagttgggcagcagctccacgaaagaaagaccagcccccaagtgcagtgacagcgcagagtagcgaccgagaagttcccaggccagctgccaccccgcccccatgccattccccagaacaggcacaggcgttagggcggggcgcgcgtgcgcagtcacgcgctgcgccaaccgccacagctccgggaaggcggccaggaccggctagagccggttagaaccagtggcgcccgcccacgagccagcgcctcacaaagggagggcggctcacggccctcgcgtatccctgcgcggcgctcgcgagccgcccctcccccggcgtttgtccctgacgcagccccaccggttgcgcagtccctccccgcccccgctctcccctccgcagcctgcagcccgagacttctgtaaaggactggggccccgcaactggcctctcctgccctcttaagcgcagcgccattttagcaacgcagaagcccggcgccgggaagcctcagctcgcctgaaggcaggtcccctctgacgcctccgggagcccaggtttcccagagtccttgggacgcagcgacgagttgtgctgctatcttagctgtccttataggctggccattccaggtggtggtatttagataaaaccactcaaactctgcagtttggtcttggggtttggaggaaagcttttatttttcttcctgctccggttcagaaggtctgaagctcatacctaaccaggcataacacagaatctgcaaaacaaaaacccctaaaaaagcagacccagagcagtgtaaacacttctgggtgtgtccctgactggctgcccaaggtctctgtgtcttcggagacaaagccattcgcttagttggtctactttaaaaggccacttgaactcgctttccatggcgatttgccttgtgagcactttcaggagagcctggaagctgaaaaacggtagaaaaatttccgtgcgggccgtggggggctggcggcaactggggggccgcagatcagagtgggccactggcagccaacggcccccggggctcaggcggggagcagctctgtggtgtgggattgaggcgttttccaagagtgggttttcacgtttctaagatttcccaagcagacagcccgtgctgctccgatttctcgaacaaaaaagcaaaacgtgtggctgtcttgggagcaagtcgcaggactgcaagcagttgggggagaaagtccgccattttgccacttctcaaccgtccctgcaaggctggggctcagttgcgtaatggaaagtaaagccctgaactatcacactttaatcttccttcaaaaggtggtaaactatacctactgtccctcaagagaacacaagaagtgctttaagaggtattttaaaagttccgggggttttgtgaggtgtttgatgacccgtttaaaatatgatttccatgtttcttttgtctaaagtttgcagctcaaatctttccacacgctagtaatttaagtatttctgcatgtgtagtttgcattcaagttccataagctgttaagaaaaatctagaaaagtaaaactagaacctatttttaaccgaagaactactttttgcctccctcacaaaggcggcggaaggtgatcgaattccggtgatgcgagttgttctccgtctataaatacgcctcgcccgagctgtgcggtaggcattgaggcagccagcgcaggggcttctgctgagggggcaggcggagcttgaggaaaccgcagataagtttttttctctttgaaagatagagattaatacaactacttaaaaaatatagtcaataggttactaagatattgcttagcgttaagtttttaacgtaattttaatagcttaagattttaagagaaaatatgaagacttagaagagtagcatgaggaaggaaaagataaaaggtttctaaaacatgacggaggttgagatgaagcttcttcatggagtaaaaaatgtatttaaaagaaaattgagagaaaggactacagagccccgaattaataccaatagaagggcaatgcttttagattaaaatgaaggtgacttaaacagcttaaagtttagtttaaaagttgtaggtgattaaaataatttgaaggcgatcttttaaaaagagattaaaccgaaggtgattaaaagaccttgaaatccatgacgcagggagaattgcgtcatttaaagcctagttaacgcatttactaaacgcagacgaaaatggaaagattaattgggagtggtaggatgaaacaatttggagaagatagaagtttgaagtggaaaactggaagacagaagtacgggaaggcgaagaaaagaatagagaagatagggaaattagaagataaaaacatacttttagaagaaaaaagataaatttaaacctgaaaagtaggaagcagaagaaaaaagacaagctaggaaacaaaaagctaagggcaaaatgtacaaacttagaagaaaattggaagatagaaacaagatagaaaatgaaaatattgtcaagagtttcagatagaaaatgaaaaacaagctaagacaagtattggagaagtatagaagatagaaaaatataaagccaaaaattggataaaatagcactgaaaaaatgaggaaattattggtaaccaatttattttaaaagcccatcaatttaatttctggtggtgcagaagttagaaggtaaagcttgagaagatgagggtgtttacgtagaccagaaccaatttagaagaatacttgaagctagaaggggaagttggttaaaaatcacatcaaaaagctactaaaaggactggtgtaatttaaaaaaaactaaggcagaaggcttttggaagagttagaagaatttggaaggccttaaatatagtagcttagtttgaaaaatgtgaaggactttcgtaacggaagtaattcaagatcaagagtaattaccaacttaatgtttttgcattggactttgagttaagattattttttaaatcctgaggactagcattaattgacagctgacccaggtgctacacagaagtggattcagtgaatctaggaagacagcagcagacaggattccaggaaccagtgtttgatgaagctaggactgaggagcaagcgagcaagcagcagttcgtggtgaagataggaaaagagtccaggagccagtgcgatttggtgaaggaagctaggaagaaggaaggagcgctaacgatttggtggtgaagctaggaaaaaggattccaggaaggagcgagtgcaatttggtgatgaaggtagcaggcggcttggcttggcaaccacacggaggaggcgagcaggcgttgtgcgtagaggatcctagaccagcatgccagtgtgccaaggccacagggaaagcgagtggttggtaaaaatccgtgaggtcggcaatatgttgtttttctggaacttacttatggtaaccttttatttattttctaatataatgggggagtttcgtactgaggtgtaaagggatttatatggggacgtaggccgatttccgggtgttgtaggtttctctttttcaggcttatactcatgaatcttgtctgaagcttttgagggcagactgccaagtcctggagaaatagtagatggcaagtttgtgggttttttttttttacacgaatttgaggaaaaccaaatgaatttgatagccaaattgagacaatttcagcaaatctgtaagcagtttgtatgtttagttggggtaatgaagtatttcagttttgtgaatagatgacctgtttttacttcctcaccctgaattcgttttgtaaatgtagagtttggatgtgtaactgaggcgggggggagttttcagtatttttttttgtgggggtgggggcaaaatatgttttcagttctttttcccttaggtctgtctagaatcctaaaggcaaatgactcaaggtgtaacagaaaacaagaaaatccaatatcaggataatcagaccaccacaggtttacagtttatagaaactagagcagttctcacgttgaggtctgtggaagagatgtccattggagaaatggctggtagttactcttttttccccccacccccttaatcagactttaaaagtgcttaaccccttaaacttgttattttttacttgaagcattttgggatggtcttaacagggaagagagagggtgggggagaaaatgtttttttctaagattttccacagatgctatagtactattgacaaactgggttagagaaggagtgtaccgctgtgctgttggcacgaacaccttcagggactggagctgcttttatccttggaagagtattcccagttgaagctgaaaagtacagcacagtgcagctttggttcatattcagtcatctcaggagaacttcagaagagcttgagtaggccaaatgttgaagttaagttttccaataatgtgacttcttaaaagttttattaaaggggaggggcaaatattggcaattagttggcagtggcctgttacggttgggattggtggggtgggtttaggtaattgtttagtttatgattgcagataaactcatgccagagaacttaaagtcttagaatggaaaaagtaaagaaatatcaacttccaagttggcaagtaactcccaatgatttagtttttttccccccagtttgaattgggaagctgggggaagttaaatatgagccactgggtgtaccagtgcattaatttgggcaaggaaagtgtcataatttgatactgtatctgttttccttcaaagtatagagcttttggggaaggaaagtattgaactgggggttggtctggcctactgggctgacattaactacaattatgggaaatgcaaaagttgtttggatatggtagtgtgtggttctcttttggaatttttttcaggtgatttaataataatttaaaactactatagaaactgcagagcaaaggaagtggcttaatgatcctgaagggatttcttctgatggtagcttttgtattatcaagtaagattctattttcagttgtgtgtaagcaagtttttttttagtgtaggagaaatacttttccattgtttaactgcaaaacaagatgttaaggtatgcttcaaaaattttgtaaattgtttattttaaacttatctgtttgtaaattgtaactgattaagaattgtgatagttcagcttgaatgtctcttagagggtgggcttttgttgatgagggaggggaaactttttttttttctatagacttttttcagataacatcttctgagtcataaccagcctggcagtatgatggcctagatgcagagaaaacagctccttggtgaattgataagtaaaggcagaaaagattatatgtcatacctccattggggaataagcataaccctgagattcttactactgatgagaacattatctgcatatgccaaaaaattttaagcaaatgaaagctaccaatttaaagttacggaatctaccattttaaagttaattgcttgtcaagctataaccacaaaaataatgaattgatgagaaatacaatgaagaggcaatgtccatctcaaaatactgcttttacaaaagcagaataaaagcgaaaagaaatgaaaatgttacactacattaatcctggaataaaagaagccgaaataaatgagagatgagttgggatcaagtggattgaggaggctgtgctgtgtgccaatgtttcgtttgcctcagacaggtatctcttcgttatcagaagagttgcttcatttcatctgggagcagaaaacagcaggcagctgttaacagataagtttaacttgcatctgcagtattgcatgttagggataagtgcttatttttaagagctgtggagttcttaaatatcaaccatggcactttctcctgaccccttccctaggggatttcaggattgagaaatttttccatcgagcctttttaaaattgtaggacttgttcctgtgggcttcagtgatgggatagtacacttcactcagaggcatttgcatctttaaataatttcttaaaagcctctaaagtgatcagtgccttgatgccaactaaggaaatttgtttagcattgaatctctgaaggctctatgaaaggaatagcatgatgtgctgttagaatcagatgttactgctaaaatttacatgttgtgatgtaaattgtgtagaaaaccattaaatcattcaaaataataaactatttttattagagaatgtatacttttagaaagctgtctccttatttaaataaaatagtgtttgtctgtagttcagtgttggggcaatcttgggggggattcttctctaatctttcagaaactttgtctgcgaacactctttaatggaccagatcaggatttgagcggaagaacgaatgtaactttaaggcaggaaagacaaattttattcttcataaagtgatgagcatataataattccaggcacatggcaatagaggccctctaaataaggaataaataacctcttagacaggtgggagattatgatcagagtaaaaggtaattacacattttatttccagaaagtcaggggtctataaattgacagtgattagagtaatactttttcacatttccaaagtttgcatgttaactttaaatgcttacaatcttagagtggtaggcaatgttttacactattgaccttatatagggaagggagggggtgcctgtggggttttaaagaattttcctttgcagaggcatttcatccttcatgaagccattcaggattttgaattgcatatgagtgcttggctcttccttctgttctagtgagtgtatgagaccttgcagtgagtttatcagcatactcaaaatttttttcctggaatttggagggatgggaggagggggtggggcttacttgttgtagctttttttttttttacagacttcacagagaatgcagttgtcttgacttcaggtctgtctgttctgttggcaagtaaatgcagtactgttctgatcccgctgctattagaatgcattgtgaaacgactggagtatgattaaaagttgtgttccccaatgcttggagtagtgattgttgaaggaaaaaatccagctgagtgataaaggctgagtgttgaggaaatttctgcagttttaagcagtcgtatttgtgattgaagctgagtacattttgctggtgtatttttaggtaaaatgctttttgttcatttctggtggtgggaggggactgaagcctttagtcttttccagatgcaaccttaaaatcagtgacaagaaacattccaaacaagcaacagtcttcaagaaattaaactggcaagtggaaatgtttaaacagttcagtgatctttagtgcattgtttatgtgtgggtttctctctcccctcccttggtcttaattcttacatgcaggaacactcagcagacacacgtatgcgaagggccagagaagccagacccagtaagaaaaaatagcctatttactttaaataaaccaaacattccattttaaatgtggggattgggaaccactagttctttcagatggtattcttcagactatagaaggagcttccagttgaattcaccagtggacaaaatgaggaaaacaggtgaacaagctttttctgtatttacatacaaagtcagatcagttatgggacaatagtattgaatagatttcagctttatgctggagtaactggcatgtgagcaaactgtgttggcgtgggggtggaggggtgaggtgggcgctaagcctttttttaagatttttcaggtacccctcactaaaggcaccgaaggcttaaagtaggacaaccatggagccttcctgtggcaggagagacaacaaagcgctattatcctaaggtcaagagaagtgtcagcctcacctgatttttattagtaatgaggacttgcctcaactccctctttctggagtgaagcatccgaaggaatgcttgaagtacccctgggcttctcttaacatttaagcaagctgtttttatagcagctcttaataataaagcccaaatctcaagcggtgcttgaaggggagggaaagggggaaagcgggcaaccacttttccctagcttttccagaagcctgttaaaagcaaggtctccccacaagcaacttctctgccacatcgccaccccgtgccttttgatctagcacagacccttcacccctcacctcgatgcagccagtagcttggatccttgtgggcatgatccataatcggtttcaaggtaacgatggtgtcgaggtctttggtgggttgaactatgttagaaaaggccattaatttgcctgcaaattgttaacagaagggtattaaaaccacagctaagtagctctattataatacttatccagtgactaaaaccaacttaaaccagtaagtggagaaataacatgttcaagaactgtaatgctgggtgggaacatgtaacttgtagactggagaagataggcatttgagtggctgagagggcttttgggtgggaatgcaaaaattctctgctaagactttttcaggtgaacataacagacttggccaagctagcatcttagcggaagctgatctccaatgctcttcagtagggtcatgaaggtttttcttttcctgagaaaacaacacgtattgttttctcaggttttgctttttggcctttttctagcttaaaaaaaaaaaaagcaaaagatgctggtggttggcactcctggtttccaggacggggttcaaatccctgcggcgtctttgctttgactactaatctgtcttcaggactctttctgtatttctccttttctctgcaggtgctagttcttggagttttggggaggtgggaggtaacagcacaatatctttgaactatatacatccttgatgtataatttgtcaggagcttgacttgattgtatattcatatttacacgagaacctaatataactgccttgtctttttcaggtaatagcctgcagctggtgttttgagaagccctactgctgaaaacttaacaattttgtgtaataaaaatggagaagctctaaattgttgtggttcttttgtgaataaaaaaatcttgattggggaaaaaagatgggtgttctgtgggcttgttctgttaaatctgtggtctataaacacagcacccataattacagcataatcttcaagtagggtacggactttgggggattggtgcgagggtagtgggtgagtggcctactaaaaagcccagtaacccccacaggaaaatagggaacttctttttaagtagcctcctttccactatttagtaattggctgtgagctgggctgggggagaaatggggcggggtgtgtgtgtcattggaaagctctcttttttgtttttttgagacagtctcactttgtcccccaggctggagtgtagtggcatgatctctgcaaactgcaacctccacttctggggtccaagtggttgtcctgcttcaccctccctgtagctgggactacaggtgcacaccaccacgcctggctaatttttgtattttcagttagagacgtggttttaccatattggccaggctggtctcaaactcctgacctcgtgtgatccacccgcctgggcctctgaaagtgctgggattacaggtgtgagccaccaagcctggccgatccttttaagtttttaaaccagttaagctctttggttccccctcagagtcccaaggtcctgggtcactcaggatcacattttcctttaatcagttgtcactggtccccttttgtccctttgaacgtgctgtgggattagtagcagcatctggctgttggaaggactggctgggatctcaggtgaaataccctccctggccctccttacccttaagatctccctgaaaagtcagaccttgcttattggagtttgagatgcattctagtaaacccagacctaccagagagagggacccacgtctgaagaatcttccagcctggggaacctgtgactggccacacccttagcctaatggaggggcctcagaagcagaactacctttttttttttttttaatggtattacattttgcaaatggagaggtagactctgattgggccccttttgacaacgcagcagagctgaggtttgaatcctagtcagtcaacacttcaacccctatgttgctgtttcttcaatgtctagaatgttctgatagatgaagcaatggcccggcaggtcagcagcacaccaacccccaacctacccagcctgtataggccttggccacaggagctttctcttcccttgaagtgatctaatgggggatggggtatctgtctcgctggttatgaaagaagctgagctaggtgctctcctaagttgcttaagtgtcttctgaattgatgcccagtcagtttcgtatggagaaaggtctctgtttttccaaagcagaaggttctgtggaagcacaaatactttactggagagcaaaggagtacgagtaggaattgggggccacgcacagtggctcacgcctataatcccaggactttgggaggccgaggtgggcagatcacctgaggtcaggagttcgagaccagcctgaccaacatggagaaaccccatctctactaaaaatacaaaattagccgggcgtggtggcgtatgtctgtaaccccagctattcgagaggct

SEQ ID NO: 56328 - DNA, 1580 bp, Homo sapiens
ggcggagtactgatcttagtaccgcccgccgccccggactgccccgcccctccctagcccccccatccccgcccctccctagcccccccatccccgcccctccctagcccccccatccccgcccctctcccgcccctcccttgtccccgccccttcccgccccaactcaggttctgccccaccccgccccaattcacgtcctgctccgccccgacgtaggccccgccctggcccccgggccccgcccccgtctgacgcaggccccgccccctctccgccccgccccggctcgggcggccggaggacccggagctaaggcgcccgaacccgcggcggcggtggggacgatgtggttctttgcccgggacccggtccgggactttccgttcgagctcatcccggagcccccagagggcggcctgcccgggccctgggccctgcaccgcggccgcaagaaggtgagtgcggccgagctccgtaggccgcggtcgacctgggccttgcctattccgcgccgccgaccccgtcgcgttgcgcccggcctgacgtggcggcggaaccaaggggtagcaggccggggagggggcgggcagtgcctacgtggcgggcggagggaccgagggaccgacaggcggacagggccggggtcacgtgggcccggcgaagtgtccctaaggctgacctggggagagacctggctgcgggcccttgtcttccggccacacaacagctctgggaccatctcaggccccgctgccctcccctaggccacaggcagccccgtgtccatcttcgtctatgatgtgaagcctggcgcggaagagcagacccaggtggccaaagctgccttcaagcgcttcaaaactctacggcaccccaacatcctggcttacatcgatggactggaggtacctgctgccttgcctgcccgtctctgcccctcacgatgtcctggttacccactcctgtctcccctcctgccctgtttccaccctatgtgccccagcacccccagatttggtttcctcttccccatctctcccaacttcaagtcgcttatctctccttcctctctgcccctccgcccttgataaccctgtgtccccttccccagacagaaaaatgcctccacgtcgtgacagaggctgtgaccccgttgggaatatacctcaaggcgagagtggaggctggtggcctgaaggagctggagatctcctgggggctacaccagatcgtggtgaggtggggggcagtggtgatgagagcagggatggggggttgcaggtgctggggcgtgatggctccttttgcccccagaaagccctcagcttcctggtcaacgactgcagcctcatccacaacaatgtctgcatggccgccgtgttcgtggaccgagctggcgagtggaagcttgggggcctggactacatgtattcggcccagggcaacggtgggggacctccccgcaaggggatccccgagcttgagcagtatgaccccccggagttggctgacagcagtggcagagtggtcagagagaagtggtgggtgactgggggcagcgcgccccaacctgccct

SEQ ID NO: 56329 - DNA, 1337 bp, Homo sapiens
aaccctcgccctcaccggccgggctctcggggagctggcaatcgcggccggagggcccgggcacccagggcgggcgacactcgcagcggtaggagcccggcaggttgacgcagcggccagggcggcaggctgccgggtcctggcactcgtccacgtctacgaacagcgagggggtgggtgggggccgtcacagctcggcccgggccccgcccctcccgcgtaccccactccccggcccgggcctcacccatctcttccgggctcaggcactggcgctgcgcgggactgtactcggcagggggcgtgcaggcacagcggtagccgccgcgcgtgttctcacacactccgttccggcagttggactcgtccaggcactcgtccacgtctgcagggaggaaaagcgtgggtagcaggggcaggcccgggatgggcgcggtggcgcgtgtctccctgccgcttccccacggccgccggggggcggagctcacccacgcattccagcaggttcccgtcgtagtagaagccctgcttgcagtagcactcgtagccaggctgcgtgttcacgcacttgccctccttgcaaatctccgacccgaacaacatgcactcgtcgatgtctgcggggtgacaaacactggccgctccggtcccgcagctgcagcccggaggcgtgggctgggcgcaccaccggagcgaagccatccccgggcggggcctacaggaggggcggggcctacagggcggggcctgcgaggaaggtgcgggcggggcttacccggcgcgggcagctgacccagcgagtcccggcgggatccgggcgagcccaacccggggtgagagggcgcggggcgggcggagccgcagggcgcttaccacggtgggctgggatgccgtagttgacgatgttgttgtcctgggtgtagccctttccgtctgggcagaggctgtggaactcggctgcaggggcagggcggccgtggggagggaagaggcaggactgagcgcgcgcgtgggcttagggctgcagcccgccgcctatttcccaactgccagggggcgccatttcccacatttggcttccagatgaagaaactgaagatctgggaaggggcctgcccggctcctgacctgagctgtagactgggcaggggtagatttcgcagtggtcgccccagccggcccccagagagcagcagcactcctgctgggtcacgttggtggccaatacgctgtcgcagaacactgtgtcatcgaagttcaggtagcactccttcttgtggtggggctgctccacctctgaggggcagacggcagctcagggttgtgcacagaccccc

SEQ ID NO: 56330 - DNA, 1398 bp, Homo sapiens
ctcactcacccaaactggaaacggggaggggtcgttatcaccctcgctttcacttgacatccagttaaaaaacccaggaggtctaatatttctccaatatcatcgtctcatggccatcctgagcccaccactcatcctgtccaccactgtctccgccctaagtctctgcaacagacctccctccacaatcagcagcagggaacgttctaaaacaaatggcaaatcttgtcactcttacacttaaaatgctgcaggtgccctctaacaccttctgggtgaagcacaacctcccaggcaggacttagggggccctccaagggatggggacctgtccctccccggccagcctcagcccccatagcctgatcattccttacagttccccaacaccccaccctctgtctcacctctgatctgccagtgccaacccctgtgcctgccatgctgttcctctcctcctttcttgcccaattcctagtgattctttaagatgacccaggcctccttcctcccatcccgctgtgtctccaggaagcagcccagctccatccaggcccagcactgcatgctacagtctgtctttccttctccagttttcaatgagtcccagcccccagccccgcctcttggcgtataataaacaggagtgcaggggggagtactatcgtctgccctcattctttgatatcttttttccttcaaatttaagtaacatgctttgcaaacgcagcttcgagctctaccccgagacccttcctacgtggaaattctagtggtgccttccttggcaaagttcgttgagaaaatgagtgagcagagtcacctggggatgaatgagccaccttccacccactgtttacagacagcgtgacccgctccccggcttcagcgcgtagggggcggcggaggcccggggcgggggtgctggcgctcacccaagcaactgcggccgtcgggcgcgggcgcgtagccctgggcacaggtgcagcggaaggagcccgggaggttctcgcaccagccaggcgagcaggggctgccctcggcgcactcgttcacgtctgcggcggaaagacctagcctcggactctgccccaccggaaggcggaccgcgcacctcgcgggggtgtgggtctcttccctggaacgcggggttgagagggcagcctctactcccggaaggccccgcccccagacgccaatcaccaccgctaccccgccccgcccccagcggagccagactgggggaggcacctgacggccccacccactcggctccgggccccgccctcaccgcgacaggccccgcccccctggctgcggtagccaggctgacaggcgatgcacttgaagctcccgggcttgttctcgcatttgccatccgggcaagagcttgggtcc

SEQ ID NO: 56331 - DNA, 598 bp, Homo sapiens
aatgactgagggagaggatgggacctctgtctgtttctgtcccatactcaccttcaacctgtgctactaccagccttggggctctgactcatcccaaagccccagcccttctcctgcccaccccatggctgccctcacttcccagggcaggagggcaggagggcgggggtgctgctctcctggatgccagaagggcctcacagggacagcccatatccatggccctcagggtcaggctaagcacatcccagcccagcccatcctgcctggcctcttggggccaggcctcacagagcagaggggtgtgtcctgggcggggggaggtaggattctctttttcctttctgccagtgagtcactcatagcggtgagagtgacctcccaatgacacccgcccactgtggcctgggcaccgagcctgggggatgtgggcagcacagatggagacagcagcctgggcaggatggccagggagcctgggagatggacacacgtacactcacacccacagtcctcttgtcacacacacacagagactcatcctgacaccaacacaggttcacataaacattcccatacatttggccgggcgcagtgg

SEQ ID NO: 56332 - DNA, 2378 bp, Homo sapiens
ctagtccctaccttcaggcctgcaccctacttttaggcctcaacaccctccctactcagaccttgccagtagccggctcccatccccagccctgaccttagctcctcctcccagggaatgcaggtgtctactctggcaggccctactttagacattttgtaaagacttttcttgtttcttccagcaagtctgcttcttgcgggaatatttagcccttctctgaggcttcctgtccccggctcacattcctcaaaaaccctgtgtgctcctgctcagaactcagcaccttctgggaagccagtgtcatccaggacctctgcatttccccaccccttaggccccaaccctaacgcaaagcttcaaagtccaggcctccatgcagccctccaactctggcccccagagttccagcctcccaagttccctgaggcccctggtcccccaggccctcggatctctgccctttataccctcagcccccagtctctaaggccaagaccccactagctctcccaccgggcctggtgcctgtccttcccctgcccccagccgtgcccccggccctcacccacgcggaagccggagcccgtgagcgtgtctgtgctgtggccgttctctccgatgagcgtcatgttggagccctgctgacaactgtcccgacactggcccttgagacaggtccgcttgcagatcaccggcgcaaagaccaccttgaagcgctcgcgggccagcgccccgcccccgcctgcgccccgctcgccggccggccccccctcgaccctgccgcccaggcccagcagcagcagcagcagcagcagcagcagcgccagcagccccgccgcccccgccccgcgcatctcaggggccaggccgccagcagcccctcggggcccgggcatccggggccgcaggacccgggggagggggggcgcgcccgggcggggcgaggggcccgcgcccgaagggagtagagggccgggagccccgggagagggtagggggcagcgagggagggcagcgggggaagcgggcgggaggggaccgcgggggcccggcgggaggcgcggagatgcagactggacagcggggagcgcagaaacttcccagccccaggacgaagcccagaccaggccccgaactcaggcaggagcgaggaggccggagcaagttgaggcggagaggaggagcgagggagaggaaggccgggcggccggcccgctccgcgcctccccctggccgggctcctctcccgcggccgcggggaggcagggagcgcgcggggagggctcagggagaagtgagcagttgttttccctggctggagcgcggcgcggcggcggcgaggggggctgggacgctggccccgggccagggacacagtttttttttttttgttgtttaaagcgtcgcctctgccgcctggagaagcgagggtgtgcaggctggcggaggctggggggtggcgcggggacagtccccaccccagatgcccgcccccgccggaacccgcggccgcgctgggccctttccagagggccctcacctgggaccgtctggccggccgcggattcctccgggcggggcggggcggggaggcctgcgtagagcgagataccgaggctgagggagagaggtggccctgccgggtcacactgacgatggaggccgggtggagccggagcccaggccttccagctctttcccagcctcccttgcaaacgtgggggtctcagggccccaaagtaacttctcgttagtgctggtccaatcccctctgaggaaagggctaaagggtggggacagcctttggccagggctcacggaggtcccaggaggaagtctgtggggtccagaagaggagcagaaagaacaaagctagaacccagcttccctgccagccccctcggaatggcttcctggtgcccaccctgccacctcccccctttcctttcgtctggccgtgctggcggggctggctctgggcctcagacactctggaatcgccaaggtctgagctcagggcctggcccccttcccaggctaacagccgggaggacgggggcgctgtccgagggcccaggggctggagaggggcacagcagagccccagggcaggggctggcagcggctgggggtgggggtcttcaggttggccatggctggagaggagcatagttccagaccaggcttgtccgctggtctggaaggaaaggctgcaacgtgcgggggcccaggccttactgtggggcctgccaggagaccccagggttccgtctctgactcacagaactcagcaggaggtggggacggctagggcacatccaggaaaagcgctgccaagtcagggcggcaccagaccctctcccggacagcacccg

SEQ ID NO: 56333 - DNA, 2531 bp, Homo sapiens
ttggccatgatggtgacatagtcggcgcactgaggaattcagggtagggctgggagctggagacggtaataacctgggggtctgtgcatacaggctggagtccaagagatggttcagagacagttcctctagtcagcctcaggctaggtgctgtggctcttcgctgtaatcccagcactttgggaggctgaggtgtgaggatcacttgagtccaggagttggagaccagcctgggcaacatgacgaaaccccatctctacaaaaaatacaaaccaaaccaaacaaacacacaaaaaacggtggctctattcagcctgatagaaacgacttgtggtacaggccctaagtcaggtacgctgctgcccaagagcctgactggtagatggagatgtgaaagggacacagggctctccacgtaagcaggaggcagcaagaatgacagttccaggggttctacgtggaaggaagagggggccaggaggaagggacttcaggtcagattgagggggcatgtgccatccggaagaggagaatgtcgatgtaactgtgaaagtccaagtcctagctgcttttccactgccctggtgtacaacctcaggccctgcagactgcacatctgaggacccctgcctgccctgtctggcttctctgaatctaataagggagaagatgcgtttgaaaaagaacacggaagagggagagagaaaaaaagcaccaaggtccatgttcagagagccctggtaattttaacttgcaactcacccaagaagagcctaatggtcgcaagagtatgtaggaaggccccaacccgacccggcccagcacgcagcacccaagggcggctggaagcgcaatgcgcgtgcccagtacagcgctattcagtctgcaggctttttgaggatttcaacttcaaagaacggtcggcttcggggcgaactttgcttcagttccaggcctcgggaggcagcgaggagacagactgggacaccgagcatgcagaaggggagtggtcttgaaatacgcggaaagggagaatgcacccctcctggccagccttgccgggcgaagtgagaagtactgaggcctgagaaggctccacgcgtgcgcaaagggccgctcgctgtgattactggggtggcgatggttgtgatgacgccgctgccccgcctgcgccgaaagggaaaccccaggggaggcggaggccagcggggatttctgaagccaagtggtccccttcatccacgacggacaggaagggcgaccccctgaggccacttccaggtcttgcgaccggaggagagttaccaaggagacgctcctcccgaggcctcgcgcgtcggaagcttctgtcccctggattccggttgacggacgcgtcccccgagcaggttctcggtagcagccgacacgccccaccccgggcacagcgaggtctgaggaccacgctaaggcgtcacgtccgccctgatccgcggcagctatggaacgggcggagccgcagcggagggcgctccgctttgacgtcacttcctgtgagcccggcggtgacaacggcaacatggccctgaacggagctggtgaggacctgggcggcaggggtttgtggctgtgaggtacgggaggcagcccactccggcaagacccccagtccctatgcctctcttccccagaagtcgacgacttctcctgggagcccccgactgaggcggagacgaaggtgctgcaggcgcgacgggagcggcaagatcgcatctcccggctcatgggcgactatctgctgcgcggttaccgcatgctgggcgagacgtgtgcggactgcggggtgaggcgagactcgggcgagtgaccggggatgggtccgcgggccaggccactcagcccttccccggccctcccctctggaccccattgccggcgtctcattccggccccgtgtgctttttggtccgtagacgatcctcctccaagacaaacagcggaaaatctactgcgtggcttgtcaggaactcgactcagacgtggataaagataatcccggtaagagtaaaaaataatccgggagaggggccggatatgcttaggggggaagcgtggttaagtggtgatagaggcccgagaacagtagggctgagaggtgacagtggagtctctgggtggggtagaagtaaaattatttctcctttaggctctaaagaggacccttaactcaataagagcaccaagcacctcctgtgtgccagccactgcgcgagagtctgagctcaaccaggcccagtactgatggagaattgaagctagggcataaatgtgatacaaagtagaaagtggatgagttgccttatagagggacagggaaaacacctcaagcacagaaagagcagagcagaaaaggagatggctcagggctgaggtgggccaggcatcctgaccattccacccactttctcctctttttagctctgaatgcccaggctgccctctcccaagctcgggagcaccagctggcctcagcctcagagctccccctgggc

SEQ ID NO: 56334 - DNA, 1772 bp, Homo sapiens
ttccaagtgtgcatgccagccccagctccactcacctttttccagcttttggcctcttcacctctccactctgctctccttgacgccctgagatgagttgagcttgtttcttctcagtttccccagtcaggatgagggagtaggtagaggactatgtgatgccccttttctaaggaagaagccatagccttttcaaaggtagcagccagaggggtggaccctagccttgtctctggcagcacctctgcagcctcttccgccatctggtgtccattccccacctggaagtgaggttttgtgttccgatccccttgatagattcccctccttcccctgagcatcctgaccctatcagcctatcccatctcatgcccaccccaggtactcagacaccgacaggagtttgtggtgaccccagcgtcaggtggcacgttaggcaccaagtgtggacttgccagtctcctgactccactgttagatcattttccttgggtgtgggggcggggcggggcgcggcggggagacggggtagcaaaaagaaccgtgaagaaaccacgcctgcccccttcagccttttcccccctccgccgcatttttccatctccccttgagtgagtggatgtcccgttgccttttctcagctttgcgcgacgtggtcccacaaccgttgcctttttaagagaggcccggcccatccagagggggtggggcagaggcggagtctgaggagctggggaaggaacaaagcgaggcctgcgggcggcggctgggctccggcggggccgcggggtgcggggcctgcgggcggcggcccgggcggagcgttggagggaaggaggtggcatcgccgtccgcgccggccccggccatgaacgggctgccctcggcagaggcgccgggcggggcgggctgcgctttggccgggctcccaccgctgccgcgcggcctcagcggcctccttaatgcgagcgggggctcgtggcgggagctggagcgcgtctacagccagcgcagccgcatccacgacgagctgagccgcgccgcccgcgccccggacgggccccgccacgccgccggcgccgccaacgcgggacccgcagccggcccgcgtcgtcctgtcaacctcgactcagcgctggccgcgctgcgcaaggagatggtgagtgggtgggcgccgggccagctgggcggggggctgacgcggaggaacgcaggggactgggacaggcggcctgggtctcagaggacttgcaggcaccagttgggttgcaagggttatggtaacaataattagtgatagttaccaattatggcagtagttaccatatattttcaaatgttttgctgacgttacttcatttcatccggctaaatggataaccccattttttgggtgagggtcatgactaaagttgcatagcttgcaggtggtgcctgatgtccacaaaaacttcgtttaggaaggtgcggggaagatgggctggggcccactattccagggggcggggctgggctggggtggcctggaccccaactccagcccaccctcagttgtctgcaggtggggctgcggcagttggacatgtccttgttgtgccagctgtggggcctgtacgagtcaatccaggactacaaacacctgtgccaagacctgagcttctgccaggacctgtcatcctccctccattcggacagctcctacccaccggatgcgggcctgtctgacgacgaggagcctcccgatgccagcctgcctcctgacccgccacccc

SEQ ID NO: 56335 - DNA, 1006 bp, Homo sapiens
cttttgttgctatcggcagctgctggctcaggggcatcccacctccgggctctgggttcctctgccctggaagggctccaggacccgtcccaataaccacccacggccaggagggccaaggccccgtgctggatatttaaatttaggggccggtctccagggcgcgtagataaataaatacactcagcgtcgttgtgctctgcctggctggctctggggcgggaagaccgcggtgtttgtggcaggtgcggccccgcgctctgccagcaggtggcgcccgagaccccctccccccccgccccgcgccgagtgaaggccctgccgtcccgccggggcggggctgggggcgctgcctgctggccgagcctggctcagccgccgggtgactgcggtcgagtcacttcccctctctcgcccgcgacctccgagtcccccgctccctcctcccagttcgcttcgggctttccctgcctgccgggaaggaaggagaaggagccgcccaccttgaggagggaaactttccaccccgcgcggggcggggttgaggcggcgcaggaaatgggtggccggagtcgccggagcaaggggccccggcgggggcgggggaggcgcctccgggaacggcctgggacctcacgccccgcgggtgggagggaggggtggcagaggccgaggggagtgaagtcgcggcacctcgggccttcccggaggccaagcatgagactccgcggcggtgaagtttgattggggttccagggacccgtattccccgctcagtctgtgaagaccgccggctctccccacagcactagcggtctttacagttatctgtggaaggtttcttaggaaaccggggacccacaccgctgggactgagaaccaaacccagttgtcaagcccaccggaagaagccagcacgttcggagacagtgggtactcagccccctacacgcgcacacgacacctcacaacctcctgaaaagaggtgaagccgcacaccgaggtg

SEQ ID NO: 56336 - DNA, 1641 bp, Homo sapiens
acgaacagcacatccccgcgccctgctgcagccatttgcctcctggagatgcagcccagatggcagtcctggcactcagacatcccgttaaaccaagtagcagtcacgcaccgggctcctgtccatttacacaccttgcagagcagcgggaaggaacaaactgacctattgccccagggcagctgacacctgcagaggctcattaccatgcagggcgggtgggtaggcgataagggctctaatctaggggttcacagctgctaacgctccaggcaggctttcctggggagggagagtaaacatacacaaaaatgacacgttttccccatccattatagcgcatcccatttaataaggaggcatggcaaaatcagccaggctttctgctaaatgccttctgaggttcatcctctcagggattccctaaaaggcggaactacaattatccccatttaatagacgttgaaactgaggctcagagtgttagcgctttgcccaaagtcacacttggttggaggtcagttatgattctccagctacttgtcggggtttgggattatcttcccccttgacagcagagtcaggttctgaggttgggccaccgaggttactgacgccttcctgctctggttaagacgtgggtggctgcaccttggagttgagagctggtcctcgtccacattcacagtatgactctgagcaagtcccttcccctttctgggtctcagttttcccagccgttgaaagggggccagtagtacgtacctcccagggctgcgggcaggaaggaaggcggcccgggcagcgctctctagggtggcaccaagttgctggttgccctctctccacgcagcctctgcgcgcaccgagcgggcactgcggtcgggcgacaccccttccacgcccccctcccccgcccccgctcccgctcccgggtcgcggcgcgaggccccggaagccgggtcgccccgcccccgcgctcctgccccggcccccgccccgcgccggagccccgcccgccttccgacgggggtgcggctccaggaaacggcgcgctcccagctccgcgctcgccacccgacgcgccccaggcgaccccgcagactcagccagaccaccctgcgggccccagcggcggcagcggagagcgcggtcccgggtcggagcctgggacacctccgcacggacggggcgggcggcgcggacaggccatggggacccgggccgggccagcggtggcgggccagcgggagccccgggcctgagaagtgggcggcggggtggcgggggccatgacctcggtgtggaagcgcctgcagcgcgtgggcaagcgggcggccaagttccagttcgtggcctgttaccacgagctagtgttggagtgcaccaagaaatggtgagtgggagggaggcgggggggctcccccgaacttgctgggacctcatccggccctttgagcctgagaggactctgcccccccagcccaatgaccaaatgggcccccaccccagcttgggccctggttccgttcccaggctcggagattcagaagtgcccttgcaatttgtgggacccctggagttgggggcgtgggcagccttccctgcgcgggggtcaggactttcaggcctgaggttctg

SEQ ID NO: 56337 - DNA, 616 bp, Homo sapiens
accaacaggttcaggggcatctcgttcacatgccgccacccatagctgcccaggcccctgcgtcacaccctaaatatacgtgcttgctggtgtcagcttcccttggctggattagggcacagctgtgggggcctcacccgccaggcggggctaaatttaggctccccaggggaagggctggggcaggaagggaccatggggtccagggggaggggagtaagcaggaggctggggtcccttgggcagctgccatatccttggccttgcccacactgggcctgctagagggccattcacatctttcagcagagcctgggagagcttgggggctggcacttgaactctggcctctggctcctgctccagcatcctgcgggaggccagggaaacactgggcacagcaggctgagggtgccggcagtgtcaacgcagctgagtcacaggcggctgtgggtagggcctcctgggctgcttagcctggagcccaggccgggaagctgcccctgcccaggttgcagcttcccaggagggcgtgcccagcctgagtcaggctgcccagccaagccctgccctccctaggcaccccctgtccgcttcccctttctgggaaggcccc

SEQ ID NO: 56338 - DNA, 3767 bp, Homo sapiens
tggacttgagatcacggtggatgacgggcaccagggcctcgcagtgcaggtagtgcatcccacgggcaatctgcacagcccagttgaccagcacatggggaggcacgcgccgcccggccagagctcggctgaggggcccaccggctgcatactccatcaccaggcacaggttgggctcctccaggcacacagccttgagggcaatgatgttggggtgtgccagcatggcgaagagccgggcctcctggcgaacgctctcggctgtcacactgatgtcctcatcggggtcctggcgagctgccttcacagccaccagctcacctcgccagctgcccctgtacaccttgccaaagcctccaatgccgatcacctcctccagccgcagctcctggaagctggccacctcgcaggggggcgggccgccaccccgagacacatagttggacgggaagatgcccacctggccacccacctggcccgcccaccagccctcgtctcctgagatggctgcgtcccgggacagcacctccacacggtcacccttcctcagggccagctcatcctgcccactgggctcgtagtcgaacagggctgtccacaccgggttggcataacccgctgcctttggagacccctcaggccggcctcctccaccgcccccaccacccccgctgccactgccattccatgaccctagagggctcttgaggaagaggctcttcaagggctccatggccgggagccggcgctgggatgtgtggaggaccttctctgggtgcccgtggtccccacccccgctggctgccaaggccctagtcccggaacctgggcatccgggccctggccctcagccccagacccacgcctctctggggagccaggagtgttgtctcccggccccccgcatctcgggcttctggaggagggcacccagggcagtgtggtcaggccgggggggtggggccccggggcctccggcgcctcaccatggctagcttggagggacccgagcttccctcggttctggagcagtcctgggagcctggctccggcccccgccaagtgtaaggtggggccttcaggggcagcgcctcaactccggttgggtctttttgcgcagggggtggagggagcgtccgcagttgggccgagactgcctgttcctggccccgtctcctttggccccgacggctccgaccccgctcccttcttcctcctccctttgtactttggccccgggggcgggaggcagaggtggagggtggagtttcacttttttccgctcttctccctcctgcaggaaacagcatcagatgacgcgggcggcctgcaccgctcccctcccagaggctccaggcggggagttcccgggtaggcgggccaggagaggcagagagggaaagggcagaaccagatcccccatcacagcaggcttttgagatctagaaagaaaagcccccagctgcgtgctctgctgcctagggtggaggttggtctctgctaaggatgggccatctctgccctctgcatccgcatcggcggcagcaaaacggggttacagaaccacacttgggaagggggtgaacccgagtctggtcttggctgcgaagttgtgggactgtgcgatccatcgattctgagcctcattattttctttcttttttcttcttttgagacggagtcttgctctgtcgcccaggctggtatgcaatggcgcagtctaagctcactgcaacctccgcctcccgggttcaagagattctcctgcctcagcctcccgagtagctgggactaccggcgcgtggcaccacggccggctaatttttgtatttttagtggagacgggtttcaccatgttggccatgctggtctcaaacccctgacctcgtgatcctcccgcctcggcctcccaaagtgttgggattacaggcgtgagccaccgcgcccggccattcttttcatatatgatatgaggacgagaaagctctgcctcgtagagctagttggatggggtggggaagactggaggacagacggaactggctgcacctcaagctcttggagtggattgcctaaggctctcttcttctcctcacctgggaaacaatccgcttcttcatatcccttccccattggcagaaacctgagacttgtccagaactttgcccaggattggattcagaatagctgagtcgccctcacaacttctggatagggctgccccaattgctttgagcctgtcactttaagaaagacgacgctatcctatttcgactattcctgcctgttacggaaggttgttctctacaccctaggtctgagctctgacccggaagtagacgccgctgggagcgaaatcggtcgtgacgtacgaggtccagcattaaagggggcgggccgagaggggcgtgcttcggtagtgcagaactctcgctgctactaggggagtccacgcctccaccttttccccgcctcctgtaactcattggaagagctgtgcgccaattactttgccgttacccaatggctactcaactgtctctttggttccgcccagtcgtctaccctgggttggcaacgcctgggtctacgcatgcgcccaaacgcttttacgctcgaacttgctttagtcctggagtctgcgcacgcccaaagggcacccctcgcgtcctaccgcgccatcacctttctgcgcttgcgcattcatgccgtcaagttttccttttccgggtcccaattggaatcgttgggcgcatgcgccactgcaggctggcggttcgcggctccttcttccggcctcctccttaggccggcaccagcagaagccgggcgagcgcggagccccaagcaagtgacctgcgaccccgaaagtggaccccagatcctggggttctccctggtccggagactagggagctgtcgcctgcaccccgggagcacccaccccacgaccacctctggatgccgccgacgggtacccggcccgtgccccgcgcctgcctgccggctcggcccctcggagcaattctgggccaggagtggggacccggaccccgcccctgatgcagccccacccccgcgtccgggccttgcaccactgactgtcccggccggccccgccccctgctcgcaccctcgcgcggccgagcccccctcccccgctgggggaggccatggcgtgagcgtgaggccgggccccggggccctcaggcgccagacggggcatgggccgggggccgcccccatgagggtcccgggagggggggcgcgggcagcagcggcggggccatggggtcgcaggtgttgcagatcctgcgccagggggtgtgggcctcgctcaccggcggttggttcttcgacccgcaccagagcaccttctccaactgcttccacctctatgtgtggatcttcctgctcatctttcccttcttactgtacatggtgagacgccacggccacctgtaactccagccgggagagggagggcagcctggcagggattcagggcagtgccctgggctctgggacgtggagagagaggaatcactgcagagtttgggtctgtgtggaagaggggccaaagtcttcctttcttggatcgagtgaccttgaaccctacacttaatctcatccagctaagcagaatacagagccctttgtcgaggtctgtgtactggttgtgtggagaggtgatgaaattttcttgtgagtctgtgaatcccagctatgatgttgatggcaggtacatcctgtgggggcgaggcttt

SEQ ID NO: 56339 - DNA, 1213 bp, Homo sapiens
cggggcccaggcgccgagctgcaggcagcgggctcactggtgtggggagtgcgcgcggcgcccggggcgcgggtcgccgccggggctcaggcgagcggccccgaaggcatcgaggtgccctgcctgctgggcatctcggccgaggctctggtgctggtggcgccgcgcgacggccgcgtagtgttcaattgcgcctgtcgcgacgtgctggcctggaccttctccgagcagcagctggacctgtaccacggccgcggggaggcgatcacgctgcgcttcgacgggtcccccggccaagccgtgggcgaggtggtggcgcgcctgcaggtgagctggagtggtaaactggggcccctgcgcgcggcggggcggagcctgctttggacccctccctcccgccgcctttgtcccctactcctgcggaagggaaagtcgaggagggcagagccagccccggggcttggcaaggccggaactggtgccctcgggtaagcgacttctggtcttcatccctcgggcggtggcacacgcggccctcggggactgtggaaagttccgtgtggcctgggacgcagtccagggggcgggcgctggggcggccccacctcccggcagccccgcccactcgtcccgccccgtccgcagctggtgagccgtggctgcgagacccgcgagctggcgctgccccgcgacggtcaaggccgcctgggcttcgaggtggacgccgagggattcgtcacgcacgtggagcgcttcacattcgccgagacggcggggctgcggcccggggcgcgcctcctgcgcgtgtgcggccagactctgcccagcctccggcccgaggccgctgcccagctcctgcgctcggcgcccaaggtctgcgtcaccgtcctgccccccgacgagagcggccggccccgcaggtcagggtgccggggacgcggggaggtgggagggccggcagttggccaccgcgcagtctgcgcctcccgggtcgccatcagcagtttcaggaacccagtgtggatacctttccttctggaaagaatctcccgtctcttagcccgtctgagcctgtctcttcctgtctctgtctctctctctttctctgtccttccttcctctctctctcctctctcttttttttttttttgagacgaagtatccctcttgttgcccgggctggagtgcaatggcgtgatttcggcttactgca

SEQ ID NO: 56340 - DNA, 1810 bp, Homo sapiens
aaaaggagaggcaggctggggatggctgaggtcatttggaacaggatgagtttgagaggcccgaggacgtcagagtggagatgtccaggggctggtgcgcaggggagagagatctgggttggatacgaggacttggagctgctgagccatgagcatgatggggtcattcacgaatgagagaagaaccaggagaggtcttcgtgggtcacgggaggtcgcgggaccgagaaagccaagaggagggaggcgcagcctgggctgcagggccttggctccctggtttccctctgggcctcgggtcgcggacctccggtcggggtccctgcgcagctcagccgtcggcttcctcagcgttaggagccttctcaccccgcccgcttcctccccgaccccgcctcccaggcgctccccggcagcttcgcccgggtcctgacctggccaccgcgagcccgggctccgcccctcgcgtgggagttccgccgaggcccgccctcgctccaagccccgcccctggccgcccccccggagccggagccccgtggaaaacgccacttcctcgacggaattggcctgccgtctcgccggcgccgcccgtcggagcctgcacccagggccttttctgttcctaggagactcgctgaattttgggacgcgtcccgctgacgataactccttttcccctgctattgtcctcccgcgacggtgcgaagcccaaacgaagacgccatcggcctcggcggggattttccccagacgctggacccggcctccggttgctgcgggctccttgtgcgcctgcgcagtcgagaagggggcccacgccggccagcgctttttgctgctgcgcttgcgctggggcaaagcggaagtacgtccagctgtagcccttgtgggctgcggctgggcctttgttttggcttcctgaggctgtggattgaagatttcaccgttcctcccagaacagagtatcaaagcatcggtgggccgggtagatctttacctggcaccacacattccccaagagaagcacacactccctgggccacccaaggaatttggccccatcacatctttcgaacatcgtttctcttacctctgacgctggctagtccctctttgacatccactctcagctgatctaagacctggagctaatggggcctcttggaagactcctgaaactgctccatccccacagccagcgggctctactaggctctcagtgtgctaggactcttgccttagctgcccgttttcatccactggacggtaactcggggtttccaagggcattctcagactgcaagctctcagaggacagtgcacgcattcacccagctctctaccaccaatgtctggcctgatgtgactagcaaaatgtgtgctcagtgtttgctgaaaaaaagcggatctctagccagcttggcaacagatttattagttcagagtagaaagagcaagagtccaagtgctttgattgttcagtaaaaactatgcctcctgactggagagctgccagcctgctctcccccactcttaacaacttaccctactattaaggcacttgagaagagggagagcaaggaagtcccagaccaaaccccttctggatcctggagagagccagtgctgttgcactggtttccttcagccatggttgagcaaggaaagagccggcagagacctctgtagggcaggaaggccagcccctcaaacgctggtgttaggcacagggacaatgccagtgccatacaggggctggtatctggggcgttattttgattaagctgtaatgaatccatgatggaag

SEQ ID NO: 56341 - DNA, 2651 bp, Homo sapiens
ggacccatccgtatcccctggaactcatctgctagagtaaacgtacaaatagataatttcaagacaaaggcagtttacttgcagagctgagtcagggcaaggagtgaggaattctgccctgggtccagaaaggagtaacactgtagcggctacttcatagcccgcctcctgtcccctcatgctgggcctcctagcctgcagggacctcacctgtggatgcagcggtccgggcagagctcagcctcatagaagccatcccggcagtcctttcctacaagctcgtgggggtgaggccggtgaggagggtccttggtgaccagggagatgcgcactgtccctggtcctgtgtagccattgatctgtccaaagtacagaggcccagacatccaaacctgactcccaaacacagagggctggggttccacagtcccttccccgcacaccctggcgcagtgctgaccttgatggtggggtgggtcttggtggtatctgtgctcctctcgcctgggatgctgcccgcggagcgcccctcgcacttgtagcggaagcgcatgccccgctgcttgggctgctcaatgatctccacataggggccagaggcctgggctggctctgccaggggacaccgcagccccattaggcggctgcccccactgccctaccccagggagcacctccccgaccgccgcgggggccacttacctgccgggaagatgagggggaacagttctgaaaggggagggagatcagggtcagcacacacccaatgcccattctcacaaggaggaatctgctctccacggagaggagaagccaggctccctcccaggggaactgagtcaggacctgctccctagaacctgcggtgaaactaaggggtggaggaaaggaaccagaaacacctgcttcttgagggaaaacggggtaaggaatccttcttctccagagggaagctgaatcagggcctgttgtactttcttaaggaaaattgagggagggcacgccccacctccctccagagaggaaactgaatcagatgcgttctcccctaatagggaaacgaagccagagctgcccccatggacggtgtggagggaaactgagtcaaggttccctctgctcccccacccagggaggatgctgagtcaagggccaccccctccacccagaggggaaactgagtcagacccctccccgcctgccccgccccgcgccaccatccggcaggccgaccgctccctgcgcagcgcccgtcggcgcaggaaggggcggaaagcggcgcgggggctcccgccacagccgcggcggccccggcgatgccaccccgcggggtcagagggcgacctcaccgtccatggccggggtcccgggggcggggccggggtcgcagctgggcccgcggcgtgcactacagacgagccattcgccagaggcggaaatgcgccgcgcggcccgccgtcgcgtcactgcccggaatccggccgcgcctgcgcgctgccccgccgccgcccggcgcaggggccgggagcaagtgcacgccgcgcggaggacgaagaggctgcacgcacagccgctgccgggggtcggggccaagtgcgcgcctcgccgaggacgaagaggctggcgtgcccggtggctcggctagctcccgggtcccggccccgcctggagggtgggtccgccgattactcactttgtttttaggggatttcagggccccctcccgccgatcggcggagtttggtgatgtcactctgggccgggtctggagcaaagccagggctactgggctgcggccgcccgccccgcgcagggaaaagcccgaccgggccttctgctccgcagaggccgggtggttgaactccgcgcgggtttcctaaccgctaaaggtgcctttcggtggtggctgtctcagaagcacgttaaaatgtcctacccaccccaatctagatgcggctgtgggggaatgggagcggccggacctcccagcctgacagtgcatcaagagctttgcggagcctacagcccggatgggacgactgaggccctcccgctggcgagctggccgagggctcgtccctctccagctaaagcgccagcttacgatacagccaaactgccggctctcatcggctgtgggagcaggaggcccccaggggtaaatcccggagcctcgtctctgaagcctggcgcttgtgtctcagaaggtgcgggacccacagggacacttgaatcagcaggctcacgaccccccacccccctgcccccgcctgtgtttgccctggacctccagctagggctgaccactaattctgtcatgtgaccccacagtgcaggtagctcccccaagaccaagcccaaggcgcgtccgtgtggaggctggggctgacgcacccccaccccaggcctcatccccaaaggaggatgctccactgcagggggcggagtcttctccagatggagaaagacttttttattttctctgaattcgtcttaaattaggaaatcatgtgggaattggaaaagattggaaattctgacttgtttcccaggctctgaagaaacaggaagagaaaagtgaaaatagagttagcaccccgcccactcatttcagtttctccagtggctggccctgattagaaaagtgttta

SEQ ID NO: 56342 - DNA, 1724 bp, Homo sapiens
catgattagactggaggcagctgggattacaggtgtgagccaccatgcccagtctccaaaccctgtttacacaaaaattttaaaaaactagccaggcttggtggtgcgcgcctgtagtcccagctactagagagcctgaggtggatcacttgatcccgggagggggaggctgcagtgagcggagattgtgcctcgctggctgcactccagcccgggcgagagagccagaccttgtctcaaaaaaaaaaaaaaaaaaaaaaaaagcctaatatggctgagggcggtggctcacgcctgtaatcccagtactttgtgaggccgaggcgggcggatcacgaggtcaagagctctagaccatcctggccaacatggtgaaaccccgcccgtactaaaaatacaaaaattagttgggtactcgggaggctgaggcaggagaatcgcttgaacccgggaggcgggggttacagggagctgagatcgcgccactgcactccagcctggcgacagagcgagactccgtctcaaaaataaatatatacaaattaaaaaagcctaatatacaaaataaagctaggaatcttccctgagtcctcttgcctacggaatgaagtccacagacttgggggagcgttcgaacccttctaaggccacttcctttctccagcctctcgcgcccagttgactcccggcaacacctcccgccgccacaaggagacgcccgaggacttccctccgacaaagccaaaaacggtattgccacgtgacccgctccgcatacacgtgaccagcttcgcacccggtgggcgtcacgtgacggactcagtagaccgccactggctgtgcacgttatggggtttccacctagggctcggcctgaggcttgtaacactccgttttcccccgagtcacaggggcagtcttgcccctcgcagctgggtcgcggtgtctctcaaaggtccccctctacaggggcttcgtgaggcccgggcccacagggcgctcggtcccggaagtgacgtctcccagaggggccggaagtggcagtggagggagggaagatggcggaggtggtgagtccggtgcccggggcggggcggagggagccaggggaggtgggtagagcccgaggccccccagtagccgaccctggcgtcgcgctgtctccccagggggagataatcgagggctgccgcctacccgtgctgcggcggaaccaggacaacgaagatgagtggcgtgagtgacgttggggggcgggactaaggaacctgagggcgaggggcgggagtcaactgaaatcccgggatggggaggggcgtctggaattatggggcgggcgaggcgcagatactttgatgaaggggcgtggctcttagctgctccgagaggtacagggcggggcctggaaaggggtggcacttgtgactgaaggaggcttaggagagacctaagtgctggagcttagggatccggcctgggggtggagttcaggtcgtggaagggtggagtctcatagcctggcctgtctaaggcccctgtctatgctattctcatagccctggccgagatcctgagcgtgaaggacatcagtggccggaagcttttctacgtccattacattgactgtgagttctgggcctgaggtggggcatcagggtagggttgggggacagtctttggcattctgtcctgagccatccccactgctacagtcaacaaacgtc

SEQ ID NO: 56343 - DNA, 1113 bp, Homo sapiens
tacgcttcccacacactacccagtagaatcctccaggctccgtctgcgcaattgtgctccccagcccatccacccgggggcaagacggaactcctcgtctactcaccgctgccgcaaggctgggccaagttaaggccccacgcactttggcatccgggccagggatggtctccagaccccacagggtgaagcggctgaagttggcagtggctccaatgaagcggtcctggggaaggggcctggctcagcatcgggactacagctcccgcccgcaccccctttcaaccctatccctttgctcacgaagtcccgctccagcggctcctcctcttggtcgtcagtcccggaatcccgcaaggggtctggcttccccatcgacaccttcttctcttctgtcaccatcacgtatcccacgaggccaggcggcaccgccacctcctctccccgtagacagcggccccgaaacgacacttcgagtcctggagcgggaggcgcaaagggcctcaggcaggacccacgctgggtcgagcccggagctgccctcccgccacctccggacggaccacgatccccaggagcccaggcgatgagaagcgcgcaggccggcgcgggggctgccgggagccgtagtccggccgcagggctcaccctcggggccctggcggatggcgggcgtgaagaagcgccccaccggggcgggcccgtccaccgcaacctcgcagggcagcagatgcagtgtggcgggtacggcgtcgcgcaatgtggcggagcgcaagtggacgcggtgcctctcgatggccgcttcgtcgccgctctccatcctccctcctacgcgacgccagggctcgcgagctgacactgaagctggcgcggaaagcgcgcaggacctctcaggaagcctccgcggggcctcacgggaagccgccgcggagcttcacgggaagtgtagtccccttaccccctaacgctttccctgggttcaagtcctagggttttccagttgtgttttgtttttttccttccttccttcccccctcccctctttcctccctcccctctccccctctccttccccctcccccctccttccccctcccccctccccctcctccc

SEQ ID NO: 56344 - DNA, 1514 bp, Homo sapiens
ggggagaccttatccgtgagcagtccccccaggccagccccaacccgggactggagcaccaaggtgttgcgcaaagcgagggccagcaacaggctgagtggctggacagggccttcctgccccagcaggccccgcagcaaccccagggagccccccagcagcccgggcttgcagctctctagctctcgcaggcactcgcaggccgtggcctgcaaggggcgctgttccgaggcggggacaaagcctcgccccagatcgctacccgcggccaggccgagcagtaggggcaggagccggcaggaggcgcccgaggtggggcccagcgcgccgcccgccgccagggcagtggtggccgccagcagcagtggccgacggagagctgagggccgcgggggtaggaggaccaaggtgtccaacagggaggtggcggccacttcggccgcagaggcgtcgggccacagctgcgcagggtactccatgctcagggccagcagggaaacctggatgggggattaggagggaatcacgaagatgaggttcatgacgcggcgggctggggtgaccctgcggaacggcgcaggggacgcgtgggggcctaccttggtctgttcgctcagcttctcacttctcaggtcgctcagcaggtcgcgacccaaatcctccccctcgggacctgccatgaaggcagacgggctggcccggaaggcccccaagcgctgggcccaggcgtcccggctcaggggccccatggtgaggcgcgcgggcccctgcgcagggaagagggaccctcaggccgcagccaccgggagcgcggggcccgctgccgaccccgaggggctgcggtcacccccagacgccgcgcagatgccggcgggacccgcgcccggctcccacggtgagaccagggctctcggggccgacgccagagctgggcgccggggccctcgcgggacaggacaggagcagggcgggggagggtgcgtgccgagagctcgttaggccgcctccctcccgcccgcggcccgcaccgaaaccacagcgccaccccggcccccggcgccggcggtaacgggccgcgctcgccgcctgactcagccgccgcgggcactcaggccggccggctccttccgggctggcggcgcggggcggggcgcggcgcgggggcggccgagtccgggcggggaggggcggggcgtaacggggccaccgcctcccgcaggtgtcgactcgcaggtttcgcgggggctgactaactgtcccgccgcgcaggcccccttccccgaaaccgccgcaggccggggcaggaaaggcggaggggagtgggtaggggtggcggagcggggtgggcctgggccccagatgccgggtaccgcggcgcagggctgcgatcccgcggccctcggcggacagcggcccggtcccaccagcgcccgccaagccgcgcagggcggcagccagcgcgccccccgccggcgcccgggcacaccgcaccctgcgccagacgcgcggccccg

SEQ ID NO: 56345 - DNA, 1298 bp, Homo sapiens
cagcctgggcaacagagccagaccctgtctccaaaaaaagaaaaaagataaagagaaatgctagtggtaaaaaaacgtaacttaaagcctgtacattccccgcaggggggtgtttatggccttgtatccagctggctcttcccagattcaaaagcaattattccaaaagaatgctttatggttaaaattaaaccacagtccaaaagctattagaactggactttgaacaaatgccaaagaggacagttatgaacatcttcttgacagaaaaagaaagagacccaccagaaggaagaaatctaaaacaaacaaaaaattaagtaaaatgttgaaacctgttcaaccaccctatttcagatagaacgcactttttaaccacattaggaaagcgaaactcgccgtgggtggggtggaaacgctgccaggtcatcctgtctaaagaaactctggtcgcgcctacctgagggacgtgcgggcgcggctcggcccccacgaggcgccccgacaccgcgccggccgcgcggctcccgcaggcacagcgcccgccccggcgagcaccagtgcatcaccccggtgacgtgggtcacctgccctgatgcgttattccgccgcttgatgaagaaaccagcatttaggaaaacacagaggcgcacattagcgtgcacgaaatcgcccgagggagctgagagctggcgaggtcacgagtgccgggctccgggcggggggtggggcagggcggcggggcaaggccggggcgggagcggcgatccgaggccgggtcagcagcgccccctcctggaacgccgggagcgccgcgcgcgcggatgccgctctccttccagcctggcgcgccgctgccccctatcggacaaacgctttgaccgttggctaaagcaagtatcagacgtcagcccctccaggtggcaagcacgcctggccaagcctcagtttccacatctctcaaatgggagcgatggcaacactatctacccttgcacacctcagagggtgaccaggagcaaatgaaggaagcaccgctctttcttcctgggccggcctcgctgcttaggccccagcaaaatccaggtcgcctccccgaggtcatctttgtcccccgtgtctgaactgggagcacagttataaaaccagtcatgttgttctgagagtggcgtctctcttccagtagcttcgataactccacaaatgtatttaacataattttcaaaacattttttcttataagcatgtatcataatttagttttccggcaattatccattcactgtctaaatccccca

SEQ ID NO: 56346 - DNA, 5527 bp, Homo sapiens
aaccccttccctcattttacaggatagaaatgcaaaactcgtgaaaagcagaaccttgaccaaaatgtgaacccagaattaaaagatccaccggctactgactcatttgctactcacagtacttgctctcagcctttggataaaactggtgatttagaacttcggatatggaggacccaaacacctgagccaagactcctcttcagaaagagccaagaccccacaatgctagatgggaccccaaggacaccgaacagttacaacaaacccaccagaactgcttaatacagttactacacaaacgacccctgttcccagctaggctctttcccaaccaagacaagaattgcaacccccattaaggaccctgcccgacaactcccttcttccgggaatggtgctaggccccagaagtcgctgataaaaattaacatgccaaactcaagtgcccagaggcctcgaggtctttaaactcttcctactctgcgtcgtgcttcggggtgcccgagccaggagagggaggggcaatccaaggtaaatctggtcccccaaactccccggaactgcagaagaagccggccacgtgactcggccgcatccggagtgggcggggacaggagatcggctgggcccggccccctcaccaatgcagaaacgcgtatccgagaggcagcagcatctccaggtccctaaccctgtggaatcgccctaaaacaacgggtgtatcagacccatctcctgcaggcaggagcctgggcaagctacataaccttcggttttctcagccctcgggccgtatacagggggcggggtggtttccgggcggtgcccgcctgggtcacttccctaaactcggctccaccctcactcaggcccatccgggaaggcctcgctggcccagggcttcggcaccggcggccgggcctgagcgtgcgcgcacgcgccgacagacagcgccgttccagccctcgcccgatgcacgggtgagaacgcagctcgttagatgcgctcccgaacgggccgcggtctctgcgatgccccctccaagccttgcggtgcaaggccttaatcgcaggcacccacgccccaaccgggaccccgtcttcccagcatcacccctcgccgcgccagcacccgcccctcccgggcgcaggcatccctgccacctgctcccgagacggacccggctgccgagggagggtgacgcgcagacaggaacagccttgggtggggcgcgcgcgccgagacctctcgcgcgctttttcctcgccgcccccgggccgggtttggacgccgcatgctccagtcgagagcgcgcccctaagaagaaaggcgcgacgccggccgttccgcgaggggcgccccagcgcgcgccccgaacccctccccccgcggccggtgtccgcgcgggcgcaccagcgggtgggggaggggagcccaggcggagcgcgagcgacgtccagaccggccctccccggcgcccacgggcgcgcacgcgcattccggcaccgcccgccccttcgtgcgagaccctcatcccgcccggggcgctgggggagggggtgcggacgtcgctccccagtcgcttcccgcgcgcaggcgaccgacccgcagccgcctccctcaggcgccgtggcctgccgctcaccatgtttccggaaacgaaaaggagagggcaccgagagccgcagaagacgagagcgctgcagccgctgccgggacccgactgaacgcggcctctcccggccccttccgtttagtaggagccgcacaatgaggggtggggcgggcttccggcgctcccaccgcgagccgacgggaaatggagtccgctggccctgcgccgccgcctcgctcgctgggtaacggagtcttcccgccggccggctccgagctgcagtgcatgtagggaaatgtaggcccaggtcctgggcggcaccgcagcgcgcagcgcgagcccattggtccaatttcccaggaaccgctctgagcccggcgaggcggcgctcagtaaaatgacccgaaaacgatccccgactaagcggctctttatcccacagcaaaacggctttcttaagacccatctggtattatctggatcccttggcctgaaatttttgagtgaggttagggttttgcatttctgaatcgaagcaactattgattagcctggaatcccgacctaaagcaaaggaaatcacaagtatgaaggcgtcgtcagtcggataaacactagtactctgcatgtgtaaagccactctcgtctcctgaaaaaaggccatgtccaacgtcagtaaaacaagaataggaggaaaaggcacaggggaaaggtacaaggaaatctctgagagctttgttcttgtttaaagatgtttggcaaagtcatgaggcgttaaagggtaaagacgagggtttgtgcattcaattcaaggcttctttacatgcctttacgtgccaatgagaagaaatagatattaaaccagacttgaacccagctctcgagttgatagccaggtacatggttattctaacatccgcaaaactgagacaagttctgtggtagtatatgccttaaaaaaaaaaagaaacgagcgggggactccgggatgattttgttgttctagaacagtgaccacagcctcacactctgcaggaaaagactgggtcgcaaacaagtcagaggcaaacccagaaagggaactgggggccctaatcctataaacggaattaagggtgtaaacggagagcgatgcctgggagtggggtaccttgcagagcataccgggggttgtagtcggggacattccacagcaccgcccccgcccggactcccggcgctccaggtggagacagcagcttgaccccgcctcccgcgagcgaccctacatgaatatgaggctagcgcccccttttctgagccttagagtttccaagagcaacggggagagagaggggggcttcgcagttaccctggagacgcgctctcgcccgcccccagccgcgggatgccctagatgtccttattaggacaagagactcgagggggcggggccagcccgacagccggcttgaggctccttataaggccgcggcgggcgggaggcgggagccggagcccattggtccaatttagcttggctggggctactgcgccgtgggctaggcacagtcctgaggggcgggactggagctctggcgcccacctctcccttcctcgcaggctggagacctgcgtgttgcgacttccggcatagcagctagaggccgggtgctgcttcaaaccctggcgggtcgcctgtgtccaactcagctatacgtgtctttcaggcttctcaggttgaagccctttgtagggtttccatcttcaacctccctgagggtctcccacttccgattagccacaaaaatgacgaagtgttctcccctctacctgtgtctgggcttcttaacccgcagcctgctcctccgctcccaaacccaaccgcgtgcccatctcaggcctccccaactgccaggatgcccaagcacctcttacttacagtcctccttcctctaggcctctgacccccgacattccgagttctattttgggccttctcggcacgtccccgacttcctctccaccacacactctttgccctgtatcccggggatgaggatcaccatttcctccaagggtcctgcagctcctcctgccttacctttgtgtcctcatccccggcacccatttctgggtgtccctcccaccaatacgtttgcacccgtttgtctcctagcccccgcctctcctggactcttttcaagaccagtctccatctccagcctccttcaagcttgaggctgaagctgacaatcttaagagaccttagagccgccaagctcaggttagtccgttaagcgccgcccagccagtcctccccgtcacagggggcgctgtccgccttcctctcgcctacacaaagaccccgctctcgaatctggggtgacaggaaggagccggtccaggctccgggggctgggaaagggcgcgtctcaaaggctggctggagtggagccaagggaaaagatcgttagagacagcgcccctgaccaaccacttagagcagcgcaggggtgggagggcggccgcaggctctcctctcgttagtgccccctgtgtttggggccccgtgatctcaacggtcctgccctcggtctccctcttcccccgccccgccctgggccaggtgttcgaatcccgactccagaactggcggcgtcccagtcccgcgggcgtggagcgccggaggacccgccctcgggctcatggcggccccggtccgcctgggccggaagcgcccgctgcctgcctgtcccaacccgctcttcgttcgctggctgaccgagtggcgggacgaggcgacccgcagcaggcgccgcacgcgcttcgtatttcagaaggtgggtcctggcgtggcccgatgggaaaagctgctggccaggtcaggcctgccctgaccaggtaccctacccctgcccggccaggcgctgcgttccctccgacggtacccactgccgctgcgcagcgggaaggaagctaagatcctacagcacttcggagacgggctctgccggatgctggacgagcggctgcagcggcaccgaacatcgggcggtgagcgcctcggaaaggggtcggtgatcccccacctcccccaggtggagcctccgtactctcctgggagcccttggcttttaagctccccactcctgtcccagttgccgttcggcctagggctagtggctggcgctccctgagcctccctcaccggtctcacgtaaccatctgagtaggttgcatcccagatcctcgcagctgccggattcgtggagtgtggagttaactcttttctctcccgcaggtgaccatgccccggactcaccatctggagagaacagtccagccccgcaggggcgacttgcggaagtccaggactcttccatgccagtgaggaaggggcaaggggagtggaaggcaaagtgggagtgcgggagtatgattttctggcttgggggatttggcaagcctgagtccaaatctcaccagtgatgcctggccttgagcaaatgacttatcctcttttcgacttagtattttaacctgtgaatagaaatattggtaacagccaatgagagaattccatgatcaagctacttaaggatcccagctcagttagttacggggtcaccattattgagttttcctgtctaattacacctgtcctgcagcgcatggtagaagtgaggccaggctgggcagacacccccacccactgccccgaaactgcctgctgttttatcccagatttgcagcggatcatcccatcacctggcccattttacagagaaggaaactgagagacaactgagtgacttacccagggccacaaagcctgctggggacttattcaaagatgactggctggctttcatgttcagaactcctctgtacctttcaggttcctgcccagcccaaagcgggaggctc

SEQ ID NO: 56347 - DNA, 707 bp, Homo sapiens
cttctcgctccctcctgccctccacccccaggaccgtcttcagccgggtggtcctttcactacacacggcctcccccacaccctccatccacaaagctacaagtttgggggcgagggcggcagttcccttttggcacaaaatgaatggaagcccctgagaaggagggcagggctgatgtcggacgtgcgggatgccagagtcgggtgccaaggcgcctcctcgacctcctcgcaccagcgtcccccgcccggtttccgcctccgcccgaagtgggggcgtgtccttggggcggagtatgggcggggctggctcccaggaagggcgtggcctctgtttgcccacgtctttgggcggggccaggcgggaaagcactgcgtgtccggggatcccccgcctggggcccgcccttcctttccccttgccatccctgcttatccccgcagtcgccctccacgtgaccccggggagggagtctgccgaggaggggacgtgctggtgggtcccgcggcgagcgcctggggctcaggtgaactgcgcagtgcccgctcctcgccactctgccaccaccatccctcccagctgctggggcagaaggttaaataatagctctttaggggccggacgcggtggctcaagcctgtaatcccagcactttgagaggccgaggcaggtggatcacctgaggtcaggagttcgagaccagtct

SEQ ID NO: 56348 - DNA, 1790 bp, Homo sapiens
ccagcacctcccgaacaaaggcctcatcaaaggcatagtaccttgtggagtcagagaacaccattgaccctccataaaagacaggaaagggagtctggcggggcctagcagggcctaggtctgaccccttccactctcaactttctgatggctgggtaaatcccatccctccctgggcctgtttcagccggcaaaatgggtatacagtcagactggttgatgtctccaccatcccagagggtgagcacctctcgatgagtagtgcctgccgggagggcggaatctggaagatgagctggtgcagtagcttgggcggcgcatgcagcagccgctcgagcatgtggaaggtgcggtaatggtccatggtgtcgctctgcagcaccgctgccgtggcgccagtctgctccaggattcccgagcgcacccgcagggccaccgcgtcggtcactggaaagcggacgctagcatcaggccccgccccgccgacgccagaggcccttaagggtttccatcccagacccctataacacctcttattcccaggcgctcgcccacttccctaaaggatgcccaagtcttagccccgccccctctcccattcaacacaaccgctccgccgactggcttccccacacgcccctcacggacccgagtaaccatcgagccagaggcgatacacgtcctcgtcgataagggtcgtgttccccacgaagatgtccagctcactggtcatggcgacgcccggggccgcagcgccccgagcaggagcgagcactgctcgggactggcgcgccgccttcaggccacttccgggagcgccgagattccgctcgcggcatcgggacccagcttatgaccacttccgggacacagccagtcggggaggggacggggcgggagcggcgagggaagagagggggaggcctgcgcggaggagcaccgcttcctcccgccgggagggggagtcccgggctcctgcgtcctgtctccctccccggccgtctgcaggagcacgaagggagtgcctcctcttcgtctcctcggtccccgtaacttctcccctcacttcctcctggcttttctcccaccttctctgccctcttcgggacctcctaagtttgacctgtatcctaaacttaggggtttcacagggctctatcctaaatctccgcaaaaatggggtatgacccgacttcctcgggctcttgctggagactggtttgtccatcctgcgcatgagcacctctcctgggtttggggcacctgctcccaccttggttttaatcccacccccagccccacgagctactgacgtctctaattctgcccctccgagctctgcctggaagtccacatccggaggggccgcctatcggccaagtctatccacactcttcccgtaagcccctcaaaagctcaacatattctagacagacctctgcctctccccatttgtttctttcctgcgtccctatctcagtgacagccctaacatccaccagttctcatacgagaaacctgggcgttcttccagactcctctctccccacattcagttcggctgatttgcctcccgaatatttctagtatctgtttgtcctctccacccccactgatgctgccccagccgtctttctgcttagctctccttgctcttgctctttgacaccgttactaatctccctgtttatgtcccctccccgcagggtccggcccacacagatcagcccaatctttttaaatacattttttttttcgagacagcgtctcgctctgtcgcccaggctgga

SEQ ID NO: 56349 - DNA, 1424 bp, Homo sapiens
atccttagtgggccgagacttccgaatttgatcaaaggtaaagagggactggagagcggtccatctgacttctgtgggggatgggcaggagtcaggggcggacgcctgaatcttgtttctcagaagagccgagaggcctaggctcaagcttggggcgatccggtacttggaggttcgaagctcctagtttcgggttgagaccgatgtggagggcgatgacgcgcgggttccttgacatcgaggatcagtaacacccggagtgggtggggaacgaggggggcggcccctgagctcaggccccgcccctttccggggacgtttcaccggattggctgtccttccataacgacatgcggccccgccccggcgcgcgccccgccgcgtgcccagcccgggtagctgctgcagcctacgctgcctcggccactgcctgccgcgtgcggagccggagcccgagcctgagtggcgccgggcccgacgtggggctcctgggccgcggcggcgggcgggcgatgctccagaggcctgaccagccatggaggccgaggcaggcggcctggaggagctgacggacgaggagatggcggcgctaggcaaggaagagctagtgcggcgcctgcggcgggaggaggcggcgcgcctggcggcactggtgcagcgcggccgcctcatgcaggaggtgaatcggcagctgcagggccacctgggcgagatccgcgagctcaagcagctcaaccggcgtctgcaggcagagaaccgtgagctgcgcgacctctgctgcttcctggactcggagcgccagcgcgggcggcgcgccgcacgccagtggcagctcttcgggacccaagcatcccgggccgtgcgcgaggacctgggcggctgttggcagaagctggccgagctggagggccgccaggaggagctgctgcgggagaacctagcgcttaaggagctctgcctggcgctgggcgaagaatggggcccccgcggcggccccagcggcgccgggggatcaggagccgggccagcacccgagcttgccttgcccccgtgcgggccccgcgacctaggcgatggaagctccagcactggcagcgtgggcagtccggatcagttgcccctggcctgttcccccgatgattgaaggcactgcttcctccacgccgacgcccgcccggattgctccccgagccccgggaccgctgtggacctcgggacctggacgccgtcctggctgcgcaggaggggccgctggcatggactaagaaatcctgacaccaagaagggcccctcgctcttgctggcagggcagcagggggactgaaggctggagcggagggacttgctgggggttggattgggggtaataaacccggacggaagcggagcccacggcctgggcagcgtctgtttggtactcgccg

SEQ ID NO: 56350 - DNA, 2611 bp, Homo sapiens
tgtatttttagtagagacagggtttcactatgttggccaggctggtcttgaactcctgacctctggtgatccacccgccttggcctcccacagtgctgggattataggcatgaggcaccgcgcacggcctggctaattttttttaaatttttttgtagagacagggtctcactaggttgcccagggtggtctcaaattcctgagctgaagcagtccacccacctcagcctcccaaagtgttgagatgacaggctttagccacctggcatggcaggctgtcccaattctaatctcagctctcagctacttactggctgtgtgaccatgggcaagttatttaacctccatgtgcctcagtttcctcatttttaatattgttacaggtgaggattacaggatttcactgatgttaagaagtaccctttaatagctctgaaatcatagtttaattggcaatttaaaaaattttagtggactaggcatggtggctcatacccagcactttgggaggctgaggtagaaggatcacttgagctcaggagtttgaggtcacaccgggcaacacagtgagacttcatttctacaaaaaaattaaaaaattagttgggtgtggtggtgcgtgcctgtggccaggtcgcttcccagctaggatctcagtaggattgcttgagcccaggaggctgaggctgcagtgagctgtgattgcaccactgctctatagtctgggcaacagagggagaccctgtctcagaaaaaaaaaaaaaaagaaaagaaagagaaggaaagaaaattagtggcataaagttatagtgggtttttttttcaatcgatgaggtcttcgattccgtgaaatatggtaaatgatgtagcaagcgcccagcacaacgtccctgttcccattctatcagccagctatctgaggagtgggttgggatggggctcagtgttctgggagaagtgggttctagctctgccgctgggccctgggtgtgggcgcccaatcgtccgggaagcgcccacaagcccaggcaagtcccgacagcggtagcccgagcccaagcgctgcgggcccggcgtcccagtgaccccagttccgggtccgaggcaccgccggcggcatctcccactcccgggcccgggccgctccaggccaggaagggagggacgccccgggtgactcagccgccgtgactcggccgccgtgactcggcggaacggacgcccctccttccctcccctgtcgacacgtgctcgcagcccctcgacaggaaatgggcacctgcagcctcccgggtgccccccggcgggcagcgggcgccgttaggggctgagagtggggtcgcgagagtcgcccgcagcctgaccccgcgcacgtcccggaacctcgaggtctctattcgccgcattcggcaaagggatcgagggccggtctccggggacctggcaggttccactgcccggacccccctggactccccaggccgagaaacgatagggacttggcgacggaggggcgaaggacagacagacggacggacacgcggagggtcgcagaccgggccgggactcccaccctggcccagctgctctcccgacggatcccgcctccctcccgtgtggggaccctcaccccagcccagactccagatcccaggaattcagcccgaagcggagagaccctcctagccttcgaggcgaccaccctaggcgcccacgccccttctgaagcagggtggacgcagaagtcagaggtgggcaggaggagagaaagcgggcacggagacggagggacggacgcggacggcgagggagaagggggcggctgggagaaggggagttcgcgggtctctgctgcccgctgcgcggtgggggcaactggccccggacggcgaggggcaggatcctcgccccagcccccagcccggccccgactccggttccccgctccagtcccggagcgtgcgggagttgaccccggcctcccacgcgcggtcctcccgtgggaccaccggcgtcgggccccactcacctgctgggctgcctgcgctgcggccgggggctgcgcggggccgccgtacccgccgccgttcccggagctcgggccgggttccccgaagtctcggaacatgcccggggctggcggctctgcggggtacacggctgctgggttctgactcacccgcgccgtgcggagtcttttctttttatgaatgaaaagttctcgggctgaaccactgcgaccgcggggggtgggggcgttgcagcggcgcggtcacctccaggctccacccccgagacgcgccgccttggcccgtcggtcccgaacttggcgacgcctccccaagtccggctgcagccttttcaccgggatgggcccggctcggcgttccccggaggctgcgggcccgcccccctgacgtagctgcccatacatggtgtaacttcctcgccgcgcccaggtggagccccgggttcccctgcggactgacgcacctgccagagcccgcgccccgccccagccctctcgaggcctgggctaacctccgtttctgctcccacaaaatagcacgaaagaatcacatctctaggagccacgccaaccgccacccaa

SEQ ID NO: 56351 - DNA, 1492 bp, Homo sapiens
tgacactgggcaggtcaccttccttcaactgggcctccctgctgatctcacagagctgttgtgggatcaagtgagatcacagatgtgaaaatgctttgtaagctataaagtgttatgcactcagaaagtggttaccagcctggtgcctctcctttgcctttgagcgacccaatgcttgtcaccctcttgtcatcatcatctctgtgtgtgtgtgtgtgtgtgtgtgtgagagagagagagagagagagagaaagagagagagaaaggagaggagagtgtttttgaggcagtatgatccgtggacagaacacccgtgctggggtcagacagctctggggtctgggtttgaatgtggttaggctgctcaccagttgtgtgacctaggtgaggcacacaatctctcagagcctctttcattatctgtgaaatggagacataatgataactatctcaagggttgttggaggacacaagtaatgtcacatgcttagcacagcacatagtaagaatttgacacataggctgggtgccgtggctcacgcctgtaatcccagcactttgggaggctgaggcaggtggatcacgaggtcaggatttcgagaccagcctgactaacatggagaaaccccgtctttaccaaaaatacaaaagttagctgggcatggtggcccatgcctgtagtcccagctgcttgggaggctgaggcaggagaatcgcttgaacccgggaggcggaggttgcagtgagccaagattgcgccattgcactccagcatgggcaacagagtaagactccgtcaaaaaacaaaacaaaacaaaacaacccaggggtgagagcctttgggactgatcacacatgaaggcactcacacagcacatgtgcacacacactgatacctcaacttcttggcagagcccaagctggacaggtcaagtgtgacacaggtaaccaggggaggggtgacacaggtcagccttgactgcattcacttgcctgctccagaaacatcaccctgcacctgaccccaccgcccccaagcagtggatgctggggccactggggcagctgagggagcagggattcaggtctggggtgtgtgtgtgtgtgttacatgactttgaaagtctcttcctgctctaaccgtcactggagccacaaggaggtcctttcagagggagcacattccaacctcctcagtcactaacccccgccttgtggctgcagaaacgttcctggcctctgacctcaccagcttccacccagggaggccaggagagaaccccagggggccacagccatcgctggaagtttgggggcagggaggcctgagggaccctgccactgtgccttggtggctctgtaagactggctcagtcccttcccatctctgagccccagagaatccctgccttttggggctgcagtgaaggagaggaggcttggcaccctgtgcattctcagcatggccagggcattggaggtgatatttatg

SEQ ID NO: 56352 - DNA, 1282 bp, Homo sapiens
cgaccctcctccctaatagcctcctgagtgctgggagtataggaatgtgccaccatacctggcttttttttttttttttttggtagagatgggggtctcattgtgttgcccaggctggtcttgaactcctgggctgaagcaatccttccgcctcggcctcccaaattgctgttactataaatatgagccaccatgcccagcccatgtttacttttactatttgagcctgttttcttatctataaaatgggtaagaaaggacccctgagggaggtggcccttgtacaggtttctctctggtctcagtctctggttttattccctgggaagttgccccctaagccctgccaccctgcctgactctatctccctgggattttttcccagtaagcaaaggaagatggggttggtgggcttctcagctgggtgtcctcaggtttacccctaggtgcctgggggatgtgtgtcagaggagtggggagtttccctcctcagatgaatcagctgtgtgacctgatcctcatccctgccagagcccctcccagccggcaagagtggggcgcagctgccccactgggaaaatcccccaaatcctgccaaagctcttgctgaagcgttctcttgactcagctgttttagtcctctttgagtctgcccaagttccaacaggagtcaagtcgggcagattctctccttccctggacagaccctctggagcctcctccctggggtctggggtttgcagtatgtgggagtgggaggaaaaggagttggggctttttcctggcctcagtcacccttcccctggttttataaaaggagcagagcacaggacttgtccaagtttgcccagcaccccctgggccaaaggcacttccctgctccaaggtaggaacaggccagccaaatagggcagaactcactgccagcctgagggggtgggttttggggggccattgacctggcagggggccagttcccactgtagacctggagacccttcctgcccagtaggcttcgtcattgcactctctaggcctcagttttttcatcggtaaaaaaagggactttcggcggggcataatggctcatacctctaatcccagcactttgggaggcaaaggtgggcggatcacctgaggtcaggcgttcgagaccagactggccaacatggcaacccaggaggcggaggttgcagtgaaccgagatcatgccactgtactccagcctgagtgacagagtgaaactccgtctaaaaaaaaaaaaatagactctcagttttg

SEQ ID NO: 56353 - DNA, 2931 bp, Homo sapiens
gaacccgggagccggagcttgcaatgagccgagattgcgccactgcactccagcctgggtgataaagcgagactcatctcaaaaaaaaaaaaatgttaatttggcatctgcactaggttgggccctatgccggatgctggaggataaagcattgtcactgtctgaagggatcttacatacagatgagagcagcaggcaggcgggagctgtgggagcctaggggacatgcctgcaacacttggggtgaggaaggatccggaagcatcctgaagaattacacctgagccagtgggtctgcaacgtggcgccagccagggaagtgggcgagggtaagctaagcagaggctacggcaccagcaaaggcgtgaaagtgagaaaggccaccatgtgtacaagaaagtcacacgcagctcaacgttcttggacaaggagtgcaaagcagggaatggagatgggatgaggcagaagggtccagcaggggctggagtcgccaattacctcattcattcatgtaataacttacggagtcgttgttctggccaagcactgtggtaggctctgggaacagggctgagatctagccactgttcctgccttcacagagcacagtgtgggcatggggcttaggggccagcaggagacagacatcaagccattacacaagtcaccacacactctggccatcagggctgcaaggcaggtgctcgagcagaaggaacagcccgaggcccagggctgtgcaccagggggtgaaggaagtaacagatggctccagctgggtgagcatgggcagaaaggggtgcccgagggaagcggggaagtctatgggaaccaggtcacggccagtgcaggagagcagactccatcctgcaggctgtggggagccatggaagggcttttggcaggacatggccactctgcaggagggatctgttgacctggctgtggagaacggagcggggacaagaggagggtggaagtggcttgggagacggtgagttgtgggctggggcaaggcacagggatgaagaggggctgtgtgtgtgacacactcagctatggaagaagccagtgctgttgaccccacttgggcatctctgtgggacccatgaggtaccttggcccactttggtggagtgcaaggccctggcagcccgagggaggcagagcaccaggctccaactcggagaccacccagctctggggacttcccaaggctgggcagagggggactcagccctggggaagctcagggtggggaggaagctggagagagcactgagccagcatctcatgactcagccacttccacccagtcagcccggtggcatctccgctcccctgctctaaattccgattcggtgagactgctggaggctgagtcagtcccggcacggcacgagagctgtgtcccaaggggctccctgccagacaccctggcccccaatcaaggccagggccaggcacggggctggagaggtggcggggtgcaggagccaggctccaaggctacagcaagtcccagcagagtggggcggcccagtgagatcacgtaagtgaacatgctttgtgagttatgaaaagctccctgttttcctcagtgggctcagggacctcattgcccgaggaagggactgggatgcaagtcctagctctgcccacctcatcgcatgacactgagaaaactcctttcccctcttggcttcaatttccttgaccacagaatggggccaacatctcccaaaggggttgggagaattaaatttaatgcatatgaaagcgctttgcaaactgtctagtgggccctatgatggtcagggtggtaggagaggagagtatgaatggcagggcttccagagagactacctagggttgtgcaggttgttcactgcacaaggatgtctagcctaaggtgctgaaatccagcccatcccatcctctgctccccaaaccgcgtaccccggcctaggactgcttggacttggtacctttctctaatatgcacaaatgcaccctgagggctagcagtggccccttagacgttcctggaggggtcaacccctggaattatgggaaatctctgagaaactgattacggatggaggggaagtggggctggttttgcagaggttcttagagacagtgcctaacctcagcagtgaggcacaacttattgctaggggcagctatgggggcctggccgggtcaagggggtagtctctcctggccctgcccctccctagcaacgaaagcaggtaaccaccaagacagtattttaaaaaacactcaagacacagacccaagccgggttttattgaaatgccaggagcaggcacatgtcaaagtagccaaggaaggggggacagtggtacaggctgtgtaagttggcagggatgggcaagcctcatgtccatggtcctggcatcccctctgccaggggataagtaggcacaactaccctcccctcaaaatggcatgctcaggccagtggggcccctacccctggaccatgaaggctccaagaagggctggaagcactaagttttctctctcctgagggggaaggaaagaaggggagatgcaggaggaaggggaggtatagcgggggatgagcgttccaagaagtctctccttctaggtgtctgcacccaactcatggtgctgggcagtggagaggagcagcattacaaagggaggctgaaggctcatccctcagggaaccggagccccccagcctgtggggcttgtgtcagccctgaacagagggcagaagttcaaggggactgaagatgcaggtagttcccaagtgacctaggagtccccagagctggggggtgtggccttcataggacaaggaggaagacaggaggatccaaccccagcatggaggggggagtgggcagtctccccaatttggcccccctaggtcag

SEQ ID NO: 56354 - DNA, 2826 bp, Homo sapiens
tgcataagccacttgcccgagagcacgtggtgggtgatggcgagctggcgcagggtacccggtgtgatgggccgcccactggtctgcagagcttcccaggctgcctgcaggccctgcacgtccccggagttggggctgtagccctgcccatacactgcaatccagcccacaggctctgagttgggtgaaccggggtccccatagcgggtaacttgggatggtgggtacttggccagccaggcatccagctcagtggcaggcgttgtgcgggcatcaaacactagccaggggtccatgtcagctgccatggcctctgcagccaggtgctcggcggtgaagccatcctcacggccacctggagagccctcctcttccagctcctcacctggttccatcctgctgtgagggaaccgagtcagggcagggtctgagacaataactacagatgccaggcactggattaaactgtggccttgagtaagagttactgtcgatgcgcctcagttgcctcatctttacaatgggataacaactgttcctgtcccgtagatctgctatgaaaattagatgcctgaggagtcagcgctccagaagggttgctgcagttattactattctccttgacttacagaaaaggaaactgaggctgagaaaaaggacttgcccaaggtcacacctgcagtgcgtggcagggccgaagggtgaatccaggcgtgggagcaaccagccccagctacacctcccggccctgccaaggcccccttttcctggcaggtatccggtgcgctggcatttaatagaggaacgcaaagaagcgcacgttcgcgcagctcccgaggccggctctgtaaggccaggcctcccaggcaggcgttatcgggcccacttacagacgaggacgctgaagtccagagaggttacaggccgttccgaggccaatggggcggttcccagactcgaaccagggcttgttagagcctgcaggagagccaggctccggccgtgccgcgcccgccgccattaacgcccacgggcccgagctgtgctcccgccccggccctgccctgcccctcccgccgcccgcagtcacctccggccttcgctgcgttcgacgccggcccagccccgggcccggctccgctcctgccgtggctccgcgccaccgccaccgcgccccacccccgccacggccgccgccgccgccgccgccatcttagcgccgcgccacctcaacaacaactttatagacaggcgcagccacagggcggagccgcgggcctcagcggccgcagcggccgcgctgtggggcggggccggcaggggaaggggcggggccgacggggaggtgctgactcgggggcggggccatcgcgggaaccccgggaggggcgggccgcggggggcggggccaacgttcgctcttctggccttgggggcgggcgggagcggcggtccagactggggagggacgcgcaccggccaggaggcttcaagaggagggcactagggccctgcgagcggcgtcttaaccggcggcgctaggactccgcgggaaacggcgggggcggagcgggcggcaccaggacccaggggaaccgcgacgggcgggcggcgagcaggcccgggagccgggaggctgcgggcggcggcgctggacccgacgcggcgagagaggccccgagatgccgagcaagaagaagaagtacaacgcgcggttcccgccggtgagcacgtggcagagcccggcaggagtgggcccggctcccgggtggcttgggcccagttcccgctgggcaggcgggcgcgccgcggtgttcgggggcctggacgccccgccccctccatgccctccccgcgtccgtgtcccccgccccctttctccggggatgccccttcctcccccagcacccccttaggggacggtggcgacggggtctgaactctgctcccccacccgcaggcgcggatcaagaagatcatgcagacggacgaagagattgggaaggtggcggcggcggtgcctgtcatcatctgtatcctgccgggggcggaccgggtcgaggggcgtgggggagggaggcagcgggtcgccctctcctgccccggagttctccttgacgctcctcagcccgggcgctcgagctcttcctagagtcgctgttgaagaaggcctgccaggtgacccagtcgcggaacgcgaagaccatgaccacatcccacctgtgagcggcgaggagccgggaggggccggcgggtttggcgcggggagttcacacactgaggaaggcagagcctgggtggcgagggaggtgggcggcagccgggacaccagcaaggccacagactggcagaggagaggctgggcttccaggcagagggagccacctgagtaaagcagggcaggcccgggagcggagatcggcccgggctccagcctgacatctggggccccttgctgccacccactgcgggtttgggtgtctgggcccctcttgagtgccagcccctcctcacctcttccaggaagcagtgcatcgagctggagcagcagtttgacttcttgaaggacctggtggcatctgttcccgacatgcagggggacggggaagacaaccacatggatggggacaagggcgcccgcaggtggggccagggcctggcatacagtggggaaggccaaggccacagggcttgggggtggccaaggagtagggagcactccgggcagatggactgtaccttcccaaaggggccggaagccaggcagcggcggccggaagaacggtgggatgggaacgaaaagcaaggacaagaagctgtccggga

SEQ ID NO: 56355 - DNA, 2140 bp, Homo sapiens
tagttttaagttagggctggtctcctcaagaaaaaaactcatacacacagatgtgccacattttgcattcaatttcaggggttccagggatacactgacgcccatgtggagctcctaaacaatcttaacagttcacggggccaggttttaaaaatccaatccagggccaggcgcagtggcgcatgcctgtaatctcagcactttgggaggccaaggcgggtgtatagcctgagctcaggagttcgagaccagcctggccaacatagtgaccccaccccctacccccgctccccaccaaccatctacaaaaaaatacaaaaattaaaggggcgtggtagcgtactctcgtagtcccagctactgggaaggctgaggtgggaggatcacttgagcccaggaggtcgaggctgcagtgcgctgtgatcacgccactgcactccagcctgagcaacagagtgagatcctatctcaagggaaaaaacaaaacaaaacaaaacagggaacgtgggaaggaagcgttccctgacgatactggttatagcgggtctgaagctgggctgtggaattggagatctcgggaaaacaacacccgttggagccacgaccctaggagtccactaagcgagcgcccattgtaggagggaggtgtctacggaaagaccgtgaggtagtgaacaccccgttgccggtgaagtgcaagcgcagggaggccggggaggaacttaaagccacgaagacactgacttaatgggctctaagtccttccagttctgggatcccacctccgggttaattccgcttcccttgaggagcgcatgcgcaatgggaccactcgctcaaagaacccacccgacccgagacggcgcgaatgtgcagtcgagcgctgatcccggccttcccatgagcctctggggcaggctccaaggcgagcgacggaagcagccgctcttagtttccggcaacacgacagcggctgccgagcgacccggaagtattcccattttgcgttgtctgggctcggcggcagccgggctcggagtggacgtgccactatggggtcgtccaagaagcatcgcggagagaaggaggcggccgggacgacggcggcggccggcaccgggggtgccaccgagcagccgccgcggcaccgggaacacaaaaaacacaagcaccggagtggcggcagtggcggtagcggtggcgaacgacggaagcggagccgggaacgtgggggcgagcgcgggagcgggcggcgcggggccgaagctgaggcccggagcagcacgcacgggcgggagcgcagccaggcagagccctccgagcggcgcgtgaagcgggagaagcgcgatgacggctacgaggccggtgaggaggcggggcctgcgcagggggcgggtcgggcgggggtcccggaacgcgtgggtctgggtgtgcgcgcagtgtcagcgaagctcttcaggccaggaaacccccaagctgtttaccagctctattaaatagtctttctacgggatcccttgagcccaggagttagaggctgcagtgagctgcggtcccgccagtgtactccagcctgggcaacaaagcgagactctgtctcaaaaagaaaaaagtctttctacggttgtttaggattagaggttgactttctccactcagctgcttgaggacagagggcttctgttttcctcagttgtctggtacaatcagattctcaataaatatgttgaatgagtgaatgaagtagtgtcagcatatacagaggcaagaaaaacctggtattggacgaatcgtgtagggcgcatggtagagaaatgagggagtaagatagacagggatgtgaacacaaaggaccctgtactgtagtctctgttaagaactgtagattgtcttgaggatagtagggagccatggatgtgagttgaggagtgagttgctcagatccgtattttgtaaacatcactggattgagaatttagtcaaaggtagtcaggactggagaccaggaaaccaggagggctataggccaggggagggctgatggtggcctgcaccaaggcagcagcagtgggattgagagaagtggacaggttggagaggtgttttggaggaggaatgaacagaactcagcacttgtatg

SEQ ID NO: 56356 - DNA, 1784 bp, Homo sapiens
taatataaaactatacgcatgctccagagaagtcatcctggcaacctctctggaaggagtttgaaataaaccgtatctttctcaacacgcttgtacaccccaagtctagcatagtcacacaacagagaagttcagtctggcaacacactacagccggagacaaactaggtggccaccgtgatggttcaagccaggaactagttaattaaaggttgaggtgagcaggcttgtctgcgacatttgcatatttctgacttgcgtacttagaagacgaaggccagtacccttaagactgatggtttccgaaagaaacactgtcgtctctagttgctgtcctccttcctcctccctgtctatcccggagaaaagaccctcagagaaacacccacacttagtctctggccctcggctcccaggaacgctgccggagcaacaccgccgtctaggctggacgctgagagaggatcgtccacgactcacttcaaggctgaaccaagaaaacacagtaaaggaacttgccggcggccgcgacggtagcgtcagttagaaatcaggtctccagtgttcccagttcccaccagtccaactgcgaggagtgcgacgtgagtctgagtctgatccctccgaaaaccgtacttccggcgctgtctcggaggcctcccgtcccctcccttgtccgtcttctaactcttccccacgccaggtccgtcaagcctaagtccttgagttccgggtccgggcagcagagaaaggaagtcctctccctggaggcctatctccctcagaactgcgcgagaagcgagaccttagaaggcagggcttcccgcgaaggaccggaaaggagcgcctactaaggacgccgtcgaggtccggggcgcctcaactctatagctctaactggctagaagtgcccaacgtggaatgtttcttttttaaaggcggctcttgaagcgacccggaagcggaagtggaagaaagttctagtggcttgaggtatccgcaggagcggccgggtggcgggaggaaccgttacgggaactgaagttgcgggtgagcgccagccgcggagcagggccctgattggaggccagaggggttgcggggagaaggggaggagaggggtcgcaggcgctgtggcgggccctgggggagagcttggccgcgctgcggggagggggcggggtgcagcgcgtgggagccgggccgcgggaaggggcgggccgcagcggcgcgcggtgggggcggagctggggcgcggcgtgaaccccgcgggcggggagcgggtgtgcgcagcgctaggtgtgcgcttcgccctgtaggtagagagaccctttggttagctttccacgccaagtggccgttccaggcaggcagtgtcgtcttggttcagccaaggtcacagagggagtgatagcttccgcgcagccctggctacggactctgggcatctttccactgccccgcttgcgccacctgttaggcaggatcgtttttcctctggggcaagatcaaaatccaggtcctgcaggaagaaactcctcttaaaaatagtagggaagagtctccctggaactgttttctcctttcaggatgagggggatcgagcaagccactgtaacccctggcttggcttcctcttactatgagattgctcgtgggcccttagaagttccaggtcttcagccctaatctgccttttttttgggattcctagattaagcctgatcaagatgacaacctcccaaaagcaccgagacttcgtggcagagcccatgggggagaag

SEQ ID NO: 56357 - DNA, 2027 bp, Homo sapiens
gcaagaatccctgccagtctctgcctctgtctccaaaggccaaggggagttggggtggggagtgggaggcaaggtggggcccccagtgcaggtgcggctgagggaaaagggcctgagtttatttttgagactaaaaaagacacaaatgctttcaccagaaacattgttcctttttttccagtaatcatttattgggcgcctcttgaacgccaggcgatgcgagactgaaaatgatcaagtccctgctcacatttttgggatagaggtaggaagaaagggcaagaaagacttaacaaacggtggagattcgaacgtattatgggagctctaagaaaggaaaggaaagcgggaggaggcttagtggagaagacgacatttgagccggcctggaaggtggaaaagggggctttagagtcgcccttcccccaggtcggcagctggagctcagcccgggcaggcctgctgctctcccggcttggatcccctttcagcccattcatccgggcctgggccgggggtgggcgggcagacaatcagacactgttttatcccaggcatcggctccagcctcccgcttggcgcccgcaacgcggggccgccggggaaatgagtctctcgggactccctgggagcgtaagcgttcgaggatctgaccggagggccgggccggaaagcttgagagccttcgctcccgcaggtgaggcgcagaaaacactccctcggggaagtgccagccctcctcgcagccccgccctccggcccgccgccggccttcggggccgtagcggcgcgcagggcccgcagagaccgagacctgcgcactacaactcccaggaggcctcgcgaccagaccgccgaggggccactagagaaaggtgcgtctgcggcgaatcccgtcgcccagcgcacggcagcgggtgtgcctgagtgcgcgtcgcctcccaaccagagaggacgtggcatacggcgccaccggaagttccggcaagtgggccctgaggctggccccagcttccgggttggtcgcgcgccttcctgcggctaagatggcgacggagcatcccgagcctcccaaagcagaattgcagctgccgccgccgccacctccaggccactatggcgcctgggctgcccaggagcttcaggccaagttggcagagatcggagctccgatccagggtgaggaacacaggaagtcgaggggcctttacgggcctgcggagaagcggagcctggttacccgggagactcgggtgcgaggggcggaggcaggccgctggggcctgacctggccgggctggcctgccccattgatcgtgtactttgccctgcaggtaatcgcgaggagctggtggagcggctgcagagctacacccgccaggtaggtgttggcggcgggacgtcaggataggccgagcttctccaggagaccttatataccccatcacggctcggtcttcattctttctttatctcggcacagcaaggcggaggcttgccctttttagcttgttcttgcctttgccagcttagttgtaatttcttgtatccatcttggtcctcttcagtgcccagccagagcgctggcagacaggcactgggtacgttttgttgaatgaattgggagcgaacgtcgtttagtgaaacagctagttttggactgacctagagtcctttctcttttgcagactggcatcgtgctgaatcggccggttttgagaggggaagatggggacaaagccgctccacctcccatgtcggcacaggtagggagattcttctgttttttaagattccatctgctgatccttttgtagttcatgagcatgatgattgggtgttcacgtgcatgtgtgagatgtgacacccttgcacattactcgcctgacctgagtggggaaaaaaaaagattccatatgttcagggtagcccttcctctcacttgcagttgttgggcagggaggtactgccatgacagaattgtgagctcttcagttctctctttgatgctgacacttgcctccttt

SEQ ID NO: 56358 - DNA, 748 bp, Homo sapiens
cgggactaaagattggaacatgggcccttgactggaagaggatctcaagaagcaagagttgtggcagattggcgtgttgggtattggtgctggtatgaacttgttttcttttttaagcagggagatcattcgctgaaggaacatgagctcttggagcagcagaagcgggtaatacccctccccctaacctttgacctcgtggtccagtcagttggctgtcatttatagtgcttagagtgcaccattcaagttttccctggaggctactttgttctcaactaagttctagtatcttccaaagctttcaatttttcttgaagttcaggaattgacaaactatgacctgtggcctgcatgtgtatggcctatgagctaaaaataactttaaaattttttaagggttataagaaaacccaaaccaaaaatatgtaccagagtctgtacagcaacccataaagcctaaaatatttaccttctgacctattataaaaagagcctgctgacctctgctcgccttacatgacatcattctagataggactctgggtaattgagttatttgtattggatttagacagaataggactgtaagtctgggaatgttatataagatgtttggccccagaggtgcattgcatcagtcattacccagtgggttactcaggagtattaaaaagtaagtgttaaaaagcaacaagtatgagctgggtgccgtggctcacacctgtaatcctagcactttgggagg

SEQ ID NO: 56359 - DNA, 2328 bp, Homo sapiens
ctggatgcctgggcttcacacaagaaccacctctcccgcagttcccaaggacttgtcatttcatgttcttattttagacctgttttgtaaataaagctgtttcccaaggaaagagatgaatatttaacactcctgagcctccctcatctccttttagccccttcttgcaaaaggactaaaatagtctctttctacaatcactgggctgccccagtaaccacgaacataaactgggattagacggcgcatttgactggtggtgacgccaaccccaggctgaaatctgtgtttcaccactgccctgctttgtaggaaggcttgggggaagtacctctaggtctggtttgaccttactactttgtccttggggagtaaaaatagccagattagcgccctagcgcggcagaggaagtaacagtgggcttgggaagtaggccagggcaggccttcccaactgaccttgtgaccagaagttcaagtccttacctgtgcgacaacatagctcaaaagctaaattgtcttgagtccatatgaacccttgggttcaagcaacactagtcgctggggtttgggatttgtatgtgggatggggggacttactttctccaggttgtaatctggtcctgagcagcctttctgacagactagagcaggctggatcactggctcccatgggcatttgccagcctgtggggagggtagtcatgcgctgctgttgtactactgttggtgtttaagtgcaccagtggaggcgctcacttgccggagggttcaagatggtctcggggttgtggggggcatgatccagataggacgtggcagctgagctaggccttaggaggaatggaattttagaaatttggtaagcaacaaagcactggcactctaaagaggcatttggggggtagggaaagaagaggaaggttggctccagatgggccccggggtagcttgagaattcacttatgcgaagaaccttctggactccaggtccctgagcccccgcttgccctcggggcgggaacttcccggatcacaggcacccgcggtggcagcgggccccgggtctccgccgacctctctgtttgccggggccgcagggcagggctaggtcggcaggcggagagccggcttccccgggcagacccccaccgctgggggcgggttccgcattggctccgaagacccgaggggccgaggcgcgctcccgcggcggccccctccctgcagggaccgaatcccggaaaagccgggtttccgctggcggggccgcggccggccgtgggcggggaggggaggagcgggggcagactggcagcggatttgagggcaggacccgtgggcgcgcgctggccacagaccaccccttctactccgcgggagcgaggggcgcgcgtggctgcacgcagggcgcgagcgcgcccggcccggcccctccgcgctgggtggggccgcgcgggccgggctccccgccccctcccggacacgcccacccgtgtcggcctcgcgagccgcaacaggcagcggcggtcgagcgcgaggcccgcgcgcccagaggccccgcgcgtgcgtgcagctcgctggctgctcgcgctcgggcaggcgggctgaggaggctgccgcgcccccgccgccgccgccgcgggggaagcctgggagccagatcggcgtcgcctcggcctccgtaacccccgcctagccgggccatggcggaacgcggaggggcgggcggtggtcccggaggcgccgggggcggcagcggccagcggggatccggggtcgcccagtcccctcagcagccgccgccgcagcagcagcagcagcagccgccgcagcagccgacgccccccaagctggcccaggccacctcgtcgtcctcgtccacctcggcggcggctgcctcctcctcgtcctcgtctacctccacctccatggccgtggcggtggcctcgggctccgcgcctcccggtggcccggggccaggccgcacccccgccccggtgcagatgaacctgtacgccacctgggaggtggaccggagctcgtccagctgcgtgcctaggtgagcgcgggagggtgcggcggggcgccgggggagcggggtggccgccggggcccagccctccccgccccagcgcccatggggtccccgccctccatctccccgactgtcccgcggcccggcctggctccagccaggcctcccgggactcctgccacggggacccgccctctcctggcagccccaccttctgcctggggccgggaccacccttctgtcctccccgagggaccttctggcctcggccccgggctttctccgattgg

SEQ ID NO: 56360 - DNA, 786 bp, Homo sapiens
tataaagctacttcacacctactcgccattactggaaataatcttgttcctttatttagttactttatagatgctcaataactacatttgtcaaatcaatgacactgattttcctatagtgttttataatgtttattgaatgactatctgttatgcacaattcatccattcaccaaatatttactgagtgtttctgtgtgccaagcactgatctaggctctggagaagcagcagcagacaggctgacaaagtccattctctcccggggtgtgctttctggtgggggtgacagatgaggaacaattatattgttatatctgtgataaatggtcagatagcgagtagggtcacaaagaatagtgtggtggggaactgagtgtggggggaaaggctgtcttggtgagggagggcctctggtaaggtgacagttgcgctgatgctcgctgcagtgaagctgatgaccagagcatttactgtgtgccacaaaactgccagagccaggtgctacgatcccttttctcagaagggaaaattgaggccctgtgaggtgaaggcatttttttaagactacacagtttaaaagtgggcggggctggaatttgtctcatgactcatgattgccagacaccagagccgtttctgtgtttaaacttggtcccccaagccctgtctggttctcatagctgacaaataatatttaatgccttattctttgccagctggaattacaaaacactgctcaatttccatcatagacagcgagaggctgtgtggtatagtggctgt

SEQ ID NO: 56361 - DNA, 1098 bp, Homo sapiens
atatctgtctcgttcatgactgagttctcagtgcctgaacagttcctgacatccagtagaccctttatatctatttgttgaataagtgactgcttttcccgttgtgcatgggccagtgccaggggtcgagttgtagtgaactgagagtacatggacagtgctgaatggggaaatgaaagttatcaaaagcctctggtgccttgcttattcatagcagatttgttcataataacaaaagctggaaagaacccaaatgcccatcaacacatgaatgaataaactgtggctatgatttggctataaaaagaatgatacatggtggaatatggatgaatcttgaaagcattatgctgcatgaaaggaagccttacacagaagagcacatacttaggattccattgatatgaaattctaggaagggcatttaatttatagtaagagaaaagtggctaaccagaacccaggatgggagagggttgactgggatggaacacagaacttttagggtaatggaaatgttctgtatcttaaatatggtggtgattacacaggtataaatttgtcagaacttatcaaaatgtacaattaaatcagtccactttattgtatataaactatttctcaaagttgaactggtgtctgacatttaaatgtactttggatttcttttgtttacctacccacttcttgggcagatgacttttcttttaatttccagttctcctagctacctgctgactcatcccagacgtacttacattcctgtttctgaatcagttccaacatcctttgggtctcttgtcctcaatctctagttggcaaaacatctttctaattgcagggttattggttatcttcagatatgctattggaacttacttaccatcaaggctagttgggtctccacctcaaagactaagtatctccaaacagatacttttacaacgtaacaagcaaggaaaaaaaatgtttgcagcacatgtagtttgacaagaagacataagagtatattttaaactctcagttcctttcggtatgatgacttgtatactttgatcagacttcctcttcagaagttgtagtctttatgtttaggat

SEQ ID NO: 56362 - DNA, 1745 bp, Homo sapiens
cctgtaatcccagcactttgggaggctgaagtggaccaatcacctgagctcaggagtttaagaccagcctgggcttaggcaacatggcgaaaccccatgtctacaaaaaaaaaaaaaaaaaaaaaaagaaagaaaaagaaaaaaagatattctgagcttattttctcgttatttccttctctcccttcccaaatatttttttgagcatctgtgtcagctaggaatacagaaactaaaaaacattgcttgcccttgtgactggggagatatagacaattgaataatcaaccacaacatgttatagtaagtgctaagataaaggtaggcacaagtgtcagggaaaacacagaagtgggatgcctgagctgagtgggagtgggggtggcccaagaaggcttcctgaaccagtggcaccagatggacaagggagaggccccctactccctgcttgtcctctgctctcttctgaccggtagcgttaatacttctttggtttaatgcaggatcaccagactctgtggcccacgacctgtttttgtgtagcccataagacatacctttctaagtactatagctgaaaaacatcaaaagagtagtaatattttgtgacatgtgaaaattatatgaaattcaaatttctgtctgtaaacctcactggaacacagccatgctcattcgtttgtatatggtctgtggctgctttctccctacaacggtagaattgaacagttgcatcagagaccttatggcctgctaggccagaaatgttaagccctttacagagaaagcttgctggctcctgtttaatgctttaactgccctactgaaaggcaggaggttgaaaaaatgatggtagtcaaaaggaatgcatgaaatcctgttgtcttctgttagctgattgcaagtagtacacaggatatatttgagacatctcttttcctatctcccaccaaaggataattcaggcggatctcagtgcacaggcacaggcatttgcctcattcttgttttgtctgttttgaatttagttatgggaatattttaatatctctcaaaaatagggtatctggtgtgagtcagaatgattatagaacatgcttgcctggagaacaggaaatgcgggatccactcctggtgtgctgttagctgaaggacgtcagaactgtcctttaacctccctgcaggtctctaaatggtaggattgtttggggattacactagatcatctctaggcaccgttcagctcagtagagacattgctgcatggtggaaggagtgacctcagtgtgaatcctggttctgtccctttctgcccaggagaccttgagcagcttatctaaatgctgtgtgcctttgttagctcatctgaaaatgtggctgtaagaatgacctcatgagaatggactgagatcatattcttaaaactcttggcactaataggtatttaatctactataactgtgaaaattatgtctgtgaactctttttttttttttttttgagacagagtctcgctctgttgcccaggctggagtgcagtggcacgatctcggctcactgcaacctctgccccctgtgtgccaccactctcggctaatttttgtatttttagtagagatggggtttcaccattattggccaggctgttcttgaactcctgacctcaagtgatccacctgtcttggcctcccaaagtgctagggttacaggcgtgagccactggacccagcctgaatactaattat

SEQ ID NO: 56363 - DNA, 2055 bp, Homo sapiens
tcgtaaatgacgtagatacgtaagtacgtcctacgggttatgtggctatgctgctgagacctcacactcaaccctccagcactaattcactctctttcaaaattgtgctgttgctttcagtgtttggggagcccaggagaggaatgtgaaacaggactgcccaatcccgctaacacacacacacacacacacacacgccaagaatgtgaaacaggactgcccaatcccactgtcacacacacacacacacacacacacacacaccaaaaaccaaaacaaaccaaaatattcctgagtgcaggagttatgatttaacaaaaccttcatatcctctaacatccccactccagagaacaccctacttagaataaaaagctaggagtgatgagcaccatggctttcagtctttatggagctgtgatagcccatcattatttgatttattctcctatcttttccagagcggatgtagtctttgaatagaattgcataattttagggttttaagcaccctcagtaatcgtgcagtttagtttcccatctcatgccttccaaaaaacttcatacaagttgaccctcatctagccttggcccgagtgcttccactgaacaagaattcagcagttttttaagcaggcccattccattgtatggactgcccgaattattaataagttctctatgttcggctaaaacttaactcatgggaatttccaccctaagtcctgatttaaccatttgtagaaatgaatgactcagttttttcactcccacagaagtggtcttcagctattggaggacagtgcccggcctccgtaggctctccagcctcagcattgcccacttttctcttggcttgttgggcttttttcttcttgatttttggggatttttgaaaatagccctatgtcttggatatgagtcacaaattgcccccccccccaccatttcgtcatttgtctccaagctctgtttacattggtgtttgccgtgcagaagtttttctttaatgtaataaaatgtagccatcttttttaaaatgacctctggacttcatgtgtttggagtttattcatacttagaaaggccttgtccacttgaggctgtttaaaaaatacccatattttctgctagtacttaaatggatttgtgtgagtgtgtgtgtttgtgtttgtgtgtgtgtgtgtgtacttaaatcttttatgcatctagaatttattttaagataagatgtgaggtaggggttcaaattaatttttttccagctagctgtctagttactccaacattattgaattactcattttttcctgttttgaaatgccattatattaaattcatgacacacttttggatttattcctagagtgtttcatatgttttatttccaagcaaaccaccacacacatcttataccttcattactgaaatttttaacctaaatgtaaaacttgttatgtgcttacctggcatccagccggtcaggatggtctgactctgctccttcctgcctcagcagcctcctcttttgtgccacctgcaggttaataagcatctcttatgtcattatccaggccattgaccaaggggtgacaataatattggccattgtagggctgtcctttggactccagtggagagccattactcactgtttcctattttagaaatgcagcatgataggttaaaaagtgcttagggttttggtttcagttgcagaactaaatttgagcatcccttctattcattgtttctcagactttaatgtgaacaggaataacctgagaatcttgttaaaatgcaaattctttttttatttttagtagagacggggtttcaccatgttggccaggctggtcttgaactcctgacctcaggtgatccacctgccttgggcttctagaatgctggtattacagacatgagccacagcacccagcataaaatgcaaattctgattcagtaggtctggggtaggccaagattttgccccgtttatttatttatttatttatttattggacagtatcacactctgtcactcaggctagagtg

SEQ ID NO: 56364 - DNA, 1413 bp, Homo sapiens
catgagtcaccgctcccggccagagatgcagttttgatatgttgtccaggctgctctcctgggctcaactgatcctcttgccccggctcccagagtgctgggattatggacattgttctgtaccaatgtgtgctgggtgtgcagtcactgcccagctgggctgcatatattttttccaaaacccaggtaaaatgtgttcatcgcttaagaatcagcattttttaattttaatttttatttttttgggtgagacaaggtctcacactgtcgcccaggctggagtgcaatgccgcaatctcggctcactgcaaccgccacctgatcctcacgcctgatccttctgagtagctgggaccatgggcacttgccaccacgcccagctaattttttgtattttttagtagggatggggtttcgccatggtgcccaggctggtcttgaactcctgagctcaggcaatcctcccaccttggcctcccaaggtgctgggactacaggcgtgaggcactgcgtctggcttatcagcattttattaaaaaaaaaaaaaaaaaaagaggaaggagataattacgttgaaacctgatagttagaactttcaatttaagctgaatgggagtggggctcctgaaaaagaaggtttgtgaccagcatgggcaatgtctctactaagagaaaaaaaaagagggaagaaggttcaacctgctgccatttaacactgcttctcccaggagagcagccctgtgaggcttgggtttctctgaatgatgtcttgggtttcaacattgtccccttacttgttagccactttcatggaaaaaacccgcaatccatgaatatttgtcatctcgcatgccattactggtcaaacaaaatgaatcacaagctggggcttgaatagaaattccattatttacagacaggtcagattaatctatctaggagggacagtgaaagaggctatttttcctgatggtactttttaaactgcagtaaggtggtgctgttaatgaaaatgccaaagagaaagagtgatttccttcctaagcagtattagattatagtgttgtcaggagtcttgcaattgaattacctttttgtaatcaattccgccttatcagttaactctacttgtaatggactgctggcttcaagagactgagtctggattatttaaaacttcttgctgtaaaggagacatcacctgtagcatctccccttccccaggtggagcatcccctgttggagcactttggaggctgcagtgttatgagctctgccctgtctgggaagggttctggaacaggtctgaagccctcagagcaaaggctcatttgtctgcttgatgccaacgtgctgtgggttctccagaggctggggctggttgcttctgagtccttgttagtattgttaccg

SEQ ID NO: 56365 - DNA, 742 bp, Homo sapiens
ggaaaagggggcatgtactgtagcagccggagccacgacctgggccttgctccgcccctcctagaaaggccctgctccctcagcagatcacaggcaggggtgggtgtgagcctgaagtgacctcaggccctaggaagctgctcttccttcgtttacaatggaaggcaagtgagtgttgtcgcgatgtgagtgcccagcttaggatttgccctccaaagcccagtgtcttttctgtagatcaaagaaacaaatcctttaagtcctcctgttcacctgctttactggcagatgaagcctactcatggttcaccagggggaataccaaactcgccctgcagatcggtagtaattgtgcggagatgataggaaacaggagaggcctctaccgctgaaaagcacgggtctgaaagggcaggtgcctgtcctggaaaccaccttctcttggggcatcccctggctgcccttctgcctgttgccaccaggtggggctctctcccagctcaccgttcttcctgcttaggacagcgccccacgtgacgttagtgaggcaatgcatgggaaactgcagcccaaacagactcctccctgggagaaaccccagccctgcccctgcagaccctgcaccctagacgccgttccaggccgggttcatggggatccaagaactgaggagacctcgatttacaaaaaaaaaaaaaaaaaaaaaaaactctttctaaatttattttttatttttattgga

SEQ ID NO: 56366 - DNA, 1584 bp, Homo sapiens
gctaaccttccgagttgtctcagagccaaacgtagtaagctacctgtcaccggatgtgcttgagctaagggcgctgaaccacctctgtcagagacggtgcatcccccaccggatgtgaccccgggatgcggagcctggggtcagatctgcgagccagataacagcggcactcacttctcgggtcttcgtgagcattaagtcaatgaacccagggcaccaaagcgcgcaacacgcagtaggcgctcagttagtggcgcctcgctctgtactccaggaagcccaaccttctccctgcgcctcagtttctcccgacgtcctcgatggcgccatggcgccacactaggtaccttcgggttcgacctcccgagcagctccacacgctgaggccccgcggcattttgcggccgagggcacccctcggggctggcgggccctgggaactgcgccccgggcgggtcctcgcaccgcccccgcctcgatggccccgccccgtccccctcccgctggagccggcccggcccgcgctcctttaaggcagcgaacgggccaagagaagcgtgtttcgccccctccgacgccaccgaggtagcggcttcacctttaaggcggcgcgggggctgctgggaaggccggcgggatggaggcggcgggaccggctcgcgggtgcgggtccgggtgaagcgggaggcagccagagtcggagccgggcccgagcaccaggcgcaggtcggcgcgggccgattgggccgggagacggggtcaggccctaaagcgggggaggagactccgggtcggcctaggggagggggtcgtcatgggcgcggcctgtgggaggatcgggccagccctggtagggggcgcggtcccgggtggcccggggcgggggcgcggccttttcagggaaggcctcagggcgttgcgctggcctaggggaggggtcgtcgtgggcgtagcctggaaggactgggggccgcgtactcagcccctctagtgggagcgcctccgcagggtcggctcgtcgggaggatgggctccgcggcttggcctgccttttggggatggggctgtccgaggggctgggcccggatcgccggaggggccagggtctcctgcacaggagtgagcccccacgttccccatacctgtcctggttagggggtccccggggaaacccggacactgagccgcctaagtcggcctgagccggtggtctggggccgaagcaggatccggctgcaccgcattgcgtctcccaggcctagacaagctaggcgcgccctctgtaggccaagcgcgggcacggtgcgggctgccggctgggggacctgggcacacgggagactcaggcgtccggggaccgcctgtttacctaatccggggcggacggcggtgtggccccaggcccggcgcccgcctgcccgcaccctcgtcctcacagacgccacagccatggccatgatggtgtttccgcgggaggagaagctgagccaggatgagatcgtgctgggcaccaaggctgtcatccagggactggagactctgcgtggggagcatcgtgccctgctggctcctctggttgcacct

SEQ ID NO: 56367 - DNA, 2168 bp, Homo sapiens
ggagcggcgcctcccaagggggtcctgggaccttctcgcgctcctcctggcctctgagggatgcgtcctacccgcgccatcgccccgtggcccaggacggggacctccccttagtccgtcctcccaccgccgggccctgccccgcatcccggccttatgcactgcccctcccacccggccccgcccaggcacggccgaccccgccccgggcaccgcccaccgagccatcctgcctcgcctccccccacgcctgcagcttctcgcgaggggcggcgacggtcccctggtggcaggaggggctccccctgttgcgggtgaggcggctgctctcatattttcagatgttgctgtagaaataaagacggtttaaatctgagctgggcttgttttgagacggaggtcgggggcccccagcgtctctagactggggtggagccgggaagggtcgtgcgtgagtgggggacagtgtgtctcgctcaaccgctgtccgcgcagctgggcccagatattgtgccccaccccggaattgcgtgaggggcccacaagtcaggctttccctaaaacactcacttgtggggttctggagaccgcgggctcttatgagctctgctcctcacaaagtttttgaccttgagtgagtttcccgagactcagttttttcatctatgaaatgcgggtgatgacgcgcggctgcgagttaggactgcccagtacacgaagaaccctggacaaatgtacttttattagtcttactagaacccacattctcatttaatgttcacaacgtgggtattgggagggcaaggatgactacctccgtcagacagatgtgaaacgtgccaagcccagccctaaattgagctttctaaacaccgagtcgcggtcaggctttccagcactgtcctcaagcctgagtgcgtccggagtgcaaactacaagccccagaaggcaatgcgccagcagtgatgggagtgggcgcggaggcgcgggctccccgactacgcctgcgcagcggggctgagttggagaacgtcttagactacaagttccgggaatcagcgcggcgaggcctgagaagaagacgtttgcgcctgcgcgtcgcgggcggggcctctggggcggagcggccaccatcttggaacgggaggcggagcagagtcgactgggagcgaccgagcgggccgccgccgccgccatgaaccccgaatagtgagtgagccccgcccgcgccgtccagcgcagcctcgatcccgaatacagggctgtacgcttaccggggttgtctggcccgggtcaggactgtgcggcgcccccacatccgggtccctcttccgctgacccccccccacatccgggttctgcccctccccccaggggccccaggaccccggctcaaaaccccgagccctcgcacccggggcccagacgtggcgacccccaggggcagctcttggagctcgagacatcggtcctaccaggccttatcggtcagatgaccccgcagtcccggtcacttcaggcctcagtttccccacctgctgcttgacaactgtcccggagttttggagcccgtcttgatagtttctggtctcgggttcaggcttgggccctttaggtcgggcagtgaatccctctacccttctctttctcctgaagcccggctcctggggccggcccagaagctagccaactacgcgggaggccccgaagcgccgcttgggtcgcgtctcccgcaggtcctctcttccggggctgcctcctaccctttgcctgggtcgcgctgtcctgtcgctcccgccggtccgtcctttcccgccctctcctcgcttttgctcaggcccccaacgccaccgtcacaccccttcccttggctgtcacactgcctgtgaagtttagatgaatatggaatttgctctcccccttcctgtgggattctctggtcctcaaactctcctcactcttggtcactccccctgcgggtaggtggcccacatctcatgcccaggactaatagttttccccaagtatcagttatcttcttccttttctgccacttcctttttctactccacatccaggtctcagatttccttggggaagggtgaagctctgagctggattgggaggggaacagagaagggaaccagcaggctctcgaagggactttg

SEQ ID NO: 56368 - DNA, 758 bp, Homo sapiens
ctgggcttggtggggtgcacgggggtcctggcttggtttctgtgtcctaaggctgctggcaaaagcccttgaccccgtttcctgaggccaggaaagctgcttgtgcttctgtggtctgtccccaagggcccagcaccgttctgtcagggaaagaggcaggcggccatcagctcatacctggcgtgccgccgccaactcccgcggggcacacggcagaggtgtggggtcgcgcagccgctgagagggcccccactgcacctggcccaacctccttcagcgccccccaaaaccccactgctcccattcagcccctgtcctggcgtcattgtgtgtcccagccaggtgcttctgccgtctccgacagtgacaagtgcctcgcacttcagcctttgccctgagcgcccgcccgagggggccgagtgcggctgtgccggtggctggagtgccgaggggtgcggggtgccgggggcggccgcgtctacgctgtccggagggtgaacggccgcgggcttgtcggggctgggggtggcgcccgagccgggcgggcagacgaggggcccgcggagacccagccccgcccgaggccgctcgcgcggcggccccgcccccggctccgccccgccggcttcgcgggctggagagcgagggagccgcgggcgagggatcgcaggatgagcgatcggggcccgggcagccggcagcggacgcgccccccgagcccaccggcccgcgccccgcgccccccacggccccgcggt

SEQ ID NO: 56369 - DNA, 1923 bp, Homo sapiens
tgcgatggagctgccataggccatagccacattggccattgggtccccaagcaagtggttgacactgaaggccacgtctgctcctgtggctgggtatcccccgggctggctggaataaccaccgcttgtgtcatcgaagaggggagggggatccggggctgcccgggccctgtgcttggagcctgtgggtttggaggtatcagagtagatgacagaaataccaagcatgagcccaaaccaccgccccttccctggctggacagccctgcacgggtcctggaggcaccgatcagtgaggggaccccaagctgggtgagggggagctaactgagaaaaaactgtgatgagggatcctttgcgagaaatccgttgctaaatgtaggcaaagaaagagctgaggcagcgcctagaactggttgcccacttggggtttctgaaggcctctcactggaagtgacctctgaactgagccacagtgagtagaagtgtgctaggtgaaaataactgggagggcatccttccgtgaacaaagctgggagaggcgacagctggctacctggaggccctggacagtgatcagggacctcatcaggttcacaacagtcaaaggagtttctggaggaggaggcggaccccgtttttgcccgactccggcatgggattcccaggactgggccgagagggcgaagtccgggacgtgttggagtgttacgaggggcaggaacccgagtgacacccccgccctgggcggcggtcccagtcgctatctccctcggggtgagcgggccacgccgccgactctccccccgccggccgcgccgcgccccgcccgcgccccacgcaccgtgggctccgtagcccgagtgataagccatggccgcgacgctcgctgtccccgagggcccgctgcgccgcctcgtgggtacgaatactaatgaggcagctgctccgcgcccagggtaccgaccgaggccacccggccgcgcgacacgtcccccaccccgccggtctcggccaccatgtccgtggcgtcatcccccgcgcctgccattggctcttcggcggcgccggctcgcccctcccctctcccaattggccactgacgagctctggcctgagcggattcggcagaaggcaacatccgggtgagggacaggcggagcgacttgcggtgcctgggattggatcacgggcttgccagttcacggtgggaacagccaatagaagagttaagaaagaaggtgggcgagaattatttgcgcgcctgcgcggtgaggcacttgacgcaccctgccacgactacaccagggagtcgagaggtaacctgcagccggagtcaggagcaaagcttccttggtgggacgtactccaggagggaacggggcggtcgagttccaaccaagccctgcccttcggggcgcctgtttctccctctctgggcttgttttcctcccccgtcacctacacttcacccaatcttggaacggagccccggcagacccggaggtggtggtgggaggccggacctatcagtgacagagctgccaagcaagccccaggatgctgactccacccgcctcccactcctcttctccgcgcgggtgctgtccgtcgtccggtgctgaaaatgtcctcccgcctcagccgccatcctgtagactcccgggggcctgcgtatgggaagatttggggtctcgaaccacacgctcctagcgagcgcgtggccgcacgcacacatacacgcatactgcaaaactggggcccagaggatccgaagtctgagagattgggtggtataggtggggcaggatcctgccccgggcctgtcccatagactctcccgtagtccagcagatttgggggcagaggtgtgctgatttgcgtcctgaagctgcagcctaaactcctgagtcatcgccgggc

SEQ ID NO: 56370 - DNA, 1006 bp, Homo sapiens
ccagtcccaaggcaaggcacgcacatccccagtgagtaacacttcctgagggcggtccgcctgtcacacccgccagttaactcttgtgtgtccaccctgcctggccagtgcccgcctcctctgttctggaccctgctttgggggtcaggggtcccctccatgctagccctgctctgagggccccagctgggggatgccacctccacacacggcctcctgcagcctcaccagctactcacattgcacacgtgggcgggaagtggttaagcggcctcagtccccacaggccccagccatgctctgggggcacctttggctctgtggtcagttgctcatctgcccctggcctcaggtcagccttgtgggagagcaccctctactgtccatagatgactcattcctgaacctgggttttaggattttaggttgccatggagaaaatatgccatgtctccatggaaaccaacctatttgcttaactgaggttctgggggtggttctgacactcagtgctaaccagggggagtctggctgtgaggtcgtcagcacatggcggtgctgccggctgcctcccacgcacgcaggctctgccagcctgccttgccaatctgccaggcaactgggacaggtgcagacatgacccaggctccaagcacacgcatccaccctccccgccgaggcactctcccggtgccatatgttgactctgcccagcgccaggcagcccagcgcccacctccccctccccagcctggccccacgcacagtgctctagcctctgctgggtagtgtgaggagtggcaatctgcaggcaccctagaagtcggcctggttcaggtgctccccacgggagccctgattctcttgcaaggtaaatcacacacacacacagggcacgccagagtcccaggaaaggttttaattccagtccttggaatctgagaagcagacaccaagaactgccctgagaacacctggggggcctggcatcttgcctccagatcca

SEQ ID NO: 56371 - DNA, 1404 bp, Homo sapiens
tgtaacttatttacctagcacagtgctggttcacttgatgactggaggatttgcaaatacaaatttaacaaaaaaattttttgtgagacagacattagtttttacttttcggtagtcccaggtccctgtaatggtagcaagctttccttgacaccagttcaagttgtgtatagtaagcctggcctaggtgagtgtttagtcatattcctcaacaatttcactaatgacctgcacctgacttgaaaggctcggttctctaaaccagcttcatcttcccgttatcaagcctcagttcccaacatttgcaatgcctcttcactgttagtatattcactttgtaagatgcagcttaagtctatctcttccagaagcctttctttcctccccctggttctgattatgagtgagttaagtcacaaccttcccaccttaccccgggtgcaaaaagcggataaccattcctgctctgagtgttgaggagctcacaggtggtaagggatggaaaagcacactgtaaagcgctgtacacaggcaatttatcttttcagaatggcagctcctccggggcaggcccctagggaaggcagaccctccccactctcgcagaggtcaatccagcttctccgcagcgcccagggggcctcccgctcccttctagatgcgccggagcgggccggaatatcactggctcgcccgcagcccagcacgcgtcaggccggttaaatctctgcttcggcctcggaggaggaggttgtgccggccctgctcgactaaccggagagggcgaaccaaaagccatgcatgacgatacgcaccgcggggactggagcctctggcctcacgacggagattccctgagagctgcccgtggttgccggtaccggctgctgccgccggactcccgtaggcgctgcgcggctcccttttcttcgggaggcagagcctatcggtgcttccgtgtgcgtcatcaggaggcgaccgtcggggatgctcacagttggacagtttggtcccgaggcatgctgggataccgcgggccggtctccatagtaactggccgacattcgcgcaggccttcggcctgcagggaaggccctgatggttcagtgctttgcagacggtgcccttcgtccgcggccatctccccacggcgtgcaaggggagaagccggccccgatccccccacccccagctcaggagagtaacggagccagctgtgggtgtgaacacgcatttatttacacattgtcatcggtaggcacatacccagcccagcccgttgaagggacagatctcaggctgtcacccatggaacctgcagacccttccctcctccagaacccttgaaggcgaagccctgagagaaccaggaattttaggcttctgttcaagagctaagaacta

SEQ ID NO: 56372 - DNA, 981 bp, Homo sapiens
acggccccgccgctcggccgcgcgccgtgcagacgcccgcccgcccgggccccgccggcttcccgggacgcactcctctccctccccgccggcgcgcgcaccctggaccgggcgcgccctgaacgcgcggcgcgctcggccggactcggagggaaaccgcggcagagctcggctgcagcgtggtaaaggatggcgcgggctcagcagaaaggaaatcaaaacgctcccttccttccgcggcttcttctttccctgtgtccgaagaggtctgcgttgcgacttacgtggtagtgcttggaaggtgcggagtagatgagagataagtgaatgtggacaaacctgtcacgtaggacgaggtggccgagtggttaaggcgatggactgctaatccattgtgctttgcacgcgtgggttcgaatcccatcctcgtcggccctgttttatagaggttgggggggaagcatctacattttcacatcctgcctatttggagcagcaagctggaggtgcgaggggtgaggcatctaaattttcacatcctgcctgtggagcagcaagctgaagaaaactgaactgggggtgagagtggaattcgatcccaagtctctctggtctttatccaccacgcatctcctgcctgctcctacttcaggtgtctgtagctctgggcagaggccaaaggtgttttctttccttctagaaagagggcccaggggttggtggcacggaaaagactagaaccgggattctggccagtgtgaagttgggggccaacgtatgatctgcaggaatcagggaagccccccattggaggcatcgccctccccgtccgaagtagtggtacttgtcctactctccagcacttctcctagggcggagaccttgtgtccacatgccctgctccccaacacacacaatctctttttttttttttttttttttttttgaggcggattctcgctctgtcgcccaggctggagc

SEQ ID NO: 56373 - DNA, 1091 bp, Homo sapiens
caccacacccagttaatttttatatttttagtagagacagggtttcaccatgttggccaagctggtcttgaactcttgacctcgagtgatccacccacctcagcctcccaaagtgcttggattacgggcacgagccactgagccaggctattgtgtgttaatcttgaattctgcaactttgctgactttattagctctaaaagtttgtgtatgtgtgtacgtgtctgtgtgtgtgtgtgtgtgtgtctctgtgtgtatgcatgtattccttaggattttctatatatgtatatattatgtcatctgtgactatgaatagttttacctctttttcagtttggttaacttttgtttctttttcttgccattttttttcccaccccagtgcagaagttcatttcttgccaaattgctctagctagaacttctagtacaatgttgaggagatgaaacggtgaaaccacgtatccttctcttgttcctgatctttgggggaaggctttaggtctttcgccattaagtatgatgttatttgtggatttttcataaatgccctttatcaggtgaaggaagtttccacctattccttgtttattcagcatttttatcttgaacgagtgttggactttgtcacatgctttttatcttgaacgagtgttggactttgtcacatgctttttatcttgaaagcgtgttggattttgtcacttgctttttgttcataaattgaggtgatcacttggtgtttcctcttcattctattaatgtggtgtattacattgattgattttctttttctttttttgagacgttcttgctctgtttcccaggctggagtgcagtggagcgatcttggctcacggcaacctctgcgtcctgggttcaagttattctcatgcctcagcctccggagtagctgggattacaggcatgcgccatcatgcctggctaatttttgtattttttagtagagatgccgtttcaccatgttcgccaggctggtcttgaaatcctgacctcaagtgatctgcccgcctcggtctcccaaagtgctgatattacaggcatgagccaccacacccagcctttct

SEQ ID NO: 56374 - DNA, 599 bp, Homo sapiens
gactttctacttttcctcctgagctccctccagacctcaccttagttctgaatgagagttagagagcctggacggtgtccctaacaccagattatgagaggataagagccaggacagagcggcctcggtgcccgccagtgcagaagcgctccgggagccggggagggaagcccgggaagttgcagggatggagctgcctgagcctaggggaacatagctactgtccgcggtgctgaaagggatctcctgtcgccttcggggcgctgcccatggtgctgacggctgcgccggccgtgtatggctctgtccatggttctgaacccacagtcggcttcggagctctgtccgcggttctgaaattcagagccgctttggagctctgtccgcggttctgaaattaagagccgagaggagccgaccccgctttagaagtcgagggcttgtgggctatggagatacagcaacaggttccctggccaagagctgcgggcagcgggtcaacaggtgtttgcagaggcaggtccatgagaaattcctctggattctctgaaactcagaccatgccttcctcacttcttctctgcctcccagtcttactc

SEQ ID NO: 56375 - DNA, 1596 bp, Homo sapiens
cgtgccactgcactccagcctgggcgacaagaacaaaactccatctcagaaaaaaagaaagaaaaaaataaatctgcagcaaacatccctgtcccctctattcctgccctcattctgctctggaagccccagtgagatggaggggcaaagggaggaactgcaacatggcaagatggggctggttcagaaaaaatatgatctagtcctaaatggggaaagtggagcccagtaataggaagtcaagtcaggagcagagaaacaaccccagatgaccagtcccagggccgaggaagaacagagggagaaggaaaccagggatcagagtccagactccaccttcactaaaatcttggtaggcagaggaatgccttccttgatgtcctttgtcctctcattgaactccttgcaaaactggttgatggaaacgcctctctgtgagggaagcagagggggttagtggtgagaggaggggacggcttcctatcgcccaggaggcgccgtccgttccctccttcgtcttcacttctctgggttcccatctgtacccagattcaactacccctccgtgagccagaagatcgtacgcatcttcccacgttatcctcattacagcacattgaagaagggatgaggaagcccaggtggaagacactttgtaaccagcacaaggacataaagcgtgtgagaagcagagccgagctctgaaccgaggcccgggtggttccagggccagcgccctccatccgcgtcctagcttccaccatcctagacaacccccacgtcgggttcccgccacggccgcacctgacccagcactgggcctagtgggggcccgggcatggccaggcctgcccgcacgatcgcccggatcacaccgccgacctcgggcttcctgaggccccgggcggcccggccgagctttgacatgatgcggggctgctggcttcagttcacctcaggggagcagcaagagcgaagctctgggcgccaccatcttgggccagaggtcaagggtcctcacgttaggctagggcaggtgaggccaacaaacagcagccttgtttcaaccctattgctcgccaactagtaagacaaggaggatgagaggaggataaaacactttttaacttgttttatgcagataaaggaagggcccgaatggcctaggtacacacattcccacaggaacgcgcacaggcactacctcggacagctaaccagtagggtgggaccttgataccccatagcattgtgggtatggtagttttgactccgtgtgcaggtccggccaattgctatgcgccagggcgccatctgctgcacacggtgataatcctagggtttgaaatacacctggagctcctgattggtaatggaagtctctcctctctctgttcctcacatgctgttgaaaggcagtacggttgagtgtagaccctgagctgggcacggtaacttacgcctgtaatcccagcactttgggaggccaaggcaggaggatcgcttgagcccaggagtttgagaccagcctgggcaacacagcaagaccccatctctactgggcgggaagatcagttgagtccagaagttggaggc

SEQ ID NO: 56376 - DNA, 2195 bp, Homo sapiens
tgtgtggtgttataggagtcggcgaacctcttagcctcagtttccctatctgtacaatgggtaaagtgatcatacctcaggatttttgcaagaattaaatgaggtcctccatgccaaactgctagcaagggacctcagtatatgctcatcttatctgtgatcataaaaatgtgatcacgtagctggttggggggtcctgagagcactggggtcttttccttgcctgagctgccccctgctggcagtgggcagcactacctcccttacctgtgcacatttcaacttcacctgtcagccaactttatacccattttaaagacaatgaaaacggaggcacaggaaagaagaggggtgactttcctaaggacaccgaccaacttgttgaactcccccatataacaagtaatcatcaaagctaacagcttgtaacactgttgtgtcaagcagggccttgggcacctttgtggatgagaaactggtgtctatggtaagcagaggctgtctggcctagacacgggcgtagcaaggagaccgtgcgggatttcagtacccaaacgcccctcaccctgcgcaactatagggagcggcactgcagtcaacacatcacaacttacaatatcccttggattggattcaattattagcctggttttccggttcataaagccaagactcccagacaacctcactccaccccccagtctgaccctgggccctcaccactactccccatttggcctaggcccttccgcatgccccacccagaccgtggtcccgtgagtccgtccagacctgtaaaagtggaccgcgggcccgcctctgctctggactccctttcggggccgcaggaggctttctcatccatcaggcatctggcaagcaccaggaaactaccagcctgtttgtgctaaggaaactgaggctcgggaatgtttagcggctccttccaggcccgtggcgggtgggtggtggtacagtgaagcagtcgaggcgtttctccgcgcccctacacgggtgggaccacctcagccctggcccgatcccactcaaccgtagccccgattcccggcaccgagagctttgcaacttccaagtctccacccccaggtcccgagtcccgagaggaaggtggagccacattactcctattgtgtaggttcccacctgcaagagtgctgtcgggtcctctgaggtgaaaccccaaaggaaagcgggatcgggactgggggagggggattcccaagtccctgacacccgcgccgtctcggcctgggcttggtgacctcgtcagtcccgtctgccgggactaggccgcggccaggccgggcacagcggtacccggtccggcgcgtgtgcggcctgctgacaaaaggccgagcccgcagggccaatccgcgcgccaccccgtagcgcctgggggcgggagcgggcgagccgagaagctcgtcttggcgcgtctattggctggtactgacgcccatccggaccccgaggccaggcagttggccaaggggggcggggttcgcagagccccaatgaatgggggagccggaagcaggaagtgagtttgcgaacggagcagctgctgcaggtgaggcgcggcgcctgggcttttggggtcaaagcgtgtcatcccgggggaccaaggcgaatccatactgagcgcaaaatcgttccctttctgcccactctccagtaccccctccaaattcaccccgccctcgaggccaaggagtgctccggggagcaaagagttaacagccctttccgaacctcgaggctgtgctattggggcggggcttctggaggccggggcagggcgaggaggctggacactctgtcccagccgggacggggcgtggcggggagaatgccccgggttggggaatccccgggttccaacggggctgtcagaccttcagtaaattgttgccctttccaagcctcagtttccctatctgtaaaatgggctttcttctggttgtgaacttctgtggcttccctggtggagcacagggagcgagcaggagaatggagggccaaggaaaaggcatttagagggatgagaatgggacagtttcaagcaaaatcatttattgctgtggatactttccgtccagggcgacttcatctgattagcgcacccacctggtaatattggggttattctctcttttatagaggaggaaacggag

SEQ ID NO: 56377 - DNA, 987 bp, Homo sapiens
ccctcgtgttttgtttctctgggcctggacctctacagtaacgcagcaaggcaggacatggtccttttcaaccgggtaaccatgaagatggagacaggaggagttctttttgctgctcataaatgctagaaggggcttctttccaaccctggaagccagagggctctgtggctgacccagagattgtaggacccagacgcctggaaaggtggctctgactgggaaggagcaaagataaatatctttgaggaatctgagacagattcctcaacccaggaaggtggccagcgcgtcctcctgagcctgggtgggaaagcttggcgcccggaacctttgtactcgcccttccctgtgctcgggcactattgggcgttacgcgagggcggggccggttgccaggacgacgcctgcgaagatggccgctgcgtcctcatcggattccgacgcctgcggagctgagaggtgaaggcagggctcctcaaggcctcttttcccacccgtgtaaagagggtcccttggtccccgggctctgggctcctgctgttctcgggcagtctggaaggactcttaagaggtcagatagggaaaccgaggcctaagatgtgcatatgtgtgtctggaggtcgctcggtgagccagtggcggagcctggacttgtacccagacgttctgtaccttatgttcagagtgacctgtaccagcttcctcaaagtttttttttcccctcccatgggactcactccccaactgtctttcccccacttccagcaatgaggccaattcgaagtggttggatgcgcactacgacccaatggccaatatccacaccttttctgcctgcctaggtgagtctctggaaccaggaaccctgggttctagtgggatggggagtcagacaatggtcctgtagtgaagcctctgggattctgagactctggttttggcccttttgttttccagcgctggcagatttacatggggatgggg

SEQ ID NO: 56378 - DNA, 1258 bp, Homo sapiens
gtttcaccacgttggctaggctggtaaacttctgaccttaagtgatccgccggcctcggcctcccaaagtgctgggattacagatgtgagccaacgcacccggcctaaccacctatttaatattgaaacttgcaacccctttaccctgctctacttcttgtttccaaactactatcaccttctagcattctatatgatttgcttattattcctctagtttctcatctgcacccccctcaaatcaggaatttgttctattgtacccttcgtccctgtaacaaaaccttgcacctagtaggctcccaataagtatttgcgagtaaataaataacactcaattctagctcttccatcccaggttctaaaaaaatgtctgattctaacaacctggatcctaatgtaacccggttctaacatctcaggtcttggggcccctcccccctgtccaaggctcccacttctccccgcccgatcccgcaccccactcacgcccagccctggcccagaccgcggccggccagcatcacgccacggatgctgggatccgagcgcaggaagagccccacgttgcccagcaggttgagcagctggaaggcggccagcgccagctgcaaggcccgggccaggggtcccagcggcggcggcccgggaccgagcaccagcacgtaagccagctccaggcccacggccgcggcccacagcgcggtgagcacgagaggcagctgcgcgggcgccccgtccgtgctcccagccgcccagggctgccccatggcctggacacccagctgtcggagccggaggactaggccgcttccgtattggggcggagatagcggcagacggacgtctgctacggccaatagaagctcggaagggggtgcggcgagcgctcagactctcagggaacggccggcccacgcggcgagttgatctggccaacggaccagcagtggaggcgctcggaatcccgcggcgctggagcccggataacgccgcggagtgattgacccgcccaccctggaggctcctcccatcccgtcggagccccgcccgctggcgcgggggccaggagtgcccgggggattgagttgcagccggggtggtgtcggggtttcccggctcagcacattctcccctactccccacagccgccccgatattaatagccctgccgcagcccatccagctggctcagagccgttccccatgcccgggtgtctccatcaccccagaaaacatgcaaaacagctcggcgcct

SEQ ID NO: 56379 - DNA, 1119 bp, Homo sapiens
tgggagtcgacatggtcaccagcaggtgcaggtagcgcaagaagagctgctcgctgctcagcagcacgtaggcctcgagccgcttccgcagcttctggttgtttttgtggctcagactaagttcggcgggcggctcccgccagctgcacttcagctcgtccaggatgaccttgatgagacgtagtcgggcctcaggaggcactcccgctgctatcccgctgccggccagcagcttggccacctggctgcacagcgacgccaccgtcagcttcgccagagggaaggactgcagaatccggccctcctgcggggggcgcttctgaggctctggggacgtcgtcctagtggggaagagcgacagcggacgcagcagccggtggtaaaaccgctggagctcaggctcgggcttcgggggctccatcatagagccggcggccgccaccgtccaggaacagaaagccgaggggttactaaggcaaccaggagcccgacggcccgagtgcgcctgcgcggccgccacccggtggctgacgaagcagggccttgcgtgcgcacgcactaggaggaggagttaagggtggctttagaggctcagtccccgcgacgccgcgctggttggtgctcctgcgccggaggagttctgcgtctcggggtggtgactgggtccagaatggcttcggattcggggaaccaggggaccctctgcacggtgagggtcgaggcttcgtgtggagcctcgccgggcagagagcctcggcccctgggatgatcgttaccttgggaagaggagaaggagtgggcacttgggttggggcctggggccatgggatgaaactagggtgcgagggtagcaggggccctgcgtgagtgttggggggtgactcccatggtcctggaatggtcatgagagatcatgaagaaggtgcttgaagaggggttaagtggggcttgttcccagacccttgcggtggtcatagggtaggtggtgaaacaaagtcataccaaggcacttccccagcgatcatcggttggtccctgccgcccttgcagttggagttcgcggtgcagatgacctgtcagagctgtgtggacgcggtgcgcaaatccctgcaaggggtg

SEQ ID NO: 56380 - DNA, 1384 bp, Homo sapiens
aaaaaaaaatttaattagctgggtgtgatggtgcatgcttgtggtcccagctatttgggaggctgaggtgggaggattgcttcagcctgggaggttgaggctgcagtgaaccatgatcacgccactgcattccagcctgggcaacagagcaagactccatctcaaaaaaaaaacaaaaccaaaaacaaacaaacaaaaatctgactttattcctttcagtcataagtaaaaattatcaattaacataagtgaagtgcttggcacacagcctgtcatataaagttaagggagcagcagctatgattctgaggctgcgtgggaccctcggaggcagccctagccaagctcccctttcctatggttggatgagctgctaaccagggtacagtttgtggggcctcgggttcagagcctccctactcgtctattatttccctgtacccccatccccatggggtgccttgctcatccttgacaaagctgcttttatgacagggtaagctggcagactacaaactttgccccaagctggcagactacaaacgttgtccctacactgcctgcttggaactgggtgggtggtttcgcagttagttgtccttggcttcgaggcagagcccctggctcggatcccattccccagtccctgtctgttttccctttcaaggctgtgggtgggttccacctctagccccaacccttggactctgctctttcttgccaaacctatgctggttcttttccagctccctgtggttgctgggagccaaacccttttaagcccagactcaggctgtctttccccacttccaagtcattgcagaaattcatcctggattctgcccacagctaacccctgacatcctctcacctccattctggaatgatgcctgggttttaacctttttaagcctaaacggttcaccatgacacgactctattagcctcttttttttttttttcctttttttgagacagagtttcactctgttgcccaggctggagtgcagtggtgcaatcaagactcactgcagggtggatgcagtgactcacgcctgtaataccagcactttgggaggccaaggtgggtggatcacttgaggtcaggagtttgagaccagcctggccaacatagcgaaaccccatctctactaaaaatacaaaagttagccaggtgtagtgggattacagtgcctgaaatcccatctacttatgaggctgagacaggagaattgcttgaacccaggaggcagaggttgcagtgaaccgagatcacaccactgcactccagcctgggtgacagaaccagactcttatctcaaaaaaaaaaaggagatcggccagacgtggtggctcacacctgtaatcccagcactttgagagg

SEQ ID NO: 56381 - DNA, 2491 bp, Homo sapiens
ggagtgcagtggcgtgatcttggctcactgcaacctccgccttccgggttcaagtgattctcctgcctcagcctcccaagtagctgggattacaggcgcgcaccaccacacccggctaattttgtatttttagtagagacggggtttcaccattttggccaggctggtcctgaactcctgacctccggtgatctgcttgccttggtctcccaaagtgctggaattacaggcgtgagccaccgctcccggactaaaattttttttaaggctcaacttttgcttcctgcagaattaattttctcgtttattaaactgtttattatgaaaaccttcaacatacaataacgtcattccattatttcttgactgggaattccatcagggcagaggcctttgatttttcaccggctgccaggacctcagcaaccccagggaatgtttccaaagaatcaattaatggcacgagggcttctccggggcctgcctcaggtcccctcgcggtgctcagcacagtcctgggagccgtttgccgactcaaggcgcctgtcctggtttctcccgccaggcccggccttcccccgtacactcacgcggcaacccccaggcgcgggtttggacagggcttccagaatgggaggagccctgacttccaattgtacaaagttttcctgggagcccgccggtcccagccccacccgggccagagaccgccttacagactaggcctctctgccgccggcgccgctcgcgcgcgttctcctctcttcagccctccctcttcttcccaaccccctctcccgccacgggctgtggcggttggtcgtccctttcccaccccctcagctaacgagcgggctctaggccctctgggattggctgtgcctgagcacatcttccctcagcgtttctgattggtcgctggacgcgcgggatgcgagtccccattggctaggccagggcgcctgcgcggcggggttctcggtcgccagccattcctgaggaggactgccggtcgttcggacgtcttgcctgtcgctggaggagaggtccgggctctccaggaaggtggctgcggcgacaaaatgaagatattcgtgggcaacgtcgacggggcggatacgactccggaggagctggcagccctctttgcgccctacggcacggtcatgagctgcgccgtcatgaaacagttcgccttcgtgcacatgcgcgagaacgcgggcgcgctgcgcgccatcgaagccctgcacggccacgagctgcggccggggcgcgcgctcgtggtggagatgtcgcgcccaaggcctcttaatacttggaagattttcgtgggcaatgtgtcggctgcatgcacgagccaggaactgcgcagcctcttcgagcgccgcggacgcgtcatcgagtgtgacgtggtgaaaggtaacgcggaggcgcgctcgggggcgggggcgcgctcggggcactctgcctgttagccacgccccttacccgggggtcggtcactgcgcggttgggaggggtggggaagtgcgcgggagcaggtcggaggtgttgggggcgcgttgggtagagccaccctcctcccctgcggtccaggaaccgtccaccaagtaggaggaagcggctctgggtgggtgcggcggccactgcgagccaagctacggggccggggacgcgcctgagagccttgcgagtgttccgggggcgcgccttctcctggtctcctgggcctggcacccagcggaaattgggaagtgacgggcacaagccggatcatgaagcggggaagatttctccacttccccacttcctctccagacgtcggtcagagcaagggaagagggaaaaggtgggggctgacgccccaaggccgccctcctgttccctcccgatgaatgtgctcaagcggaaggtaacggggcccttggacgtttctcgggctggggtcttttagtcttgtctggcatgggtctactcatgggcacagttacacgtgggtacgagaggggccccttccgaatcactttggcctttcaatattaggtaggttaggcgtggcagctctgtgcttttctcctccctcaaacttggggtttttctttgggctcgattttacatctgtcaactggaaaccccagccttttgcatgtgcaagaaagcttgttttatgaagtccccttctgcgtagtctttacatgccaagccagtgccctagggcagtgtcattcttttataagcttggtgactttgcaggggggcatactctggctgagggggtcctggggaggggtctgtgagagctcttcattaaacagtggctaaacacggtttactgaatcagtagtagtcattgcttgagtagtctgattctcagggcagatcccggtgccttttcttcgagaaaaatgtgtcaccataatttaagcctgactagggacccagttgactttttcatagcttgagtttttatcccttaagctctttatctttt

SEQ ID NO: 56382 - DNA, 2046 bp, Homo sapiens
aaagttgcttgcttaatgaatatgaagcagcctaaggatgagagaaaacgaggcagcagctggaccctctggagaatgttactttgtattttgtttacagctggttgtgactaagctctgtcctctaaagtcggttctaggggattaaaacagctctggctgatggcgcccaataaaataaaacaaaaaaacctttgctgctccagttttttctcagggtggggtcggggtatactttaaatctccatggtctcagaaaggtttcttcatcgcggaccctgggaggctggttcccagagggaacttgtcctcagcgtctcctggacagtgcagcctcctgccgggcctacttctggaaggccattacagaggtcctttcaccacctgtgagaggtttgattttgggggagctccgggactctcaaggctacagtgtggactgctggcccaaggagaaggttggtttcctgaagtggtgggtggtgggttggggggggtcttcgttgtttttcttccctggcatgtgcctgcataagctatttccacagcgtcctggccgcgagggggggtggtgcttgggaggttagagggagacacctagagtgaacggcaaaatggagcgcggaatactgtctggctgtgcacgtggaggtggcgaaatgtggaagcttaacgaagttggcgccatgaagctaaagactgctaccccggggctctagctcgctccgcctaatggcgggccgcaccccgccggcgaagcccacgtttgtaggtccgccctcacgctgatctcttgcccaatcagcgagttcggcttcgcgaggttggtgcccattggctttcgcataaaagctccgaggttacagacgtttccacctcttgccggcctcttaggtaattggcgtccgtggtaaccaatcaggaagaggatctgagggaacgccggccttttactttcttgagtggccaatccggttgtaggctcacctcccccttctactcagagcactgctgcggccgccgccattttagcgttttgtcagaagcgtccgcgccgcgaggaggaggccctgctggtttctgtgcgggtgagactccgagcctttccactgcctttcttgtactgtgttaaatcttctctcactcccttgggcttcgggggtgtcctggtaggtccgcagtctccacacccgtcactgagagccgacctcggtcctcggcattgcgcggtaagccgggagcagcccttcccccaccgccccctgagaataccttgctttttttcgcccaccctgtcccgcgcccgacatggctgctcttggagcctcgagatttccactgggataaccccctttcccttatatctgacagttacattctcgtttcgggaatttctcgggccgtgagacatcgtctggttaatgaatctgaagctcttttccgcggccgcgcatttcagtgttcggcaggagctaggacggtgccccgagagaggcgttcaccactccagtatttcctttatctcccactcctcgctgtctgatccgagtcgcgcgttcattacttccaaaggaaactcaaatgtagctattacaaggcccattttcccggaaatgatggctgctttggttcctacgtgaggaaaagcctgttgataatttcaggcaggcagtcagcaagcctagtagacttttgttttctgttgtcctcctagtggatagaaaagcctagtacccccatttcttcatatgctgtctttcatgcccatttctgttggaaggtatcggttcttaccaaaccctttgtctactaaggacctccctattgcagacgtcttcttattcttacaggttcatggcggctactatagcaggccttagttcactcccacttccatttgattattgtgtggaggtgtgtgtgcaggcgtgtgagagagaaaactggaaatatacattagagtgaaagtcgttgtcttttgtgaacggatgtgggcctgaggtcttttgtcagatgtcttgtttttctctcccaggctcttgtcag

SEQ ID NO: 56383 - DNA, 818 bp, Homo sapiens
gatgggaggattgcttgatgccaggggcggatgttgcagtgagcagagatggcatcactggactccatcctgggtgacagtgggatcctgtctcaaaagtttcccaggcatcctcaaaattggggttgttttgggtgaatgctaaattaaaccaggctccttaccctagagctacacatcagtactaaagtagactcggggggggatggagtagtgagagtgagatcattgatcattggcactagtattaagtgctgtttcaaattacccaggtcagtttgctctcagtacttgtgtgttcttacacatgatctcattctgaggtaaaggaaattcccaggatgatggtgatgggaagtcccaggactccctttctgcagtggatttggagaacagtagtccaggttgtagcaagagaaagtacttttttttttttttttgaggcggagtcttgctctgtcacccaggttggagtgcagtggcactatctcggctcactgcatgctccacctcccgggttcacgccattctcctgcctcaccatccagagtaactgggactacaggcgcccgccaccacacctggctaatttttttgtatttttagtagagacagggtttcaccgtgttagccaggatggtctcgatctcctgacctcttgatccgcctgcctcggcctcccaaagtgctgggattacaggcgtgagccaccatgccccgccaacaggaggatttttttagtccgtttgaggtgctgtaacaaaagaccgtaagactggatggcttatacacaacagaattttatttctcacagtttc

SEQ ID NO: 56384 - DNA, 1672 bp, Homo sapiens
atagaagaagggcggtttgttctcgagaagtgcgagctatgcgtgacatgcaaacaggaggtcgagggtcagcatgcatagcccagtctatcatctccgtgaagtggagcgcaatgaaataccagaattagctgcttcatgtcttaaaatgagggaagagaaaagcccaagcaaaggcaaggggcatcaatcgcagtgcgcctggtaacaaggttttggagggaaatctgtgtacctctcctgcgcgcactagcgcctttcaagatactctaaaaagaaaaaagtcccctttcccccaaaccggggaccaaccacctcgcccccagcggcccaccctccagcttcttcgccccaacaaagactcgacccgacccctgccccgcctccttccggagacccggccccgcctcctcccgttgtcttcccagacctcccgctgcaaaatgagaaacccaaatccgggccgtgcagtctgccggaggcccggcccgacccgcccccgagctccccacatcacacacacacgaccccctcgcacctccgggtggcggcagcgacggcggctcccacgtcagagagaaccttacaaaatggcgacggccgctcgagcctggacgcgaccgggccctttctcgcgcgccagctcacgcacgcgcgagtgcgcgctgcttccctccccttcccctcgcgggagccgagtgaccaatcccgaggctgcatacaaatgaccacgcagcacgggggcggggcctgttggtggtggcgcggcgccgcggaggtcagcccacccccagccccagccagccagtcaccaccctggaaagggtcgccactgctgcgtcagaggggctctgaacgcaaccactgcctagaaaagcggaggccttggggagtcgctcaccacaatgggtcctgctcttgggccctttgaggggggcggggagctaatgacagaggaatctccccgagggccctaaaaaggggcttttgtagcgggctggccggcttctgtggcagcttggggcaacatttcaaaaatacaggtgcgccacattttaagcaaaactagtcattgttttgtagcgctttaaacattattttaaagtttgtcattgcagaggtgttatttattgctacggaaactgagaaccaaggggcagaaagataacctggcagaactgggacaggcctaagaggcattgctacccaggctacgcttagtcatgttttgtttgctcgtgagtatccgtggtctgattctctctcactcattgtgtgtccatcacagtcctggtctgtggtgagcacgccagaggaatacttggtggagaggcccagcgaggtccctagttctgggtgggacagggtctcctcgtacacaccaagctggaagtctaggcaactgagtttcccgactgtctagcattcaaaattcagctgtggtccaagggcacctcctggcggtaaaaacaagcttaggcgtgccaggtgcggcggctcacgcctataatcccagcactttgggaggccaaggcgggcggatcacgagttcaggagttcgacaccagcttggccaacatggtgaaaccccgtgtctactaaaaatacaaaaaatagcccggcgtggtggcgggcgcctgtaatcccaactactcgggaggctgaggcagga

SEQ ID NO: 56385 - DNA, 503 bp, Homo sapiens
tctggactaatattagtttcagagctgatatatattaactccaaaagaactccatgacagcataaacacagacgttttggcaggtactgaacagaattgcctaacagcaatcacatacttggaacagttaattgctaaaatactgaaatgataagaacctctgcaattctcacgttaccagccacacccatgttgccggttgtgacctgcctgtcaggtccagtcccctctatcctatgctaggattgggttgccatgacacctgatcagtaatcttatctgatggatcgcactgactcaacacatcatagcaatcatttccacagcatgtttgtttgttttttgagacggagtcttgctctgtcacccaggttggagtgcagtggcgtgatcttggctcactgcaacctctgtctcccgggttcaggtggttctcctgcctcagcctcccgagtagctgggatgacaggcgtgtgccaccatgcccagctaatttttttgta

SEQ ID NO: 56386 - DNA, 465 bp, Homo sapiens
tccccacagggggcccccgggcctcaccttgcagctgtttgaagcgtccttccagcacgctggcatactgagcagggttgatgaaagcagctggtgaaagcaggaggcccccggggttgtgggccccttccacagcctcatagtaaaactcgctggcctcatgcaggccgttcccgtgcaccctgctcactccgttcccattcatgctgccagctgctagttacagagcccagggcccagagtccatgctccccgctggcagggggccagtttctgttccccagtggaacctcaggctggagtccagcgtcaggggattcaagaatggtgggaatttcaaggagtggcaaaaagagttacggggtgtcccgaactcctgagacagagagtgggggcacgcctggctgcggtgagaggagacaggcggctccagacaaacaggttggacagtgttggggaggggag

SEQ ID NO: 56387 - DNA, 2439 bp, Homo sapiens
cctcaggagctcaggcgatgggagaggaagatgaagatggagtaggtaccacaggtaatgaaagaaacagcacagcgaaccgcagatatgcgggaggagaacggcagagctagagaagtcacgggaaggcagagttgaacaaatgacagtgagatgaataatagattagaagaaatggggactttggcaaagttcaaatcttatttgcttctaagtataaatgggtggactggcagagagataaaacgaaaaagaagtcacaaatcagctcagggcctccaggaaggcaagagaaagatgggcccagggcagaaggaaggaacagcaaaaccccgacccacctctcagactgtgttcctgatcaattccctcggaggaagttaggaactgggctgaagagggggactgaaattttattttctcttctagaatcctccagttatggcagatttattcaaatattcagattcttcactcccttgctatctcccttccccaacccggggtcacatcaatttctctaagggaagaatgtaaactccatcctatcttctcctcggccaatcctttgcctttctgaataagccaagaggttgccccacacctcaagctaagacacatatttggaactcactctgcccctcttcaccttcaaggaaaactggtttgttgctacctctgcccatacctgaaacccccgggctctccagcgttggaactgtggctgctccgagagggggagggcagacgacatgtagcaggttaagaccggggcaaacctgcacctcacacaagcatgcaatgtcctggggtcaatggggtaaagttccaagcgagtggaaggtaaatcacgactgtggcaccggagccggaacacccccgcgagcaggccttgctgggtagttccgtgcggggcggaccgcacagccctatcagcttcctggccacagaaacgccgcacgcggccgcttccccgccgcccgaagcgtctgctttctccccgggccagttccggccaccacagccaaccgcgtgcccctctcccacacactgtgggggaacagaagggagcgcgtggagccagctgccaaagaggcgaggaggagcccacgcggctccggggaggagggagcccggctcccgcagtccgccgggcagaggcggccgagcgcgcccccagcacctggcccggcgccggcccgtccgccccgcagccccggcgacgcgaggggccggcgctgtcagacccgctcccagcctcgccgcgaacgtgtccgtcagccctaactgttccagactcttctcccggctccagagaggcccgagtccccccccctcggccttggcccccaccgccctcatcccggtacctgtgtggctggcacgggaccctctccgtcccgtccccgcctgctcccgccccggctcaccccggccgccgggacccgaccccgaccccgaccccgaccccgccgaccgcacgcggccggacaaagcgcgccgccccgcgggccgggacaaagcgggcggggcgccggcacctacctcggcgcggagccgcggccgggcgggcgggggcgcggcgggcgggggcgcaccggtagttgccgcgcctgcagcccggccgcgacgggcggttgcaggcagcggccgggcgcacggcgggcggcgggcgggcgctgtcacggggcgcaggcggcgcggggggcgcgcggggcgggcggcggcggggcgcgtggcggcggcgcgcgggcgcgagcggcgggactgcggcgccgcggaaggaggacaatagcctccccctgccgcaggccgccggctcccgcgggaggcccgggaccatctggagccggcggccccgcggggctctgggcggggcccgagtcgccccttccccgcccagcgccatggcaaccgaggcccctctcggtgctccccgccgctccccgcccggggtagttgacctgcctcggggcgaacgcggcagcagctccgaggccggctgccgacccccagccaccttccgtgcggggtccccccaaaaccccgccttcccgtcctcgctggtccctgggtcccccaccacagcttacaggtcttgatctccccggttcggacacctcacctttgtccctattctgcttttcctccaaaatccgtatccccgagacacgcgatccttcctctaatgacactgccgacgaggtttcccgagatccagcctccgttcccctttcctctccgggcacctccagtccgtctccgctaagcattcctctcacccgtcccctcgctctcgcgtcctccttcaggcagctgggccggctctccctcccagaacatctccatggcacagtgaagattcgtcttctacagatcagatgctccaaacaggcatctcagcgcttctcagctcctctcatttatcaaccaggagaa

SEQ ID NO: 56388 - DNA, 1468 bp, Homo sapiens
ttttaattggccgtctttttctttgctaagtctgggacccagggcttggcctggggcagcccccgccgcagacaaggctgttggaggggtcacgaacccgcttggtagccccgcgccgttaccgtcgcccctcccggccgagggaagggtcctggaaagcgcgaagggcggccaaagcccggattagggccaagggccgcatctcgccgccaccgtgggaaactatctttgagaggagggaggagtcgtggcctggcctcattcccgctcacctccagccttggccgcctctcgcgggctcttccccgccccgaacctcccacctgcgggcccactggcacccgcggcgctcagaggctctaggtggctcccggcggcggttcgcggtctcggggccctgcagcgtcgagtgcgcaggcgcggcgggcaggtgggcggggcgtgcgcgggcgcaggcgcgcgcgcgggaagggatgggctcgcgctgccgggcgtgggcgtggactcgggcgtgggcactggcggagttccaagcccgggctgaggagggggcggcggcggcggcggcggcggcgggcgggtacccttcgactgggcgttgccgctgttccctgcgcggcatggaggggacggccgtggccgtgttcgaggtgatgctgggaagggagagaaagcggaggacactttctgaggagacgggctttgtgaggagaccgcgaagtttgggcagaggggtcgggcgtcgcctaaggtgaaggaggaaggttcgggaatcgaggcccgtctcccacggggaagcgaggaagtaggagcagatgagggctctcgctcgcggggtactctgtgggggaacgacgccctctctccagcctacggctcagaaagctgcggcgtttgccgagcaccggcggacacccaggggcagagcctgacgcagcctcggaggtgcctgccggagcccagcgccttccatgcaccgggtgctgggagggggcgcggaaagaaggaaaggaatggggcaagccctggcgttgcggggcggggtggggggagtcggggcgccaggacagaggcaaggagggacccagtgcagactgggagcgagggagagtttttttaggccccggtgcaggtgcaggtttctgggttcgaagcagctggacgtggaagggcgaggttcagaggccacacctgtgctcggggagctgctctggaagacggcactgagcgcctggcgccggccacgccccgtgtgctcatttcattacccactttcacggccggtgcccaatgggacgttgagctgctgtttgtgaggggtactgggcaggtgacagaagcacaggctctgagggcacctgagagagtacccccgggcgtcctgcctgtttgttgtcatcaaagaaggcggcgggattccattttacaaataaccgaacctaggctagaacccagggcgctgactcat

SEQ ID NO: 56389 - DNA, 2252 bp, Homo sapiens
gctgaagctgaggcagtaggatcgcttgagcccaggaggtcgaggctgcagtgagccaggactgagccactgcactccagcctgggcaacagagcaagaccttgtctcaaaaaaacaaaaggtcagctcaggtatctcctcatggaaacccttcttcacatccagaggtggtcggcttccttctctattctaaccctgggctttgtacacaggtctgcatcccctcctagcatctgtgagcttctctcagggaaaagctcattgatctgcatccccaagacctgctggggaagaatctatccatctaaactcgctttaatttgacaaatgaatcagttaagagtaggaaagctgcctatgggcactgctcaatgcaacgtgagcaacaaagggagacagaactgaggccagaaaggtgaggggggacagaggctggcagggaggggagcttgtcagtgcagactccaggaagaatctatacagaaagttactgagcggcctgagtcccccaagtgagggctcgggacaatctcccgcctgggtgagagaatagggagaccctgaaacgtctctgcagcctcgggctgctccagaagcgcccacagctgcagggttttggtgtggatgggacctgctgacagggatgcggtgggaagagcccctcggcgcccgttctcccaggcttccccttggccaagggtgctcctagcacagggccatgaaagtaagatgaagaggcttgtttttctcctagataccagcgggcaagcagaaaacaagaggctcaagaggggcagcccccgcatagaggagatgcgagctctgcgctctgccagggccccgagcccgtcagaggccgccccgcgccgcccggaagccaccgcggcccccctcactcctagaggaagggagcaccgcgaggctcacggcagggccctggcgccgggcagggcgagcctcggaagccgcctggaggtaactgggcgagggccgcgcagggaagggctcagcaggaggtgcaggccacgggccgctgctgagaggtcctcaccccgggcccccttgttcccgcaggacgtgctgtggctgcaggaggtctccaacctgtcagagtggctgagtcccagccctgggccctgagccgggtccccttccgcaagcgcccaccgatccggaggctgcgggcagccgttatcccgtggtttaataaagctgccgcgcgctcaccaagtcctcttccgcgtctgcttccgcgtcgggcccgggcggggcggggcggggcgtggagccgcgccgcggcctgacgtcacccacacctccctgggactgcgtcactggtgcgcgccgcgggtcagggcgcaatggcggcgctgggcggggatgggctgcgactgctgtcggtgtcgcggccggagcggccgcccgagtcggcggcgctgggcggcctgggccccgggctgtgctgctgggtgtcagtgttctcctgcctcagcctcgcctgctcctacgtgggcagcctctacgtctggaagagcgaactgcccaggtgcgggggctgcgcgcgaccggaatccgcgccctgcgggcggagcttgggcgagccgggggcgggtccgtgctcatgggcagccgcgggccccctgaacttactgtcccctccgtagggaccatcccgcggtcatcaagcgacgcttcaccagcgtcctggtggtgtccagtctctcacccctgtgcgtgctgctctggagggaactcacaggcatccaggtgcgaaggaggcggggcaaagggcaacggcggtgagagctcaggggtctttaggggaggaagcaaaactgatgccccctttcctgtggctcagccaggcacatccctgctcaccctgatgggcttcaggctggagggcattttcccagcggcgctgctgcccctgttgctgaccatggtgagtgctcctgctgtattttttcttctggtctttgttatcagcctgatgggcagtgccgtggactcttgtttttggtttttggttgatgggagacaggacttttgagatggccccagggtcctccggtatgcatggtctggaaatcgtggctggagaggatttcaagcttggagtctcagggagcatgggcaaaggtctgggcaaaagcggtgggttatggtgaaagtgttttcttgccctcagattcttttcctgggcccactgatgcagctctctatggattgcccttgtgacctggcagatg

SEQ ID NO: 56390 - DNA, 2353 bp, Homo sapiens
ggcctcccaaagtgctgggattacaggcatgagccactgtgcccacctaataggcaagtttttttgttttttgtttgttttgttttgttttgtttttttgagacagagttttgctcttgttgcccaggctggagtacaatggcgcgatctcagctcaccacaacctccgcctcccgggttcgagcgattctccagcctcagcctcccgagtagctgggattacaggaatgcaccaccatgcccgactaattttgtatttttagtagagacgggtttcaccacgttggtcaggctggtcgtgaactcctgacctcaggtgatccacccacctcagcctcccaaagtgctgggattacaggcgtgagccaccgcacccagccaataggcaagtttttaatatcaatattgccaaataagtctcaaggtagttatcctaataatttacacagccactagaaatacaacagaatgtctatctccccacatctttaccaactgttatattgttagactttgatttctgtcaaccttgtagtataaaatggtatcattttaattttcagtcccctgattattactgaagttggctattttcttatgattgtggatatatttttaggtttttccttttgtgaactgcctgttcacatcatttgcccacttttctgctgggctggttgtctttttcttactgagctgtaataaatctttatgtattctaggcatgaatccattctctgttatacccatggcagacgcttgggaggatgtttagcaagttataggaagaggaaggggaaggagttgagagggaatgacaagttgaagaaggaaggatgagaataaaaggtggggcgagtccgggaacaaggctgcgaggctcgggtgaaagactggccttgaactagatgaagaacacttcccctgagaccagagtgcctaagagttctgggacagtctcagttgtaaaacagccagtgcttggccacaggtgtcacccaatacactgactcagccagggcctgggatgactaagagctttttcaatgtgactcatcaaggctgacaagcacaggcatcacgttccagaacgcacaaccaaaagggcaaagcaacagtccaggcaggtcagcctgtagagacaagacttcctactgacatccaagctactcgtttgccacagctgctccaaggatggcaataatgagtgcgagctgcatcagagatgagagattgaactttaagaaaaatgtcgccgggcgcggtggctcacgcctgtagtcccagcactttgggaggccaaggtgggtggatcatgaggtcaggagttcaagaccagcctggccaagatggtgaaaccccgtctctactaaaaatacaaaaaaattagccaggcacggtggcgggcgcctataatcccagcttcccagctactcgggaggctgaggcaggagaatcgcttgaacccaggacgtggaggttgcagtgagccaagatggcgccactgcattctagcctgggtgacagagcaagactccatctcaaaaaaaaaaaaattgttggcttttagtattaactgtgagtgtttggtattcatgttggatctgctgctgatgatgtgggggtgggtggaggggaggcagagaaggaagaattagaaggccacagaagcccaggttgaagggctggggctgctgcagtggaaatatcttttaagatgctacttggcaagcatgattcaaccctgacagacccttagaacaagtcagacgacctgaaagatgagattctgctgtccagctgcaccgtgtcagtgaggacccccactgtgaccccagggcacgactcactcccacgggcttgcctgactccagctctgtgctatgacatcacgttggtagcctgacacgggccacagtgggcatatttatgccacagaaattggcaaacactataatcaaggccctttcctcacttccctaagagccactcctgacagagcagtgggtggcatgcaaatcccagaagggcccagagacggggagtgaggggagcagcgtagacagagtcgcttctccactctcccttttgcctacagaacccaaataaagaaggctcttttcttttttacagacctggtgtccaagtacttaatttgatcaaaacatgaggatgagctaaggaagacagcagacaggcactctatcaatgtcttaaggtagttccaatgacattctgcaacatgaattaatctttgaggatatcaacataaaaattcttttgagaatctcatttaacaactggaaaattattcttttgtcttctaagggactgatttctttacccctgctct

SEQ ID NO: 56391 - DNA, 785 bp, Homo sapiens
gccaggaaatgctatttcttctcctgaccccttcaagcctagtggtagtaatgactttccactgtcgcttggtgcctcaacttcccttgttgggtgtctgacttttcttggctatttaattcaatttattaaaaatagtgtgcaaccctcaaccattcctgggtagtcttgactgctattctgctagatgacacaccccgacatcccgtggaggaagtcactgtggaacctaggtcaatgtgaaagcctggttctctgggcgaactgattaccaaagtacccagtccatgagccaaggcgatagtaaagaaatccaatgggaaacagcttcagttcctggaagaggaaagtaaacagcaacccaggcaggacatggccttgactgtgtttgctgctgttttctctccctattcgtgactcctaggagaacatatcttcatagccccatgatctgacctttcatcctatgctttggagtttgagcacaaacactgactggctcagaggcttcccggagatgcagctctgggcatccactattgctgattttactgtgatggccacatagcaagtgtcggaattgctgatcatttgtgtgagctgctactgagtgccagccactgcactgagtgatttctatgatctcaatcatcagagggcttgtaaggggaatattattgtaagcatggaaagacacccagatgaacagcttgcctatggtctcagagctcaaagccacgtagacccctgtctgcccgtcatgccgagctgtgcctcaggtcctg

SEQ ID NO: 56392 - DNA, 3187 bp, Homo sapiens
acaaccccctaatgctaattaatctggttacctagaggaactaagttgtctgagactctgtaaaataagaataattatttgactttgtatgttcattgggaggatgaaatatgagaatgcatgtgaactggtccatattagggatgtaatacatgctacaaattaataatccttgacatcaaataaggtctgactgccagggtgggatcagattttggaaggtcagaagcaccaatagagaaatatagacacaatgatttgggggtgatcagcatagaagtgacagccaaagccatgagaaagagcttggcctcagcaaggtggggagggctgctgcccacaagcccagctccggccaccagcatgctccctccccacccgaaccacgggtgcctgggctgcccaggccctggcgagcttagcccagggcatcaccactcacctgctttcctgagaagagcacaggagcagaggtggaacagcagaaatgtgaggaggagaaactgaggcaggaatgaaactgaagggatggtcttaagaggggcaaacaaatactgctagtatgtcacagcacaggagcccaaaagagaagtttcaggcagaggtgggcgggcggggagcctgcagtaacatgaactctcaaagttgtggggaagggcagcaccaaagcagacaatgacccagtgagaagctgacacggaagcaacggaagatgaatcaggaggtttaagggaacgatatgcagccccgcctaaaaagtatgcattcattcattcagtcacttctgaacgagcctttacaacatgccaggcactgtcggtcatcagagagaaagttgtgcaggagagaacaggtccctgtcctcatgaaactgacatttcattccagccaggaaaccaagcacacaaacaagaccaaagatccatcctgatcggtaagtactgtctcctggcctcagactccctcctgatggcaggtctccctcggtgtcacagagaaaggcaccacctgacagagaacaaagccacggtgctcaatccctccacccctggcctagaactcccggggtggggagaaaggcatgttcttaacaattgctaatcccgagcagtttgggactaagcagagggaaatagagctgaagcatacacagatgtccacgtcacctccatccccccagtctttccccctacgagcatgcccatgtacacacacatgcacactgcatttctcccctctccttggattgttatcccatgacctggcagggagcctggcccgtttgcagttaaagaacaagaggccatttggaacctgatcagtttctcctcctcctaaactgaggaaaaggttttcttcaaaatgggagatgttctctccccttagatctgagcagtgagtcctactcaaacgccagaggtctggtctcccaaaatacgggtagtaacatgtttttcctgcactgctgtctgggaggtctcacatgttgaacagagcatgacctcagccctcctatttcccagattcctaaaggaaagccgggcctttctgttctgtaactccagggcattttgtgaaggactgagccggctggggagctggagcacagcacacgaagggccggctggtgctgaactatgagcagggcctccccatgaccactggcagccatgccatttacacaaggaaccatgtggcctttccctcaactgtcaccatcatgcaagggtgttctggcccagagctcttggatccatggccaaggtcttctgtccaaggtctcaggcaaaacctgttctcggccaggaacagtggttcacgcctgtaatcccagcactttgggaggccgaggcgggcagatcacctgaggtcaggagttcaagaccatcctggccagcatggtgaaaccccgtctctacgaaaaatacaaaattagccgggtgtggtggcacacacgtgtaatcccagctactcgggaggctgaggcagaagaatcgcttgaacccgggaggcaggggttgcagtgagccgagatcataccaccgcactccagcctggatgacaaagcgagactcaaaaacaaaaacaaaacaacaacaaatctgttctcaggtcaagtagggtttgcctacctcctgcccctcagcttgcccatgcctgaccagaacagtccccacagctcttgagaaatgatctagtccaaccctcccctagattcctgttctctaaggactgttcccatccttctaccctctgctcttctaactgctagaaagctgccaagttccagagggaagagcaacaatggccaggatgtgtgggcacccctacccaggacaaagtgcctagaggcctctgaaagtcggttctcttaccacggcagttggtctgcagagttccagagaggccacactgttcctgtaacacccaagtctgggcctgaggcctgctgcctgtttataattgatgttctaggttaatcccctgtcaatgactttccagaactgtcccctcctttaccgctcccaggagagagaggctgcttgggagccaatctctggcttaggggtgggccttgagtagactgagggaaggataaaaaaacaaacactaggtcaggggtgagctggaagagcggcggtcaaaagccactgctcacaagttctggtggaaagatgaaagggcagtggtgttcgagtttcacaaagaagggagggccagggccagggctgggaaagccagccaggagagagacagggcatctggcctaaggaaaggagcagaagattcaatggggagaagaaaaaagaaggagtctaatgtcttcctccttcctgccgagacctcactatgccttgggttgtccacctgggaactggtgacatcatgggcctgtctccccacagggccagaagactggatccctcaccagggcacatgttacctggtgattagtgtgagctggtgacccagtacgatttatcagcaagcagatgttcacatgcttgaacatactatgaaaccacccagctcagttcatttaacaaagtgttatcctaaagggcaccccagtaagaagccagaacagagttcccacctactgggtaccaccccaccatcgcaaggaagcaaaacaccaggctgagctctgaccagctccttggaggaggcacagtcaatagctcac

SEQ ID NO: 56393 - DNA, 476 bp, Homo sapiens
cccagctaattttttgtattttagtagagatgaggtttcaccatgttggtcaggctggtctcgaactcttgacctcaggtgatccacccgcctcggcctcccaaagtgctgggattacaggtgtgaacaaccgcgcccagccccctgtgtatgtttatgcatttagcatctcacctggcacagaagcaggatcaatgaggtcattactactcttccacgctagccagtcactatgcaagcatgtattttgtccagcacgtgcattccctctctcccaaccacggataaacaactcagggcaaggccaccttgtcagatcctcctgtggcctcacagcatccagtaaggagctgtgcatagcacagatgcacagtaaatgctgaaggaaagaaccatttcttggagtactgcccagtaataacttgtcctccttaagccactcagtcaactgagaaaacgcaggattagaaaatggg

SEQ ID NO: 56394 - DNA, 462 bp, Homo sapiens
ctggagtaacactagttgagattagaccccagtatttgctgacgtcttgatggttaatgggcaggggagaggccaccaatattgttattggcaattgctctatttttcttgaggtaaagggtaaattcccctttgtgagcaaaacatctttttctgtattgtaattccattctgctatctccaagcattcagtaaaatgttgtgaaatgcctgacaggtcgtttgtgtatttaaggcaatatggtatgaagggtgaagcaacagccctgaggcagggagaactaggcaacatacagaagagaacagctggccaaggaaataaccaagccagacagatgacattcatttaacctatgtttttcactccctaactatgttccaaacttggtggaacacataagcatccctgggtatttgtagaaaaacttggggaagggaactctataaaagataggtcttctt

SEQ ID NO: 56395 - DNA, 1550 bp, Homo sapiens
ctagtctctctgaacctctggttcctcacacattgcaagagacaaatattttccagaataaataatatacttattattaatgatttaatattaatacatttcacattgatacacagcatgtacatgagaagaggctccaaagcagcataaagtgatgtgcaaacgtaataaatgggcagcatgtgtcacttcatagtaactgcagcactcagtgacagacaagagaaaggtgacacacatccccagagactaagtatgactcagcatggccaggtcgtggaattttcccaaagcctcgttgtgatgtcatggtggatgtcatcaggaaaggagctgccacagaagcagtcaggcccttccacacacaggcagtggaaatgtactcccagctgtcccgtgccctcccggccccacctctttctctggcctcgaggcatatcaggacaaggaggtaacacaagagtaggaaacccgaggtagtgctgggagtacctggggtaacgccttcaggcataacacttaacaacacaacaaagggccacatccatgtccccccaggagaaagctgaagaggaggggagggtgacaagcttagactacagagccttagtccctaggcaaagctcaagtcagcagtgccttgggaactgaggagccaaacaagctttgacaaattacataacctggaagaagaggtcccttcttggtgactgattttccctctctattgatggatctaagggaagacatcaataaaatatggcaattttaaaagaagaataaacaatgggatcagcatcttggattctgctaagcagccttctctaggcttcagtttcttcagttccataagacaagtggtttggggggaaccttccccaacatgcccacctctcattgtagggatgcaagtaagagaaataacatccaactctagcagccaagaataagaggacagagcaagcagagagagaacaagggggtgaaactcgtggagggtggagttcttccacgttacggccattcccaccatgagcccattgcccttactcaatggtagcacgcagacggcacctgctggcccaagacctagctccaagggaggactgcgggaaatctcacacaggaaaccagctcctgcgtcatgaagggtcgtcagaggaaaacccccacataatgggtggaaaaccgagaaaaactcctataccaaggaatccccactcagcactggatatgagctctggagaaagttgtccctgagccacaaagtccccaaggccacagcgggcctgaagggaagagcattattgttgtcacaaatgctgggagagcacctggttccctggctcggctgctcctgcagaccagcagggggagaggggactggactagcaggggaccggcgggagggctgtggaatttaggctgaggggaggccactgaatctcccaggcacctgccaccatggaaatccatgttgggggaactgtaaaagcagtagaggccggacgcgctggctcacacctgtaatcccagcatctggggaggcc

SEQ ID NO: 56396 - DNA, 2416 bp, Homo sapiens
aacctctttaacaaaacctctccagaataaaactttctagctgctgaaatccaatcactgtttctccactgcagcggcatcaaaaagaggtccacaactcacctcctccacgaagccttcccaagcccatccccttccaggccatttctcctctctctcgctttagtgtgtggtttgctgtgatttactggcctctactgaacttcctcttccatgtcctcctagggccaatacctcacccactaggctctctacaaacatctgcagcaggctgccttgctgcttaggttttgtttattttctctctcccccaatgggtttgtcagcagttgcaggacaaggattgacctcatcgcccacgctgtctctcggcccagtgtagggataggaacactgtaggtgtgcaaaagaatgtgattaagagttcaacagttaaggagagcctgcaggcaggaagctgtagctgcaagtgagagaaatgctgagcacatccacccccagcacaagtgtttgcatcacatacagggaaagggtgccttgggggaggccagccagggctgatggtggcagtgggtacgggagcaatagggaggcagatggcaggcactctggaggttctggttgtcatcagcaagtgttggtacttctctgagcctgttttctcagctggagaacgggtaaggagcccaggcctacctcttctcacaaaataaagacacaatctgattttttagaatttcagacgaggcacgcctgtaatctcagcactttgggaagccagggcaggccgctcgcttgagcgtaggagttcgagaccagcctgggcaacatgacggaacctcgtctctaccaaaaaatacaaaaattagctaggcgtggtggcgcccgcctgtagtcccagcactgggggactgtggcaggagggtcgcttgagcccgggaggtcgagactgcagtgagccgagatcgcgccactgcactccagcctgggtgggtgacagcaagaccctgtctaaaaaagaaaagaaaacaaaagaatctcaaagttgccagggacctagggacttggcttccgactctgatgcgctttgtaaactactaaaagctggagaaataaggggctgagcccagccccacctcctgaatgagcggccttgggcgaatcactgcgtctgggcgcctggagcttccccgtctgaaacaaagtagaggatcctacgggaggcggagtgcgagagcaaggaacaaggaaagccctcgccttacacgccgcggcttcctgcagagctgagccacatccagtacgatggggacaacttgggctcccgatcctgacagacttgggttcgaaccctcagggacctcgcgcgaggcgctttagtcagtttctccatctgcaaaatgggcccgagagcaagaatgaggcagcccgcaggcggacgctgcggaggggcgctcgggggctgcagccgggggcgggtccgggggcgggtccagccggccgagcccccgcgcgagggggaggggcgccgtccgctgcgtcgcgtcgcgcaccgcgcacagcccgtcgctgtctcctccagccgtcactcgcggagcccgcgccgcctttgcgcgcgcgacccttacataagcgtccctcgcagcggtgccggcgcacgtccacccgctccgacccgccgcgggaagaggaccgtgcggagcgcggcggacactcacctcctcgccgtcgccagtcctcgccgccgcctctaccgctgctgcctccactgacagagaacagctgcggtctccgtgcaaccgaacttgctgcagtcccggccccgccttacggacttcctattggcccagacagcccaacccctcccgttattgggcagtgttctccgtcactcctcgcccctaggctctggactcctccctgtgcccgcctgtccgtcacgtttaagccttggcgccccacgtcagccccgcccctcccgtccccggcgagcgcctggataagtggcgaggctgggagagcccgcccctggcgcaccaccgcctactcccttgtctccggagcctcacgtgggccgccggaccctagccgacgcccgcaataggcggaagtggccgggctgtggctcgcagttattggctgtcggcgggggtggggacgttcgattcattcacccgagtagcacgtgtctcccgaagctgcaagcacaacagttcgcactggggctcaggcatcccggctagacgcagatacgcgctggctagcggagaagaggtcgcaggaaaagctaacgttagcgaagggcaggaggaaggagaaggcgcttgtgccacacgggttacatgactatgtcctttaacagctgcgtagatgatgatgggggtctacagtacgtctgtgtgaccttgggcaagca

SEQ ID NO: 56397 - DNA, 5135 bp, Homo sapiens
caggctggagtacagtgtcacgacctctgctcactgcaacctccacctcccaggttcaagcaattgctgtgcttcagcctcccgagtagctgggattacaggtgtgtgccccatacccgctgatttttgtattattagtagagttggggtttcaccatgttggccaggctggtcttgaactcctgacctcaggtgatccacccacctcacactcccaaaatactgggatttacaggcataagccaccacgtccagccgcatgggtgatttttgtattttttttagagacagggtttcgccatgttggccaggctggtcttgaactcctggcctcaagtgctctgcctgcctcggcctcccaaagtgctgggattacagacatgagccactgcgtccagcctgggcatcatattttcaaggagaaagtctagtactactaactgctagatttataattttgtctgatcctcctagagggtatatgaagactcaggccccacccatggagggtagaacacacatttgctgaagactttatgtgctgggctgactcaactgggctggattccaggcccatcactgactatgcttctgtcatttcaacggagagaagaggaaatgaggataagttccagagggatgcaagggtgaagtgcactcacaaaggtcagtctccagggtagagggcacgccccacccctgctgccctccaaggtcagtcagacttccaatgtctaattctcaaggttctggcgagtgggctctcgggactgggctccaacatcatcttctccgagaggcctgcctagatcctcccctccctcaaaccagatgtggtctctcattctcttctgttcaccaaaacaaggtcttgcccacagcaggtagatgtagatcacattcactggctcactcctaaggaacatggtagcctgccccagcttgcagccttccagtatgtctaagcctcaccagaactttaaatgacatcagccatgtacatgaataaatacaggaaatacctctttcctacttcacttcaggaaatagatactactgtgttttgttaatttcaagccacactttttttcctccacattttaacctctctaaaaagggcctgcaccttccaatgagtgggtaatgggtactctctcttccttccttccttcctttcttttttttcttttttttttctgagacagggcctcactctgttgcccaggctggagtgcagtggcttcaatcacagctcactgcagcctcaacctgctgggctcaagcgatcctcccacctcagcctcccaagtggctgggactgcaggcacatgccaccaggcccagctattttttttttctatttttttgtacaggcagggtgtcatgttgtgcaggctggtcttaaactcctgggctcaagcaatcctcctgccttggcttcccaaagtgctgggattatagacgtgagccaccgtgcctagcccagatattctttcttaatggtatataaaatactgccacctttccgtagatgtcctcttagatttgatgaaataaagcattattcctgtgttatagctgagaaattatagacacatgaggttaagccactcacccaagacacagagccagtacatgaaagggcaaggctttaaactcaggtaatggaggaggcctggaatcctcggtgtctgtggtaggccatctccaagacagtccccagtgatcctagcctcctggtgttcacacccttgtgtaatctccaccccttgagggtaggctggacctggtgacttgcctctaaggaacagaataaagcaagtgatgggttgtcatgttctgggtgggaaagtctatgtacacgtatccccaaaacccaaggaagctgaggccaaagaaagcggctgacaaattcggtttcttagaaaaaacatttctttttttgttgtttctttttgagacggagtctcgctccgtcacccagactggagggcagtggcaccatctaggctcaccgcaacctctgcctcccaggttcaagcgattctcctgcctcagtctcccgagtacttggggttacaggtgcccgccaccatgcccggctgatttttgtatttttagtagagaccggatttcgccatgttggccaggctggtctcgaactcctgacctcaaatgatccgcctgccttggcctcccaaagtgctgggattacaggtgtgagccaccacacccagtaaaaaagaaacatttaatatagatttaggaacagaagccaagtctgtgtctcaggctgcagcaagacgtgatggtggatccccaggccataaagccccagacccagggcttatataccacagggcaggaatgtgtaagacaagtaaagttgagacctcagagaaaggcaagaatgtgatatgaatctgcctatgggtaagatttctggtaacagtagataaagtagaaatcttagaggcattcccagaatgggggttaataagaagtcaacatggtggattagcatccaagatggagctgctctggactccacatgtcacttctgcagttaggtccccaaagatcctggcttgtctttctcgccatctcttgctctcactcgcttgctctgattaaagccagctgccacatagtgagatggtctttggagaggcccaagtagcagcaatcaaccatcaacaaacagaagccctcagtcccacaatccgaaaagaattgaattatgcaaacaaccacaagaatgagcttggaagcagattcaccccagaaggacctggagaagagttgactgtagcctccgagagatccgagccagagacctgctaagccacgcccccattcctgacccacagaaaccaggataataaatgtgtgttgttttaagtctctaagttttggggtaatttgttagatagcaatagacaactaacagtctccaatatttaatgccagttatttactgtgttgggtcgtggggacattaaggtgttcttttagccttcaaggggtacctagtctggtgaggtaaggcagacatgtgtgattgtgttactgtgtgtattgggtcattgggtgggctggagaggggactgcctatcttacacagcctggaggtgtcagggcaggctttttggggaggtgtcactcacaaagcagaattttgaaaggtgagtaagagcttgccagttgctatagtttgaatgtctgttccaaaactcatgtcgaactataattgccattatgacagtatcaagaggtgattaggtgactggattactgcaattatcaggaagtgggttcttgataaaagtgagttcaaccccctcttgtccttgctcacgtttactttctcttacccttccaccttctgccatgggatgacatagcacgaaggcccacatcggaggctgatgccattcttttggacttcccagcctccagaaccatgaatcaaatgaacagttgtttagaaattaacctgtctctgttacagcaacactaatcagcctaagataccaggtgaagaaggcagagaagcagtgaggagggaaggaggagaacacagattttctccctctcctcagtggatttgggaagttgttttaagactgcatccttggcaagagggtactccgcagctatgtgcttgacgcaagagtgagtgattcatcccaccacatctcaaaagtctgtgagtcagccagttcttcctgggctcagacctttgtgagagtggggatttgagttgactacgtgtgttgaagtgagggcgttgaagattgtgtaatggttttgttgctttttaaccagggtcaggattgacctttggtgtgttgtcagggttgaaattaaaaggtctgggtacaaatcagagccagtgtttgggacaggctggggcagaaggtcagggctccttttttacattctcttcacactggccctgtcataggtcctctgggagctgagcctggcagattttaagcaacccttcacccagggaagattcagaaacggagcagaaaggatgagggcaaggccaggccctaggggacaaggctagtgtgagccaagagctgcagccagcacttccctggccctgaataggggtgccctctgcagtaccccaaacatggaggaggcaggacagctggcttccagtcctgcctctgctgccgagtctggggaaggagacctgagtgactgaagcatgggtttttaaagcccggctgaccagggtggccgaccagctctgccacttagtgggcatgctctccagccaggtgcttaatctccctgatcctcagttttctgatctataaaatgagatgacaatccccacatcataggactatcatgaggtttaaatgaaatctgtgaaggggttgactcaaaacagtggttaaaacaaaaaggagctgggtgtgatggctcatgcctgtaatcccagctagtcaggaggctgtgacaggaggatcacttgagaccaggagtttgtgaccagcctgggaaacatagagaaaccttctctctaaaataaacaaagaaatacataataaaaataaaacaaaaaggagcatggaacagatgtatgaggtcccttcagcactcaaattctaccattctgaggccaggcgtggtggcacactttgggaggctgaggtgggcagattgcttgagctcaggagttcaaaaccagcctgagtaacatgatgaaactccatctctacaaaaaatacaaaaattagccaggcgtggtggcacatacccgtagtcccagctactcaggaggctgaggtgggaggatcacttgagcccaggtggtcaaggttgcattgagctgaaattgtgccactgccctacagcctgagcaacagagtgagaccctgtttcaaaaaacaaaacaaccattctgaggaatctgctggcccagccccaagcttctttctcttcctcctgtcttgggggaaagagttgctgccagtagtctcacctttagaagcatccacactcatgatttcatcttatttttgaaacaacccattttacaggctgggtgcggtggctcatgcttgtgatcctggcactttgggagaccgaggtaggtggatcatgaggcc

SEQ ID NO: 56398 - DNA, 965 bp, Homo sapiens
gtttgttgagaaaagagctacaggctcacagccaaaggtgtacagcagccacataggaatagaagaagctgggggcaggtaggcacattttcctgtttctgaggtagcctgaggccttgccccaacccgacattctctccatgctcacctccccgggccctgcccccgggagtgctgagtgccttcaagcccctgggagaataacttagccatgcccgaaaaaccagaaataaaaaaataaaaccagaaaggtcaggaggctgagtctgggtcctcaggcctcaggaaactgcagggggacccctgccaccacccttgtatcccatggagacggaagggcttctaaatgtttctcgagcctcataaggatgggagagggttgcaggactagaggacctggcaccaggaagggaggccgctgcccgccctcatgtggcctgcctacctgttaacagaggtctcgtcagaccctggccagcagggacaaaggccaatgtccaggagctgagaggcaagaggccctcaggggaaggacagagaaaggtgtggggactaggtgcccccttcctaatgttaggaccaacttaaacctgcggtgcttggctctgccctggcacaagaggataaggggcagggagaaaaactggtttcatgaaattcagtgggttgacaaaatacaatagaatcaaatcaagtaacagagtattactttatgaaacttttgctacatgattattgattaaatgttgtgctggtttcaaagtgcactggatttcccactgttagtcaaggccaaaaatatgggaaaaattttctcaaagactacaaaaagtctctgtgtaggtcaggctggtgagatgagtttggttattagagagttagaaaaggttacgtttttcataccaattcttatctttaggatcttaaactacagccatttgtttgatttttggcacagtgaggat

SEQ ID NO: 56399 - DNA, 1107 bp, Homo sapiens
gcacagacccagcctccactgagaggtcagtgcccacaggctgccctcagctctaaaggcccagagtgtagatgagccaggaagcactgccacccttgcacacttgctccccatctgggatcctcgcccctcttcctcccccaccccagaccgttggagaggtctccccaggtgtccacccagcctgctcccctggttactgtgcccacaacatgtggcaccttcccccgcacccagcccctcccagtgcaagccgtgcctcactgccagactgcgcgggcagggagggacctgtcccctgttcccggaagatggaagatcgcccacacctggcactgtgcccagcccctgcgggggcgtcataaatatctcctgaatgattcattcattcctttgggagagaaagcacgaccccttagtggttaaaggtatggagtttgaagtcacacagacctgggttcaattctggctctgacctttggctctgtgaccttggtcacctctctgagcctgtttcttcatgtaaaaaatggagtcaccacgaccagattaggccacggtgaggactgagatgatgttgtaaggcaccagcacagagctgacctacagctcaatcgtggtgggagggagtaattatccattcagaaaaggggaaactttccgctgcgcctcctgtcgctgttttccttggctcccggaggtgcgcagtatcgggtccgtttttaaggtaaagaaactgaggcctagaaagagaacaggataacccagggcgcggaggctggggctagaacccaggccggctggctctgagtccagtgcttggcctgcctctcagaggcctgtgggcacgtccccacccacccctgtccccaggcgtgggagcgaggggttgggcttggcctcagggcgtccctggatcccggacgcgcttggggatctccggctcggaccccaggagcagagacagcgctcgagcttgtcactttaaattcaagagggagcgggcgggcaagcgggcgagcgcgagggagcgcgcggcgggctcctgggagcgtgcccggactgcggcgcagctccggtccgccgccccggcccggccgagccccc

SEQ ID NO: 56400 - DNA, 5712 bp, Homo sapiens
cctccccaccccttcatctcccctcctccagccctgggcccaaggacacacctccagggtcccaggccccctctgtctgggagccccaccgaagaggacaggtgtggaggtctctgacctgcccagcagcattgcctgggctaggcctgcatgtgggagaagcagagcaagccactgcatcacggtcggcagcagctctaagctccaaacttcccttcctctcttctatctgtctgtgcctgcagacccccaaaagggacaaatcaaaaggcttaataagcaccaggatggggccaccagacctcctctctctccacccctcccaccctattatcagcccttccgtcccaacctgaaagatcaataatggtttggcagggagaggaggccagggcaggagggcacgtccccgtggcctggggctccagttagatggcagccaggctggagctgtctgggcaggctagacaaaaagaaacttgggagcagaggccctctggtttccacctggcgtaaagctgagtctgctgctcacttgctgtgtaagttccttcccttctcaggcctcagtttccccatctgaagaatgggggtgttggataagatggcctctaaagagccctgtacctctgacttttggacattctgtgtgtatggactccggagcccaagggcctgggtccaaatcccagcttctctgcttactagctgcgggaccttgggcaaattatccaacctctttgggcctcagtttcctcacttgtcaaaggaggataagaattgaacatacttcataggatggcatgaaatgacatgtgccaagtgtccggcacaggtaggtgctcagtaaatgcgaggtcaaggctttgggtggaggagttcaggctgagggcaaaggctcttaggatccagtatttcagatgaatgtgggccagggacgggcgcggtggttcacgcctataatcccagcactatgggaggccgaggcgggtggatcacctgaggtcaggagcttgagactagcctggccaacatggtgaaaccccgtctccactaaaaatacaaaaattagctgggcgtggtggcaggtgcctctaatcccagctactcaggaggctaagacaggagaatcgcctgaacccggaaggcggaggttgcagtgagccgagatcacatcactgcactccatcctgggcaagactccccatggaaaaaaaaaaaaaaagagcagaggacaggggatgcacgcggaaccaagagcttcgggagctacacaccagggcccgtgcaccctgccaagccactccaaggggaaagactgtatctctccccttcattcagccatccacaaacaccccacacccccaagccaggaaccccaagcagggaggcagccccaggtgatgactgtgcagggagctgagcgaccacatgagggcagtggagactcgatcaggaccgcataggatttggccttaggatgggggtgggatgtgagaaaatggggagaggggtgaggccagggggccttggagtaggcggaggctggagagtggttgcctgtccacagactccccattcatgtcacatgtggtattcgtcatccatgcaagtatttgttcctttattcatttcttcagtttgtttattcttctaagccagcccctctgccgtccatccttccgtctttccttcctctctttctcactctgtttttttctttcttgtccctttggtttgtctggccaggagatcaactgggcataccgtcctgagccacagctgggtgccagcctgagagaggcactcctctaggggatacggtgagccttggcccctgcccttgaagggttcagggcagtaggccacggtgctgggctccccacagatctgggcctggggttggtggggcctcgaggggcctaagtctcccacaggctgcaagtcctgagaagcctcagtaaacactaaaacagtaaacagtaccctggccaggcagactgtgtgacctgggccaccactctaaaaataaattccaggaaaacagtatggtcccaggtccagcaatgtctgagattcagggacattccctgccaaccagagccgatttctgtggcctggtgactaagctccctctcgcaggagcgtaagcatggtgggggagcggaggctggggcttgacgtcaggagattgaatccttgctgtgtcctgctggtctaagacacccctctgcctctctctgaggctcagttcccaaatctgtaaaatgggaggaagcaggtcatctgcttggtctacctcgtggtctgagagctaaatgaaattgcaattgtgcagatgaggcgtgatggagggagaccacctggctttggggtcacgcctggatccaaattctagttcagcctcttactagctgtggatgttagtcaacaacttagcctctctgggcctcaggctcctcatctgtgaaatggagctaagagtccctacctcctagggaacagtgcctacacgtggcttgcaatccactaatgggtgttgttattattaggaaatgttcagtgaaactgtatagcatgacaaacatcaagtgtgtcattacagagattatccctatagcaaccaaggccaaacgcctctgcctgactctcagctccctccacccccagtctggccccacctgccttccagccttgccacccaaggcctgacgacagcagcagttgggaggaagatgctgacagctgatccgagggggtggggcccctctcaccactccttggggcggggagccctgctctggagctacctgcccagcccagtgtcaagtcactgccgagccctgtggcagtttcggggaggaaggggcacctggaaaggcagagctgtgctggggaggatccttccctccaagtggggctccatccagcctgcagaccacagcccggagcgggagccgggcagaggagtcaaggagctgggctctgcctctccacctagtgactcctgccctggctgcctctttagaccacagtgagtttaaaggaggttgaaggtgctttttcacctgcctgacttggaactccatgaggggggatgtcatgaccagcataaattagggggaacctaatgacgtctgccccttgttcttttaagcttcaatagaaacactcagtccaagatctgggaagacccttgtgcccatttttaaaagatttcaactctggccattaggagaagtggagagatcaggtgacaatgagttcccagttcaatgctggatttactgctggcatccaacgtgctccactgagcaagcaccagctcctcatgctgcaccactgtgcaagcgagcctcaccctctgcgggggcggggtgggggggcagcattccgctccggcctccgcagcttcgcacgtgccgctgtctccggtggaacaccttttccctcccccatctgactgtgtttcactttttcctcaagactctgaaaggtttcctgactccctcaacgtgggcgaggagctcttttcccctactcccgtcccgctgcctgtccctactcccgttgtagttctgatcacactgatgtcctgcgtgtctaccattctaagccgtgggcttctcaaggcagggcctggattttgtcttaaacagttcagggtccccgggcccttgggcaccagggggacatctcatggtgcaataataagaaacactcacactttacagagggaaggttctatcgctttccctagatcgtggccagccacggtgtcaggtggctgcccacctgcagcagagcttcctggtgctgcgggagggggcaggccaggcctggtggggccagtgaagggggtcatccccttcccacctggcatgaaacgcctgtgttgtgctgcgtcctgagacccctggggaaatgcaccattcattcattcattcattcattcactaaaggtcactggctcctgcctgggatctgggacccagcccctgagcacacccccgcccccactgtcatggtcccgctgtttgtcttctcccttccgacctcccgtggccccagcgcggccagctcacagtaggtgctcgggcagcgtttcttcagggacctagacggcctggagaggaagggccccagcccagccgcccgggcctctcacctggctctcggggcgcccggctcgcacttcctcccgccgccccgccccttccacattcctgccccgccgggcctgccccgcgcagtctgggtctctgcgccgcagccgcccgcccgcccgctcagcgcccggccccgggatgacggcggcccaggccgcgggtgaggaggcgccaccaggcgtgcggtccgtcaaggtggtcctggtgggcgacggcggctgcgggaagacgtcgctgctgatggtcttcgccgatggggccttccccgaggtgagtgccccgcgcctccgcctcgcccggttccgctcgcgcgcccgggtgtacaggtccgtgccggagcggcccaggctgtgcgcctaacccggcctccgaggggtgtcccagcggggcctggggtccagggcagagttcttccgccccagccattgggaatgaaggcctcagtgatgttatctgtaaagccggaggaatggcatccaccggggagaggtgtcacaaggactgagtgaggcgacctgggtgcacacaagatcctaagacagcacttggccacacaattccgctgagggcctgagagcttggaagccagactgccgaggttcaaattatggctttgcctcttatagctgtgtgcccttgggtaagtcccctaaccctgctgtgcctgtgtccctcactacatcacaggtgagtgacagtgcccaccacacagggtcactgtgacagagagttaatagacctcaagcactcagccccggcctgtgcacaggaaggactcacggagagttggcacatgtcgctcctgggaaacattgtctcccttccagctcttgccgctggaaagcacatgccatgggctctgccttggagggtgggagcacgccagctgtagcctcagctgctgggcccgcgtctctgctctcctctgagccccgtgcccttttgtaacctgcttagcttctctgagcctcagtttcctcacaacaaccccatggggtagagggactgtagggcagtggtgaagtggagcccaggggaggctgacaggcagctcccgtgcggtagctggcatgtccttggcgctgtaggcatgcccaccgttaatccttcctgacatgctcactgactgcccaggcagactccacgggcaccaggcggcccctgctctgccgcctctcagccctgttgtcctgggagtccatggagttgcttccagcatctcttctttttttttatttttattttttttgagaagagtctcactctgtcacccaggctggagtgatattggcacaatctcagctcactgcaacctccgcctcctgggttcaagcgattctcttgcctcagcctcctaagtagctgggattacaggcgcccaccaccacgcctagctaatttttaaaattattttattttattttatttttgagacggagtctcgctctgtcgccaggttagagtgcagtggcacaatctcggctcactgtaacctctgcctcccaggttcaagcgattctcccgcctcagcctcccgagtagc

SEQ ID NO: 56401 - DNA, 1934 bp, Homo sapiens
tggccaacatggtgaaaccccatgtctaccgaaaatacaaaaaaaattacccgggcatagtggcaggcgcctgtaatcccagctactcgggaagctgaggcaggagaatcgcttgaactcaggaggtggaggttgcagtgaaccgagatcgcgccattgcactccagctcggggacaacagagcgagactccgtctcaaaatatatataaatatatatatatatatgtaattaaataaattaattaaaagaacccacaacgtgtaagagttggaaaggcttcattttgcagatgggaaaactgagtccagaacccagaggcttacctgggggcacatggcccggcagtggcagcactgatctagagcccaggtcttccccctcccgaccagggccttctccacagcccccagtgctctgcctgctggacccagcctcctcctgcccctgtccctagcaccagactcttcctctaggcagccctcgaagcccaaggggccagcagccaggaggctggagtcccatctcccagacttcctgcacacagcaaagggctgagagcagcctgaggatttggagggacctcagtgaccctcatctggctgtgacccaaccctggattcagggcagcaggggagggcaaggtggagagagctcctaggacagggggaagccccaggctggggtgccagcctctgcccagtcctggctggcatttgtggctgcaaccattcccacaggttcaaagcctagcagcccccacaccagcatggggataggaggtggcagggagcacccggccctgctggctagagccccctgggtccttcctggttcgcacttggactcccatgggtgtcctaaccagggatgccccgacactccctcttgagccaggtcccccatcttggtaatgattcattttctgtctgtgagcccctggagggcagacctgagcctgagtcatctccgtcctggtccagcacaggcccagtccttcttttctggctgaggacggcttaacagataaaattaggtgccattgatcccatggacagagggtgaccctgcctgggggtcaaagaacaacacaacaaaaggtacagacagagtctctaggatgacgtcccgagtgggggaaagggctgtgacagttacaagccagaggggaaacccagcccctttctgtctccgggaactggagttggtaacctcaggaaaggcaggtggctgaggacaaggcctggtctctgcagccacaaagacctggctctgtcactagccagctgttcagtgtgtcaccttgaacaagtcatttcctctctctgggcatcatcagaaagtgaaggttgtactgacgttccgagcttgcaaggatcggagatggtgccagtacacagccacacacagaagatccttagagaatggtgggtggtggtgtcattaccatgggcatttgcaaagcactgaaacatgtctcccaagagatttccagcaggctgccttgcagctcagatcaagaaggtgactgagtgggtggtcaagctgggagctcagatgcaagggcaccagtgcccttcacaatgacaggcccctactctaggacaaaggtcagaagctgcggaggggctgggtgtattagtccattttcacattgctataaagaactacccgagactgggtaatttataaagaaaagaggtttaattgactcacagttctgcatggctggggaggcctcaggaaacttacaatcattgtggaaggtgaagtggaagcaaggcacttcttatgtggcagcaggagagagagagaagggggaagcaccacacttttaaaccatcagatctcgtaagaacttcctcactattggccaggcgtggtggctcacacctgtaatccctgctctttgggaggccaaggtgtgcagatcac

SEQ ID NO: 56402 - DNA, 1255 bp, Homo sapiens
agacttcaggaggcaggtgatgaggagaaagaggcagctggagtcagggaagagggaagaatagaaagcggagacaccagggtcgggggtcggggagagaaaccaggagttaggatagggaagagggccgggtgtggtggctcatgcctgttatcccagcactttgggaggcagaggggggcggatcacctgagacagggagtttgagaccagcctggccaacatggtgaaaccctgtctctactaaaaacacaaaaattagccaggcatggtggcgggtgcttgtaatcccaacttctcaggaagctgaggcaggagaattgcttgtacccgggaggtggaggttgcagcgagccaagatcatgccattgcactccaggctgggtgacacggtgagactgtctcaaaaaaaaaaaaaaaaaaaaaagggagggggaagagaatcgaggaataagtcatcacacttaatgtctatgcaaactcttgactcacatgaaaacttcaagtttcttaaatattgaagcatctttacttaaaaccttccttcccttcttttttttttttttttttttttttagagacatggtttcactgtcactcaggctgaagtgcagtggcatagtcatagttcatagtccaactcctgggctccagcaatcctccacctcagtctctttttttgtttgtttttttttgagacggagtctccctctgttgcccaggctggagtgcagtggcgcgatctcggctccctgcaacctccgcctccctggttcaaacggttctcctgcctcagcctcctgagtggctgggattacaggcagggactacaatgctcagctattttttgtatttgtagtagagacggggtttcactatgttggccaggctggtctcaaactcctgacctcatgatccgcctgcctcggcctcccaaagtgctgggattacaggcgtgagccatggcgcccggccaaagctttttagccactgattatgctacctcctggggaaccttcacaaccaacttctctattttagtttagacctacactgtttgggacatctttacttcctccttaacatttaaggagaaattggaaatagtttagcttaaccagactaaagagttctcttttcacaccctaaagtctcccaaaagaaatgggtgggccgggcgtggtggcggacgcctgtaatcccagctacttggaggctgaggcgggagaattgcttgaacccaggaggtgaaggt

SEQ ID NO: 56403 - DNA, 3448 bp, Homo sapiens
taaataataataccttgcatttacgtagcgcttttaccttggagttcaagccttgatagaattagaaggtatcattattttaattgtctcgctaacgtcctcctgaaagagttgatggctgtttatgcaggttatatgattcactccatgccctacctctctgctccattccctgcttccaggagtcagagcttaaagagtgggaaaccaaggcagggagaaaaagatttgtgtgacaccgctcagcaagggcgtagtggagccaatagtgccaaccccgatgtgtaacgccccagccaccgtcctttgtgggatttagaatttaaacgggccccagagcaagagattggctggggaaatgcccggatcgcggctgggctgctcgcatggcactgctcgggtacctccggccgggctccgtcgacgttcggagcctgctggcccgtcgggcagctgtcgggccgcgggagtcggtccgtgggcagggccggcgcagctcgggcggctgctgccccgtcgctgacccccgcgcgaagctgcgcgcaccaacaggagacatcttcccggccgggcctcccgcgcccgccacggcccagggcggcagggtcgggccgggggccgggggcggcccgcgcacccctccgtggggggcgccccgactcgccgggggcggggtcacgtcccacccgggccgccgggggcaccggcgcggcggaaagctgagcgtggccgaggagcgggggcttcctgggccacctcgccgggcgcctccggccggcggtgggcgcgccggccgccaccgcccccgggccgtcgcggagaccgcttctgcgcctggtacctgtggacgcccttgttaagcgcctgcagcacccccggggagccgagcccaggacagacatgctactcctgtttcctgccccttcggagcgacgagcagtgggtgaggcggggccaggccgctgcaccgaggagcccccgggcccagggcagacgggccccgtggcggcggcgccggggcctgcccgggaatggcgggcaagccggcctcggcccaccggccggcacgcgaagggagggcagccggcggccatgcgccccttccctgcgccctctcgccctgggcaggcctgagccgggagcccaggtcccgcgggcccagcccggcggcttgaccccgggagaccctgctttgaggcgggtatcggttgccctggcccaggcctcccggccctcaggttgtgtgactgtgacgggcagcctggggccaaaggcggttgaaggggaaggggacgcagatctcccactgcttggggggggtgatgtgctttgtggggggtcgggggtcaccaccctcccaggggggtgggggagggcggccagcacagctggccgcgaggggcggggtcgcagaggcgaagtgtgtgtgagggtgtgtggggggagggcgcgcggaggaggatcggtgccctgcgcgcaggcgcgagcagccagccaggcccgagccctggaagaacgccgacggggagcgggggcggcgggctggcgggagggagggagggcgggcggcctgacgcgagggggcgcagggagccgcgtcggcgtcgcggggcgcgggcgattcgaggccgacgcatccgcgcgtgcgcgcgccggcggtgtgtccgcgttagaggggagtgacgcgtgcgcgttcacgcgcgcccgggagagcggtaagaagcgcagggaggcctgaagggggtgggggggtggagaggcgagctggaggaggggtggggaggtggcgcctgcgcagtgcgcctcggaggagctgtgtgtatgtgagagtctgacgggttcaaaatggcggcggctgcttcagcggctcctcctgtgtgagggaaacaacacccctccccggcagcggcggcggcggcggcggctctcggagcaccttcccagcggctgggcccgtggccgctctgtctttcctgggcaggggacgctccgggaggaggggcaacgccagggggcccatcccccggaatccctcttctgcgactggggagtagccggggggctcgtcccgcagcgcggagccagacctgagggggagacgcgaggggagccagggcccccatcccggcgcgccgcgccgctcccgccctgtccgccccccggggccggggcccgcgttccggggggccggggcggcgcggggagcctcgggccggccggtctcagctgatcggccgctgctcccgcaggcgaccagcccctgctggccgagggcacggcgaggagggcgctccctgcggccggggccggcccggggctcgggcccgggctgctgaccgctggcctgggggaggcgggggcgccccgggctcggcgccgaggggtcgcgctcctctctcctgacgcctccgactcccggtctccaaagccagaagagaaggtttgattcagcaactgtttgctcccttttcctggtcgctctgaccctctctggatactgggttgatccacggaaaaaccgaagacgacgtttgggatttaattattcctctcagctttggaatcttttacttctcacttggacaagaactcaagagcagaatctccggtgagtttccccctcccccccctcatttggaagtttggttgactgtgttatccaaagactgaatgcaaagtttctatctctttttccgatgggtgaaccattgaaacgccttttcctgggggagcccagcgagattcgccctttttcctctccggccctggctgctccatgcccaggcggtcgtcgcccagggggtgcaagcacggtttccctcccgacttcgggccagggcttcctccgggagggctctgcctctaactgctctgcaaactgtgtcatcgggtcctctggtctcgtagcagttttgaaaggatgctgttaacgtggctgtaatgtagtgacaaaaacggggggaacctgtgttctcaatggaagccattatccacgagaatatttagaaaaaagaaaaccctttcttggtattacggattgaccgtcgcgccggccggtcttttatttaatttttggacaagatgtattttccttgtatccttagatgcaatcgtttattttattactttatccaaaaagatcagatggaattttggtccttgatttgcacctctgaaatttgtttcagagttgtgcacatcttgtgttggggtggagggtagatttgggaatgataagatccggggagtctagaaaggaaggcgacgattgtgcacggccttacaggaggggtatgggaaattgttttggggtcatttaaatcctaattttttgtcctctttttacatagtcagtttgcccttctttcctttagtttctgattaccggtgagagagaactaatttggttaggatctggattagttcagtggtgcttcacctggtcagc

SEQ ID NO: 56404 - DNA, 311 bp, Homo sapiens
caagagcaaacctccgactcaaaaaaagaaagtgaaagtgaggacattacttccaattctgtagaaataaaaaggattgtaagagaatactatgcgtggtggctcattccagtaatcctagcactttgggaagccaaggtgggtgcattgcctgagctcaggagtttgagaccatcctgggcaacatggtgaaaccctgtctctactgaaaatacaaaaactgagctggacatggttgcatgttcctgtaatcccagctactcaggaggctgagtcatgagaatcgcttgaactgaggaggcggaggttac

SEQ ID NO: 56405 - DNA, 2255 bp, Homo sapiens
gagaagataactcaagaggaactcagctcctgtgcctagttcatccagagaggcggaactttgggcgaccccctctacttgctgagaggggagagagaagtgtgtgtgcagtcagccagagagctctggcagtaacagtggtaacagtgagaggtgaccctgaggggaagggtgtggactgaaacaaggacaaatgtgggccaaggtgcctagtgtagcccgcagaatgagttaaagccttccctttggctggcgccttcagaagtctgccaccgggagccctcagggggctggccctaggttctcctattgcagtggtggtgggagggagacagggcgggggctgtggctgagctctcctccctggcagggcctcttccaatcgcgaggaagaaagcagttgctgaacacaccccctcccggctctgcagcagaacggctgggccctctgcctggctcgctcactctcgctcggctccccctcctgccatcttccgttgcaaagcatttctgggagctgcatgtgggtgacgcagcagcattgttcgcaggcacaggaagccgcggctgagctgaagggctcgagaaggagcccagagcgctgcacgctgctccctctgggtagtctgaagggtcagagctggactgccctgccctatgtgctctgggagattccagaatattcaagtaaatccggattttcccagaggcagaatatctaactccttcaggagaacttccagtacagaaaacaaaacaaagacgctggggaaacttcaccaagagcctcggcagctccagagcgacgggaaacgaaaggtcagggggtcgatcggcaaaccctttctggtttggggtgcgtgtaactatagggacttttgtctcagtgaagaggcaggagaaactgcctgccgggcgagtccaggacaatgctatgttacttcgtgttgcttgagccgtcattgcacttgttccctcacctggtgggatgtgcttttgaattgggttggttggcttttgagaatcctttccctctctgcccaggcaccttctgttctctttcccttcctgtgatctgtagggtgtgggcttgtgtttaaatgttctcccgaatgcctggagccgagataggcgtcagcctttcccgcactccacccccgctctcctatcccaaaccccctctagtgaagggtggtggcttctttatatggtttcttgtagggcctcagctggagtctgccttttttgatgaaagcagggcgtgcttggttgaatggccccagcaaaataaggcttggaaggaaatctgcatttccctccacacccacacataccccagtaactgagtcttgtatgtgtgaacagctgccaccccccacacacacaccgacacagttttccgcctacccttccctattccccacaaaaatcttgcaggtagaattagactgcttttggtgaacagttaagttccttttctactcttgaacaatcgcagatcttactgtgcagtctgttttgctgaaagtggaaagtccccgtttgtggacagctcagttcacttcagcagaggaaatgggcagagtcctactcttcgtcagtgcgaagtgggggaggggagccatgcactccctagcacacattttgaatggacctgaatttttcaccctagggagattaggagcccataccagagccttgtcccacgtggcaccacaccccgcctcttcacccccacgctgtatggtactaacagaaaaggatgccatagcaacttgaagtaaataaaacatccgcagatgaaatgagtttgggggaaggtgagaggcatctggagacttggcaaaaggggatcttagtagaggagcttcttggctatgagtgaaagggtctttctgagacccaactttgggatttggagcaggatccttaggttaagaatgaaaatacataaaagtcctggtctccgggacagagcacacaggattatgagaaaaattattagcaatggcccagacttgctaacctgtccaggatcagagtttagtgtttgccgaaacagttaccatcctgtacatacatacctagggtagccagaaaaggaatcatgtaacttgtctcccagatttattttgctgttggtgttgctttagggctcataaggtcagaagaagaaggattccattatactagaagatttgggtttcaggagtttctgtctaaaacgaaaagatttggccaggtgcagtggctca

SEQ ID NO: 56406 - DNA, 1029 bp, Homo sapiens
aggcttttaaaaacatctctgtcttcctatagatggacggagaggggttgcttaacgaagaattgccaaattgctgggaatgtccaaagtgctaccaggaggacagctcggagaaagcccaggtaaaggaaccttatcagatttgcactgtgacagaaaggaggcatcaaatgtgggggattgctacacgtttgcctttgcattagtgttcacacagtttctctgacctaggagattatttttgtttggtttggtatgtttttcctttggttaatttttagtattttctttgttagagtttgtagcattgtgttttgtattactaaatgttgttccacttgggatctgcaaattcctaaggtccttttatactctggggccctacaaagagaggaaccacggctgggctatttgaggagagaaattaggtgagtatgatccctcctgaggaatgttaactagaggagaggcagtggcctgaggcagccagtgagtgcagcagtgtacttgagcttccagttaagcaggttcacatttttgtcatcttcacttttgtggcctggcagaaagccctgccctgcccatcccacatgcccaaatgtgtcatgtggaggcagcccctcccccagagaggaccagtgctatgaccttggcccagaggagctgaggttgctgaccagtggttgccaataatgtcaaagggccaaaaggactgtacttactcaggctgacaaggcaagaccagctgtggacacctacaggaggagatggctttccaagtgccagtctttcaaggacccttgcacgggagcagggaagggggcagaaaggaattttcttactttttatttcttcccacttggatactaagatagttgaatttttcaatctatttgtctttgagggcaaggatttttgaagttgactagggccaaagttctccttagttcttgcactagtgacctttacatgtgtcttcattagtgatgttgagtgtttgcatctctgctgtagcagatgtgttgttgg

SEQ ID NO: 56407 - DNA, 2488 bp, Homo sapiens
caggtcccaggttctgggtgacctactaaggattctgggtccagtgtgggtcccaggttagacgtcctagtcctgagtccgtgtccacagttctgggtgttgagtctaggacagtgatctggagttgacagtccaatctaggtctgagtcctgaccccaagtctagagttcagggtcatggtagtagcctagggtcagaatcaaggttggggtcagtaaccaggatgggatcgaggtcatggtccaaaatctggatctggggacctgttgggggtctgaggtgagtgtcgcagtctgggtatggcgttggagacccagggctgtgatctgaggtcatggttagagtctgaggtggtgggccaaggtttgagtctggggtcctgtttggagtctggtgtcaggtcgtggactgcgtccaaggtcagggagtccggggttatagccagggtctgagatgaaagtcccaggatggtgttcagaggtctgaatctgtgtcttggtgagcgtccaggttccctgtgatcacgtttggtgtcagggctgcggcccgactggggagcctgggatccagagatgtgacccgaggttgtggtcagagaatgggtctcgggtcgtcttccgtgccgggtccctgtcgtgttccaggcccgggtctccgtccagcatcgagggccgaggtcacggccagggtctgagcccgcggtcgcaggtctggttcggggtcagattccgcgcggcctccagggggcgccgtcgcccgcccggctcggcccctcgcgggctcgctggcgttgtgcgcggcaggcggggccggaggcggcggcggctccggggcgcgggcgcgcgggcggcggcggcggcggcgccccgactgcagtcccggcgggagcggagcgcgagccggggccgggcccgagccggcgccatggggcggcgccgcctgtgagcggcggcgagcggagccgcgggcgccgagcagggccaggcgggaggcgtcggcgcccgaggccgagcgagccgcggccgggccgggccgagcgccgagcgagcaggagcggcggcggcggcggcggcggcgggaggaggcagcgccgccgccaagatggcggacctggaggcggtgctggccgacgtgagctacctgatggccatggagaagagcaaggccacgccggccgcgcgcgccagcaagaagatcctgctgcccgagcccaggtgaggagaagctgcccgcggccccggcccgaccccgcgggcgccccggccgcggccccgagaccctggccccatgctcgaccccgcgacctggacccccggggccggctctcgcaaccccctgtcggccccccagcccggagcagcccggccttggcgcctgcgggtccagaccctaagccccagaccctgggcgcctgagcccggagcgccccaactccggagctcctctgccccatcggtccccggacccagtcgggtccccctggccgccctgctgcttccttatcgtgctccaccggccccccgaagtcgctgtcagcccctggctcccgccttctcccacgggggcccggcgcgccccttcatccttctcggagcagcccttggtccctgtggggtcccctcccctccgctggccaccatttacctcgcctgacgatgtcacccacccttttgctgtccctgctcacggcactcgctttagggtttccactacccccacccgtctctcctccagtctacacttgtgtgaggtgttgggggacagccagtcttccggactcttctcccaccctctggtggggtcgctgtcctggagttgggctcgagagtgctttcagggcggcgtggtgagcaggacctagggtgctgcgggcaccctccccctcggaccgcgctcaggtcggggaaacatcccctgtgccctctcccctacatttctcctctggcaggccctgcatatggtgccccgtgggtgctgttgaccaggggccctcccagcacacctgcaatggctggaccttagctgccgcctctgtaagacaactgacatcacacctggtatcaaagtttagactgttcaggatgtaggtgcaaaagtacacaggatgtggacgattgctgcggtttgtccagcattttatggctgatagagtatctctccactgtgtgagcctctcagcagcgcatggggtggcgaggacaggtgtggttttgtccctgtggaacagatggggaaactgaagctccagaggtgagtggcctgccccgagtcacacaggtagtcccaggtggcacctggccaacagatcagggcttcagacttctggttctacatttcatcagctaccctggcctgtgccagggagcagacgtgcccgccacgattctttgtgtcgtgtggcaactccttgtgcatgcctgagagttggcctcctcctggtgccccagcgggctggggatggggcctgtccacactgccgtggtctta

SEQ ID NO: 56408 - DNA, 1488 bp, Homo sapiens
agatgaaaagaggccagacgggaagaacgtggtccagcagaaacaggctggacttggggctgagtgaggcgggagtctggggaagagggtaggtgtggttgggttggcttcggacatactgatgggatagcatgggatccctgggcacagagatgtcctggagtaagctgaaatgtggacctgggggtggcatcagggtgacaatgggaacggacagtctctctcccagggatgtgggggtcagggagagagaggaggccgtggaagagggttgagaaggcactgtcatggaattaagtgccagtggggagctgtgttcaagatggcagaaatcaggagaggctggaaccaagaaagtcctgtcggggttgagtttggagagggctcagggaagggaccgcctctgagaaaaggggtggccagggagggctgcagtagtggtgagcaggtgagctctgggcattcagaagccttcgggctgctaccaaccccaggacctcacagattgacaccatagcgtggggtggcaaagtgaccccagatggcacaggcgccatgtgactacagggagaaggcagggtaaaaatggcaatcaggccttccagcccagagtctcagaactgaggacgccctacagcaggaagtgatgctcaagctagctggccctcctcaatcatgttccacgtagggaaagggagaatagagggtcagccttggccacctagcaaaaccagggccccagaccccaggctgggcctccagtaatcaagggccggaactgagctgacggaggcctgcaccctagttccggtgtgggtggaggggccggccctgatttcgaaactcgccttcctctcctgacgctggcagccaaccgcagcctctgcaaaagggactcgtgcggcgggcgaaggcagccgttcgccgcgggcggtcctccgccgggacggctctgccgctgcctgggcctgcgcccctctctccccgaactcctatccctgacttcagggccccgggggccgcctccccgcatcgctgggcctgcagacaccggccaggtcccaggggaaggtgcttcccgctcagccggcaagcacttagtggcgtctgctcgttgctcgtctccaggccgggtgaggggagccggggcgccccacttcacccgcacaccccagcagagtcggtgaccgcgggacctggggtaggaagaccggggcgagcaaggggatccgcgggggaaacgcaggcatcacggctgcagcaggaccgcggcccgccgcgcacgcgcgtgcactaccgaggggcccagtgcccgccccctccggccccgccttcctcttccggacccggctccgggggtctgcgcagggctcggggcgcctcctgcgggccgcgggcggagctgtaaccgggcaccgccctccaggccgccccagcggacccgggcccgaccgaggtcggggcgcagacccaaggccgggcatctcc

SEQ ID NO: 56409 - DNA, 2190 bp, Homo sapiens
agcaggaggaggaggacttacagcggatcctgcagctgtcactcactgagcactgagccatagccccgggagggctggccaggccactccctgcccgcttttgtaatttatttatttataaactctctgctgctgagcttggggcctggagccccaggaatgagcaggcaggggagactgagatggaaataaagagactgtcgcagcagggctgctctgctcactgggctggagcggtggggaccctgaaggtggggcgctgtggagaggcactgtggatggcggcctcagacctgggcttgaatcctggtcatggtccccttagcctatctgagcctcagtttcttcagttgtaaaatgaggagaccaccccccaccctccgcccctcagggctgaaaggagctggcgagagtcacgtgtccttaccaagcaggcgtcctgtgaaagtcagatcccctgtgccctgtcccacctgctggggacccggttcgtcctgccacccagcctagtcttctggaaaccggcccacgtgcctgctggggaggaaaagcctgggtccccaggcaccattcacctccagctgggaagagccccgacgccgacccctgcagccaagcccaggccctggccctgactgcggcttgttctctgcgggtgggtttgcgcaagtcacttccgcctgcgtagctggaagccctgccctgctcgcctccgaggtggacctgagagcccctcatgggcttcctgggttatttgtaaaccccaggccgttttccccggaagcctgtcttccagtggttcctgcggagtgggaacgagaaggccgaccagcagggagaaatgtttggggtgggggcccttggccgagggcgcgccgtgcctgatcctctctagacctgtcccccacctccccacctcagctctgcctccctaggacccgcctctgcagggcacaggacgctggaggcccagaacagctcaggtgctcccgctgggccggcccgggccgggcgcttcctgggagggggaccaaactcccggccttcagctcttgccctccgggtctccgggctccgcacctgcgcccgcccccggcctcgcccctgacctgtgcccaggggctgggcgggccgaacagcggagaccggaggggcggggcccggccgccctgagaagctccgcgggcccggctgggcgagtgtctggccctttaagggccgcccccgaggaggtgccaggcccgggtggcgccgtccgtccttcctggtcctgcgggtccaggactgtccgcggggttgagggaaggggccgtgcccggtgccagcccaggtgctcgcggcctggctccatggccctggtcacagtgagccgttcgcccccgggcagcggcgcctccacgcccgtggggccctgggtgagtgtggtccggccgtggtgccgcccacgcagttgctgccccggcttgggagcgcgtcctgcccgccagcgggctcctctcgaacggggacatgaggagggggccccggggctcgggctggagggcgctgggggcctcgagggtctctggtactggcgccggggcacaatccagagccctgcgcgccgcccgggctgcggaggccccgatctgagcgcgccccccgccacactcggcgcccacccagccgacctggccttgggccggggctccacggggcctcccggtggggcgtggactggggtgggaagacgattggcatctggcgccttttctggcctcccccaactctagaattcctgagagaggggaggggacagccctccccgccctcaccctgccctggggctgctctctccgcaggaccaggcggtccagcgaaggagtcgactccagcgaaggtgagcgccacctcccccacgcagacacttccgtctgccccgggcctggccacggccgtcctgggctccagctgcagggacagaaagctccccggaggacgcgcagcgaagcccactgccaaatttgtggggcagcgttcccggtggggccggctggtgggctcgcggtagggcggcctttgccttcaccctccccctggtcagctggggcttcctcatccactgccctgggctttggctcaggtggtggccacgggccgaacggcaggagggcatgatgggcctgaggactcctgggtccccgaccatgt

SEQ ID NO: 56410 - DNA, 528 bp, Homo sapiens
tgctttggatcaaggtggcccccgatgtgggaagccagaggtgcttgctgggaatgtatagatatgtttggacttcatgagctatggaccccaggggtccttctctggcaaagcacccatgtttgtgaggtgggcaccgcttagcaaggcaggtggctggctagtcaggtaggttttccctggctgctccagaaggtgagtcatgagtagtttccctgtgggccaccagggggcaccagaggtcgctcagctcttccgaggacttgatccgtctcaagatgactgtctcctccctcttcggcctaggactttcttgaaggaaaagagctgtagtggtgcctctctcatctcctaacttgctagggactgccagtcaaagcagggccacagtaaaggactgaaggtcaggattccaggctcaatattctttattgataagcattagtgaaccccttgccctgggagctcagccagtcctgctctcagattcctggccttaggtgggagagcatcttttcctcatggatc

SEQ ID NO: 56411 - DNA, 5075 bp, Homo sapiens
ggtcaggagatcaagaccatcctggctaacacggtgaaaccctgtctctactaaaaatagaaaaaattagccgggcgtgttggcgggcgcctgtagtcccagctacttgggaggctgagacaggagaatggcgtgaacccgagaggcggagtttgcagtgagccgagatcgcgccactgcactccagcctgggcaacagagcaagactctgtctcaaaaaaaaagaattattatagtggcgtgtcctcctgagccaggcacctcatagaatcttcttgcctgttcagcaaggccttccaaccctccatccatttctccctcaggtcaggacagcagggtgacagtgcctggagaaggccctggctcccctgaaagccctcccggcctgtctctgacctgcactggaagcgggggtctccggggtgggtcttcagcacctgccacacctctgggggaggctccaagcccatctgcttggcccgacaccagcgctgcagccgtgtgatccctgccagggtgggaagaagactctggagacttgtggggggtggggtagagtctgagctggagaatgtgtgtgttggggggagacagttcctgagggtcagagtcacgcaagcgcttgggtgacttcagagacgtgtgggtgactggctgggagaggcgcctccgtggggctgggtgggttctcaccggtgcagggcccgtactgccaggccaggtcaaactgcctcagcagctccagctccgcttcctcctcgtcgcggggctggggctcctcccctgcaatgacagctgctcttcagtacgaggttggcttcagtctcctgcccctcacctcccagccttcctcaccaccgctttgcctctgccaccccgcagctagacctggtgtcgggaggggaggacaggccacctttccctttccatcggcccctccgcccctctaggggcctcctctaggcccctccgtgtccactcctcctgcctccctcacacctcagagacctagctcgggtgccagctcccccttgctgtgcccagcgggcccctccctcctcttcacaaccgggtaggaatcagtgatgagccgcttccggcccatggcggccacccaggcaggcagagaaggaggcaactgcggggaagaggagagaccggccagtgggcgcgagaaagacagctgctgagagagacagacggggccaggccagcggcgggcagacaagatgacccagacaaaccgagagaggaagtcgccggggtccagggagggacgcctcccccacccccaaaagcacgcaaacaggaaagacttcagccaatggcaggccgcctatgcggggcggggccctggcgctagccaatggtaggcagtgtagggtgaggggcggggcggtgcctcagctgtgggccgcgggaggaggggcaggctggggcgggggacctgtcgggatgccccgacttcaccaccttccccggcccccattggtctgctgtgggtcccgagagacttcaggagagttatcttcagcctctcacttcccgttttcccttcctaggcaaatgttcttttcagcttcgctaatccccgtggccagtttgtaactccctagagtccagctggagccttcactcggtcctttggcccgccccgccttgtgggggcaggtctggaggtctgaagagagtttgggctaatccaggccccttcccggctcccacccaacccccactggccccaggagacctggctggagaagcccatgggttctgaaacctcctttctcacagtctgtgcccaaagatgctgcccactcttagtccgagtaagtgtttgccgttttgactctcctggggtcccaagtcgtgtccggcccgccccaccagtcaggaagattccatactgagtaggaaggcagagcaagggtctggtccccccaccacaatgtgtttggatccctagttcttcactggcaaaatctgccctgtctctcacaataatgtgagtctgagcagaaaatattaataataaacctaacactcattgcacgtaccatgtgccaagtactgttctaagcactttcccacatgttaattaaaatagatgtcaaaaagtttttgaaagtaggaagtatagctaaatgattatcactgctgatagtcacaggcattgtagggccccaatcaaaccacagtctctcttgcaccccaggagctcactgtcacaaggcagacagatgcacagttgtcagtgagaggctataattcctaccagaagagggaaagggtgggtcagagattggttaggaccacagggatgattagcattggaaggcctcctggaggaggtggactgctgtaaacaatgtctctcaattctccacccatgacctttgtcccttgggctcctgtcatcactgactcacccatactgctgcctccccctcaccaacttcctggcaggaggcaaaagtactggccagtgggagtctgggaaccagcacagggaccagcccagctctaatcaccctccagagatcccatccggttcttccttccagggatactgggagggtggggcacagactcctgggctgctgcctgctcagaggcctctgcctcctcctttccctgctctggggtctgggtgttctgcactggaagagggctaagccactggtacacgtgggcacaagggaggaagctgctctggaaaggagaccaccagaggggaggcagaggagcaggccatgtcttcagggtccacgtcctgcctggctctccccatcggcgtcctagaggagggagcttgtgggggcactgcatggagctggagggccctttctgctgtattgtttgggctgggcctagtctaatccccccatctgccttgcggactaagtggggcccacattcagggagacagtgtccctgcggagttagtgatggaagcagggaggccctgtctaccagggctgggaagggcctaggtgctgagtccagtcaggtgctgagcatgctaggtagggatggcgtctaggctctgggggattgactacccctccccagagggtcttggcaagggttcctgggctgtttccagaggtgtgtggcacccacctcctgagtccaccaagccctgagggagtagggagccatgggtggggcagacccctcctcattcccagtccctcccacccctgaaagctgatagccgtggggccctgccaccgcccagggagcgtgaaatggggtgtgccgctgggcagccacagtagctcctaccaccgcctgggcctattgccttttctccttgggcagcctctggcatcctgagctgctctgtagatgttggctgggctgtccctgccagcttccccagctttgcctggcacaggccccaacccaggctggaagatgtctccctcaggcttcagctacccccacacccaagaaaaagattcagagtggtcagctcaagtgcaggcaccctaggcctggctttctgccttggagttgagggaactctctgcaggcagcattgctgctctctcttagatggcagtagggtggagcccctaggaaagagttggcacccagggattttggaaccatccctgtccaactggcatgccctgactcagcacctgaatccctaaggtgcgctgaggactaggctggaccttgaccttcctgtcctcaggtcttttccttctttgctgtccaaccccatccaccttctgtaccttcttgcctagaaccccttcacctactcaggcagcatcctggcctcattccctaaactgctgtcttggagcctgttcaggcttcagactggatggccaggccagagttctgggttgggtgctgagttctctctccctgggggaatgtcctgagacccttgtgtcagccccgacacccagaggctggtgatgagactagtaggagtgacctttgcacctcagcctggtaacaatacccaagacccttgcttcagggccaagcccagagtcctgggggtccaggagagaaaagaactgaaacaggaacccggcaccttcccaggggctgaggcccaccgctgactgcactcaagggaaggattaggtctggcttagctcagacaatgtggtagaatgggggcctcagcactgcacctgcattcccttcccccacctcaccatgaggtttgtggggagagccaggtagagctgggaagctggaggcaggtggagagaggggagcagctgcctgggacccagtgggctgtggggtggatccagctcttcttccctctcgccagtaccccccttcctcaggcccttgggccctgccacccaccctgagctgaaagtcagtcccactcaggagattctgggcagccagaatacccctggccccggcccccaacatactcacacaccgtgggccccattcctcaccctgtgggccagaattctttcaggcagtccttcctagtccctcactgccttcccagacactccctcttcccctggtccaggttctctggcctaatgtgcttccatcgcagcagcttgagtggaaaggatggggtctctgggtttttctaccactgcatcttctgtcctgctcctaccaccctccacaccttcttctctagtcacctcctctttcaccttggccatccaggctctggagcagttccgggaagacttgaaaaggggccttctggccattactcaccttggccaccaggtgtcagactttgcccagctgggtgggaggaaggttctagttaaccatttccaccccatcagtctggcctcagagagagatctgggcaagttggggaggagcctagaggtgaccactgaactggcaaggctgagggaccctgaaggttgagactgggaaaaggactggaactctgactctacagctttcccccagatccccctcactgccactgcccccacaccaccccactgacaagggctttgtcccctgctgggaagttcaggaacgaggctgagtcagggagcttgagaattgaaggaacaaaggcagggacagttgtagctccacag

SEQ ID NO: 56412 - DNA, 4064 bp, Homo sapiens
gagagtgcaggagccaggtgtgcacaagaggtgggacgtggggaggaatgtgaagtgtcagtgagccagtggctggtgtgcaggggtggcgtgcaggggtggtgtgcagaagtgtgacggacaagagtgtgggtctgtgaatgaaggggacagggagccattgcacccatcagcagtgtcacttctggggctgccgggtgacaattgccatctctgcttcctccccggtggagcgtgtggctccagggcagcgagggtgtctgagctggccaggagcgcgtctggtctgttaggggaatatgtactcgcatcctgtccggtgtgaggggcaacgtgtgctcccgagctgtggcggaggtcagtcggggtcagtgaaagcacagaggtgtccctgggttagggtcagagaaggaggacccagtagagcagcgtgcccagtgccccccacccctagcctctctccaaggcttagcctccacccgcccgtctcccctcctctcctggtagcccctcacaccccggggggagggccaggctgggagctgggggaacaggggtcctctgggattgggagggtctgtggggagggctccagaagcccagcacggagttgtggaaaggaaggcgggtggggagagcaagcatgaggggacctctggcgagccccggggactctttcgaaggtttccttcgaggggctcggccgggaagctgcacggcggcggttgccagctggccctccctgctggcggtgacctctcgctctgggacccctcccggcgctgcgccttccccctgtgtggcctcggcgcccccggccccgccccctcccgctcccgcccggtcgctccttccccgcggcgggggcgggggcgggggcgggggcggggtccggggcaccgggctccgggctctgcccggcgctgccctttcccgcgcgtcaactcccctcctgcccgggctgagcggctgctcccgccgctccctggccagtgacagactttttcctgccgggtccggcccggctgcgccagccccccgccaaacaataatcactcccaggccacggtggcccgggggactcgcggccgccgcccgccgcccctacctgccgccggctccccggccgtgggcaccatggagggttccggccgcgcggcgcgtagctaggaagccgcgagtcccgcggcgcggctcggcccgtccggcccggcccagccaggctcggcgctgccctccgccctcctctccgccgcccgcccttcctcccgcccgccctcctacccctcccggcgggccggggagggagagcggcgcggcccgaggtgtcggcctcccctcgcctcccgccgcccggcctcgggctcccccggcctccctccctcttcctctcccagcccctcctcccacccgcagcctcgctccccgcctcggactctctggccccgactggtgcgcggggctctggggctgcggctcctacggcccgcctcgctggggctccaggttgccgcctccccaggtctgcgatcgtccgggctccccgccgctcccggccacctcctggccccgccgtgcggactccaggaatgccgcgtccccgcccggcccctctcgagggcgcccagccgtgcctcccccggcccgagcccagctccctggcccggccccggcgcggggctcccgggggtcagggcaggacgggaaccggatctcgtggctgcttggcggggcgggggtcggggcctcggccgcctggctcctacctgctcggaggtccatggggctggggccgggccggccgggtgcggctcctctcccggaggctggcggagtgggagggcgagccgcggctccggcgaagctttaataatcccatccgccaggcccactcgcaggtttttttcgctcggtttcggattttttttttttttcggtgtgggacattctgcaaactttttttttttttttctgacgtgtaaagctgtaaccacaaattgtagcggccctccccggggtgggggtaggaggggggaggagggaagggagggcttctggggctccctctccctcccacagcaccgagggggggtgaggtgaggcgaggctgtggcggtaccaccctgggcctcctgggggagggggcggggaggccatcagtccgtctgaggactcccaggagccgggggacagcgccggcttcgggtgggcttctccccaggcgttggcctgggacaccgccccctgccccctgtcccctgccgatgcggggtccctgatccaacctacctctgcctgtgcgaggtccctgctcccaccctacctctgcctcctcatctctaaccttccctcctcctcccccttgagtaaatgcaatgacacattctcccaaatgccagcgagctggcctgggagcaagtgatggtgtttttcctgctgccctttgtctgggctgaccgccccccctgcctattgtcccgccgcttgtcccatttccaaaagctagagctaagcgaggcgctggggctggggcaggtgactaaccagctcacaatgccccctgcgggggaggaagagggcactgcaggcccactgcccggcccagaggcgagaagaggccacttggcgggactttttccctcaagttcacaaggttcttcattcttcctccagtgaccagggagaatgtacatgggtgggggatttgtaattcattaatcagcacgaggcaacggaccagtttcaacaccacaggcttcttgggtgactcagcgggaatgctccgattcaaggcgatggaccgcccgagcgtccccatttgtgaaatgtttccccatgaagaccctggcattctccttcctttggggtttcgggttgttggtttttccggtggtgaggtgggggtggcttagcggtgagggctccccctccttcccgcaggcctgggttgggatttgctgggcaggatacctgggggtatgcctggaccctcccagagggggtcccctcctccctctccaagggctgccggggagaacacgctcagaggaggcagctctaacccagggctggggactgccctgcttcatgattttcctgggggagagtcatgtggtccccaaggcttgggtgccctatagccacaccaccaattaaatcactgggtaataagttgcttttgttgttgtttatttattgtttcaaagtgggagaggccagtggtgggccagacctggaaggtgatgcctctccctggagtggcatcagagatttgtctcccactccttcctggtgcccctggaatgggagggcactctgccagtccagccccagcgcctccaacctgtggcctgggcaggcatcctgatcatggccagtgctgggtcccagggcagctcttcccttctctgtaccgcgagcactgaggtgggggggtggggggggtggggaagaagtttgttttcaattacctcactggagtgggacagactttgttgttgggttggtttttttttttctctctctctctgtcctttcttccttttttttttcctaaacaaggagaaaaagggctgggaaaggagagctggcttggggtggggggcaggggactttgagggacctcagtagcagctctgatgaaaactgcctggagggacccttgtgaaaagtgctcagggcctacctctgccccccccaccgcccccgcacctcctccctgcccccaccagccaggactctggagtttcagtgacattcctgatggatgaacccagtgatttcttgatgcccatgccaaggtcaagaaggcagatgcccatgggtgcatggcacggaggccagccaggaggtccccctagctgctaccctttcagagggagggggccaagaaggaggggagagggagaaggggagccgcttcagcctctccctccgcctcgaagccgctccttgtggagtctgcacaatgtggtttggatttggctgagcccctcagcaccttataaagcaccttgctgagtcagggagaaagcagccccagtgtcgggggagcggaggggagg

SEQ ID NO: 56413 - DNA, 1222 bp, Homo sapiens
ccttgagcccaggagttccaggcggcagtgagccgtgttcgcgccactgcactccagcctgggtgacagagcaagaatatgtctcaaaaaacaaacaaacaaaaaaaggcacataaccacgatctaccctcgtaaaacgtttccagagcgtcccagcggtgcccctcatcatctggcggcccctacgcctctctgagactcacagacctactcccctctccagggggcggagcccacaccgctgagcatttactcttgttcttccctctgccaggggcaccgttctacccctttctgcctggagaaactgccgtttttccttaaaggatcctcgaagccggaaggagcagccacctcccactcccggctgctgcaagcaagctgctttgacttctttctagagttggggattgctgctggagtccgagtctcaggcccagagtgggtgcgatggtcttgcttgcaccctgtatcccccggcagacgcccgggaactctactaagtgggtgaccccagagagctcgcccccacactccgactccgagtccagcactcggtccactgcacagggacctcgcgccccacagctgcgtcctctctgaccttcgcaatccggtgcgcggcccgcggaacgccccgatctccaggggcacggaaggccgaggcgtgccgggggagccaggagcagctggctggcgggcgccgcgggcctccccggtcacgtgacaccccggacaacgtgcgccgtcacgtgacggcagagcctgtgagcgtttttctcacgtgacggaggcgcctgcacgtggaccaatggggaggcgggggcggggccggcaggggcggtgcgcgggaagggaccccggacccggaggtcgcggagagctgggcagtgttggccgctggcggagcgctggggcagcatgaagtgcctggtcacgggcggcaacgtgaagggtgagtgcaggtcggcctggcagcggcggtgcagcagccgcggagccgccagcctaacccccttccgctcttctccccgcagtgctcggcaaggccgtccactccctgtcccgcatcggggacgagctctacctggaacccttggaggacggggtgaggggctagggtgtggggggcgggtgggactccagccgggagcgggtaacccggactagagtctcgcccccactaggcgggatgaccgctggcagatttgtcggcaaagtt

SEQ ID NO: 56414 - DNA, 1248 bp, Homo sapiens
tactcaaatagtcgcagaaggtcgtagtactggccgtgtatgtcacctgtgacccagggaaccgggtaagctagatgcaaggtctagacctgaacccagggccaggactgcgctcaagggaggagggctccaggaactctgtggggtccagtgccacttttaggaaggcaaggggacctgggccgggggctcaccgcagatcttgaggggtgcctccagctccagaagaatgggctggctcagaaaaatctcccgggatttcaggcacagaccgcggatctcgttctctgtcagctgtacattcttgccaggccgcgagccctgcactggggcgcaatggggtgtcaggaccctggaccctgacaggaggagggtgggcgacacgggtggccccatggatacctccgggggcgcctaggcctcctcggcccctccttgcccacaggcagctgttgctgctgagcctcccgggaccgcggcctcaagcctcccaggggaagcccccagctaccctcagcgcctcgggaggcgactgtcgtgcgcagggggctgccaccaaaaacctcacagcgcaggaccccttcctggaccgggcttcccgggtttctccctcgccccaagagcccaggcaacccgtgcgcccccagcccgggagagggggggagctgctccgcgcgtcggagctggccccggacctctcaggcgcgtccgcgggggggcagctgcggccacggaacctcgctgcccgtccccgcccagtctaagctggccccgggggcccgcccgcgcgccacttccgggccgggcagggggccagggcgcggcggacgcgggcctcccccgccccgaccaaccttccagcaggcgcccgatgatcgagtccaggttgagcttctcgctgtcggacatggcggcgccgccgctccagcccagcagctcctggcccgctcctgcctcccgccctccggcagcctccttccggcctggctctccttccgcccgccccagtccgcccccggcccgcggccccgcctccaggcctcccgggcccgccccgcccagtcccccgccctctagcgcccccgctggacgtgaggcgcggcggcccggggggcggggcctcggcggcgggctgggggcggggtctgtcgggggcgtgaccaagctggttacgccccagaggaggcgcccagccctgttcagaggatgtggggccggaaggactgtggaagttgtttttctctttca

SEQ ID NO: 56415 - DNA, 813 bp, Homo sapiens
taagacacgttggaggacggggcttcttgaatgtccagtgaggggtctggtctgaattttggcacaaggcggtgggggtgtgcgtggggggcagggagtgtgtgggcctccccctgagtctccccctgcccaggtggtgtgcggcgtgggccgcggggaccgccctctacggcaccacaactccctgccgaggacgctggaggtggcgctggcccagtgcggcctgggcgaggaggcgcaggtggcggctgtgcggcagcgcgtcaaggcggcggccgaggccgcgctggccgccgtgctggctctggaggccggcctgagtgccgagcagcgcggcgggcgccgggcgcacacggacttcctgggtgagtgagggcggccggggccggggccgggagccgagggccaggggctggagggcggtggctgccgtagctgagctcgcgcctcccgcccggcgcaggcgtggatttcgcgctgacagcggccggcggcgtgctgaccccagtggccctggagctgaacggcggcctgtgtctggaggcgtgcggcgcgctggaggggctgtgggccgcgccgcggctggggccggcggccgacgaggcggtggcggcgccgctggtggagaccatgcttcggcggtcggcgcgctgcctcatggagggaaaacagctgctggtggtcggcgctggcggcgtcagcaagaagttcgtgtgggaggcggcgcgcgactacgggctccaggtgggcggggcgcggggcggggctgggccccaggtcctggcccgagtggtggaggcgggaccccggggc

SEQ ID NO: 56416 - DNA, 1962 bp, Homo sapiens
tgcgcgccaccacacccgtctaattttttgtatttatagtagaggcagagtttcatcatgttggccaggctggtctccaacttctgacctcaagtgatccacccacctcggcctccgaaagtgttgagattacaggtgtgagccaccgcctccggcctgtttgtttttttgagacaggatctcactgtgtcacccagcctggagtgcagtggcaccatcatagctcactgtaaccttgaactcctggcctcaagtgatcctcccaacttggcttcccaaagtgctacgattacaggcgtgaggcatcgtgtccggcctcaacaacgttttttgaagtgtctattctgtaccaggtgcctaaatgtgcttaaattaagaagggagtaaacgccaacaaaatcccatatttacaggtctatcactgacccccaaaaccctatttaaggcgggaacctggcaacatagcctggcagtgagctggccactcagtaaatgctccgatttgcagggtcctcgagccagaggcactttgaggagaccctgatgcagccgcctccctttctggagtgaaccgaaagcaacgcgacctgcctttcatcacgcagccggcctggcagtacccgtctccaacagggctggggattgcatttacattcacacctgcatacacttccgaccctgctccatccaaactcaaaacaccgtagaaccaaaacgggctcccagaaagccttgctgggaagaccgagggtcctgcggaaaggattctgcaggctgaaggctaggcgcctcgccactctaggactacaattcccgagaggccttgcgacggaagccatctttgttccccaccaggctaagcgattttccggagggggagtaagatcccttgcgtcaccggcgcgcgcagctgccgtcgcggagagatgatgtttaggtccgggactgtcagtcagtgcgcggccaggtacgggccgacgggcccgcggggccggcgccgccatggcggccgtgtttgatttggatttggagacggaggaaggcagcgagggcgagggcgagccagagctcagccccgcggtgagtgccctgccctggcgcgactggatcctggagccgatcctgtcacccagccgaggccggagcggcggctccgcacgcccagagcgggctccgactctttgcagacccagatccttctcagatcccggtctctattaagttctgatcccaccctcaccccgacctctcttccagaaccccagccttttctcccgattctccctttcctgccttcggtttcttcccaattcttacccatcccctactagctgccatccctgacacccttctctcctgggccacgcagtccaacctgaacgggagcggggaggtatcctggcaccttccttggctcttacccctcggtttctcacaggacgcatgtccccttgccgagttgagggcagctggcctagagtgagtgagggtcgtgttgggggaggggggaatggagtggggaaggggaactggggagcactggagccttgtcctcattaactccttgtgtccgtaggcctgtgggacactatgaagaggtggagctgactgagaccagcgtgaacgttggcccagagcgcatcgggccccactgctttgagctgctgcgtgtgctgggcaaggggggctatggcaaggtaggggcgggcgcaccctcctcctggcctcacagcctccatctggaggcagcaaagggttctcaaaacaaattagacttgtgaatcagcagggcctctaatgggattcagagccagaaacataaaggagggaaggccaaatcctctccaatcggacttgaaatcttcactgccccacccttggcagggcctaggcctcctgatcccaaagccagagcttcagggtggggcttcttgaagataggatgtggagagggaagttgat

SEQ ID NO: 56417 - DNA, 1497 bp, Homo sapiens
atgtcctcatagcactggtcgttcttgaccggctgcccgaacacatgccggaatttgctctgccggaccactttgcggaaggacatgtctgcgggacagagaggcctgggtcagtccggcccatcccaacaactccagccctccccaggctgctgaaggtgagccgggaggatgcaaccgggggccaggccaccgtaaccctcctgggtctcggtttacccagttacagaatggggtcacaggtgcagagcctggccgcctgtcaccccgcaggcagtgatctgagaggtaaatgctccggccctgaccactgctgagtcctgaggggctttgcaggacgcagggcccctccctggctctggtgtgtgtcgggggcaggaggtgggaggtgccggggttggagagctctcagctctactgtaggtcccagccagtcgggagcagcctccttcctgctcccagagatttggaggctaggtaatggggaagaaggagagaggaagcaggaaaagtctctctactgtggggccgagtgagtgcccagttctgagtcccagggaatgtccagggagccccggcatggcccccaggaagggacggggtcgggacgcagctgtgggccgcgaagcaacccagagcggcctcgaatcggggtccagggtgaaccaggagcccaacttccagggacctccgcccaggagaggagaggctgggcggccaaggggagtgggactgagtggggtagaggggaggcgaaaggctcctgggacccgcgatcccccctcagccccctcagcccggcccctgcagccccgcccagcccccagcccgcgcccctagccccggccctgccgcgctcaccgggggcaccgggggcgcagggggctgcggcaccggcttcgggcggctccggatcccggcctctgggaagcaggaagcaggattcaggaagtgacagagggacccggagcgggggcggggcaggggctcgcgggggcggggccgaggtcacgcgcggaggggctgggcgggaggctgagcggcgccggggggccgggagcggggccgccggggacggggccagagagagcccctttcctaggacccggtggagcgcccccaccgcagctcctccggaagaagggggcggggcggggcagggccgacggcggccgccgcagaggcgccgcaggtgcgggtgcagccttacagcggacccgaggccccttcgcgttcttgctcctcataatggcatccgcaggagtctccaggattgggtgaggccccgccttcccggcccccgacggaacgcacacctccaaggggccccattaccgcccccaacaaataaatgtagaatctacacggacagtggatatgttcacgtgactctttttaagttatcaaagttaatgctctttttttttttttttttttttttttgagacggagtttttgtcacccaggctggagtgcagtggcgcgatctcggcccac

SEQ ID NO: 56418 - DNA, 2225 bp, Homo sapiens
ccaggttggtcgcgaactcctgggctcaagcgatcctcccaccttggcctctcaaagtgctaggattacaggcttgagccaccgtgcccggccatcctggggtctttcaacaaattgataactggtagctactatgatctcagatttcaggtttctcaaagattctgtttcttgtttcgtaagattctgaaatgctgatgttccaaaattctgagatggtttgtttctaacgttctgcatttctaagtctttgaccactgagggtgtctgtcaggcgcggcttcctatgccctctgcccccaggttctcccaacctctgggactgggaaggagggcagtgggtggagggggctgggccattgccttgacatggcccacattcagggctggctgtggcagcccagggccccagagccaggctggaactaggataccagcctccaggtcccaggcctgcgtcatctctgcgtgccctcggccagggccaccagacagagacgggctggttgagtcatccaagggctgggggtggggcaggctgttccggccggctcctggctggcaaggcaggagtcctacgcccagctctgcccctaacatgccccgtgcccttgggcaagcctcagcatcagggctgccacgcgttcggtggtgctcgaagcccttcagcgtcagggtcagtccttgggaggggggctgtggtcaggctggtgggctgggctagcagtggcaggacaggaggagagcaattgcctctggtggaattaattactcttttattagcacaaaataacagcaacctagcagccgcacggcccgagaataagttaaggcacagagcaggcgacgggcggctttcccagggccaggcctgcatgccccgaacttcctgagcaaactccctaggggctggggtttcgagggtcctggagggcctcttcccttgagatgaggggaacggaacagggcaagaggggcgcccccatgggcgcaaggggtccacgctgcgccgcgatcacttctcgaagtagggcaggtagaagaactggaagccccggtggcccttgaccgcgcagtagatgaagatcacgtgatagactgcggggcggggcctgtcagcgcagaagccccgcccctccccgcaacaccgcccccagtgccgccccacagcccccgccccttccgccccggtgcccgctcgcacctccaggcaccaacaacaggaagcccggcacgaagaagatggcgctggagacacctgcgggagggaccagagcccggtcagggcgagggggcggaggcttcgaggccttccgggctgccgctgactgcccgggcaagcctcactcccagctgaaaaggagccgtgtactgccgggaggtgggagggcttgccgtggacccgtggacacaagacaggggtgtcctctgcctgtgggggcgggagggtcgctcacctggagagggggtcgcctccagtcccacgccgaccaggatcagcactgcacacagacggagccgcgggggtgggggcaggagcagtggtgagggcgggggctcccacccccagcccggctcacccaccacctgagctgaaggtgccctaggcagagaccctccccaggaagctcaccaagctctgtttccagagcaaggcactgagcaggccctgggaagtgtgtgaaaggagagatttttctttgttccttggggtgggcttttagtcattcagcaaacatttatggaacacctactgcgtgcctggtactgggaattccgccctgaagggcagataaggtccctgccctcatggcccgtccttagtggaggaaccaataagaacctgaaagctaacagtacaggtgattgggatatagggggtaagaacagggcagtgcaggagtcctgggtccccagttagaagagtgatgggggaatgaggagctggactttgggctctgcaacaaggggggtagtaagcctgggggactggggggccaccatggactgctttgtgcattgcccagactacttcaaaaagggtgggccaggtgtggtggctcatgcctgtaatcccagtgcttcagggagccaaggcaggaagatcgcttgaggccaggagtttgaagccagcctgggcaacataccaagatccccatctctataaaaggttaaaaaaaaattagcccagcccaggcgtggtgactcatggctgtaatcctagc

SEQ ID NO: 56419 - DNA, 1727 bp, Homo sapiens
atcgttctccaggttctgttgcagaacacaggtctcaggggggttgctgggctggggcccttcctcactccctcccgggaagagaaaagcaggcctacacaaccatttgcctggccgcctggcagctgttcacctggccctctgccctccccgcagaacgggtttggtgattcacagaaaccaggtaggaggtgggtggatgccagggctttggggagcaggagcctgcatagatcccagggaaaggagagctcccaactttgggttagggtggagctctcattcagtggcctagaatgggagcttgggaattggggtgccaggaaaggccaggcccagagttcccaggttcaaggcacagggttctggtccaggtctccaagaaaagcagcctagggttggtggaggttttctgggaaaatgggtttttctggtttagtgggagccaaagggtgggcaaggactggtcatgtgagaggagctccagctcttaggggtggtggtgggattagggagagggctttcagaatagagaaaggcgtgcgggttcccatcagcttagctggcctggggcacaggggatgctcctgcgtgtggggcaaggtctggttcagatacagaggagctcccccaacccagcgggggccaggtgcgagtagccaggatgagtggggaatccggttgggttccccagctggagctgagggatgagctcccgggcccgggcactgggctcttcccggctggctggggcccggtatgggaaccgggagggcctgggcagggctctggatcaagagtcacgtccgcggggcgggggggcggtctcgcgcttcagctggggcctctaggcagatgcttccccgagttgaggcctttggggcccggcctggggtcccgtccggccgggggcagggggttaggtgggccgggcggttcacctggtagcgcagccgggactgcttgtcctcgtcagccacctcgaaccgggcccgacgctcgaagtgcagcggcccaaagcgcgcgaccccgctggactcgggcccagggcccccgtcctccagggacagctcgaaggcatcatcaatgctgaactggggccgggcggcgctcatggccccggcccgctcaggcgccgtgcgccgccgccatctgcgcccacacacccagcgtcgccgctgccccgcccccgcatgccccgcccctccgaccctggctccgccccacgcgccggtcccgcccccgtccgccctaagcaggccagagttgccgagccctgagcgggctgatgggtgggagcctcttccagacggagcgcgcccgccccgtgacgccactcagtggccgccatggcaagcgacagcccgtgccgggctcggacacatcccccaggcgtgtatgtgcgggggcttggaggggcttccacgccccaacctccaggtccctgacagggccttttgcaccgcagcctgttcctcgagtgccaaggagactcctgggaactgtttccccaccttactcacaacagccccgcaccggaggggtgctctccccatttttgcaaatgtggaaaccgaggctcagagagcttatgtgtcttccaatttccagtcagtctccacgcagcagccgaagtgatcttttaaaacaaatctttttatctgcgtgtgttattctgaaaaccctttttaaaaattttgctgctggcctggctcggtggctcactc

SEQ ID NO: 56420 - DNA, 1146 bp, Homo sapiens
gctcaagcgatcctctcgcctcggcctcccaaagtggtggggttacagggccaccgcgcccggcgctaaagtacctcatttctatcattcatcgattattccctaatattaattgggcacaactatgactcatttccgaccccgcaatgggctctcttggtctccttctccacctttctttccctcttcctctttttattttttgaaagaggaagatccaggatgcaagagtcccgacaatcatactagatatgcgaaagagaaaaagccggaagaaaatacacaaaaatcataacactttgagggtgtggcttacgggtgttttttttttttttcattttcctaactctgcagtgctgttatattccatccacaacttcaaacaaagtgccacacggccgcagtcccaatcaattcaatgacaattgttagggacgtcctcgtcccgcccggcccgcggaccccggcccttcctccttgacaggctggggtccagccccgagacattcctaggctccgcccccgagcagacgcgcgcgctcagccccagcgcagagaaccaatcaccatccgtttccacgctcagtcccttttggcttctgccctcaaccaaaatggcgctagctcggaagctgccgaggtgctaggagttgccgaagcaagtccggaagctaccgagcgagtccggaagttgccgaaagggagcagcggggaaggaggatggcggatatcatcgcaagactccgggaggacgggatccaaaaacgtgtgatacaggaaggccgaggagagctcccggactttcaagatgggaccaaggttcgtgtctaccctacccttctccccctctgcggcgtggtgcgcatgcgaggcgggaggaggccttaggcgagaggttgcgcatgcccagagggcagcgtccactgcccctaccgctcacatgcagaactcgacgctgattgggctgaatttaagtagggggtgaattcgggcctgtctgccccgccccctggctcggccttgtagcagcattggtgggggaggccgtcagtcatcacaagcgggttggggttgggggttgatctcagtgcttgggcagaccccacgctggaggaaacccagggccgggagtggtcctcgggtatc

SEQ ID NO: 56421 - DNA, 2193 bp, Homo sapiens
ccgcgcgctgacgcgggccccccggagcgccaggctccggccggcgggcgggagggccacctcacctctcccgctgcgaccgcgtcctaaccccgggaaacggcatccctctgggcgcgcccccgaagccccggggcccctccttccgggcccgccttccgcgaccggcccctcggggacccgccccttgcatccccttcccggagtcggcggggtcccaagtcccccactctcggacgtccacctagagctttgttccccgagtgtctctgcgcggagtggcccagtgcgcccagcatctctgccagggttccccacgccctgcacccgaacctaccttccgggaccggtaatctcctccgccctccagatctgccttcttgggcagccgggtcctcgacctccccctcccagcatccttcctggacccctggccctcgccggctctccacgcgcctaggcagccactccgtcctcttcccagggggtgagccctcctcaggctgaggccagagtggctccacttggtatcccacgggccatggccctggagacccgctccgtccacctgcgccccagactggcaccgaggttccgctgcaggcacccctccatcccccactcgcaccccgcgagcaagcgagaggccccgttgtccccacttccctctgctcgccggcgtcccggtcccctgccgcgctcttggcccgcctgccgacgccccggctcacctctagcttgaggcgggcgcccctcacccagcccgggcagggccggccggcccgtgggtcggagcccggagcgcccccagccccggcctcgggttccagcggtggccggaccctcccgaggcgcagtgccggcccatggccccgaccttcctctcgatccgcccgccggcgcccctgcagtccctccccgacgcccgccgcgtcactgcggccgccccgcccccttcctgggcccggctggccctccccaccccggcggggtccgggcagccccgcctgcagcggaggaggcagggagggaggcccctgccttccttcccccgggcagtgggaaaaaggccattgcctaaattctggctcttcctagtccctctgtgctgattggggtccccaaagactcttagttcctatctccaccctagcccagccctcctgtgtgcagtcacagggtggtttgatatggggggtcccaggcccactctcctcttctcactctctgcagtccttagatttgggacccagggttgaggaaatgcctccccaccagtctagccagaagctggtggctctgacatgcctccacctagggctgggctcggctccagggccccaggcctctatggtcacccagctacacgcccaggcagaaacgggctgtcactgtgagtggctgggctagcccctgcatggtgccacaaagcctcccccacctctgccttccgggtccacaagtccggtcacccagccacccggagtctgggcaaaggcctcacgaggcaccccaaggctgggttcatgggatcccacccagcctgctacaaggtgctggggcagtgacggcagcaccccgccagcccctccccttgacactgaggccaagtgctggaagcagcagtgccctttctctctgagaagtcagagaccttcagggctgattcagaggctggggtgttgtcagggcattagggcgtgtgagggagtggcttacgtgaactggcatttccatgctgccaggcatcaccgccaatccagaggaagcgccctccaggcccaggctgcccacagcgccaagggctgtggaagcagccaggccctgtgctgccccctggtggcaccacaggaaggcccagggctctcagcgccacggctggggcggagagggcccaggtcccaccaaaggctgatggcctacagaggcaagtcaaacctcatttaatcacaccctccccatccatagtctcctcttcccctgtctctgcctggcccacccaggcttagctgaagaaccagacccagaaaggctcagagctgagagcacaactccaaatcatcttttattaatataaaaagggcatatttagcaaaagacacacagataaaagagtcactatggctcaggacacaaggcagggaggtgccaggcctgtgcccctgctgggggagaaggaggctcgggacaaag

SEQ ID NO: 56422 - DNA, 2016 bp, Homo sapiens
gggtggggtctcagcaaccctccacagccccacccactgccctccagaggaggacccctgcctccccactccctttccactttcggcaaaagaaattcaaatctaatgacggctagatgaaattagaggtttggttaatcctcaaggttgccctgttgaaatacaaattcccatgctcttccctggaaatggactcaatttcaattcgattcaaaacacctctctggtagtaatactggacatcctctaggcttggctcaggtggcctccagatgtccttccttccctcatgaaggatagtccagtgtcggtttcctgagcagggcggcctggcctcacttacctctcttcaggcgctccatggcgctcttgctgccagcataggtaggccggatctctttgcccatctcctctatgactgacagcaggtccgtgtaggtgctctgggagccctgggcgccgggtggcttcatcgcctatgtcaaaagagaacagggcagtgagctcaggcacctggcggggagggggactccagtccgcatccataagcaaggctttggccccactcacctgcacgtagcccatggaaggcggtccaaagtcgttaaacagcggtctgaaaggagcgccggctcctggcactgagcccgacggcgacgggacgcttcctgcagcaacaggcgcgagtaagaggtcagcgcggggcagggacgccgcctcccagcttttccaagcccaggaccgggttcgcccgattccctccaaaggatgcttcattccatgctgatcaacttcagggacaaatccctcccactgcgctccacctacaagcccttacgtgaccacgcccacttcacaggccagcaaactgaggctcagcgagggtaggcggcaggcccagtattgcagaactcaggccgtcttctcttcgagacctcgaccgcccggcaggcgagcaggggtggagctggatcctcacctgtagggaccggggtgcccggcccaggggtgctggagccaggggtgctgctgggagcaggggcgatgggtttgtaggacatccccaactcctgggcgcggcggacgccagccggccgctcctcgggggttggctgcggggccgctcagccgcgctctgattggcaagcgggctgcacgcccctggtaaatagaggtctggccggaagggcgagcgggcacgaatgctccctcactcccgattggtgcgcgaagatgtcactcgagcctccttattggccgagacctgccccagcaggtcgcaaccgccgccgattggcctccgccttccggacctcgcacctgtctgctccggattgggcggtggccaccgccctccgcaattggcgagttcgcggcccgggccggcgcgctctcaatccgattagtccccaggccctagaggcggggccttgggaaccgggacccggggctgggctgccggttcgcgccgaggggtcttcccgggcgcgggcgctaccctcgcgcctcactcgcgctgcttcagacgtctgctccgctctgcccagtttcggcccagcaggggttgctgtcgcagctgccgtcgccgctgccaccggtgccttgcgcgcttctccgctctgggggccgaaggacgcagggctttgacgtcccgagccctgcgccccaccccgtgcgcttttacgtcacctttcaccggttcaacacccgctccccgatctgcgcatgcgcccgcccgaggcctgcgtttgttcccatggcaacaggcccctcatggatgccgccacgtaccgttcttcctgcggcttggctcgtcctcaggtctaagggcgacctcaaagacccctttacccgcacccccaaggccccgcgctgctgcctaagttagtgacaatggccgtagggcaaaccttcgggattacttgcgtgccgggccccggaccaaactggtcaagagcaccgactggagccaaccgtctgggttcaaatctcagcaccacccccactagcgatttc

SEQ ID NO: 56423 - DNA, 1815 bp, Homo sapiens
ctagttctaaattaagaaagacttcggaggctttttctctttctcctccagctgccccttcgtcctctcccctgcgatctgaactcacctctctctgctagttccctcggctcccatacatctctcaggcagagatttttggaattccacaatacacacatttccttctctccaaaggggggaatgtgtctaaatttggaacaaaggaaacaaatggaaccacttcacaatgagaatgacttactaacattataaaatacagatccaacatttttttttctctaaacaaggatgaatgaatgacactgatgatttattgacccaatatcggacaataccctttaaaagccctgctggacttcacagtcccttggagatgtaaatcttaccaggtatttgaaatgttaacttccagggaattggctaagccatgttctagttgagatcagatctgaaacaagttaaaatcctttacatgttcaaactgcctgctttgcttctgctgcaggcctcacaaagcaatgggatctggtggctatgattccgggcattcacagcggcagcccgggttggactcctggtcagggaaccagtcttgtttgttttaaattattggagtgactcttcaccttttgggtagccatttgttattggtcctcgtccttcccatgggcagcttccgatttcctgttttttcccatctgtggggcatatggggattttgagcctttatgcataggtggtcggctgagaaggtgacatcctggaatatggctggacagaaatgtgggtcacgctccatttgcagcttgtgatgtcagaggcatttgaaccagagcaattccatcttgaatgacctactgggctgcattcccagacggttacggaattctgagtcacaggatgagataggaggttggcacaagatacaggtcataaagaccttgctgataaaacagtttgcagtaaagaagccggccaaaccccaccaaaacgaagatggcggcgagagtgacctctggtcgtcctcactgctacactcccatcagcaccgtgacagtttataaatgccatggcaacgtcaggaagttaccccatatggtctaaaaagaggaggcatgaataatccaccccttgtttagcatatcatcaagaaataaccataaaaatgggcaactagcagctctcggggctgctctgtctatggagtagccattcttttattcctttacttttttaacaaatttgctttcactttactctatggactcaccctgaattatttcctgcgtgagatccaagaaccctctcctgggtctcgatcgggacccctttccagtaacagtgagacttttccttctttgagctgtctttagggtggttctggatctcgtgaggatcactttgcacttctttggagatgtcttgtgtgttcttggctaagtcataaccttggttaagggttactggttttggtgagtcacttgaaaaggaactttttttttttaaggtgaattaaatgttcataaatgataggccttcaggtaaagtagcctttcttctttttcagagctatccatgctgagtccaggcatggagaatgctttctttgcttcagggtgaagctctttaataagcttcaccctgaagtcagttatgtgatcaagaaacaagctaagaccgggcacggtggctcatgcctgtgatcccagcattttgggaggccaaggcagatggatcatctgaggtcaggagttcgaaaccagcctggccaacatggtgaaaccccgtctctactaaaaatacaaaaattat

SEQ ID NO: 56424 - DNA, 1172 bp, Homo sapiens
aacccgggaggtggagcttgcagtgagccaagatcgtgccactgcactccagcctgggcgacagagccagactccatctcaaaaaaaaaaaaagaaaaaagaaaatatcttaagctttgaggaccacatagtctctgttgcaatcactcatttgggccactgtagcacaaaaacaaacatagataacacacacatgagtgagcatggctggggcccaataaaactttatttacacaagcaggtgatgaaccacggtccatagtgtcccaatccttgatttagatggtgaactatcatgagctttcgttgccctctccggtagaaatatgggagaaaccacagagagaaacagagatttcaggaaaacagtaaaattaaacaaataaagtgagacgtcgcccctcctggaggctgcaggctgtgttgaacctgtgtgtgtctgggtgtacagggatgtgagtagatgcgcgtggagatgtgtgtgtgggtggagactgagcgtggctggaggtggctgtggtaggatgccagaaggaaggagtttgcattcagttcctttattagtactctctggagttgttgaggggatgtcactgctgaacactgaccctggtgcaggctaaaccgaagttagcctctgctaccctctgctgggtgaggcactggggagaacagtgggactgaatggggcgggctttctccctcccacacttcccctggaaacacccagcaccagcacattagaacatggggagccaccttccccagcgctgcttcccaaggttcggaaggggaaactctgacctcaagctctgtttgaagagcgatagcaaaggggagaggttggctgtggtttggtggtgcttatctccttcctttgctttgaaaccacaggctggcatactacccgagagaatgaccagtgccaccaagggaagggcacaagctcactggttccaggggagacatctcaggggacaggaacatcccctgacgctgaatgagtgcagcacacagacggagaatacacacaagagaaatcatgaggacatgagagaaggcactggcaataggaagttacaaaaagcaacaaaaagaaagagtagatataaaaacaataatcgaagaaagccaacaacagatgggatgaatcatacgaggtatgcgactca

SEQ ID NO: 56425 - DNA, 1825 bp, Homo sapiens
gagggggacagccacacaaacgccctaaagtctaatgacggcagaaaggggtcttgggggacgggggtggggttcacagcagtggcctgggcgtgatgaccctggcgaaggacggggtcgcagagcccttaaatcctggaccagtggctgattccaaaagcagcagggaccatgccaggattttgggcagaagcagaaagtgctggactctcctgacaagagctgagagaactcagcggcgccagcaagagtttgtgccgtgcactgaccatctgcatcctctctgcctcaccccagcctaggattccgtgacaggccctctgggaagaactccgcgaacaaccccctgccttggagtctgcaatccttcctcgagcacacggacgcccggggtggggaagcccacagtctggcagggctcgcactgggcagaataattgcaacgtagtcatgaggatcgggctatgacctgcctgacttttcactcctcccatgatacaccgatgcataccgcaggtgcacactaaacgccgaatctatagaaagtggaacacaccaggacccagcagaaggcgacatgcgaggtttgtttacttgtggcatcaaaggctgggagccggcgagctaaggagggagcgaaagagcgagcggtggggacagccaccgctaaatgccagcccggtggagggaggaaggcggaccccaggccggtgggaccacatctcccagaagccccggcgccaaggcactggcctctcagtcctcccccgaggaggcggggccgctggcgaagttgaaggggcgcagcgataccggtgcgcggcgctggcgtcgggcgcgtgacgtctttcctgcgcgccacctagcgtctctatcgcgccagttcctcagcctcagtgctatgaaggtgacagcgtgaggtgacccatctggcccgccgcgatgctggcaacacggcggctgctcggctggtcgcttcccgcgcgggtatctgtgcgtttcagcggcgacacggtgaggcccagcctggctggggccacgggtgtttggggccgggtgtcgcggccgcgcccgtgcacgagcagtccctggggtctgtagtggcctctggagagcccttctccccaggccaggcgggaaggcccccgctccggcctggttgaagtaggggaacgggtcccaacgcggggccgactcccttgaccctctgacttgctggcttcccttgttttacagtcctcggcctggcggaagttttgcaggttgtgaagacccctagtctttcattctctccttgtcacagccttgtagggcgtgaaggggtcattgccccatttagggatgcgcacctcctgatttcccgtccactgctctgcgccctgaagtggctgaaaagtgctcttaaaaggatgggaatcccgtcgccctcagctggtgcgctctccactgggtcgtggggctcctcatttcatcctaagtgagcccctccatcacctgtgtgttaaggaggcatttctttcccatcagtaaacacatttcgcctcttcggccgaggtaggaatataaaaggcccctggcctacccaagttttggtccagcaggggagccaggccgggaaagggccaagctgccacactcggcttgtggggctgtgtggtgccgtgatgcagctgtgggtttggccaccgacagacctgggctcaaattggacctgctgcttttgactgtgagaccttccataagctccttttgctccaagcctcagttttctcctctgtgaaacagagaaaatcgttcctatcagagttcttatgaggatgaaatg

SEQ ID NO: 56426 - DNA, 2607 bp, Homo sapiens
gctggcccaccccatcgccctgggccacctctactcaggacaccagagcctccccaatcccttcccgagggggtgtgtggggtggtgcatgtgaccaggcaggttaggggcacccttccacactttgtgcccgtgggggtccatgaccactctcctggtccctggtagcccagctccagggcaggcacagagtgagtgaatggggtggggtggcctcagccaagtggcttaccggatcatacacaggccgcagcaggccccacacgtgctcctcgggcactgccaggcccagctcctcccgggtttcccgcagggccgtgtgcaccacatcttggtcagccgggtcgcacttgccgcctgggaaactaaacagacacaaggagtctggtccttggactcttggggccacggagaggtcggggtatcggcagtgcggggggggccactggcccaccgaagtgtcgcctgcctctgcccctagtttactgggaggccccaggcaagccatgcgacctctggaggccagtttacctccctgagcaatggggataaggaagagaggcccgggacagcgcaggataagagggtctgcagcaggggcaagaagatcctggggctcagatacccaaattcggcctatggtggccccagcaacactgacattgtcctcaggatgttcttaattcccgccgggcggggcccgaacctctccgtagtcgccggcagggggcggcgtccgccctctaagcgggaaacagctcaaaggggtgtcccggcccaggcgtgcgcgcaaggacgcgtacgaggggcccacgcggcgaggacgtggcgccccggcaggtgcaccggggccgacggacacggatcgctgacctctcgctgcagcccttgggcggagggactctccccagacccattttacggaggcggaaaccgaggctcgaaggggctaagtgccctgccagaggtccctgccagccccgggctcctgtagcctccggcaaagggcgaggagttcccggccgctgtacctgacgtcgcccttgtgcctcccggtcaggcggctggaccgcagcgtgtacagcagcgccgggaccccacgcactgagcagagcggcacgagcaccgcggccgacgcgggccgcgcgcggagccgggccgtggcccctgccagcagccggcggcagcgcagctcgccctcggccgacaggcagtcgggcagcatgtcaagtcctgcgcggccgggacactgagggcgcgggatcgggcgagggaagaggcggggcgaggcggggcggggcgctcagcccgggtccctccgaaagctgagagggagaaggggcagcccgcgcgacgcgtcccgcctggggggctgcagagcggcagcggcgtcggggggcctcagtggggtgggtctgttcgtgggcggggccttcccggagacggggcctcggtgggactgggtctgttcgggggcggggcctgtttgaaggcgggtcctcggtgggacggggtccgttagggggcggggcctgtttgaaggcggggcctcggtgggacgcgttgagtcccccggatgggagggacggagggcggcggggcggggcggggcggggcctgcgcgggagccggactcggacgttactgccaaagggcggcggggcctagtaggcaatcgaggttggggcgggctgggggcggggcctggaccggagcttttgctacgaaggactggggggcgtggccaggaggactgtgcttccggcagggccgggccgtggccgggggtgtggccgcggggagggagatgggcgcggagctgcaggacctgccggttgtgttctccgagatcctgaaaccacgcgaaccgtgaagcgcccggcgaccgtcctcggtcccgttgggtcctggcgttggggtgtctgatgaggccccgccggcccccactggtccgtccctcccctaggggctccaggatgtacggagccgggatcccacggggacgcccctccaggaacccgaggtcgatcggtgcgcgagaggagcgtccggcccagccctccctccggtcctccctcccgataccgctgggtggcgcgcgccgcccccagtcttgtcttcccctctggctccgtcggactccagccccaggcctttgacctccttgtcccagcgtccagagctcttctcccttcctgccttgagtcttgaccggattcccaaatccctccccctttcctacctcggcccctgtggtcactgaccaccgtggttctgcgcccttccaccagaccctgggcttggggaccagatgaccccagccttgcgcacagcatttaaacgtggggtggcgggtgtccgccatgctctgctgtgtgacgttgagcaggtcccgcgcctctctgagcgccagtttcgatcctcatctgggcaagtgcagccctgccactgggctggagtcaccacttttaatattactgtgtgctcccagggatgcggacggcactgggcagagcttcgggatgcctacagggctgatgtggggactatgatgggtctgggagttcctgaggcccccacccaccctgaccacgacgacagaagtgc

SEQ ID NO: 56427 - DNA, 1096 bp, Homo sapiens
ctccttcccaagttacctacctctcagccttcgcctttgcttttccctctgcctggaatttcttcttcaccttctccctctgtccaaacccttcccagtcctccaaggcccagcttgagagccacctcctgcaggaagcctgcctggcaccccctgcctgtgctctttgccctgagccccatattgtcttaggcatgtctgcttccccctccgtgtgtccacacaggggccctgtgggttcgctgagctgctgaagccccttcctggaggtcctgtccctttgccttccgcccactgtgtacaccttagtcccactatgtctgcaggcctggggccttacctttctccctgtctgtggcacccttcagcacacagggactgaggctgctgtgactccgggctgggacactgagcaggggccgtggggccacaggcctgaaagagcaagcgagaatggggggaggggatcaaggggaagaacccaggccagggatcatggccagcttcagatggtggggccccaggatgggtcagagggtgtgaccctgaaacaagggtcaggaactgaggccttaggatatgcctggggtgggggtgaggggctagggtcagggtcagacagtaccaggagtccaggtcactctctctaaagcctttggcaaaagggttgctggcgattttcagctgggtgatctgcaggagacaaagtgcagttgtgggctggccatgagccaggctcagccaccttgtcctcccgggaaccggcagtcaggaggccctggcacctgggcctcttggcccaggaactctgagctgataggagtgcgggcagggccttgactgatggcagatactcagggcaagttgggagggcagtagtctgtgccagtgagggctgcaagcctcagggctcagtctccacccctgtgaaatgggcctgcagcgggtgctcccgagctggttcacccaccctgtggttctgataggctgtcactgctgtgaactgggtctctgtgaagatgaaggacttgaagttctcctgggcatagcgctcactgtccttgcgtgggtccacgaagaccacgtggaaacgggg

SEQ ID NO: 56428 - DNA, 1816 bp, Homo sapiens
tgcgtgtgtgtgtgttgtgtgcacacgtgtgacctggctctggccccacctccctgacaggctgtgtgacctggagagattcagtgccctctctgggccttggctccaccctgtgaaagtcctggccaagggcagctgtggggagtgaggaacaaagggcgggcacaagcttgaaaatgggcacatggagaccccagcatgagtgagggcagaggatggtgatgtcatgggcatcatcacgggggccaatttcctcactgcagttggggaaactgagacccagagaggggtcagagctgtggttcccccctgtgtcagcatccaattagatcatgcctcccagcatcacctcattgcaagatgcaatcagatcacgcctcattaccctatgcttataaaacctgccccagccctcagctcggggagacactgctttgggagctgtctaggtgttctccttacttgttgcaagaaataaaatcccctattaaatcctctttagttaacacccgccaagcaactgagcccacccgttgtgtgggtaacaaaactctggcgacccagatggggccgactgggattctgatcctaacttcttgaggctcactaaggtaaagcagtgggccgcggcaccttccccgggcgaactcacccacgtggccccagagggttgagggtgactcccggggatcttctgcttgctgcgtggcccgtggggctgtcactccgccctacccccgaaacagcggaagcagctgcctggagcttttgttctgtgctgctccttcagggaagaaagtggactttgccccgtgggttgactgaaagggtaaattctttggacctagcagtgggatctctagacttcagcgcagggcacctctgctttcggtttctgtctggctctacgtgccgtgggggattgagaggcatctctggccaggccaagggcaacccggatcccggatctgggtagacaacagtgggactagttttgggaattcgtttttttttttttgagacagagtctggctctgtcacccaagctggggtgcagtggcgcgatctcggctcactgcaagctccacctcccgggttcacgccattctcctgcctcagcttcctgagtagctgggaccacaggcgcccgccaccacgcccggctaattttttgcatttttagtagagacggggtttcaccgtgttagccaggatggtctcgatctcttgacctcgtgatccgcccgcctcggcctcccaaagtgctgagattacaggcgtgagccaccgcgcccagcatgagaatttgttcttttttagagaaacagaatttttcacaggaggctgagctgctccatctcccagagcccctacttgccataccccgggttaccagaaacaggagctctgccatttgatgaaaaaaatacttttttcagataaatgtttttgtcatatcatcacacaaagcgggtaaagttgtatatatatacatacaactttttacaaatatgtgatcatatgtacaaaggctagaaggaaatatacagaaaaatatgtattaaaatactggttttttttcattgttttataagatactctacaaaacattacaatgaggtaggactattttagtgctagagaatctcattaaatgaatttgttcaagagcttctttgtcagctgggtgcagtggctcacacctgtaaccccaacactttgggaggccaaggggggcagattgcttgagcctaggtgttcaagaccagcctgggcaacatagggagaccctgtctctaccaaaaaaaaaaaaaaa

SEQ ID NO: 56429 - DNA, 1053 bp, Homo sapiens
ggttcccgggctgcgccacgccttctgccagcccgcggccacttggccagctaagcccagacccccacccgccttgctccgccggcctccaattctgacggtggcaggtctgtccgggagcccggacccccgtcccccacccacaccgaggctctggctgggacccggggacgctgcgctacttgaccccccaaccccacccccgccgcggggggccgtggctgcagctgcgagggcagcggaggggaagtgagagcgggcgggaggcggcggcccgcggtttctgtttcccgggccgggctgggagcgggcggggcggccccgggtccccgagcggcacctacccaggtagacgccgtaggtgagcatgcccccggcgctggcagccagcacgttcttgagcacgcccaggcgcttgcggcggtagtagcggcgctcctcctcctcctcgttgtagttggggtacgcgcccaccagctcgtccagctgcgagccacgcacgccgctcgcacccgcgatcgcgccccgaacccgtgtcccccggtgcccgccgccccccggcccgccccgcccccgccggggggaccctggcccacaggggacgcccgcgcctcgcactccgggtccccgctcaccggggcctcgggcccgtccgggaccccgagcaggtcctcgtcgccctgcggccccgcagcccccgccatcgggtagagcggcggctccgcctccatggcccgaactactgcggactcgcggcggtcgccccggagtccctgcgaccgcccggccacttcctcccggcggccgggacctgcccccgccccgccctgtcccgccctgcgggccgcctcctccaggacacgtgtgtgtgtatgtgtgtgtgcgcgcgcgcgcgcgcgtgtgtgcaggggcctgcctgtgtgtgccctctggggtgtgagttcgaatccccactcagccacctcctggccctgtgactttaggaattaactccatttctttgtgcctcggtttcctccgtttcctcgacggtaaaacagaaatacatggcac

SEQ ID NO: 56430 - DNA, 1544 bp, Homo sapiens
gtggtggcgccaaggtcttctggctatttctcttacttctgtttttttctaactttttgccttctctctttcctcctgtcttgtaaaccaggcaaggtggtaggaggagggcagcaggagtagtagtggtcttattccttaggggaggcattgagggaaggctgggagtggggggtcgagacttccttgctattctgggccataacattccacataatattataatagaatataattaatacaataatagttccccaccccacaccgggattcccagggcccactgccccactcctcctcctcaggctggccctcagctcagtgctcagccctgctgcacagcctctcctcctcctcctcaggctgcccctcagctcggagctcagccctgctgtgtggctctagcctggcgccctctgggcgttgacttcttctctgtggtctgggaggagatgtcgaggcccccgagggaggcggtggtgaaatcttggcttgcagcctccagcccgcccagagccagagtcaggcacgaggctagggcaactccgccccacccctcccccggggactggccctgcgttggacatttcttaacagcagggccaccaggcagagcgggacagccaggaggaagggcagcttggcagagcctcaggtagagtatcccggggaggctggggctgtagtgggccagcagtcgggccagagtccagctcagcaactccgggttacaggcagcccaggcgggcctagccaccggcagctgcactcagaggccactgtgtcctggctgagctcatctgcctgcctgctgggggagaaagcggaaggaggagaggcagatctggggagtggcagcgaggtcccgggcacccccctggccagcaggcacccttccgttgtccgagctgggttgccaccgcctccttttcctgggattcccggacaccctccaagggaaccaagggaacagctctgggtccagctgccccaggaaggactgtgcgccccttccccacaggggtcaagtatcccttccagcaacagccgtttcctgggcaccagcctgcatgcccagtgctgatgcagggatgtggccatgaatgactctgggaaagaatcattcttagcaatggactttgtcagggtccaagaaaggagtggccagccagccccgccccgcctgcaggaggcacttctcatcccgggaactgtgccccatcagggagccgaggctgttcagcctctttgtgacccggggctgggttggcccgagccaccaatgaggggatacgctggtccctggctccccaagggaggggctgctgagctttgggaggcctcatgaaaatccagcttaaggccatcaaaagacaaaatgacaacacatttagttatagatcaaattggcttctattcatgattcgtgaatccggacagcctccattctacaaaatggagtgagagctcccaccaggcagtggcagagcagggggttcataaggcagaaaggaggaaacagaaaaataggaaacaccaaaccg

SEQ ID NO: 56431 - DNA, 1452 bp, Homo sapiens
cataggctggttgagtacgggagtcatacagatcaggtggatcaggcggccgcacaccgcagctctacggcccgggaacgttactaaatactcccatgcctcagcttcccgccttaacgtggtaacacgttactgtagtttctccacgcagagctgctgtgaggattaaaagaggccgcgtgagttgagcatctcgtcgccattaccgtcatcacacgccccccacccaacccggcgggcccaccctctgcacccacggcgaaagcactctttctaaaccacgccccggatgtcccgcctccagcggctcggaggtcttcacttattggcctccccaaaccaacatggcggccccctacaaacttcaagcgccggtctctcctagccaatcaaaagaaagatatttctgaatcccgcctctttcagcagccttgctggccaatcagaccacaccatgaagcatcaatacagaaaagggggaacccgctggcccaatggcagcgtcctacagtgtagcctccgcctcccgattgactggcctgcttggcaaggcaagtagcggcggcgcttcaaggtgggtgttcacgttttggccgtgaaagtcgggcttgggcagcgtggcgtcgggggcgagtgtggtgtccccgttggcgccgccagctctgcgcctgggcttcccctcggctcactcaggatccgcggcctccgtgtccttcaggtgcagcggggagccggctctcagggcgcatgcgccgcccgctctgcgccaccggcctagttagggtcggagatcactgggaaggtggggaaggtgctgggttgggtccctggaactgcagtcagtgatccaaaggagtgggcctgttagggggttcacaggtcgtgggatgagctcttatgagcgccggctaagtgccgggctctggggtgcccttggcatgtacgggctcccctaattcccaagaccaaccgcccccaacccacttcataggtgagaagacggaggtcaggtcacatcatctgcccaaggtcacgcggcaggctgggggacagttccaggagggccttgaagctggggaaaggaatgtggtaccgaggactgttcaggccttgaagagtttccagcagggcagggctgggttccgatcctcggcccacctccttatcgtgtgacttccgacaagtcacttttttatcttttttttgagacaaggtctcactctgtcgcccaggttggagggcagtggtgcagtctgggctcactgcaacttctgcctcctgggttcaagcgattctcctacctcaacctcccgagtagctgggattataagtgcccaccaccacacctggctaatttctgtattttttggtagggacggggttccaccatgttagccaggctggtctcaaactcctgacctcaggtgatccacctgcctcagcctcccaaag

SEQ ID NO: 56432 - DNA, 1997 bp, Homo sapiens
cagaggcggcctccagggtccttgctgaggctggggagaggtgtggtgagtgtacagcccctttgtagcccagcagttgcacctggaagtgagggccaggctgctctccctgaggctccagggagacagtgtgtgaggcctcttgccatggcctccctgcccgcctctctgcagagtatgtgaacatgcaggatcccgagatggacatgaagtcagtgactgaccgggcagcccgcaccctgctgtggactgagctcttccgaggtgcgtcctgggcatgaggggacagggaaggtgccgggtgggcacggatgcatgggggaggagggtgcccctgcccaccacacccgtgctgcccacaggcctgggcatgaccctgagctacctgttccgggaaccggccaccatcaactacccgttcgagaagggcccgctgagccctcgcttccgtggggagcatgcgctgcgccggtacccatccggggaggagcgttgcattgcctgcaagctctgcgaggccatctgccccgcccaggtgagcccctgccccaaccggccaccacgccagcccctgccactgggagagggaggccaggcagccctaggcccaaaccctagcccctgcttgatgtgcgtccccaggaagtccctttccccctctgagccacttccctcgtgaatgggaatgatgagggcttgttaccagagcacagagtcagtgagttggcagagtgaagcttccagccctgggcaggcgcctgacacacagaggttcccccttggggtctggccaagggtgtgacccctgggcctctgagccatggggtgacacctgaggccatccacgcctccctggatgtagccaccgtttccggagtcctgcttgtgtgcctgttgcagcttcccttccccagtggctgctcccctgaggcccggctttccgttctcttagtgggtctcgtgcttacccgtgggggccaggcctgccagcacgggaacaatatgactcggtcagagctctggtcagacccctgtgtgtgcctggcaggagccccggcagccgccgccgctactttctgtgtgcacagcaacccctcccagtgttctgtgactcgggtggctcctgtccagatcctagtttgtcctctggagcactcccaggtcctccaggccatgagctgcggccctgatgtctctactccagccacggactgagagtgcataggagtgtccccaaacagcagtcacgatggtcacaaccttggcttccagacagtgagtgctgtccacagacagacccggtgctgtgccatgtgtgtgactcacagcctctcctgtaatctccacaacccctcgaggaggtcgaggttattgtctccatctttataagcactaaaggatgagcctgccagccacaggtcccactgtgagttgtggacactacatttctgggatgggggcatatgagagtccttgccaagcacatttgaaggttttcccagccagcccctcccccagcgggctacccaggaactgagagttaggacgtgcccttgagtttgggctgtgcccccacttgctgtgtagctttggggagcccctcaacctctcggaaccttgtttttctcatccatcaaatggagagaagtagatttaaggcacaggattgcacccaacagtgtaggcattcttggcgatgttgcaggttcggctccagaccatcggggtaaactgagtcacacagctgttttggttttccagtgcatttaaaagttagatttagaccgggcacagtggctcatgcctgtaattccagcactttgagaagccgaggtgggcggatcacttgaggtcaagagttcgagaccagcctggccaacatagtgaaaccccgtctctactaaaaataacaaaacttagccgggcacgttggcaggtccctgtaatctcagctacttgctaggctgaggcacgataatcacttgaaccgggaggtg

SEQ ID NO: 56433 - DNA, 5189 bp, Homo sapiens
cccaggggtggggatgagcagtgacaggggccctgggggctgggatgtgacagggcagcgtggcagtgtctggtggcccctcccgcaggccatcaccatcgaggctgagccaagagctgatggcagccgccggaccacccgctatgacatcgacatgaccaagtgcatctactgcggcttctgccaggaggcctgtcccgtggatgccatcgtcgaggcacgtgaggcccccgggtgggagggggcctgaggctcctcagcagggcctaaccaccgtccctgcacctcaacctgcagggccccaactttgagttctccacggagacccatgaggagctgctgtacaacaaggagaagttgctcaacaacggggacaagtgggaggccgagatcgccgccaacatccaggctgactacttgtatcggtgacgccccaccggcccgcagcccctgctgcccaataaaaccactccgaccccacggcctcttgtcttgactctggtggtccagggtggggccgttcccggcctgcctgaggcctgtggtgcctccaactggactaggtcgccacctagtctttatgctctctggagtcctgctgccccagccctgccttcctgtagactccagggccccaccaggctctcatggctagaccacaggccgcagcatccctgtcaccctgcctcttcctgggcgtcttccccaaggcccagcgatgccagaggtcaccacagacctgccgttcccactctcccgggtgtcctggctggggcctgggcctcctgtctcccaagagccatccacttgtaagacgcttaggacttggagcctcccaagacctcaggctgaagaacagcaagtggcagaaactcaggccggggcatccttgctgggggtaggaggaagcctgcttggggtgacagtcacacgagggtgacacaggccctgctggccctgagctggcctgcgtccagccacatcctctttcctgtgttccctacgccagggtgctggcccggccactgctcaccacttcctgctttgctggcccagcgacacggtggggtttccctagggccacacacaagccccttgcccatataatggccaaaagcagcccccctgaacttgtgctaagtactgtggaaggatttcacttcatttgcagtgaggaaaccagctccgagaggtgaaagggcttgctcagggccatgcagggcacatcccataataaaactcagttcagagaccttgaccccccccatctaccatcatttccaaaagtgctttttacaaagcactactttgtaaaaagctacttcttcgaaagaacaagtttcctggcccagtgagtgttggaaatgctccagctgctgtgtgcctgctggcaggtactgcatggtagacattcaaggctctgagaaggcctgcagcaaaaacaccagcctctcccagcccattcccagggagcttttctcaggtctaacacctgggcctccttcctagaccaggcattgccatctaatgccaaagtggccaggctcccgcttgggccccacagcctgtggcactggggtgagaagtaactgcaggaggcgaggggaagcctggagcccgggaagtgtccacaggtctggcccgcagctcatcttggccactgatgaaaacaggtgttctttccaaaaacaaggcaggcgcaggactcctgaagcaccgccggtttagcttttcccagacgtaaccgccgtcagagcgtggcatggagcctgtagctgtgcactgaatacttctattccaagcgggtcagtctttccagctcaccgctgggttctttcccttaccgtggtctcccaggcacttactgctgagaccccactcaggctgtctggttgtatcaggccccgaccctgtcagaacaggcctatggcgcccaaccacaagtcccccaattttctgaggaaccacagctgagcttggctgtgactcagtttccaggcccggctctggggctccacttgtccacccctgccgcagccccacaggcctgtgctcgctgtgtggggcttagggatcaccagagctgaagggcccctggcctccagtgggaatgccccaggcctgtccaaagtgcaggcagctggacggtcgtgagtcccagcttccaggcactaggacctgatgacgcccatggtgctgacctggagcaaggtcacagtgacacccccctctaccccccgcggctgcagctgcaggtggagctgacagctggcctctggccccagggtatctcccagggcctgctgggtgcggggcgctgggcagaacaaggcagcatggcctggccctgtgtcctgctgccagtgaagcaggcccagagtggggcagccacccacccaagggccagagcggggcctctccagggtggtcaagagcaggaaggtgtaagcaccggcgggtttcactgccgcccaagggaggggtcccggaggtgggggagcatcctggggaccccaagcccatgagcctgcgaatgttggggtcccatcagccagaggcgcacaagcctcgaagtgagaggagagcagggtctcatctcctatcctgagctgggcctgagcggagctgcccctgcatcggggccagcatagacgcgcgcggttggcagtggtctgttatccgctcctttctccaggcctcctctccgggattaagcgcctcaggacccgtccgccaggccacagcctgggctcaacctctcccagacttcctggactccagtggagccttgggccgggggcggggcgtccctggcccctccccgtcgtcccgcctgcccggaaaggagtgagcggcgcctagtcccgggctggcgggagtgcagttctgagtcccgcccggcgtgcgcggagcggggcagccagcagcggaggcgcggcgcgcagcacacccggggtgagtgcccctgccggggtctgcggagccccagaatttcctgcccaccctcttccccctgccccggggaggagatcctggcgccccacccagttggctccgtgaatgcagctcagcccgccaccccgcagggtgtcaggccttgcggggggccacggaggatccccaagggaggaggagaaggatggggtgtttaccaacacagcccagcgttcccgggcctggtgtgcgcggagctttccccgctgctgcttccttggagggagggacccattctacagatggggaagctgagaccacacaactaggaagtgtcagagctggagaccagctgggtcatttgactccagagcccaccccatttggaatggagggggcgccagaccctctcctactgccttcccatcatctggaggggagggcagaggtgcagagagacctgctgggttcctggaggggccaggaaaggggcacagggtgaggagtgggctggagcctggaccccagggccgcaggatggaggcgtattcatttacaccataaaagtggctgggtgaccctggctagagcggggaccaagggggacaggggtagggggtgagccagtggagcctcacatgccaggcacgggggctgatcacgtccccacacctttccccccgcccattacaggttgttcccccaccccctgggaagtgctggaaggagcccggccctcgagccctcggcatagtggctgtgggagccctgatggccctgagccaggggtgacccctccccagatccccagagctgattccccacacctccttatttggccagcacagccccaaagggagccaggtcagacacaaccctcctctgagctcaccctttgtgctgggcacataacattggactttacctctccaagtgtcagtggagtcctgtatgaaacaaaagcaccgtaccccctccccaagggtttctccccccagggattagtgtgaggtcgtgtggatgaagggattcagttgaggctctggttatttttgtcacctccctagatcctgtctctgtcaggggtgccacgtcccattcacccaaagaggaagtagaggcacagagagggtgagagacttgcccaaggtcacacacccaatctcagcctgggctccaagtccctctgccctgtggccgggcctggtccttagggatggaacccagccccgctgccccctgccctgcccacctgcagccttgggccatctgctcagtgttccctcgttccctccttctctcctttcccaggctggggctggggctgcgtttccctgtttagagttaagtaaaccagacccaggggaggaagtgactggctgggcaggcggggccctgaccaggcctgtcccctccccctaattttcgagctaagcaactgattcccacagaggggccctgggccctgagagcagtggctttggagctggaggggccccagcatccagggcgggttggaggtggcctggcacctgcccccaccccacatcggccttgagcaaggccccgggcccttccccgccattctgtagtttcacttttgttggtttcaacacctggaaggctgcggctgctgccgggcggcccgggcctcaggggacagcccccccacagcagtgctccctggctagccccagggtacccggtggagatgcccgctcctaccactcagcacatgcagctccacagggagcagcgagggctccagccacccccggggcagccctgggcctaagtgcctgggccagtggggtcctgtctagggtgacggcagcccgagaggagggaggccagagtgaaggtgggggtggagccggtgtcactgggagacgctggaggtaggggcgggggtccccatgggcagagcaagccaggagagagcttgaggtcggcctgagggtgggcttcggggtctcccagtcccactgcttactttctgcgtgacctcagcaccgcatcaagcctgcccaggcctcagtttccacctctgtcagatgggggtggtaacagcagcttccaggattcagtgagtgaaggtgcacaggtgcccgtggttgggaactgtctgtggtctgcccctgactggcccccatccgtgtccacccacaggaccatgggctccatgttccggagcgaggaggtggccctggtccagctctttctgcccacagcggctgcctacacctgcgtgagtc

SEQ ID NO: 56434 - DNA, 696 bp, Homo sapiens
aaaaatttgaatgtgcttctagcacaaacaattttttcccagatttaagtaagacatatttaagaggttttttcaaaggttacttaaaatgaaaaaccatcatgagtctctaggaacaagacagcaagagtcaggatctattttcccagaaggttgtctaccttagttaaaaagaacaaaaataaaagggaacccaaagttcttgttttcccaaagcaagctgtgaagcaggccgacagcgtgtagatcaaaggaaccaaaagcagccttaacctttctgttaaacttggcgtggcgcctcaactgtgtggcttatcagaatccccctgccgcgtctggtcacagccaacatgggtttctggctaccaagcaacagaacgggcattaaaacagagttaaaagccctagtttttcttccggtcacatactctggaaatctcagtcaaatgcaaaggcaaacagatgaagtactgttctaaattgtgtaacctgattcaaagtttacccccgtactgctaaagaaggaaggcagactagcttggccagaaacaagctcacaacctggaaacccttcaactgctttttattacctgtagcctctattgttcaataggttttagtgaataaattgtcaattattttttagtgacagtcaaaataaatgaagcaaggtgactggcaccaataacccaaact

SEQ ID NO: 56435 - DNA, 4190 bp, Homo sapiens
cgggtggatcacctgaggtcgggagttcaagatcagcctaacgaacatggagaaaccttgtctctactaaaaatacaaaattagccgggcgtggtggcgtgtgtctgtaatcccagctactcgggaggctgaggcaaggagaatcgcttgaacacgggaggccgtggttgcagtgagccgaggtcgcgccactgcactccagcctggggaccaagagcgaaactccgtctcaaaaaaaaaaaaaaaaggaaaaaacatttctaccttactcttattttaggagccacgcctcccacctttgtctagtaacacagctatagtgatgtctcttaggggatgagaaaatgctactcctccactaacaatgactcttggagagggaacaagacatcaaatcgcgaactcgaaaaactaacagaaaaaagttaaaaagtggtttgtgtttttaaagccagccacaacaccttcattcaaggccctaaaccgcagagactttctagacctatcttaagcgtcagtaccacacgcacttcgtgatggaacggtattgttctcctagaacagacccgttttctcatgaaaccgacgtttttacaaaagcctgtttgtggacggcctgcggcggccgcgaacccgcttcccttggattacccagggctgggagaaggagggctttcgccggctgcggtccccggtccccggcctccgccccggccccggctcccccggcccccgacccccccggcccacgccccctgcccggaccccgccccggccccgccccgcgtcacctgactgtcccgcggcccccagacccggcgccaccgacctgatgacactgatgtggaactcgtcctcgcggaggccccgccaggcgccgggcaggaactccttgcaccacagataggccctgcgccgcgtccggggctccggctgctcgtctgcgggcggctgcggcggcgggggctggggcagcggcagcggcagcggcagcggcggcggagggggcagcgcgagcggcggctgttggccgcccagctgcttggactcgaggtcgctggcggcgtcgcgctgctgccccacgccgggcgccggggccgcgctgccgctaccgcagctcagcagcagcccgagcggcgagggctccgcctcgcccccggtgcagaatttggttttcatgcccgacaggcggccgaggaggcgcgggcggccgcagcgcgagaggactaggctcagagtccggccgggcgccccctcgccgctctctcactggcaggccggcggggcagggggccgcggcggttgggcgcgcggggcggcggcggcggctgcggcgactgcggcgactgtggagcggggatgtgctgctggccgctgcactcgctcctctgccgccgccgcacgaggagcgccggccgcgtcacagcccgccctcgcgctcgccactgattggccgccgtccgccggcccggcgcatcataaccgccgccgccctcgccacaccgcctccccattggctgcggcgccgcccccaacccagagcgctgcggcctccgtgagcggggcctgggcgaagggggcggggcgtcgagggggcgccccggcggtcgcagggaagggggagaggggagcgaggcgcggggggcgccgggagagcgcctccgcggtgggacggagccggactgggccgagcgagggaggctcctgagcctcggaggaccccggggttggctttgggagctgaaagtttccttggacccctcggaagccccgtgacatcagaggccgggcctggcaggggcaggcaggaaacgtgtctggaggctactgccctctccgcgtgaccttgggcgagcagcctcctcctggggctcagtgggtgtgattttgtaacatttcccagcgctgccacaggcgcgtctcgccctgtccaacgcggagcccgaagaattactaagaaaccgaggtctgaaggagggaagaggtgacgggctcgaggccacacggtgggccaggctgggcccggctgcacgccggctaccggggcccagccctctgcacgcctcccgcagcctcagtttccctgtccgtggtactgaggatgctcgggcctagaagttcagggctggaggcccagggaccgtcgagggaggggcatcatccccgccatggggccgccgcaactgcccagagcacaggccaaaggtgcgtgccacggggctactggcgttgtggacgctgcccctgcctccccatcccccgcaggaaacagccttgtgaccgtgactaacgcacctttgccggggtagaggggcaagggcccctgctaccgtttgccacacactgccccatgtccctcactgctcccgtccttcctagaagtgaggtgctgatacatataaaaattatggatcccattttatgggacatgagctgaaacaggaggtttcctgggctgccaggggcttaggaaatccagtgcctgatacacaggaaatgcttctatgtggggagttcacagtcttccagaagcaaaaatgttttttggttttttttttgagacggagtcttgctcagtcgcccaggctggagtgcagtggcacgatctcggctcactgcaacctccgcctcccgggttcacgccattctgctgcctcagcctcccgagtagctaggactacagacgcccgccacgacgcctggctaattttttttttttttttttttttttttttgtatttttagtagagacggggtttcatcgtgttagccaggatggtctcgatctcctgacctcgtgatccgcccgcctcggcctcccaaagtgctgggattacaggagtgagccaccgcgcccggccgcaaaaatcttttagagtgtgtacttggctgaacttgctccacgcaaaatggtcttatttaaggataaaaatgaaaggggacttttgtaaggctgctgtggcgacaggcctggaagttgacctgcagggaggtaggagagaccaaggcccctgggacggaggccggccactggatgtttgaaaggctgagaagccaagggcttcaatctggggaggccgtttggataaaggagccaaggactttctctaaaaataccggctcacagggaggtggggccatgccaatggcctgcccaggtgacaagccctttgtcccactgtcccctggcaccagtctggtaatctcaaaggaatgccagaaatctggccaggaggaagggacactaaagtaaggagtggccctctataatttgaaataactctttctggcatctgctggcttttgttaggaaaagcctcagacatttttatgggatcacagttccctgtgggaggaagaggttgcctcaaggccaggcatggtggcttatggctgtaatcccagcactttgggaggccaaggcaggaggatcacttgagccaggagtttgagaccagcctggccaacataacaagactctgtctcgccgggcgaggtggctcatgcctgtaaccccagcactttgggaggccgaggtgggcggatcacaaggtcaggagttcgagaccattccggctaacacggtgaaaccccatctctactaaaaatacaaaaaaaattagccgggcgtaggtggtgcatgcctgtagtcccagctactcgggaggctgaggcaggagaatggcataaaacccaggaagcggaggttgcagtgagccgagatcgcgccactgcactacagactgggagacagagcgagactccgtctcaaaaaaaaaaaaagactgtctcaaaaattaaaaatgaaaaaaaaaattaacagagcattgtgtcttacacttgtccgactacttgggaggctcagccaggagcatcacttgagcctgggaggtcaaggcacccactgcactccagcctgagtgacagagtgagaccgtatttgctgaatgaatgaatcagtgagctcctggctcagcaattattaacttatgactttgggctgagcctcggtttcctcaactataaaatggggattataataccccgagcatccaggattgagagaatgtatgcaaaatgcatagcatgcaagaagtaaccgtttggttgcgtgcagtgcattgcatggcgttgcctctgccagtggttggttttcggagatgaataatgcatgcacttgtagcatttca

SEQ ID NO: 56436 - DNA, 2500 bp, Homo sapiens
ataataatggtttgtagagcaccttaagtggtatggtgtgacaaacatctttcaggcctgacaacagatctctgtactaatctgattatccttattcagatgtatctaaatctgaggcccttggggcacatgattgcctcctggggctgccatagtagaccctggcaatgacctagtgaccgttcctctactggagatgatcccctgggcccctcagaatgcatttcctgtgtccacatagccggtgttttaagtcaggtgatctttttttttttttttttttttttgagacgaggcctctctcgttgcccaggctggaatgcagtggtgcaatctcggctcactgaaacttcttcctcatgggttcaagtgactggcctgcctcagtctcccaagtagctgggattacaggtgtgcaccacaacgcccggctaattttggtatttttagtagagatggggttttgccatgttggccaggctagtctcgatatctgcccacctcagcttcccaaagtgctggaattacaggcatgagccaccgtcgccagtcttaagtcaggcaatctaagctccctttccaagtttgttgaaaacctgatttgaggttttgtgctttaagcttgcattacatttgtaacacaataaatgcaatttttggcacaataaatgcaaaattgtggcgcagtgactcatacgtgtaatcctagcactttgggaggccgaggcaggtggatcacctgaggtcaggagttcaagacaagcctggccaacagggcgaaaccctgtctctactaaaaatacaaaaattagctgggcatcgtggcaggtgtctataatcccagctatttaacaggctgaggcaggagaatcacttgaacctggagggcagaggttgcagtgagccaagattgcgccactttactccagcctgggcaaaagagccaaactctgtctccaaaaaacaaacaaacaaaatagaaaataaatacaatttttaaaaagaccccagtcatcatgcaggttacactgtggggataacacttctgggctaggagttgggcaacctgggttcaggcaccgcaccccctctgccggctgcacagggcccctctcccctcagtcagccctgggccctgcaggctggacttttgcctggtagctttgggctggccctcccttctgcaggggaccccttgtacagatgggtaagcagaggcacaggggcacaggcaggacagcggctctgctcacgcaggatgccatggccagtcgtgggcctactccatccttgatcctcccctcccaagggcacttgccatccaggcctgaatggcaagaggcccctaaggggcccccagtcctgtcggcaccccctttgagtgactgacagggaggcaggggagctggcagcccccatccccacaccagcttgtggaagctaccagcgatcggtggggccccactggcagcccgtccgtgtagccttggccgggcccccaagcttcttagaatgccatctaagaaggcagagggggatgagcggcggcggggaggaggggcaggccttgggaagatccactgggtcacagggaagcgaaggcggaccctcctcccccagcgctactgcccgggccgaattccaaggccagcggctgcccgctgagaaggaatccggaccaacgggattctggcttccctctggcccctcctggcgagagcggcgccgggaggagggggcctcagaaggggcgggcaggggcggggcccgcggggtaggcggagctcccaggaaaacagcgggcggggcctcgcgcgaggggcggggttggcggcgaggcgtcccaggacccccattcctccctccgccccggggcttctggggagcggcgcagcttgactgccaccgactgcgggcctccctgccctacaagcccccacccccgcccccccttgggacctggcgaggagttgccccgcaaagttggggctggtgcggggttaaggggattacaattttcctaggacttagtgtgctgaagctgcttttgcgattagaatttatatttacaatgctgataacaataaactacccaggctaccgcgccacgtggacgggggtggtggatggaaagggaaacccttggccaccagcagcctgtgataaggccaaggttccctggctggattgctgcctaggatgcctgtggtccctacccccgcccgggaggcaggattgactaatccgaccaagcaaggcctccaggctgggccaagaaccccttcccagtcctctcccaaagtctatgtccttgggctcacgctgtcctctcctgtccttgcctcctgcatctacagacccctgaggccccctcctccttcagagcatgcacgtcgcaaattctcaatgactgtttggaggaatgaataaatgaattgtgaacaaatggtctgaagattccagaggtagcctaatggggccctgctgcttgagttctaat

SEQ ID NO: 56437 - DNA, 925 bp, Homo sapiens
accaacatggtgaaactccgtctctactaaaatacaaaattagccaggcttggtggctcatcgcctgtgatcccagctactcgggaggctgaggcaggagaatcacttgaacccgggaggcggaggtttccatgagccaagatcatgccactgtactccagcctgggcaacaagagcgaaactccatctcaaaagaaagaaagaaagaatgaatgaatgaataaataaataaaataaaaattaaaaaaaggtagaaacccttgcttccagaaactccccactccttttgcagaaaactcgtgaatagcctgtcctttatttagcatataatgaaggaatagacataaatatagctggccagcaatccacgagggctgccgctactgctctacggagcagccattttcctgcactgttgctctaataaacttgtgtttgctttgctctgtcttgtttgctcacccttgaattcttttctctgcaaagccaagagctctcccagtctgagccccaatcatcaaagatgattttgagggcttcagtatttaaaggggaaaagcaggctggaggggaaggagggaggggatggtcacattattaaatccgtatgttggaagagaaaaggagcagggaggggaatagtgacatattcatctagtgcttctacatcggcattttacacaagataaggtgaatgcagagtgtagatatttaaccttttatccgtggctctctgcttaggaacaaaaggagaagcagcttcttgcctgactcagctttcagcttaatttttttcttttggcagagtgaattgggattccaagattttatttgcctttcccatcatgcgattggataccacaaagcagtgaagaacagtgagtgcccatgtacttgacaatgaaggggaatcttccagacatac

SEQ ID NO: 56438 - DNA, 3625 bp, Homo sapiens
gcgcctgtagtcccagccatttgggaggctgaggcaggagaatggcgtgaacccgggaggcagagcttgcagtgagccaagattgtaccactgcactccagcctgggcgacagagaaagactccgtctcaaaaaaaaaaaaaataaaataaaataaaataaaataaaaacacataaaacatcatcagtgtcttgttaaagtagtgctgttctagttgtaaacgagttagtgtgaggttgtgggccatgtctgaggcctcagctctcagcccaggaaataaggctgttgtgagtgagtaaggtgggggtgaaggatgtgggaggggggctctacttccaaagttgctgaggcagtgttgaaggccgcaggacacttcctcaccactgtggcccaactcttctttctccctcaaaacccagctcgaaggacacttcctcccagaagtcttctctgctgtgcctataaccctcccctgaccccaggaagacacacacacacacacacacacacacacaacttctctgtgtactccatcccctacgttgtactcatcaaagccccaaccatagtgtgtgtgtgtggtgtgtatggtgtgtatggtgtgtatggtgtgtgtgtgtgtgtgtgtgtgtgtgtgtgtgtctgtctgtctgtctcctcggtcagactgggacaacctgagggcaaggagagggaattccctgatgcccaaggtgtgccccgtgtagatcatggtacagagtggaggctcagcaaacagagcataaatgaatgagtgagtgaatgaatgcatggaatcttggggtgagtttccctgaagacagccccagggtgctgtggctgtaggagctggaccgtctagtgccttggtctgggggtggctgaagctggaggagggaaagaggccagtcctttgcagcttctggaggccagagtccaaggtcagcttctctcaacaggacccctctgaacccggctgacaccacggcctttggaagccatgtggtcagtaacacgctgtcacccttactgcagtctgttcacctgacctaatgactgggaacctcaggtctgtgactcaatgcccagaatgctgtctggtatgggggtatgggtcacacctggctcatctccaggacagccctgttctgcgtgtctgccagccaaggggtcacgtgctaacctggctgccccactgggggtgggaggggcagcttcaggatggggccgcatcaggccccatctccctaccaggcccgtcagtgggcaccctgagcctctctctctcattccttcttttgagcctgcagcactactccccgaccaaagcacactttcccttctcgtctggaggagagatggggcctcgtgccagctctgcccctgcctgacacacacgcttggcccgtcactgagcctcagtttccctctctgtatttcttggctgtgcaaaggcagtcgggggaggctggccctttaagctggatgaggctggtattttgtgtttttttttgagacgaagtctcactctgtcacccaggctggagtgcaatggcgcgatcttggctcactgcaacctccgcctcctgggttcaagtgattctcctgcctcagcctcccaagtagctgggattacaggtgcccaccaccacactcagcaaattttttgtatttttagtagagacggggttttgccatgttgggcaggctggtcttgaactcctgacctcaggtgatccgcccgccttgggaggctgggtttttgagctttgtgctgttggggcccagccctcagggccgcgtgggaacccccggggcggggtgttctataccaggaagtaggcagagggccagcccgaggacagttcgtttcttgccagtcccctgacctctcttggcacacagcctgtggcagcagcaggttgaagccagacgctgctcagacctcacaccacgtcgtttgcccaacccagagaaagctctgtccccggcttctggctccttctctgccaggactcactgggtgtgatgagttggtcttggggcactgtctgggcacagcctgtttgcccaacatggcctcctgggctccatgcttccgcaggtgggaggggtctggactggcccaggggctctgacagcggctggcaacctgaggttttgacttcagggtgacctgaatcctgccgcattatggaggctggagtctctgggggctgctttcccagagaagaagctccttccccatcagcctgacattggctccaaggactccatgtggctggagggctcagggctaaggggagggaagccccgggatggcagtgaggggtgagggaagatttgggaggtgacatctacaaagagacctgagcgggtggggcaaagagggggtcccaggcagagggagaagcaagtgcaaagaccttcataacccaggggagcgctgagaccaccgaccagcagcacccccacttcttcaagccaccactcctcagggcctcccaggggtccccagcctggagcaccccatgtggtagagctggtaggctgggggacactggggactgctgtcccacttggagcctcgggctactccgcccaggagcagcgatgtggaaccttgttggattttcatgttcccaaacatccaggagacacacagttgtgagtttccagccaggcgatctctaaggccagagcagcccttgtgggtgtcagtgaggaagggcagaaagactctggcctcaagctcagctccctgctgcagggagttgaacgcccctttggtgagtggctctagctaaacaaacacgtgttatcatctgtcaatagcggccacctccttgctggctgggctgctgctggctcaaagcccagagcagcccttccggggcactgcctgccacagccaacagtcagggaagggcagctactgccctgggttcaagcccgggctacccctgctcctgctcactgtgtgtccccaagcaagtcactgtccctgcctctctgtacagtgggaggcctggatctctctgctctgggaagacacccagccctggaatggttgggccacacttggggctgggggccaggaggaagttggagggctgggctggggctggggctgattagttgaagccagtagaaaagtacaggctttgctattagattccaggaaataacaaaagctgctaacagttaccgaatgcttaccacgcacccgacgtggtgctcacgcatcttttgctgttttatttcatccttagtgagttgggtactattatcatctccattttacagagcagaaactaaggctcagataggagacgctgcaaaatcaggaggtggtgaagacagaatgtgcccctagggtgctgatcagggccctcacctagaggcagatgcccccatctcctaaggtcaatggtcctcagctatcatcccttttttttgttttttgaggtggagtctcgctttgtcgcccaggctggagtacacgatctgggctcactgtaagctccgcctgccgggttcacaccattctcttgcctcagcctcctgaggagctgggactacaggcggccgccaccacgcctggcaaattttttgtatttttagt

SEQ ID NO: 56439 - DNA, 2511 bp, Homo sapiens
tatcttaatccagcaagttgcatcgagttgtcattgttcctccttccaaggcggaggtgacaacggtgcacatcatccgcgaatacgtggaaggacagacacacaccaggggacgcagggagagcggataaagcacaaaggggacgcagcggccgcggggtcgccgggccacggccaggggcgccgtcggggaggagggtgggctgcaggacgagctcgggagggctccgaaatgcgctcgggccaaaacaaaaacaaaaagttcagcgcggcagtgggagcagattgggcgagacggttcacggctgcccattggagaaaagggaaaacagagtcccccaatcgcgagcggcggggctgctcccctcgtgcggccgcgggcccggccccgacgctgcccggcggccgctaccgctcccttccggccgcggccaccactgcaggccccgcgccggccccgcaccggcccggccgcagccccgccccccgcgcccggccgcttgcgcccggccccggccccacccgccctggccccggagccctgcgaccggcctgggcccgcggtcccccacgtccctgcccgccccgtcaccgaggccgccccccgcacaccctcgccggcgcccgcccctcccccgactcaccgcctgcgccgccccgctcctcctcggggcgcgtcccaggccccgctgcccggccgctgcgatgcggggccgcgccgccgggccccgcgtcccagtcccccccagaaaattaatcaccaaaaataattccagagaaaaatggagagtaaaatccaagatggcggcgcgggccgcagcaccgctcgctccctccgctgacgggaaaaatgagtccccgcagcgtccgagccccccgcccccaaccggccgccgccgccgccgtcgcgccccccgcgcccccggcctcggctcgctgcgcccccggcgcccgcccccgcgccccgccacccggggcctcacctcgcctcgcgcacggccgcccgtacgaaaaccgtccgccggcttcaggactccgcgtcccaggtccgtgcgccgcgcggtgccgcctccggttcccgggcgtcctcacctcatcgccccgctgccctgccgcccgcaccgccgccgcgtcgccgcccccggtgagccgcctggaccccgcccgggcacggtggaaggatacgaaaagaaggccgcggcctcgacggcggagggacaccgtgcggcgcagctgccacagtgtgcgcgcgcctcccgccaggcccagccgccgcggcgcttccacggggctctgtgcgggacgcgggcacgcgcggggagcgagttctgtgccgggcgctcccgacggcggagggacaaagggcgattcagagcgagccgtcgcctcccctcgtggcggagggattcgcggccggccggtaggcggctgggatccctccgccctcgctgccctttaaatcgcggctgaggcggcgtcgcccgcgccccgcgggcgccacgttagggtcccctgcggcccttacgcgaccgcattccggtcccggtccccgcgggaccgcggcagctgtcccgggccctgggtctttgcacacctgcccctaccagggacggctctagagccagcctctcggactgcagccctggggaaggggacccccccccctcccgccgcgcgtcccagttgctccgagggaggtggccccgggcagacgagcgtttttgttgtgggaatgggggtcactggcagcagatgcaccctaagaccgtgtgggcaggctgagcgttcctgcgcggagcatgcgagggaggaggagagcgggcgcgccttggcctggccccccgcgggccccgccgcccccagcacccactatgtgccccgcgccgtgctccgctccactccgggtgtgccctgcgcgctggccgtgcgatccctcctcggggatcccgggctggcggggagatcctgagggaccgggccgcctgcgagccggggagctgcgaagcttgcctgggcatcgatcttgtagtccagacaacagaacgatgagcgcgctcccggcccctgcggggctgcccagggtctccgcgcatcctccctctcacgcgtcaggacgacccccggaggtgggggccatgtgggtgccactttacacctagggaaactgaggcacagggagttccgtgacctctatgacaactagtcagggcttgagccagagccctctttcagcattcgggtgaaaaatgcagaataaatcaggaagcgggtgcggaggacctccaagaagttgaggttggcataggcgtgcacatgcctggaacttggtgccggcaggtgcccaaggaagcgcagacctggagtgtgaattggagcgtgttggggaaagggggtgcctaggatatgggcgggtagtgggaccagccagtgtcaaagccctgggaggggagagaggctgcccttgccacagagaggaggcgggcagggcaggcagctcagtcagatgccagg

SEQ ID NO: 56440 - DNA, 1399 bp, Homo sapiens
atcaccttgaggtcaggagttccagaccggtccggccaacatggtgaaaccccgtctctagtaaaatacaaaaacttagctgggcgtagtggcaggcgcctataatgccagctactcaggaggctgagaatcgcttaaacccgggaggcagaggctgcagtgagccaagatgcactccagcctgggcaacaagaatgaaactctgtctcaaaaaaacaaaaaacaagaaggctaggagggagccttgcccgccagggggagcccttggacttcctctaccaagagatgcggccctgctcctagagaaactggctggctcgaggccatgccctgtcgagctcgaggccatgccctgccggggctctcaaggctttggaggagcctctgctccctacggccgtggtgtgctcagccacgcccaacatttgcagacagatccggtgtgaatgctcagctctcacggctttggaggagcctctgctccctgtggccatcgtgtgctcctgagccacgcccaacatttgcagacagatccagtgtgaatgctgtgctgccatttgcttggtggatgacctcggccaagcaacctggcctttctgtgccttggtttcctcactgtgaagggacgagagctccttttggggccaagccccgaattggactctcacttctgtttggccttctggcaccttctgtgtggactctcacccatcagttagggactttgtacctcctgtgtgtcagtgctgtgctaggccccggatgagccactgcccctgccgcaggaacagaaagcctgaggggggctctgagctctctgagctccccagggtggaggaggcaccttctctgagcccacccctcaccttcattgtgttcctcacaaggcaggtctcacccaccgcaccgggggctcctgggccacgtcatctctgaatccccattgggctggcaaacagtaggtgctcactaggcacctgataaagtgagttgaatgggactttgtgtaggccaggatggcacctggcttatcttgcagtctcgtgtcctccaaggcagggagaagaaagcccggagcccctggatttggacaggtctgcgacgggggcgccttgagctctgtttggctgggactcaccacagggggctgcattgggcctgtagtgctgggcagaggagcttggggctttcggcagggacgggtgtggttagatttgtgttttgacgggtcccttgccgcagggtggagaacggatgagccaggctgtctgggagcagagtgggcaggcagttggtggtgggcccaaggccgggcagcagctggggtcaggacaggggaagcggccggagtactgaaacctttaggatggccagttggactcagggggaagcacaggtt

SEQ ID NO: 56441 - DNA, 8121 bp, Homo sapiens
aacgcgtactcaggagattacagaaacagctcgtcacctcttatcatgggaaggttatcagtaggtggtgatatcaaggaccaccatgggcctgctcccaacacagatgcccacgtgtgcacacacagccacacatacatgcacttagtcacacacgcttgtgtgcgcacagctgcacatatgtccatctgcacatgcacacatgccaccacacatgtgcactcacacaggcacacacatacacatgcaaaatcacacacacaaaggtgagggcacacacacggagcaggtccacaaggctatatcaggacactccacgggtttctcaggaaacttctgctggataccatcaccacttactccctcccagccggtggggctggtggtcactcccacagaaacaggaattggccactgtgtagtcgagaacaggccttcattgtcctatgacttcatccctctgctatggtcctgcctccactttccaacagaatattctaaatgtcaagatcccatgcgggaacctgtggtcatctatgtaagttgactcatgatggacaaaccattaacaacatttaaaataacagtttcccctgcaaaggcttcaagccaaaattaggatgtgggtctcgggaccccaccagttattctcattattatgtggtacagggagactgggtagatcagggtctcagaccataatagatgggaaaaaagagaccccaggggcaggaggggaatgagcgagagagaattaagtttgtattaagttggagaccagggcagatggaaagacggaaggttaggctggcactgggagctcccttcttcaggggtcagctccccataggatctgcaaggaaggtgcaacaggatactcccttgagccatgtgacactccatgacaaaggcacccccaactatgcccctgggtgtcaacctccctatccttttctggttcatgacctcgagatgcctcccaaggcatcttgtctgaattcttgtgttccgaaccttggcttgttatatgtggcgcactttatgcaagttacacaaaactggactccaggcgtggtgctgcatgcctgtaatcccagacactcaggaggctgaggtgggaggattacaagcccagaagtttgagttcagcctgggcaacatagtgagaccccatctcttaaaaaaaaaaaaaaagggaaagaaataacttaattctttttttctggcatagagaggttccaaagaccaatcctgaagcttggtaaaggactacagctgttacccccacattctatcaggctattaagactcactcagccgcaacatggccaggcccccacaccaagttaggcaagctacagataccaaggagtaggaactgcaaacacaaatacagggcaaactgcaggtacctaatcctgacacgtcacctggctgaactttggtagcagaagcccaaggaacacagacttatggctttgtgtatatagacattgtcctgtagtccaaaggatgtgactctgtggcagacgggaacctagaacattggacatttattatattacattaactaccttgcttgcttccaggtttctggaagttttggtaacacagctaaatactagggcctagtttttgctaagaacgtgggtagctctgacattcctttgtccattaggcagatccactgtataaatggaaacatctgtattttaaagattttcctagctgattttatcgaaatgttagagattttcctggggcgagggatagctgcaagttattacagtcagatttctaagcacgatgattatttctggtggcaaaccatgcgtgtggaggccgattcctcctatcagcctaacgattaagtcaacatgctaagcagccacacgggggctactaagtgactcgcacgggggaagcaggcagggagacagatgggcaggggagggaatctggggcaatgcacaacctccacccaggtagagagagggtctgggggataggtctgtgtcactcaagtaagagcgacacttcttggggtccagtcccgtcctgggcttgcccgggaaagaccccaggacaaattcggcccccttccagagtgtccccattctgctcccacaatgggacaagccggcctcttctccagtctgggcccccttcggccctcctccctcctcctgtctcttgggcccccagccatgctcggcccccagttgacttcttcagtacctgcattgctcagcgtcttgcactctgtgcgtgccccatccgccgctcctcctgtcccgttcctcctgcctctctcagccccactcactctcccactgcccctcgtgcccccatccaaccctcctcctgccccccaacctctgtctctcagtcccaagccagtcagggagccctgacagcagctacccggacggcagtgcgagccccttacccgggcgcagcaggcccccggcggcctggtggccctcggacagtaggaaggagcctgaggcccggcgcggggacgtggccggcagcgcaacccaggcagctccgggcagcgcgccctgcccgggccccgcccaaacgccggaaatgacgtcacggagggcggggcgggcctgctggccggggcgaagagcggctgcggcggggcctgtggcgaacggaggcgagccggaagtgggggggttgtctgctctcaggccccgcctccccggggccggctcgggccacttcttgcgcgctgccagaaggagctattttgagcaggtctgtggcggaagtgggtgttcccgggtctctgctgcccagctgtgcccgctgccgtcttggggtcccggggtgcgcgggttgggctgggtgagctcagaggcaccttgtcggcagccgagcctgaagaggcgacctcgaaacgcctcgtgagacctttcgcgggcacacgcccttcgcgttcctccgcttcctcccacgtttcttcagcccctggcggggcgctggggtgcccggtagttaagggtggggtggcagcgagcgtttctgtgcacccgcagcgtgccacgcccgtgctaagcactttgcctatagagccagtggcttaattctgcaatagcacagtgaagaacttcgcctcattttacagacgtggaaacaggctcatcaagtgctctgtaattgtaaaacctgggataacaaaggagcaaaacgcaatttagaggcaagtgtgtgggacttgactttggttagaaataggctttgcaggccaggcgcggtggctcttgcctgtaatcctagcactttgggaggccgagacgggcggattatctgagctcaggagttcgagaccagcctgggcaacatggtgaaaccctgtgtctactaaaatacaaaaaattagccgggcgtggtggcgtgcgcctgtagtcccagctactcgggaggctgaggcaggagaattgcttgaacctgggaggtggaggttgaagtgagcagagatcgtgccactgcactccagcctgggcgacagagcgagactctgtctccaaaaaaaaaaaagaaagaaagaaataggctttgcaagttagtagttctgtgactgaatcccagtctgtataagaccctcaggcatcccccggtccaaaccaaaacctgtctgcgaaggatgatttcacaggagcaaaccaagactttatttccagttttataacctgccttggggtcttcggctaggaagctaagagacacagaaagctgagattgggcaaagacaggatctaccatccactccgagctctgggagcacctgaaatgcgatttgatgtcaccaccaccatccccagttcaaccacagttcatgtgtggaatttaacctgcaaagttgggtttgctgagacccaacgccggttggatcatgtgaagatcagatcctttcactatgtatttgctttaatttttccaactagttcggatctaacatgaagtacagtattgaggctcactccagaagtgaaaatatacaatcggcaggcagattttagttctttgcctgcccttttcaaaaatcaatgactgggctgggcgcggtggctcacgcctgtaatcccaacattttgggaggccaaggcgggcggatcacctgaggtcaggagtttgagaccagcctgaccgatatggtgaaacccgtctctactaaaaatataaaaattagccaggcgtggtggcgtgtgcctgtattcccagctactcgggagtctgagacaggaaaattgcttgaacttgggagggggaggcttcagtgagccgagatctcaccactgcactccagcctgggcgacagagcgagactccttctaaaaaaaaaaaaaaaaaaaaaaaaaaaaatcaatgactgtgactctgttttcatttcctctttggcaacatagggacaatttttactgctggggctgaaattacaaacataagacacagcctctcctctagagcagctgggcagctagacctccatctgcttgctttttttttttttttttagacacggagtcttgctctgtcgcccaggctggagtgcagtggcgccatctcggctcactgtaagccccgcctcacgggttcacgccgttcttctgcctcagcctcccgagtagctgggactacaggcgcccgccaccacgcccagctaattttttgtatttttagtagagacggggtttcaccatgttagccaggatggtcttgatctcctgacctagtgatccgcccgccttggactcccaaagtgttgggattacaggcgtgagccaccgcgcccagcccatctgctttcttaaatttctattggaacagagtcatgcctcttcattaggtattatctgatgataaaagggcacagtcgactagttgtagagactatatggctcacaagtcctaaaatatttactctctggccctttacagaatctatttgctgatctccagtctagagtgttactgatgggtttctgacacagaaatatctggctgagatggtccaacataccgggaaactcattctctcctatgagaaagtcatattctctgatagcatctttggtcacctgaaacctagtgtccattgaaggcacagctctgggaactgcaaaactgttctgtggagtgttatggagagtaaagccaggcagaccagctgcttctgagggctgtggataaaatagagaatgatacacttacatcctctaccttttgtttccaggcacagatcatttcaggtgccttctgtgcagaaatagctgaataaacttggagcttggtctctttgttgttgaatttacaatgttatttgaatgtaagaccttgtagatatgacatttgaaagttagggctctggaatggcactgcctggcttcagatccttcatttttttgctaaatgacaacaaacaagaggcttaggctctgtgcctccgtttcatcatagtcaattctggtatttgcagtagttatgttgaataaagtcacccagtacacggacttagcaaatactgctccttggaaaccacagctcctagggaagatacagggttaggttcctgtgaacctctgatcacaacatttttatcaacagatcaatatacataactttgtttttgtgtgtgtgtttctattaaagatgctttatttaggccagacacagtggctcatgcctataatcccagcacttcgggaggccgaggcagatggatcacctgaggtcaggagttcaagaccagcctggccaacatggtggaaccctatctccactaaaatcacaaaaattagccaagtgtggtggcccatgcctatagtcccagctactggggaggctgaggcaggagaatcacttgaacccgggaggtggaggctacggtgagccaagatcacgccattgtactccagcctgggcaacagagcgagacttcatctcaaacaaaacaaaacagaaacaaacaaaaagaagccttatttaatgtctattattgactcattaattaacattgaaaatgagatgggaataatatagggtggtcacaggagaattaaattccaggcagcagttttacataactagagactatcgtcttctaagaccctgaaaagccaaggtatgaaccaagctggctaagaccaactggacccaacatggtgctgggcttgacccaggcttcccctaggacctcattatgtgctcattaacatactaaacacacaaccaccagtaccatgacaatttcaggaacactcagatttggcgcataaatgggtgacaccaccgctccaagaaatctctaccttttcccaggaattttcatgaatattccacctcttggttgaagaaacccataaaggtagaaaccccgaaccattgctcgactttctcttgagtaggcctgcattcctctttcttgagtatgtaattttcacctggtaataagtctttgtactttcactattttctgactcatccttgaattccttttcgtaatgacgtcaagagcccggggtcaaggtcccacctgcgtttgggcacctccccagcccactggtatcaaacccacagacaatggcatgtaactcatgcctgaatgaagtacatctaacatgtattttctccctaagacacaccttttgcactgaggaacactagataacacttcaaccctacgtgtgggggccatttaaaaatgcaaaaccgccacccaaaaaaaagcaaaaaatgacaaaaatgtggcgctaaacagaccaagaaaaggacagttgttggcagtaggtgagcagaaatgagggcagagagagagtgcttgctgggtctcagccagggactccaacacgcggcgactcggattttccccactccaggcacatggcatgtacaggctcatggcctcagaaacgctgcaagtattgatttgtggggggagggggggaggttacacataaattttttacctactaagtgaatttgcaaatgtggaatctatgaatcatgagaatcaactgtatgctaaaacagaggagtaataggacctgcctcatcagatggctatgggaattcaatgatatatgagtgcatgtaaattgcttataatggggcattacacagagaggactgagtattagccactttttttgtgtgtttttttgtttgtttttgttttgcttttgagatggagtcttgtcctgttgcccaggctggtgtgcagtggcgcgatcttggctcactgcaacctccaccccctgagttcaagcgattctcttgcctcagcctccctagtagctgggattacaggcgtgtgctaccacacccagctaatttttgtatttttagtagagacggggtttcgccatgttggccaagctggtctcaaactcctgacctcaggtgatctgcctgccttggcctcccaaagtgctgggattacaggcgtgagccaccacccctgggcccgttgttactattattgattacaaaagagcaggactctggtatttggaagaggattctctagagtttggaacaacttgaagtccctgagtcccaaaccattccgaacccctccacggtgccaccttcgtcacaccaggcagaagcccttcccttgtcaccggaaactccctctggaaggagctgttctctgtcattaaagggagttccctttcaggaggaagccaatactccccttcatgctccaccctttattgtcattatttgaaaatagaaggtttatttttatgttctgaacacaaaactaagaatattacaattatgagaattttgagaataaaagtgaataattgatggggataggagtaaaattaaatatgcattattggtctgagcctcctgacatgtctcttataatgttcagaagtattaatttggttttcgggtattcaccatggatggccaggggaaaattcttaaggctactacggacttactctgagtttttttatttcaatttttttaaagcatattaatttcaataaattgttacttaatttagttcacatgtatttgatatggtttaaataatttttattgaggattagtatacgtccagaaaagtgcacataaacgtttacagct

SEQ ID NO: 56442 - DNA, 2838 bp, Homo sapiens
tcacaggctggggggactctcagaagcaatcatgcagggaagtgctcagcagaggcagaaacccggaggacgggctgggcagagcctcacaggggccctgactctcagctgggtggagaggcagggcaaagtattcagggtacagggagtggcactgcgaggcacagcggcacgagggtgacagcaggcccagggagggctcagcaggaggaaagctgggctgtgttaaaccaggaacaggaggaggtgcgaatgcagtcaccggaagcaggtccgatgaagaggcctcgaagtccaccccacagagtcaggacttaactttgcacacaatctgccaacttgggtggcagaagttattcccacgcagcagtgccaggcttggacgaggactcacccaggtggtaatgagggccctccttcgagctcaggccaggaagcagcagccctgaccaccgctgctaacccagcctggggccctctgtgtccagtaatacttcatatttgctacccggtcatcttacttaattcccagcacagccaagctaggcagctatcattattcctgctggcacaggttagaaaactgaggtctctgctgggtgcggtggctcatgccagtaatcccagcactttgggaggctgaggcaggaagatccggtgaactcaggagtttgagaccagcctgggcaatacggcgaaatcccgtctctacaaaaaaatacaaaaattagccggctgtggtgacacatacctggggtcccagctacgcaggaggctgagctgggaggatcacttgaacctgggaggcagcagtgagccaagatcgtgccacggcactccagtctgggccacagagcaagaccctgtctcaaaaaaaaaggaaaaaaggaaaaacaggtttccaagggttcaacaacccgcccagggccatgcagtgagcgggaagaagggtggaaccgtgtccagtgatctcggagcccacgttctttcccttcatcttaacagcatccagtgtgtgcagctgccactcccctggccacgtccatcttccacgtcctcccacgcagccccctccgccctcctccccgagtttcttcttcttggcctgggacggatactgagcgccggagagagcccggccgggcgggacgctgctgccccctcgtggccgcacgtgttaccgcaggcggcccatggtgtctgggtcactctggccctcccgggctcagcctcttccaagaacggccagagggttgtgtggggagcagtaataacgaggttctcagctccacgccctgctcgccgaggaacctcggtcaagtcacttgccctcgcctcagttttcccctctgtctaatggacatacattaagaccttgaagggctattaggagaacttaataggcgagtaggggctcaggggtgcgcctggggaacctagaaatggggcttgagagagctcacgctgcagcttccggctcagcgagggcagcgagagggcctgtgatctgtccctttccttgtatggtgaaaacaaagtccgggtgcaaagtccgctgcagagtttgttgactttggggcgagggctctggcatcaaaggcactgcgtgccctgtccactgctcccgaggccgccgcccactgtgatctttgctccagtggccatgggattgtttgagaattaccaacatgtagggaaaacctgcgatcctggcctgcagagggaggggaggaccccttttgccaggctcccccaaacattgagctctcagcttcaccagctgcaccccatggggtcttctttgccagctttggcgagggtctgttcctcactgcgccaatgccccggcatgtgatctttgggctcagtgccaggcccagctatcctgctggcacagtaggaagccagaaaagcccctacccactcctgctagagcctaggggctgctgttccctctaggactccaccagggagcaggaggggccttcacggggctggtgcagacctaagacctcccacgcttgccctcagccagagccctgagacccacaccctcctctgccacctccagaaaaagcctccggtcctgggcacctttgatgacttcctttcccatccgtgctgctggagatgtctacactaggaactcactgggatggagctgtgtcctgcaggaagggcggggtgagagccggccagtgtctgagctccaggaatggcaaagaggaagctgcacaatatttcccaggtcagagccctccttagggacatccgccgtcccgatcttgcccctacagcctctctacctgaaagtccctatccccctccacactccaccaaccagctgcccctggtcccagacttggacgtcccaagtccatgcacacccctgcctcccctcggagctcccaccacaacttgtggatgggcacagtgggcagggcctggaggccccaccctgctgtgaagctggagggaaggggcacgtggaagggcagtgctggatgcaagggacagcttggggactggaggggcttgggtggaggctgctgggagaggagtagcagctcagggggaggctggaggtggctcaaggggacaaaggaggggcccagcgtgctgaaggctgcagaatctagaagacagatgcagcggggaatggccttagcaggaggtgagggcgggaggcagccagtgtagacagtggggtggagtcctcagtgtagatggcagggtggagtgctcagtgtagacagcagggtggagtgctcagtgtagacgggggtgtagagtgctcagggaccctgaggaagagctgaaggggaagggccagtcttt

SEQ ID NO: 56443 - DNA, 1007 bp, Homo sapiens
cagttttattcctgaaaatgccccctcagttctaggtaaaccaggatggtcggttgccctagttagcccaccatccaccttgagaatctaacagcggagtgggtgaggcgggaaggagagagaggcttggggacttgtccctctcttgttcatctcaggcctggcaagaaaggacatgtgtcccctggagatgggttgggggcatgacacacatgtctggtgtttgctctgatcaaaggcaaggctgtggctgcagctgtctggcgggccgtggcgctgaacaggtggcctcgctggcacaagctgcccttcccagatgatcaggaaaaggtgtgttcccggggaccagatgcttctgagcaatgtccaaggtgcccacaagagcctgtgagggatgactcagcactgggaatccataaacccacaaggccccagagccaggtcatggggtgctgggcctcctgggatggcctttcctactccctctgttcctccttgaggagcggaggcagctgaggtgggaggaacacgtgcagaaagagagaaggagctggcctggcctttctccatggtggcaaagatgcagctttaaataaacttaagttatttatgtatttatttatttatttattgagacaggatcttgctctgttgcccaagctggactgcagtgatgtgatcacagctcactgcagcctcaacctcctgggttcaagtgatcctcttgcctcagcctcccgattagctggttaaatgattgtgaccaaaatgctgacagtgatatggacaagccaaggccagggtgatgagtctcagatggaaatgaggaacttattgggaactggagcaaaggtcactttcgttatgccttagcaaataatttggctgtattattttcatgccctagggatctgttgaagtttgaacataagagggatgacccaggacatctgggggaagacatttcttcccttcctccttccttccttcctttcgagatcaaatct

SEQ ID NO: 56444 - DNA, 4291 bp, Homo sapiens
gtgtccggggccgccccgtggggccccaggctgcccgccctgaaactgcctcgctgtgtgcccttgggcaaccccgccctgctccgtgcctcagtttccccactcatagaggctccacaggtgacacacctggctccgggccccgatcggccgccgggccccgcggggcggaaaccccgcgccaagcctcccggaggcacctccagggcagggcggggagcgcggggaggggccgcggggacctgcgccgctggggccgcctggccgccggccggctccggggggcgcccgcgggagggcgcggccggtgcggggggcgcgggtggcggcggcggggggcggagacgcggcgcggcttccgctcccgcgcgcccagctccctcctccccgtcgtcctggtccgcggcgcccgaggggggaggcggaggcgccgggagccgcgcgaggagccgccgccgccgcgccatggagcccgagtgagcgcggcgcgggcccgtccggccgccggacaacatggaggcagcgccgcccgggccgccgtggccgctgctgctgctgctgctgctgctgctggcgctgtgcggctgcccggcccccgccgcgggtaggtgggcgcaggccggccgggggccgcgggttgctcggacaatggcccgggcggccccgcggccaagtgcgcgggcgccgccgccgtctcggaagcgacttggcgagttgggagcgagttggggcgcgcgcccgggatccccctgccgtccccggcgtccccgccacgcgcgggccctttgtctccccacccgggccctccccggggacgctgcgtcccgggctggcgaggagggcgcccgctccgccaggtgcggcgcgggcgggtcctcacctgcccgagcccgcgggaagccgggagccgagccgagcccgcgctgggcccgtgtggcccgggccgggcaccgagcggggacttggggcgcggaggcgggcctggcccggggagccggttcgcaagcctgtttccagcggccgcgcggccgccccgcgtgctccgaggacgggctgaagttgcagcgagaaagttctgagcccgggcgcggggcggcctggccggtggcgctgctcctgtgagccgcgtggctgtgggtttccaagcggactgacacctgccaggtgcccgggcgacccgaatgccccgtgtggccgccgggtccccagatagtgtccatccccgggtcggctacgcggaggtgacgtggtcccagatcgcggggcagtgggggaggcaggcttgtgcctcagttgtacactcccgtggggagaggtagggcgggggaactttctctccaacttttggtgtttcccagggggtggagttgaggtcaggaggactcaggaaacttaagcagtcgtgaaacgctacacatgttcttttaatttggagattgccatgtggtttttcaagcaagcctcttgctacctaaatcattctcttcggatgtgcgtgttttgtttttctggagtatggctggccaagtggcacggccgcaagtgcctgtgcacgccgcggctcctgttctgtttgtggcagtttagcggggaggacctcgggcccctttgtctgggcctccttaaggcaaacagctgtctccctgaatatttccagtgtgaatggtgcagcggggtggccctgtagtcagatcccccaggctgcagcctctgcttggaggtgtgggggacagcggggaacaggaggagcttggagtttgtttcacgtcctcctgcctctgacccaagcctagagattctatggacagtttcaccccaaatctgcctctttcaggagcgtgtttacattgtggggccttgtctggagctagcaaaacaaggtgaagacaaaacagcgacagtatctggggagtacaggccagcgccgctcctttttccggaaatgcctgggtcaaggaggcaaaaggggttttggggaaactgtttgttttaaagggggggtttctaggccgaccgcgttgcctttcacctcattgcagttttgggttttgtgcacgttttggggtgatgttgctggagtcaaatgcctgtcgtccatgtggttcgagcccctgaggagaaagaattatagctgtagagttcagttgtgtgtgaggcaaaaatagagttgattattttaacattaggcagcaaggcctgggagccccagtgaatgtggtgatccaggcctaaaatggaaggaaagggaggaatctttctgcagaacggttttgatgttatatccctggttttactgtgtgaaatacatgcctcggacctcagcgaagccagtaagtgggccgctaattatttttcctgattgcttcctgttgcaattggaagctgtgaacgcacggaaatggctttgttctagtggtcccagtgctgagaacttccccagctcccaagccctagtcctctctcctcggggcccaagtgcttgttccagggccggcctgtccaggcaccccctctccccctggaggttcctcctgtagatgcccaaggccaaggccgggccctctgggagagcccagaagggctgagtggggttaaccaagtgctgtgtggagcaccctgagagagtcccctccaaagcagggccccgtgtgtttagctcccctcttcagttccaagaaattcgccggtgaacccgatccagcatttgttcagcactttcctggggagattcacctcgtgcttcctgtcgtttttggaacccgtttaatttcagccgtgctgtgtcactgctcaggcatttagtagaactcacacacacgggtgggggatgtaggcaggtgaggcctctgagttgctttctcccttgcagcgacgggttgcagggctgatgggggtggaggggtttggggtcagacccacctgggtttacatgctcagtggctgtttgacttcgggcaccatacctagtttctgttatctcaccccgttcctctcccaggctatggggagccctaactgccctgtgtgagacctttagccccatccctggcagagctgcagtgagcgcagttgtgtgtcagcgtcctcgatctttctggccccagccggtctagaggctgttattacaatagtctggatttttcctgtatgaccttggacatccagtccactgacaaactcactcactcaccgctgcagccctcgggggcaggagtagttagttagcactgtggacagagcccctgcgcccagggtctgattccagcctggccgcttcctgtgctgggaggcttaggaagctgatgctacctttgtgtgcctcagttttctcacctgtaaaatgggaatagaatccttcctaccatgaattcagtgagttaacgtgcacctggcccggtataatgctgttgctgttttgctttggtgtctgctaccgagtgaagtgctagggttgagtgcgatagaatggcagataaggccccgcccctgcgggcagagcttcccatgtagaggggaggacagggaaagaagctttgcagctatgcagaggtgggcccacgggtgctccttcaccctcggggtgtcctgcgagaggcccttagaggccagatcatgctgtggagtctggttgtgatccacaaggcagcggaagcttctggaaggctttaggcaggagttacaggaaatgcaagctaaagccagatctttcctaggtgaaaggtgtcgagttgttttttttttaaattgaggtgaaacttatataatataaaatattaaagtatagaaggcaggcatttggtacattcacagtgtttacaaccctctcttctatcaagttataagagatttccatcaccccaaaataaaacccatacccattacacggtgacttcccgttccctctccccggatcccctggtgaacaccagtcgactttctgcctctgtggttctgcctgttctgggcattttgcatgaagggaatcttacaatgcgtcttcgtggctgacttccttggttactgtaacgttttcaggagtcatccaagtagtaccacgtatgggtgtttcagccttttattttttttttgaaatggagtcttgctctgttgcccaggttggagtgcggtggtgcgatcttggctcactgcaacttctgcctcctgggtttaagtgattctcctgcctcaggctcccaagtagcttgcattacaggtgcccgccaccacgcccagctaatttttgtatttttagtagagacgggatttcaccatgttggccaggctggtcttg

SEQ ID NO: 56445 - DNA, 1520 bp, Homo sapiens
gtgctccactgcctgtgagtgtctttgtgtaccggaatgctgctgtctccatctctgaagcatcagaacatattttaagatcagttatgtaaattcccacctcattgtccttttcaaaagacgtattggctctgcttgcacgtttatgcttttgtggtgaacttcagagccgtcctatcaggttccaccctttgatctcttgatctggggacggtaaatggtgatatccagcaggtgtcagagggctggattttaaatggcctccgatgagctggcggtctcaggctgtggaagtgaattcatctgctgggtgcagtggagccggccttgacatttgtgggttttgctgacatttgtggaaggctctggaggtgccctttgtgccgacttgcccgagccactcctgctgcccaactcactccggtgtctgctcaggaaagaaattctaatgcacactaattttagcattagcccgatggcaaatataattactgagttaattatcactcccctccctagttaatcccagagcaaaatgtgggcacctttcatttcttccttgggatgtacccctgtattagttcagatggggaggcggtacctgcctggcaaagctctcaggaaattgctcaacggggcattaatagctatctgagcgtgtggcctgggctggaacacaccagcctgggtgctgggtgtcttccaggctctggccaccttgggttctgccccaggaaggagcagactgtctcctctaggggacctgaagcttaacgtcctcactgtacgagatagttttggagcaagatatgttctggggcttgcttctgcgggtaaaggccatttctccaaactttcccccagagcgaacttgcttcccaaaaggagtctggatccgggcgtggccgtgctgccctggccgcctcctcacttcagctggagcctccgagctgacgtccatgcctattcctcctgagcactgtagacacaggccccagctctgtcccctgccctctcctccactcagactccctgggctctgaggctttacctacaggccctgcggtgcatattcagtgaaagcctagattcagagccaatgacatcagcttttacttggtctccttgctttctggaacctcccctttgcccatttatcttatgctctggccagattaatttttctccaagtagttttcatcacatccttccctttctcagacagtcgtgcccattctccagcatctgaagttggaactttttggcctggcaggccgtgccgccctgagcagacctgcccatcttctgcccctggtgtgggcacttctcttgccagatctgtctggaaccttccatggtccacccaacctgggagggccttgaggacaggggctgtcttcgtctgcgcccctctgcctctagtgtgatgtctggtagatgatcagtaactgttctgaggccaaggcctcatctgtccagggagcagatcttacccatcttttacctcctctggctcgaat

SEQ ID NO: 56446 - DNA, 807 bp, Homo sapiens
ccacccgtcttccctcgccctggccgtgacggtcagtgcctttgccccgctctgacgaccaggccctgtgcgcagttggcgctccgtggttgctgagagatgtgctctccagtctgtgggccagatggggcctctgaagtggagggggcccaccctctctcctgcagcctgctgtggctccccatcgcctctgggatgagagcagaccctgcgaagccttgagctcctggccctccagctgtgagcccaggtgggaccacccagttacaagagcgttaggcctggctgtgtaggagacgtgtgtctccacaccagagtccttgcggcatatgggaagccttcatggtcctcatggtggggaggggtccccggggaggcatggagtctcgctcctaggttgctgtgtggcttcagcgctctgtacctccatgcccctgtcctgcagatgtcaacacccagttgaggagaacgtggactttgcccagtgttgtgcagggatggtggggccaggctggagcccacgtgtcctgccttcgccctggccaaggtgggggttatctgccctggccaagctgtgccgcccgtccctgcccgccccagcaggtgggggcctgcggtgggatcccacccatgagcagtagaggcttgttgacttactggcctcccaggctccccctccaaagccaagtcctccaggacggttcttgcccctgagaaggggcagtgtgggtgctgggctgcagcgagcccctcttcgttccatttcctcacagtctcggggacggagggcttgtcctggagcacagg

SEQ ID NO: 56447 - DNA, 627 bp, Homo sapiens
tggtagcgggtgctgcactcccctgaatgtgccggggcctgggggcagggacctgggctcctccctcactgagtggagggaactcagtgtcttggagttggggtgcctgcaggctgggtggtgcaggtgaaatgcagacctctcagctggtgttccagagcagctgccttcccccgcccgagggacttcacccgcagcccagtcaggggtggcgcctgggtgcatcgcccgcaggctgggtaggggtggagcctgggtggccctgcctgtgagctgcatagttgtcgcctttgaccctgagttttcttcgttatctgtttggacctgtttggggcaggcaggggatgagatctgaagataaatgccttagctgtgaccatctccttttgtgagaggtcaatgtccagttccgctgcagttataacatcccattttttgatttctttttattttttcctttttctttttgagatggagtctcgctctgtcacccaggctggagtgcaatggggtgacctcagctcactgcaacctccacttctcgggttcaagtgattctcctgcctcagcctcctgactagcaggggttacaggcgtgagccaccacgccccagctaatttttgtat

SEQ ID NO: 56448 - DNA, 901 bp, Homo sapiens
taaaatgcaaaatggcccttccctaaaataacacacaaccacaaccgcagctggctctgcacgaaggccatgctgcagctcttttcttcggaagtcgattttcctccgtggaatttggctgggcttgtggtagcgtttgagactctgcaagagcacgtccacgccaaccagtctctggtcaccgactggctcgcaaattccccatttaaggaaaccagcaggcctctgttatgaaactcggggaaggaatgtgaattatgctccatgcggaggctcctgctcctgcacgttttccagccttttccatgggccacggtggagcatttggggaaggcctgtgtggattcccccccaagtccagactgatgcccctgataccttctcaggaggtggcggagggtctgggctctgtccaggctcctaggggtggggacgtgcaggtaaagcaaggcgtctgccgcaggcacgcgggagccttccctgggctggctgccagcaccttggagtcccaggctgccaggaaaagttcacccacacccgggctttgctggcgaagggtgagtcatatgatggccgggctcgggccctcagcagacaccaagtgtgttcccagagcagccgctcagcgcctgtaacctggaacaggccagcctttcggggcctcagttttctcatctgcctaatgggaatagcaattcccaccttccctttgttggttgggttctcactagatgcacaggagacagcagcttgagagggactgtttggagagctgttccatgtgacacccctcttaccctgtccccacggggccggaggagcaggggcttggtgatagcagctgggcgcagtcagcctctgcagggaagagggcatgtttggttcgaggctcctatgccct

SEQ ID NO: 56449 - DNA, 893 bp, Homo sapiens
gggagaggaagggacccgcctgcaggtcccttcctgaggccggcactgacttggtcactctctggctgccctgaccccaggcagagcagcgactttcctgttttagagctgagcagacagagcccctgactgcaggccaaggtgcctgccagctgctcctggagggccatagcctctctgtgcttgctggaaggtcccaggcaccgtgcaggtgacagtggccggcctcaggttccagcagagccagcatcgggcccagccacttcccttgtgctttgtgaccctatggtcacttggcacaggatcccgggtcaaatgctgcggttgcggcatttgccccaccacttacccctgggggcagcggagaaacttaatcaattgctaaacaacaaaaataatctggccgcctgccagctgggaagccactgtggccaggctgtttatggccttgggatctgcgcagtggacagtggcctgcaccgtgaccccgttcatcctgcgtgccccaggcccaggaggtggctcaagccctctgcctcctgtaagggcacctgagaaggaggccctggagctgggagcagagctgggggtgggcgtccgggcagcagaggccgattctcagctttccctggatctcagctttccccggatctcagctttccccggatctcagctttctgctacccgtgtgaaaagaagccaggagaacacagctatcctgggttggtgccggctgtggtgggaggcctgcggtgggagcctccgggggccactggacctttcctgggtggcctgtggcctgggagctgcacttggttcggtgcagggaggttgtgacatccactctgtctgcagggatggccggggccctgcggctgggtgatgaggtggga

SEQ ID NO: 56450 - DNA, 989 bp, Homo sapiens
agagccctgggggcctggctgagtatttcccttgcccggcccaccccaggcctagacttgtgcctgctgcaggcccttgacccctgaccccattgcacctgtctccacaggagccgaggaggtgctgctgctggcccggcggacggacctacggaggatctcgctggacacgccggacttcaccgacatcgtgctgcaggtggacgacatccggcacgccattgccatcgactacgacccgctagagggctatgtctactggacagatgacgaggtgcgggccatccgcagggcgtacctggacgggtctggggcgcagacgctggtcaacaccgagatcaacgaccccgatggcatcgcggtcgactgggtggcccgaaacctctactggaccgacacgggcacggaccgcatcgaggtgacgcgcctcaacggcacctcccgcaagatcctggtgtcggaggacctggacgagccccgagccatcgcactgcaccccgtgatggggtaagacgggcgggggctggggcctggagccagggccaggccaagcacaggcgagagggagattgacctggacctgtcattctgggacactgtcttgcatcagaacccggaggagggcttgttaaaacaccggcagctgggccccacccccagagcggtgattcaggagctccagggcggggctgaagacttgggtttctaacaagcaccccagtggtccggtgctgctgctgggtccatgcgtagaaagccctggagacctggagggagccctttgttcccctggcttcagtttcctcatctgtagaatggaacggtccatctgggtgatttccaggatgacagtagtgacagtaagggcagcctctgtgacactgaccacagtacaggccaggcctctttttttctttttttttttttgagatggagtctcactctgtcgcccaggctggagtgcagtggtgtgatctcagctcactaca

SEQ ID NO: 56451 - DNA, 896 bp, Homo sapiens
gcatgagccaccacgcccggtcaggccaggcctcttttgaacactttgcacaccatgggtcttttcatccaggggggtaggtacagttgtacagttgaggacactgaagcccagagaggctcagggacttgcccagggtcacacagcaggatgtggcaggtgtggggctgggcctggcagcgtggctccagctttccagcatagaaatctgtgaaagcagatagtttgtcggtcggtaggggagactttctgagacccgccccagcggctcagagggtagtagccaggggccttcctgggggctcataacccagaacactgaatgggaaaaccctgatggaggaggcgcagtggagctgtgggtgccgatgggaagtcccagaggagctgggaggtcagtagcggtgctgccctctgtggagcacttagtgggcaccaggtgtgtttccaggttcatggccctgggacctgaagctcagaaggtgaagtaacttgcccagggcacccgtcgggcagcggcgggcagaggatttgtgggctgtggagcctgtgctcgtggcccagccctgggggttgtgagtgtgctggccggggagcttttcctgcaagtggactggtgtctaggagccagcatgtcaggcagcaggcagcgggagtgcagcaggcagcgggagcacagcaggcagagggcggggctcgagcagccatccgtggaccctggggcacggaggcatgtgggagagggctgctccatggcagtggctgaagggctgggttgtgccccgaggagggtggatgagggtaagaagtggggtccccaggggctttagcaagaggaggcccaggaactggttgccagctacagtgaagggaacacggccctgaggtcaggagct

SEQ ID NO: 56452 - DNA, 854 bp, Homo sapiens
tgggtggttaggacggtggctagggcttgggtcccactcagcccctgtgaggttccctctcctgggccactcggctggcagcctctggacctcctggttgggccacaccttcagatgccaccggggaaccccctcactggcctcttttctgtggtcctctcccagggtgccacagcttgatctctctccttccaaatgtcctcttctctctttccccataggcttgacggcagccctagttgttagtaactcagcggctacactttctcccaacactcaggctcccaaccatcctttataggaagggaaatacctgcttcccaagcggtattgaatcttaatgcagtgaagaagaaagagaagcagaagagctcagtttccacgttgaaatgggccgacccctcatatcctacatgagcccctagctggcctctcccgtccagcctcaacacctcttgacctgacctggcctgggctcctgaacaccagccaagcccttcctggcatgtcctcttctggggcagcccctctccagcccgtggatcagcgccagcctgggatggactgtgccctggtgacataacaaagggaaagacaatacggcatttttcccttcaagttgaacttcttgttttttttttttttttcagacagagttccgctcttccacccaggctggagtacagtggcagaatctcggctcactgcaacctccgcccccaggttcaagtgattgtcctgcctcagcctcccgagtagctgggattacaggcgcccgccaccacgcccagctaatatttgtatttttagtagagatggggtttctccatgttggcctcaaactccagacctca

SEQ ID NO: 56453 - DNA, 2484 bp, Homo sapiens
ggccaacatggtgaaacacccgtctcttctaaaaatacaaaaattagccgggcatggtggcgtgcacttgtaatcccagctacacgggaggctgagacagaactgcttgaacctgggaggcggaggttgcaatgagctgaggtcgcaccactgcactccagcctgggggacaacagggaaactccgtctcaaacaaaaccaaaccccaaaagttctcgtctaagtccttctcccaggacaagggcacttatctcttggcggtgcgtcacaggtagggatattccgcgatccctcaccttgaccccgctacgaggacagccacctctttcaggtaaagagatcgcaatgggaaatcattctgataaaaattcccctgtggagaatgcaggcatcgatcccgttacctctcacatactaaacgaacgctcctccacttaagctgattccctagcccggcctaacctttgcagccggcgcatattgtggctcacgtcaccaccggtgtcccccgccgcccccgccccgcccggccagctcgccaccctattggatccctcacggctccggctccacggccatgatgggcttggctcaatttagttttaaaaagcattggccactcggattggtggtccgaagcgtccgtcaagcggaggacctgctgttgctacggcgtagggggtcccagccaggtttctccccgtttctgatttgtttctcaggctccggggtcctagaggttccggatccgtcaagtccatgggaaaagaatgcgcccctcgcgcttgactgacgaggcttgcgggccaatcggaatgtagtcaaaggagccgctaggcgatccaataggtagtagggggcgggagagaggggccaatgagcctggagctgggggcgggggcagggccgcgattggctgagaggcggccagagggcgggcgggggggaactcaaggcctgcttgatacgtccgccattttgggcgcttcgctgatggtgtcggtgagcgcgtttcccgcctgagcgcaactagcggcgggtcgtgggcacctccaggtaatgggggtaggggaggcgccggagcaggccgcggcgcggggtgtgcgaggcgcgcgggcaggcgcggggcccctccacctggcctcagcggctcagggagggaacgtcccggcccctctcccctccccccccggaattcgtcgctccgcgggcccgggaggcgcggcgccgagtccttcccggccgctccccgtccgctcctgttagccgggggccccgccaggacgggcgccgggagcgggacgcggtcggggcggcgactttgtgcctcgttgacgttcgcggcctggcgcggcgggcgggcgaggcgcgcccctgacccggctctggctccagccttcccgcccgccggccgcggcccgcagtctcgccccccgcccggcccgcgcccggtctccgctcccgctgggcctcccgggggcctcggggagcgcgtcaagttgaggcagcaactcgccgtcaagagtcgcgaagaccattgttggactctgctcttcgggaaacaagttttgtgggtttctgttaattcgccgcagagtcatcgggatccacaccagccagttccgaggctcccagtacccttcccagtggctttttaactcctgtgaggtggcttgtatgtaaactgtctcgaatgcctccctggtgtatttgagccgggggtggggggggtgggtggtccttcttgtggcttgaagtccctccctcttaaagaagcccattcactgtttacttggaggtgtttcctgttgaggtcctgctggctgtgatcacaatttagactttttaattataggtgaacgggatgggtctttggatgtacctccgtgccctgacgtttcaaccgcgtgacttaatgtcattttcctggtacttcacgttttctctgtggggctttgggtctgttttgcttttatgggagggggtgcttgacaggcgttccctttcatcctcgcagcacttgttgacggggtggtgtcctttattcgtgggacgtttactttgattttgtcctcaaggtcatgttgcagataggcttcaagggggacagggactccaggtttccaaccaccgaactgtgcctcaagtagcaagtgtatgagacccagttatggtggtggttgggttttcctcactgtggagtggagtcagtgaccactttttagctctgtgaccttgggcaagttacccagcttctctttttttttctctgtagtatgggaataataataagtgtcccagccataagtttgtcaggataattgccctaatacatgtaaaacagctagagctgtgcctggcacatacagtcacctcagtggctgattagtggttaggctagttaatggctattattgtttaatttaaatttgatttttaaatgtttaggtactattgggaagtcagatgagcatttgagtcccg

SEQ ID NO: 56454 - DNA, 786 bp, Homo sapiens
tggagtagagatcataaatttgaggtttgcagtttgctttctaaaacatcttttaagtttattcttttctggcacacaggacgttgtagggtaactttgctgtggagtctcacattttatatagaatcattttttcaacatagtgtggataatcacatacgccttgaaggatcaatatatgttaacagatgattggatctttttgattttgcacttaatttctttacaaattctgcattataaccagacagctctattgagggtttgcagattttttctgtaaaggaccagttagtaaatattttaggcattggaggctaaatggtctctgcaaggactcatctctgcttttgtagtgtgaaagcagccatagccaatctgtaaacaaatgaaggtggctgtcttccaataggactttacttataaaagcagacagagagttggatttggcctgtgggttgtagtttgtcaatgcctgctctaatctgttttgtctttgtttatctttttgagatagagtcccaggctagagtgcagtggtgtaatctggagtgcagtggtgtaatcccaggctagagtgcagtggtttttgtttatttttttgagatagagtcccaggctggagtgcagtatagctcactgcagccttgactgacctccctggctgaaacgattctctcacctcagcctcccgagtagctgggactgtaggcacatgctactacacccaggtaattttttttttttttttcttgtagagacaagatcttccgatgttgcccaggc

SEQ ID NO: 56455 - DNA, 454 bp, Homo sapiens
ttttcttttcacttcttgatggtgttattactgaaggatgaaaacttttaatttgaagtgcaatttatcttatttttcttttatctcgtgtttttggtgtcatatctaagaaagttttgcctaatccgtggccacaaagattaactcctgtgtttttttctgagttttgattgcctcatttttaatgactatttcactggatagataaaagaaccttggttcagatgagatcattgttgtttattgttggatatttaggaaccatgtatttgtggatgacctggatagtttgttctgtggttttccccacagtgtcatcttcctctatatttagacatttctttttctattataagctctttggacattattatatatgactttgtgctcagtataaacaccttagaataaaagaataattggaccaaggggtatatagattttaacacctttt

SEQ ID NO: 56456 - DNA, 1301 bp, Homo sapiens
ggagcagagaggaagtggtaggtcgaggcagatttggagtcaggggtggtgtggggttttgttttttcctaaatggaagtgatgacctgtgagaacgttgcagcacagaggaaacacagccagtgtgagggagcaggccgccgagtgatgcattgtgctggagtgggcgggggtgggggcatgtggtccagagcatacatgcaggagatgacctcaggagcaagggccactcccctggagcgaggaggaagtgcccagctgtaggtggggatgtgatagggctgggttcccttctgattgccttctctgtgttctcaggcaaaggaagcgaggtcagagcctatggaggaggaggggtcttgccgagggtggagtggaggcatctttgggtgcttgagaagctgctgttttttttttttttttttttttaagacagagtcttgctctgtcatccaggctggagtgcagtggcgcagtcacagctggctgcaacctctgcctcccaggttcaagtgattcctgtgcctcagcctcctgaatagctgagactacaggtgtgtgccaccacacctggctaatttttgtgtttttagtagagatggggttttgccacattggccaggctggtcatgaactcctgacctctggtgatccatccatcttggcctcccaaagtgctgggactattggtgtgcgccaccgcgctcggccttgagaagcttcttgaatgttaaggagggagggaaggagagtagccccagcctgtctggaaccagaactctgagctttttgtgtaatggctaacattatgcatgcttcttgagttaggtcataccacccagtcacctagaaaaagtgaacaaattttaaagttgctcatctggactttctctgtcagagtttggagaaaacactcatgcatttgattcacagccaggagtccgcttgccttttactgatcttctgtttgtcagcagtttccacattaagacagttgagtgagtgcatctccccaacccactctagcagcattctgccattttatagtgaaaataaagaggaatgaaaacagctgtcatttattaaacacttatttactttatgccaggccctcttcccagccttttttactcccctcctccataagataaggactattgtcttaatcttactaacttggaaactgaggcccagagaggttaagtaacttgtccaaggttatacagcatgtaagtggtagaggccggttttgaacttagctagtgtgactctagtagctgcacctgtaaccgctgcatcag

SEQ ID NO: 56457 - DNA, 578 bp, Homo sapiens
cccgattttcagtgtacacataaagagagagaatacacttaaaaccttgccagttatgttctgagacaagagcccttcggccttttgcttgttacacttccctgtcaggactgtatgaatgatagcaagaggattcagtggctgtgagttaagatcaaacttggcatttctttatcctttgccaattaggagtgtaaataaaggttttctgttatgtgatagtattagtaggggtgtatgcaactgtaaggacaaaaattgagactcaactggcttaaccaataaaggcatttgttagctcatggaacaggaagtcggatggtggggcatcttcagtgctgcatgagtcagcaccccagcggggtcatctgtgccacaggtccctgttgacagtgctgtactgtccaccacactagctgggatttattcctttgggctccaggtttggtgtttctggcactgaattacggaatacttgggacacatgtgacttttttcgtcctttctcctctactgtccttttaaaaacttgtgggatccaattgtgagtgaattatttatgtgtcatatcatttctt

SEQ ID NO: 56458 - DNA, 814 bp, Homo sapiens
gccaggtgaggggcggccaggtgaggagcgaccaggggaggcggtcaggtgagcggcgaccaggggaggggcggccggggagggggtcacgggaggggcgaccaggggaggggcggccaggggagggggccaggtgaggggcggccaggtgaggagcgaccaggggagggagtcaggggaggggcgaccaggtaaggggcggccaggagaggggccggccggggtgggggtcaggtgaggggcgcccaggggagggggccaggtgaggggcggccgaggagggggtcaggtgaggagcagccaggggagggggggccaggtgaggtgcgaccaggtgaggggcggcctcgcccacggcccgccgccctccgcccacccgcaggggcccgacccggcccggcagcccccatccccgcctgcagagccgaggcccagcccggggaccgccccgtcattcctcctcggagggacgcacctggggccgccggggctgccgcagcgtggagcgagcgggatggggcgtgggccgggcctcaggcgcaggcggccgttggcggttggagaagggggaagggtgagggacaggaacctggggggaggggaagaggcgcccgggcagtgggcggggcctgggcgtggggcggagtcgaggtcggggcggggaggtaaaggcggggccagggaggtgtggtgggcgtggtctggggcgggaggagacagagtcgcgaggggcggggcctggactgccgctgttgccagagcgggtcaggggaggcactcccaggttcagccgatccaggctcaggtggggaaa

SEQ ID NO: 56459 - DNA, 832 bp, Homo sapiens
gtgtgcgtgttctcaccacaggatgattttcctgttttcgcccactgatgccctctgaaggtgagatcaaaatcagtggctatcacagtttcaaagatcccctgttacagaaatcagcctgactcagtcctccaccagccaaaacacagaaccatccgctggcaggccctagaaaggcacccgacttcagacatctgtccatattacaaatatttgttgactgcctccaacgtgccagccgaggagaagagctgcacaccagcagaaaaggtccctctgccctcccacagcttagaccgggctaacaagcaacgcaggagcagtgctctggtgcaggaaggggagaagccgaggggacctctcaggagacagggaagccaggagaaggagcaaccatgggaagagcaggcaagagctggaggcaggaagggcaggaggatggggtcaagggcaggaagctggggtcaagggcaggaggctgggggtcaagggcaggtgtctggggtcaagggcaggtggctggggtcaagggcagggtggctgggggtcaaggacaggctgttgggggggggtcagtggcgggacagctaaggtcaagagcaggccagcggggtcaagggcagggtgtcgggtcaaaagcaggtgtctggggtcaaaggcagggtagctggggtcaagggtagggtgtctggggtcaagcacaggtggctggggtcgacagggtgtctgggttcaaggacagggggcctagtttggagaggaaggcagaggcagccggtgggaggtggcagggttttgtgctagcaatggagaagcatccaagggcccagag

SEQ ID NO: 56460 - DNA, 1650 bp, Homo sapiens
agatacccaaatagggtagctggcctcagcccagggcctgctggagatccaaccttcacctgacatttggatggggtaaaagttgaaatttacacaaggtaacaaatatttgaagctagcaagcagaaaaaagtccttacttgtgttaagcaatcaatttgtttaaaaaacatatcctgtacatgtcgtcaaagaaactggtaatagtggtggcatctggagaggggaaccaagtgagaaggactctactctgtatctgcacctttttaaaaaaaaaaaaaaaaaaacagagacagggtctggctgtcaccgaggctggagcgcagtggtgcaatcatagctcactgcagtctccacctcctgggctgaagccatcctcccacctcagcctcctgagtagctgggaccacagatgcactccaccaggccctactaattgtttgtagagacaggggtctggctctgttgcccaggttggtctcgaattcctggcctcaaagcaatcctcccaccttggcctcccaaagcattgagattacaggcgtgagccacggggccgggcccatctgtgcctctttaactttgcatcgtatgcttatatcgcttatttgtaaaaacaaaacaaaacaaaagtcttcacaagaaaagctcaagactggcagaagacaagtgaggcctctttaaagtgtgttggagagattctcgagagattctctccaacacactttaaacaaacaatctcgaacagccattttaattcttaaagcaccaattcttccggaattcaagttcaggcttccaccagcaacagaattctggcctgccaataataaccatgcagagtgactaaacattttttccaacaaaggaaaaaatgcaaacgatcaaagtgcagaagcagcccttggcccgcgcaggctccggtttccgcctcccgccgccgctgccaccgcccctgcgcctttagatttcgggcagcaagtttaattgctcgcttggaaagcgtcctcggaagggcaccgccagcaactgcggcttcgcgccccgccccttcccccaagccccgggcggcgtcacgtgacggctgagaaaagtaggggaaaggtcagcagcagccccgcccccaggctggcgcgtcccaggcgctcggatcctgttccacccgccgtgcccacagagaccttccggagcgagttggcgcgcgtccctgtggccaccccagcgacagcgggagaaatgcaacgcacctctccgtgggaaggtcgagccctgcggtgcccagctgtggggacagctcggtgctcagtgcttctgatgacagatgctgcatccaacgagccagaaacgcaggcaccgcgctcaagagcccagggcgcgtctaaaaggggctcactgtgaagcctcagtgaaaactgacggtgtttttatgaatgagcactcggggccagggttgggtaagggcaggccctcgttccagggctccccggaggcccaacttgaccgctcggtgaccactggtccggggccggggccaaacgcagcagccgcagcagtatcggaagggacccagtttaattctcttcccctccagggtaggcggcttgtttttagtaccaactcgaaacgttattttggcctgtgcatgatgcc

SEQ ID NO: 56461 - DNA, 2062 bp, Homo sapiens
cactttgaaacaaagtgtgtgcactcccaaacctggccctttttattgtttgattccaactgttaagatagggttcaagtgcaaggtctaggctagcaatgcttcacaggaaggaaaccagtaatttacatgcgaaaagcagtccacaggctcttggtattgaggcaaaaccaatccaaagaaccagctgcgaatgctgatagtccccagaccaactgacagctggatgttcgctggcctcagcggtgtgcattctcagcgacacttatgtcctcaatttattgctacgttcactcggtcagagtcgccttaaagaatttggaaaggcccgggggtgggggtgcttcctggcataaatagaagaccagtgctcagccattttttattcacttggtttgtggcttagaatgaaataaacatgcttgcatatctggaatgaccagaaaccggacacctgtggaagaaaatggtgtaacaaaatacaacgttgcaaaaggtaaaaccgattttcattttattcggtaacttacaaagttaccagcttcctactaaaatctgcccttaaatattttataacacacggagccgagaggaaccgaaagcctgtgccgagttgggaatattaactttgttatgtatttaacctggtaggtagttgggatttttaactctctgagttgttttctttttttaaagtaagatcggccctcatctttgagttctgcggctttaacgaaagccaagggcggatttacattataaagacgctgacccatggcctctcctgacaaaccgaaagaagccggctgttggctggccgcggcggtggctccgagaaggggctgccccgcgtggccctgaccgcaccgtcgggctcgcaggccaagttcgccagggcacggccacgtgacacccccaccctcccgcggccccgccgctcccagcccggcacgaccttgggcacatgctccgcgcccacccgcccttgacccagcgctgcacgggagaggctgcggggcgctcccaagcaggcactgggcccggcaccctcatcctgctcacggcagcgctcggaccgcgcctggagtccctgcgccaagggcgtgtcccgacggctgcaccgcgagggcgggcatggggagggggaccggggagacggacgctgggatggggtcagcggcgccctgccgaatcccgagggccgagcacccctccctcagccgcactgcacctgcccgtaggtgaccaacccacgggcggacccccagacccaatcctctccagagccagggtgggatgggcagggacaggagccggaggccctactggccccgggcgaaggcatcctggaaagcatccagagcgtccagcatccctcccgcggccacccgcaggctgaccgacccctgggcagaccctcagactcaatccagtccagggcggattaaggagtgggagacaagggagccggtggccccgctggccccgggccggaggcgtccagccaagtccggagggccgagcatccctcccgcggccgcacgggacccgcctgcggatggaccgacccccggtggaccctcagacccaatcccctggggaacatggggagccccggcctctttctgggttcaggatctccacaaccccgccgtccggggggaataccggggttcctctcggcgccccggttccggcggcgtcccccacccggtccggttcccggcagccccgcgccccgcccgtccccggcccccgcagcccgcagggccgccccgccaccctccccaccgcgggcgaccgggcctcaccgagtcagctacggaggtgcggcagcggcagcggcagcggcggcggcggcggcggcggtggagtgaacgagcggcgagcgggagccggggaaggagggccgcgggcgaggccgagcgcacccgacgccggcagcagcggattggctgaggcgggtccggctgcggcgcctgcaggcgggtgactcccggcgcgcggagggcgggcccggggcctcggcggggcggggcgtccgcggggctaggaggggagg

SEQ ID NO: 56462 - DNA, 1189 bp, Homo sapiens
tgttttcacttggcttacgtcgtagacaggtctctgctgggggacggagatgaccaccggccttcccaaggctgcataagatttcctttgactatgctgtgatccatttacgcggcccccattggacaattagggcctcctccccgccccccaccccaccattgcaggtataaataaaagctgcgttggccgtcgatgtacctcctggagctcctgattatcctgtaggatagatccctggaggggaagcaaccaggcacgtgcgacattttggtgacacaggccaagctaccatgccgaaaagtttaccaacttccactgccacccgcgcgtgcaagcggggccctgtctccgattatggattattttaatctttgccaatcctaaaaggaggggtgggggagggaagaatctctcatctctccttttaatttgcatttctttgaggttagaagttgggggtttgtccccctgcttgcgcttgtctggaccaccagtgagcccaggcactcgacccccgcagatttcaccgccccaagaggccagtgggctgggccagggcacacgttcctgacgcgcggctgcaccccacgagcccgggcggctctcgcgcgtgaggctctccttgcacgtgggccttcgcggtttgcactacggaagctggactgtcattctcaccgcaaatgcccttccctcctttccctggaacctcagccaccgacaggtccccgctccaaggtcatttcctccctcgctcagcgccccggtgcgcgcccagctgggattggccccgcgccctgtctgttcccagggctcttcggccttgaccgtgcgcccttccctgcgcgccgcctaggtgccacctgcaggccgggcggggcagggacagggacccagtctgtggggacgccgaggcgccacgctcacctgtgccatggtggccgggctctcggcagctgcaacgagcccgcgccggcctgcaactgcagccgcactggggaggccttattcccctcccgccgaccacgctgcagctctcctgcccgggtctgcggctcccgcggctgcgtagctgagtctattaataaagaagcagagaacgaggcctcccggggagctccgggcctgagcctcagttccctggggccaaaaacgtctccatgtctgcctctgaaactagagtaatctt

SEQ ID NO: 56463 - DNA, 745 bp, Homo sapiens
ataaatattcttaactaaaaaatatgaccatactatcattgtcccacctaaaatagatgaacaattgttacagaaaatggtaaaccctgttgcctgccaagagcacagctgagtccccactcgatctcgccagcctcatttcttgctggcagctcccagcagattctgatccagaagtgtgtacgacttttttggaactcagctctggtatccccataggaaacagtgttgaaatctcagtgtggtgtgcttccctctcctctccgaagcctgtagtccctctgaccttgcaccttgggcctctaggtgttgagtaaatatggtcagttccactttgctgagcctgcatcaccagggtttcatgaggacagaacagggtgatgcagacgaaagcacctgcacgcagcaagaggacgtgcacggaaaggactcagagcaacaagtgcactgttttcttaatggaacacgtctgctctgaacacgggatcagaacacattcttttgttgttgtttgtttgagatagagtctctcttcgtcacccagtctggagtgcaatggcgtgatctcggctcactgcaacgtctgcctcccaggttcaagcgattctcctgcctctgcctcccgagtagctgggattacaggcacgtgccaccacggctgatttttgtatttttactagagacagggtttcaccaggttggccaggctgatctcaaactcctgacctcaagtgatctgcccgcc

SEQ ID NO: 56464 - DNA, 1654 bp, Homo sapiens
caatgaaccaatacaccggaggtgggtgaggaggggatattttattttctgagaagaggatatattgggatcattactatggttcaaataccagatcaaaattaaaaagtatctagaggccacgtgcggtggctcacgtctgtaatcccagcactttgggacaccaaggtggacagatcacttgagcagcagttggataccagcctgggcaacatggcaaaaccccatctccacaaaaaattacaaaagttagctgggcgtagtggtgctcgcctgtagtcctgtagtcctaactactcaggaggatgaggtgtgaggatagcttgaactcaggcagcagaggttgcagtaaggcgaggtggcgctattatactccagcctgggtggcagagcaagtctgtctcaaaaagaaaaaagaaagaaaaaagtatctagagaaaagtcttactcccatccctggcctgtatgacacatggtctctcgtgtatccatcagaatttacttatgaaaatataagcaaaaacgagtgcctgtatgtgtttgcttcttttcttatggtaaagggagcacgctatcacccgtgctctgtgcttgcattttagaatctacttctgtgtctgggtgctcatttccattaaggttcattaactttatttatatatgctgcctaaagggacaaagtgctccatcataaggatttatcttaccacaatcatttgttccctgtgacacaagagtcttcccagtcttttgctcctataaacattgttgcaatgaataactgtacaaaggtcatgttttcacctgtaggcctcatcccttgggtggattcccagaattgtgattgctgagtcaaggccatgtgtacagacagtgttgacgtccttcaccgagttgccctctgtattagtgaagacctcaagagaaacaaatcctatgggatatatgtgtacatatgcacacacacacacacacacacacacacacacacacacacacacgagatgggaaggtggggagagagagactgagatttatggtaaggaattgagaaatgactccctaaattatgcaggctgacagtcccaagatctgcagttggctgctagaaacccaggagagcagatgcagggaaagagccatgtcccccttccaaagcagtcaggcagcaggaattccctcttgcttgggggaagatcagcctttggttccacttagaccgtcaactgactggatggagcccatccgaggtagcagggccctctgctctcctcagtctgtggatttcaatgttcatctcattcagaaacagcctcacaggcacacccaggatcatgtttgaccaaatatctcggcaccctgtcgccccatcaggctgacacatcagagtaaccatcacatctcctcgtggggattgtcctgttccgtagtccccttgcccaggtgtgagggtttgcacaggcctgaccagagtgcctgccgaaatgtggacattcctctgtctgagaagtgaaaagtggtatcttgggggcagtttgcacgcgcattattttcattgtaagtaaacctgaggccgggcgcggtggctctcacctgtaatcccagcactttgggtgggtgaggcgggaggtcctcttgagcccaggagtttgag

SEQ ID NO: 56465 - DNA, 904 bp, Homo sapiens
tgtagacgaggaaaggaacagggacctttctcagggtacacagaccctacagtgacttttacccagtccagcagtccagctgtccccttgggagtcacctcctgcgtgtctgaatcagggacagctccccgtgattgtcccatggtgagctgcgggtgctgtgtcaacccaaacacactcttccaccctgcagcatttaaaactgaagacactgatcctaaatcagctactgccagaatccattttcctaaaggcgccccaggaagcagaaaacatggagctacaaaatgaaacccttccgtcacactccacggcctggctttggcagtcgcttggttctgtcctccctgctgtggaccaccttgttggtgaccagagttctcagaggcactttctgttattcctgcgtcattttgcccttgggagtcagctctgaggctagcagcctgtcgtccaaaaggccaccaggatggccagatagtagaaagagctggactggtgatttcagcttgcaaatcagggagaggtcatctccggtgtggactgaaggtttgctgtcttccaagagggaaagggcaggtgaggttgatgactcacagggcccgtatcacacagcagagtcacacgtattcagcaggtttggaggaaaagctatatttgttcataatgggggttgagtgcacgtgcgatgggtaaacatgcatgtaacatacattccatgttcactttggggtggggctctggctttaaaatgaggtggaatgtggctcttttcatcaaaatgtgagctataaggctgggtgtggtggctcacgcctgtaattccaacactttggaaggctgaggtgggaggactgcttgaggccaggagttcaagaccgacctgggcaacataacaaaaccc

SEQ ID NO: 56466 - DNA, 1918 bp, Homo sapiens
gttttccatttttgggggtcatggtgagacatgaaacccaggtttaaaacatacataaacactcatgcacacaaatacacactccaaccattttcaagcagagatttatagagtttttaacggacataacctttttggagcctcgtatcagcccagcgccttaaatacggctgtttcttttgcagaatgagttcagattaggcgaggatatccatcaccatttttcagaccagctcgcagcctgggggcagtggttcaagcacaggctttggagccgaaatgactgcgcctgaagtactcttcttccacttccccgctgtgtgaccctgggcacgttacctagctcctctgagcctcactcttctcccccataacatagggcctataccaaagttcaagggctattgtcagtattcaggctactaactgaaggaatcaaaatctgaacctgggttcccccgactccaaaacccgtgctatattcaccacaaatgcgatcaacacacaaggcaccaggtcggacccaggcacatacgtggcgagaccgcagggagcagcgctcgctctgcgtcctcccttcctcccatatcccaggtctcacctgctccgggccccgaaggtctcaggatgctgtggctgcacgcggacgccagccgccctaaggtgaccgtcagggaagatgctgccatggccgcagcctcggccggaaacggaaacgacgcgaaccgcgtgcgtaacgcacgggcccggcggggaacaccggtccgctgtaacaccggcccggcgcagaagcgggacgtcggcttctaggggcccaggccggcggcggcgatggcctcggcagctgtggagagcttcgtgaccaagcaactggacctgctggagcttgagagagacgcggaggtggaggagcgcaggtacgggaggccgccggcgccgctccctcgcggtcggtcccgccgtgtcccgggcagagtctccgaggggctcggcctcatagtctggggcgggaatttcgtctccgacccttcgagtcaggggcagggatcgtccgtcccctgcttggccacctcccgagttgtcagtctcatcacttcctgggcagcgcgttccgtttggggacccttaagaagcactttgatttcccgacccgagaccccccactaagcttacactcctgggccctggccccgaccccagttccacccgcagcgagttagcagccctttcccttattcattcagtaaacatggtttgcgcccattctcagtcaggccccggcagcatgagtcaggtgcactggctgcccccgatccggccagcggcgggctgggcataagcagagagtcccttcccctccagtgcgtccagggccggctgcgtgcgtgtcgcggggaaagagcctggaggaggaaggcccttccctggggagggtcatggtggcttcaaggagggagtggtgcctgaaggaaaattggagttaagctggtgggtgcggagtagggtggggagccgtcctgagaggtgtggggagccatgtgagagccgggcttgtttccgaatgggactatttacttgtccaaaacaatcagagctaacacttacgtactttccatgcgttaattcttttacacctcatcccatgccaaccctacagtgtaagtttcttttttttctttttcttttttttttttttagacagagtctctctctgtcgcccaggctggagtgcagtggcacgatctcggcttactgcagcttccatctcccgggttcaagcgattctcctgcctcagcctcctgagtggctgggactacaggcgcgccaccacgtcctgctaattttttgtatttttagtagagacagggtttcaccatgttggccaggatggtctcgatctcctgacctcgtggtctg

SEQ ID NO: 56467 - DNA, 437 bp, Homo sapiens
catgggcacataaacatttgtccaagataattaaactggatattaaatgggtcagttttattttatgtaaattaggtctcaattcaatttattaaaaagatgtttaaaaaaatctgcctgagcgggggagcctcctcttgcatgccaggaaacttggcgctggcactctgactcacccgcgcagagttttccatgagttttgattttgtgaactgtgccctgttgttttcaagttctccagctgtcaagcccctactggcttaaaagggaatgttttgcacttgtactctcagtggttttagtttgggaggatctctgcaatgtgtttgcccagctttttggccttgtcaccagcccgtcgaagggcacatttcccaggcctggtcatctccctgtatgccgaggggccggaccacatgtggaccctcatttccctg

SEQ ID NO: 56468 - DNA, 1696 bp, Homo sapiens
tgagccaccgcacccagccttgcaatttactttcaaatcattctgggaaaaaaagcctatctgtcaagagatagagagaaagcacttgtggtgaagggttaacgatgactgagctgaggtgaggtattggcgggcattgtactattcttgcaaaatcttgcaatgtttcaacaaacacgaaactatttgaagaaataaaatcacttgtaagttacatttaaaaaaaaacaacgagtggatctcggccttccccggagctggaccctgtcctctagtgggatgggaggtggcttcctgatgagccagggttgcccctggggtttccagattgtgggaaagtccagggggtccctggggtggaggagaggcagcagctatttatcaagctgcagggaagcatttcaatactttaactgttggtgtggctgtaagagtgcatcccagctgagtatcggtcctgccctcagggtctaggcttgtgtataaatgcatgcaggtgggccaggtgcaaggaacaggtgagagggagcacagtggcaaatctgagagcccctctcttgagcgaagcgggcagcctgctgtgctccagctggtgggggccagggattgggtgcactggagtggctgatcgtcctcccccgctccctggagaagcctgaactctagactggaatgtggaacacccgatctttaaatgttaacatttaaacatgctgtgcaggccaaacaacccatctatctacaggctggctcagctctccggcagtcctctccgacctttccccccagaggcaaaggctgcctgcccggagaacagtcactcctcttcccacatccagcatctcccctcaaaggctggtttctgttcccactgctcagggctccctaacaaaaccaaaggcaaggttatgaaggcaggatccattctgccaccttcagatgactcccagctctggcagaaagctgggtcctgagagactgttctctgggttggacaccccgttgcaaagggagggacctcctagcctgctcaggtcaaggggaatctgaaaacaggactgaaggtgttggcaaaactctggggagactctgtgaggtcagggcaagcactgtaagggggccctgctccctccctgccattctctaaatacatttataggctcaacccctgtcggctggtctgttcgccccaaatcccgctccttagcttctctttcctgtgggtgacctggacactcttctgggctggggaactagaccgtaggatctggtgcccaaacaggcccaagaggaccagctcaggtgctgggaaagagctgggcttcaaggggctggatggaggcggtcagcttactcagtgcctcttgtatgcatgcacgctggaaaaagtctgcaatcccctccttggagtcagagggggaggccgggtgagtcactgggcgtgtagctgccgtgaccagccgcatactgccttgtagaatgcctgctctggagcccggccccaccctgggctctgcctttgcgctgggagtttctgcagactgcctcaccccacctaccagtccaacctctgcctcctgcggccgccactccacagcggtcactacggggaagagggagagggcccaaggcccaagggcgtgggggtgagatccccagggctgggctggagttgccactctgctcctgacccagg

SEQ ID NO: 56469 - DNA, 1952 bp, Homo sapiens
atgatattgaatcctcctaatttcaccatcagagggtaaactccagttccattctggggggagtcctttgcagtcaccccgtgtactcaatactcacatgcatcagaatcaccccgaatgcttgttaaaacacagattcctgggtcctccccgcagagttgctgatttagtaggtttaagggcccaagaatttgcatttctaaaatgtttccaggtgatgctgaagcttctggccggaaagacatcctttgagaacatatttcctccccagccctcggcccttaagccccagaacgctgccccgccctgggtggaacgaagctgagctccaccctagaggggcggggccctttagctccgccccactcaggagaaccccacccctccctccccgttctcattggctgggactgcagggatcccctgcgccacagtgccgtgcgcgcgtcagcaaaaacgccagggacggggtctccgcgcctgcgcagtgaagctgggcgccttcggggcttgagcttctgagggtcgggtccagcgcgtgggctgctggatggcggaaccccaggcggagtcggagcccctgctgggcggggcccgcggcggtggcggcgactggccggcggggctgaccacttaccgcagcatccaagtcggccctggtgagccgcccggacctggggaggggactggcccgggagaccagggtcgcgcgtgggggtcccgctgtcccagcaccccgctttctgccgggcgcgcccccaccaggttcgagtccgagcggggcccgggccgcgccgggtgccaggcgagccggtgttctgagggcgagtgggctgcgtcctgcggacccggaccggggtcagggcagagctggggtctcttccgtgtcgcgtcctgatcccgaccagctgggcgaagaggccctcgcccagccttgggcagccccgagggaaccggccacctgcggcaggcaccctccgtgtgcccgggcgggcccagaccccatacttcccgactgtcgccgtaatgagggtcgcctaattgactcagagaaggcagcactttgatttttcccgtttcttctggaaaaagcagaggctcacagagaggcgttaccctacccaaggtcacacacccagtaagtggccgaggtgggattcgaaccagttgggagctaggagtcctttctttgtagggtgcctttccccgtcccacttcccgtggggctggggcgggccccctagacgggggcggcttcctctccttgccctctgccaccccagagtcccctctgcactccctcctgcccttcccgttttttgtcctggtctgaagattgctgaatccgccccccgagggtggggtgcgtccgcccctcgctgacaccaggggaatgagattctggattaagaggtggaaggaccttagcttcacttcacagatgaggaaactgaggcccagagaggccctgagacctgcccaaggtcacagccctctgttctggtgcggctgctgctcgaaccactctgagaattcacacctggctccttccctctctggcctctctttccttctttcctcctctgtctggaaggaactgggttggaatcctggtgcccacccactggtctgtggcatgtgcccatccatggagtaatgaggggccaaggaggggaccctgacgagagatgaaaaaccagaggccaaggtggccaccctgtctgctcacctcagaagctgcctccaggaagttcttcaggtgcttcctgggaccagtcaggaaggagatctgcagggagcagctctggcaggccccttgatgagacgcccagcatatggcaccgttcagggaacacagactttgtgtctaggggtctgggcgcctttctggggctgcactggctgtgtgaccttggcaggttgcttaacctttctgtttcttttttgagatg

SEQ ID NO: 56470 - DNA, 1174 bp, Homo sapiens
agggttcctgccggcttgcgtggcaggggaggctggcccccacctggggatcacctggtctcagggtccaggcaggctccccactacatagatagggcggttaccatcatcctctctggaaaggagacggcctgtgatggcaggctccttctacaacaagggttcctttctggaatgctgtggtcagccctcggcaatggagctttgagcagattcgtgatctccccagtcacgagtgtccacgctcaggcagcgccaactcccgtgcttcggactggggaagctcctgaccagcctctgggccctgagggctgctggctcctgtgttttcatgtttctgtcccctttccaggactttgagcttcaccatcttcttgatcctgtttttggcttttatcgagaccccatcctcactcaccagcacggcggacgtgcgctaccgcgctgctccctgggagccgccctgcggcctgaccgagagtgtcgaggtgctctgcctgctggtctttgcggccgacctctctgtgaaggtgaggcgggcgccaggccctctacgtgctgccccggcctcccagcgcctggccgctgctctcctggtttattgctgattctctggagtgagctgccttttccccagactttgtactttgacccggtgagcaaggcacactttcttggacaagcaagtgcctgaggcagaggctatgtcagctctcctccctctccaccatgcaaactgaggccagtgtgccgtcagctctcctccctctccaccatgcaaactgaggccagtgtgccgtcagctctcctccctctccaccatgcaaactgaggccagtgtgccgtcagctctcctccctctccaccatgcaaactgagcccagtgtgccgtcagctctcctccctctccaccatgcagactgagcccagtgggccgtcaggggttgcgcaggctgacagggcctctgggaacagtccagtgtctgcagtgctgctgtgaggagaggtcccaagtgaataagtgaggcccaggtggtccctcctcaaggctcaccctgccaccccaaagagaagaggagaggaggtgggcgtggggcagaaaggggtttcttatgcacacagcagctgctgcatgtttgactctgggttctgcctgtgacgcacgtcctcccac

SEQ ID NO: 56471 - DNA, 621 bp, Homo sapiens
taggatttattatgaataaatgaaactcccttgcagggcagttgctctgcgaccagcgtggcctaggaaggctcagctccaagtgatcagctctgtcctacagagactgaagcttggagcagctggtgacaggaccacgggcacgtagcctggattgggagaagttgggagtggcgatcactagtgtttgcggagcacttgctaggaggcctgagccaaggatgttatcttattgatgtacgttatcttatttaatcagagcctgccaaacatcccagtctgccccaaagtcccgggcgacacctgtcgccctggcgtcatcattaataacccccggaaggtgaaaactctcagagtgcccttgtggagctgagaaggagcacggtttcactgtgcttagtcctctgtcgagccctctggaatatccctatgatgtggatgaacaagctgtgggtcagggggatggagggacttgcccagggtcaccagctcggaggcagggttggattccaggatttataatctcagaggtgggatttaaagccacgaccctctaatccttcccaagcaacagaaggcacggagtgtgttcgcggtgtcagggagggtggtgggaaggca

SEQ ID NO: 56472 - DNA, 1443 bp, Homo sapiens
agaatactcttcaaatctacaaggtttcatttatatccagggacagccatgcccaggcagcgcttggccaagagagagcactgtgctgggagtccagaatcttggccccaaatcccggcaggacccagggcaaatggcttccctcctggcgagtgcctttcctcctcttgggcacagttccgatgttacctgggctgggccatggagaatgccgcccaagggctggtcctgggccattgtttaccctagttctgcatggagggtttgacctcacgcccggctccccacctgcccgccctgctgtgcggcctcctccctgcctcggctgactcacagctctgctatgcgtcctgcaaacattccggagccctcgccctgcagcagtgctctctgcattggtggataatagggcagcactctgtacccagaacgggaggcatttgggtcccctaagaagcatttgtcattctgtccctgcctctgggctcctcgcctgtgatctcagaaacagggctgggtgtgtctctgcagccttcctggggaagttttcttttaatctgctagacccatggcgggggggcggggggaggggagccagaacactctgatctgttcctgccagctcagggacctcgggcaaatcgagtcagctccctgtgagaggcgggagtgggcggcatcagtggtttgcagagacgtaggttgcagagccagtgagccggtgacatcttgcatgcagccttgatccagggagtgaaggaagtgctcaggctgggtgtgagggcggggagggggctggggcagagctggcttttctgtgcgctctgcggagacctctgaatctcctctacccgtggtgggggaagccccagagttccctgcacctttgaggtctctcctcacgccagcgggctgcagcccacggtagcccagggtcacatagtggggcccagctagagtttgaacccagaactttgtgaccttgcaccctgcaagcattccgcttgaccattagggtggtcagcacctgtccctgccgccgaatgccagctctgtgaggttgaggccccacccaccactgcacccaacactgagcatggtggtgagtgcgcgccaggtgcccaagagtcctttgctgagtgggcgacgggtggggtcctcctacttccccctgccctccctcctggcccttgcaggggctaagtacctttgtacccctgggtgcccccgccacgaccctccccgctggcccacttcccccttccctgttctagccttcaaggtctgcagtctctggtctcacttctctcctcccctggttccagtagacagcggccagaggaggcgctcctggggttggattcactgttggttttaggaactgagaaaggcccccaatccccgagaaaatccagggcagaatgtggctgaggagctggaggg

SEQ ID NO: 56473 - DNA, 899 bp, Homo sapiens
gaagatgtctggccaatcctagagccaccaaatttccaggcagtgggctgtcccatgttcccaagaacaaccctgggctggctgccacacggctactagctgtgtgtcaggcctacgtagatgtactttgcatacactatctccattagagactggggtgtagataggattgcaatccacaattcccagatgaggaaactgaggcacagagaagctggtaggtggcccagccatgatgggaagctagggtgggaagcgctgagggagcagctctcctcctcaggtattcagacctgcctaatggtgcaaatgcctcagccacattcctgcctctaggtggggcatcttgcacgtgtgttcccgagggctttgcctgctggctgggaattcctgggctaaagagctgagcacttgcattttctgactcccataactgttggtcagaaccgaggtggggtgtagaggtcctgaagccagcccagaaaggtctggtttctgacccacccaccagctgttgcctttccctgcagaccgggaaacgcggtgtggactctcactgcttctccggcttggaaacggcgttcctgtctttgccttctccctggggctggaatccctcctggacaggcctaaggcatgtcatgggtccccctccctccctgctgtaaccccagagcccccatggggaacccgcagcttccatcatcctcaggggcccagtgtcccaggaggggactgtggagaggtgtttgtactcctgggtgtgtctgggctgccacttgcccagggtctgggaggtgaccttgtgccagatggggctggaagctccctgagggtaggggcggggcttaccctggtgcacctgtgttgcacgtggcctcggatctcgttcctgtcat

SEQ ID NO: 56474 - DNA, 836 bp, Homo sapiens
caggtatgtgagaaaggatgcagccaggcaggtgcaacacacctgggcagcccgtggctgtggccatggccatggccggtctgcatgtggaggaaaagatggtgaggtgagaccctgagaaacaactctctgatctcatccacctctcccctcctaggcgggacgagatggatgcaccctctgccgcagccacctcttctgcaggtgcccggcttctccagacttgctattttggaggggcaggtcagtgggaacgaccgactgccttgcatctcagccactcatgggcctcagagtgtgggcaggggcagctgcagccctctcgagcctctcactccctgcttggcctctgtaagcctgtccgggagcagctcacagagcccctgtggtggagatgagtcacttgttctaaaaataaaagaagtgaagtcatgaaatagtgtatttcctttttaagcccgatgtgcctgcagggggatccccagcagtgtgctggcggcagggaccctgacaaggtctggagcctcagagcgcacctgcccccacttacaagccccggcctcggggattgggtggagtgtcccctgcctccaacggctcccagatgagtgagtaaaagatggcacgtagaccaggagcgggggctgacacctgcaatcccagcactttgggaggctgaggtgggaggatcacttgaggccaggagtttggggccaccctgggcaacatggtgaaaccctgtctctactaagaatacaaaaaaattaaccagcgtggtggcacatgcctgtggtcccagctactggggaagctgaggtgggaggattgcttgagcc

SEQ ID NO: 56475 - DNA, 665 bp, Homo sapiens
tgtctagttttaatttttcatctatcaaagggaacatagctgaactagcccactctgtagtgcccttgtgaggattaaacaaaggaatcatgcaagaggactgtcatggtacaaggctctcagtaagtgacacttgagtgtccttcctccccaagcaagccggctccagttcccagcaaggccaggtagctgcacggccattcctgcactgggcgttccccctgcccgcctcccacgctagccctccccacttgcttgttaaaatcccctggatcagtgcctctcccaggtatgtcctggttatgtaatcaccgcccgagcagttacacaccaacttgagctctttgctggctcctgtttactctttggctcaggggagagttccattcagaagaaattgctattgcttctcagccttcccatgggaaagcagcattagggaggggttcagtgagccagcaggagtggggggagtggaggcaggggaggagtggggggagcaggccctcacacagctcagggcttgctccatacgcacagcttgccagctactttatctctttaaaaacaaaagtctcaaataattttttcacatgacctcattttctgatatacctgaatatggttaagagaaaggtggacgatgacctcatcccattccctat

SEQ ID NO: 56476 - DNA, 3028 bp, Homo sapiens
acaagttgcctaagttccaagtttcctctcccaactctcctaccctctcctcttccttctcctttctcccattcttccctgcctcttccctaactagacaattttttattgagtgtctcccaggtgcaggcatgagccaggtgctgggaaaatcatgataacccagctccttctggtcattttctcagctggttagaggctgggaggacacgcaagttcagctccagccgactggggcattggtggtagcccctggagacattgtgcaatggggctacgaggctgcatctggctccagggaagcgtgttgcaatccatgagtgatgtctgccatgcgtacaggcatggagagtgaggcgcctgtactgtctttctgtagaccctagactggtggggcctctgaaatgcatccagacactgtgctgggtgtgttgcatggccctcccaaccaattcagtatttttctccccattttccagggagaaatctaaggcgtcagaatgtaaggttcttattggaacccaggctccagggtccctggttttctgtgacatcatgctgcaggaccctgtttctctctttgctttggctgctggggagctcagaagggagctttaggcttgctctcagtcaccacattagctcaggggtttgggcatttttgtcgccgtctcctttgggctctgtctcctccctgctgtgcttcctgaggagcaggccggatgtaagttatcaactataaataaaaccaagacttccgttctggctctcactctagtttcctggtgcattttttttttttaaagttcttaatcaagggaggggatactcctaactgaagatgacatcagcatcagctggccccggggggcaggcccccagcccccaggcccgtgtgggccctgaatgcccccattatgaggggtaacctcattacacaagacacgctgcacggcggaatttcaaatggggttttgtggtttctgccctttgcagccgagcacacacaggcagctgcggccgcccggcttcctctcccgccgcagccctggcgcctggccagctggtgaccaccccttctaccatgagtcagtttcattcttaactctctgactcaggtccctttaaagggacagcagaatccattcattccaagcaagggaggagaggtgaagaacctgcctgggagaggagtcaggggtcaagaggaagcttaggggtcccaggcaggcggctgagtgagcagccctgcctcactcccctaccccagacaccaaggatggaggggctttcctgcctgttccaagggagacggacctgtgacttccccaaagcagaccatctgcaaggcgggaaaccccggtgttcagcaagcttcctttctgtctgggcacaagccctgcccaagctctgggctcagaaggtaatgggggctttgcaagccacccccaatgccccacgtgcaccacttccttctcatccttggccccctcattccttgtacttccgtcgcaacaacctctggagttcctagaacatcctgagctgcttcccccggctgcctccctgccacctggcatgcacgtcactccgctctttgtggtggtcccatctcctccttccgagcccagctgcatgccacctcctcccacgtacatactgccagtccgtcatagcaacctatttatctccatagtaacacaaggaacaaccccaaactctattcaacttgctccccatgttaacggcccccagtgtggactgtcagctccatgaaggcagggccctacttatctcgttcacagcacaaggccgggcacacagtaggtgctcactcaacattcctgggatcaatgggaaatgactgtcggggaaccctctgcagccgtccttgtcgagggccccagatggggtgtgggtggcccctccccatccagatggtgttggaggggctgggggccaggcatggcgagcaggccgaggctgcaggtggacatccctgggactggagctgctgggggccaggctgcagttccagcccaggtcaggtctcatgtgaggcctccgtgaaacaagaatttctctctccgtttccttctcctgtctgactcacactttcgttttgaagttccccctttctgccagtgctttgcctgaggttacggagtggtcaagcgaggccagcagggcgtggagaccaggaggaagctgggctgcagtttcattcacaaaaacacgacccgcccgcttcctgtgtcctgcctgggctgcccggcccgcagccctacagccagttcacagggtgtttgcaagtttgcaggggccagtgagggtgctcctggggtttaagaggcttgagtttgtccaccccacggcctctgtcaggacccccccttcccgccactatgcttctgtctcccacggtgcctcccagctcacccccacaggggcctggcgcagagcctcaaactcaggattctataggagctgagggttgggtctgagcaccttggcgcttcccctggccccactgacccatccttgtttcagcacagagctgggaggcccagggaggatggcctctgctgactggtccagctccctctgtggttcccacctctcagtgtggggtggatccaagggggagggaagagaaggggatgggaagaaaacgatgcctgttggggcacaggctcctaaacccaacctcgtatcgcctcctgcgagtagcttccaggtgtccacagggagcccggggtcatgctggcatcattcattctccacgcatcagatgatcctgtggcccctcagtgccaggccccactggccctctgcgcacatcagtgactctgatgttctcccccaccgcatgctgccaatctgatggtggagacagaacagcagtcccggatggtaaggacgcccagtgccaaccccccttagcaggggagatgcagaggaggggggccacccaatctgggcatcacagaagcctccctggaagagggggcatccgagcagagcctga

SEQ ID NO: 56477 - DNA, 3436 bp, Homo sapiens
agggactggctgggaggagaggcagggaggggtctccaggcagagagacagcaagtgcaaggcttgagtgcaggagagaccctggtgtgtcggagctggagaggagtgtgtggggggtctgggtggtgtggagcggggatggaggccaggccagggggtcggccaggctgagtggcttggacattttactgagcacggtgaggaacccctgcaggcttgtgtgcttggctggccccgcccggctgaccacagcttcgtgcagcacaatgcacatggcactgtgttggggtctcctatccagggtctcatttcaccctggtgctgcccctgtgaggaggcgttgtctctccttctgcagttgaggaaactgaggcctaagaggcaagttctgtccaaggtcatgcagtaggtgctcccggagtcatccgaatcgcagtccaggggtctctcgccaccctccctgaccctctggccatggctgctgcggggatgaaaccatcacaggggcaaggcactttgaaatgtgaaagctctgtggtgtcatgatgataaaaacacaacaggaagaacgcaacccattttggttttatgaggctgagctgcccctctggaactccctcttatctggggatctcaaggcactgggaaggtccacagaccactcctagaagcactgggaggcaagctcaggccaggcaggaagtggcaggcactgctcattctctgccgtcccagtcctcctcccctcagaatcgacccctctccccaagccagctggtgcgagaatggggagctcgggtcctccccatccccagcaggtgaggaacaaagaccagcagcagcaggaacgggactaaggactccaccatcctggagacagagaggggtggaggcattggcagttctgcctggtttagagttttctgggttcagatcctgtctgtcccttgagactatgagctcctgaaagtcatggaccatgcgtgtctgagtcactggggcctgctgggatgagcacggcttgatggctggagaggagggagtagggtgtggaaggctgagggtcagggggaagtcacaggactggctaccctgtcaaggcttcctagggtttgtttaatgaataaggaattgatggatgaattatccactaaccgaagggtatgaattccagacagatatgtggaaggataaatggataaatgaatgtgtggatggtctaagggaagatggatgagtgggtggatggatgaagggatgggtggatggataagtgatgaatgaatgcacggatgatggatggatggatggatggatggaagggtggaaggatggatggaagggtggaaggatggatggagggatgaacagatggaaggatggattgatcaacgatggatgaatgtgtggatgtggatagatggatgaatgcatggacagatagatagtggatagatgttatagggggttggtagaaagtgaaataagcacctgggtcatctcaggcatatgggcaatgtgagatgcttctagcagagactatgatgaggctcgcttgggatatgggcaacatgagacgcttctagcagagaccgtgatggggctcgctcgggatatgggcaatgtgagacgcttctagcagagactgtgatggggctcgcttgggatatgggtaatgtgagatgcttctagcagagactgtgctggggcttgctcggcttcacagatggaaacttggcatgcgtggcacaatgcccatgtcctccaccaactagaagaccaatggtttgtctaggaccaagagactcgggtcattttcttggttcagccttatcagccccttgaccatggccagtcttctcccctcctggccttggtttcccgtctggattatggggatttactggatgagatgggcctctatggtggagtgtccaggttttcctaggaggaggggcagcacccccgcctctctcttccgctcacaggccttccctcactccattcccaggctcagccaaggcacctgccatgcaccctctttcccaccattttctaaatgtctgggcatgaagccagcaggagagatgggccctggggaaagggaagctggcccctgctgcagggtgggcaggctggggaccactgtggctgcagacagctgctcagcaggcccttggcaggctccagctgagtcaccctgagtcaccactgtcacctcctaccacacattccttcattcatacagtgtctacccctgaggccacctccctgaaatctcactgggcagttgccaagggtgtggagggcactcaggcctgcctgatgggcccctggcagggagagagggctgggcaagatgacctccgggaaggtgtggacaccctctgggtcccttccagcccgggagccctctgacctcactgggctgggttccctgcagatgggagggctaggtgcctgtctccttgaggccccttagcagtcatttggaggaacactgggcccctcagctcactaagattcactgggatgaggagaggaaagtgactcacctgccccccttgcctgtctcctcagcagccacacccaggctaggctctcccgcagagggcctgtggcccctttgcagtggaccaggccagctccggagtgggcagccctgctctgtgtctgtcccagcgcttcctttctgtagggtgtggggcaggccatgcacggctccaggcctccgtgtcctcgtctgtagtcgggctgtcggcaggcaccgcctctggtgacttgtgtgggcacctggtgctcctctgtccctcctggggccaggagtgtcccacagccctctgacctgcagggctcacctctggcaggtcctgagtcctggtgtcagatgccaccaggaacacaattctgggcctgagaggtgagcctctctccaactggaagcctgggctacactaagagcttagggacccagggtggtgaaccctgagtgctgggctcccaggggtgggaagagagaggccggggtggtagcctggcccccacacagtaggtgccaggtagggcagccgctgggagcctggcacggggcctggggccaggctggggctggtggtctcagggtccatgaggcccatacatcagcctctgaatttgccatggcaggaacctgggacacaggaagccggcaccgctgagcaccctgtccttttcattcatttcctctcccgctaaccccagtcaagccttctgtggcaggcaccgctctgcactgaggatttatgtcaatgaaattgacttgggtccctgtccaagggggtctgcattctattgaggggagacggaagacaggcagtaaccatagtcacatggcctggcctgctatggaggcaatcagaaccttgggaaagagaaaggagagtgagggaagagggtg

SEQ ID NO: 56478 - DNA, 876 bp, Homo sapiens
tatatgtgagctgatataaataagctaagatcctggatagctgcagaacagtgggtgtagtgggagagcttgaaagataccggttattttataaggaagcggtcctcttgaaagtcaaggacagccaggccgcaagcagaagctgcagaagacttctgcagttccacataaaacagagctccacgacgctcagggcagagacagaggcaggatcacatctaacagatgggcaggtggaggcatggggaggctctgaggcgtgtgcatagtcacacgtgggtgcaggagagatctcgaatgttcttgttcccagcactgcccccggagacctcccagtgtggaccttgcccagaaggacacacgaccttttgaattatgttggcttggcagaaagctggactcttggcagcatgcccccagggccttctcagttctcatagatattagtcaatgtggacactctctcctttctggaatgcccccaataacaggtgttggagacatcgaggccctgagtagtaaggggcctgacccacaggcacagagttgggtgctgcgggatggccaggagcttgggtctccttccttcccaccacaccagtaggagccggatgctggcaggtggcttggggatgccccttcactttgctgccgggaagttggctgcagagtccagggctcataaaagcagccagttgagtgagaatgcactggttcagaagccagtgggcccctagctcctcacagtgggcccccttggccaggccaacaggccatgtctcctagccaaccttgggtctggcccccaaagattcatttctatccgcaaagtgcctgccctccaccttgttcagcagcctaagccccagtgaccat

SEQ ID NO: 56479 - DNA, 4062 bp, Homo sapiens
atcaacataagtattaatattaatctatatgagtaattaaaaataattgctcataatataatattaagtaattattattaattaactgatcaatatgcataattattaacattagttaacatcttattgagtaattattattaataatgtctcatattgattaattaatatcattatagccaccctgacatcttgtgtttattctttgcatcttgtgtttattcttttcagtttatttacttttgtcttatttgtgtttttgtattcaaagtaaatctcttgtaggcagcacataattgggtgttgcttttaaaaatccatattgtcaatttcttccttttcattggagtgtttagaacattaacatttaatgctgatcttttctcttttttggttcctttattcccctttctctgcatgcttttggattatttgaatattttatagtattccatattaatttatctgttggctgtttggctgcatttccctgtgtgtatgtagttgctctatgcatggtttctttgattctatcctgtttggggttctctgagtttcttgaatctgtaaacttatgtcttacactaaatatataagattttcagtcatgtcttcaaagatttttctgctcccatctcactctcctctctttctggactagttataatgtttaagagctttggatatggcttcacaggttcctgatgctctttgttcctttccttcttcaatctttttttcctctgtgtccttctgattgactcattttattgatctatgggtttgctgacttttgcctttctcatttccattctgctattgatccatccagtgatttttaaacatttcaaatattttctttgttatttctaaaattccaatatcctcttttaatactttctctgccaggatttcttatttgcttattcatttcaaatgtatttccttgatctcattgagtagagttgtagtagatgctttaaattctttgtctgataatttcaatgtctgagtcatcttggtgctttcatctgttaatttttttatcctttgagaatgggctgcatgttcctgtttctttgtatgtcaaataattttggattgtatcatagacaatcttaatgtcatattatatagactctacattctgttaagatcctctgaattatgtagatgtctttgttttagcaggctattgattcatacatatgtgtgcatccacataaccactgctataatagtcagggttttccagagaaatagaaccaacaggagatgtgtgtgtgtggtgtgtgtgcatggatgtgtgtgtgtgcctgtgtgtgtggatgtgcgtgtgtgcatatgtgtgtgtgtgcgtgtgtgtgtgtgtgcgcatgtgtgtgtatttctttatttaccgtaagttattggttcataggattatggaggctgagaagtcccacaagctgccctctgcaagctggagacccaggaaagccagtggtgtagtttgaaggcctgagagtcagagaaccaatggtgttgattccaatctagatctgaaggcctgagaaccatgagtgctgacagaaagagactgatgtctcagctcaggccatcaggcagagttaattcacccttcatccatctattagttctattcagacccacaataggttggatggtgttcacccaccctgagaagggccatctgcttgactcagcccatgaattcaaatgccagtctcctccagaccttcatagacacgccgagaaatcactcactggctatctggcatcctgtggcccagcctagctggcccacaaaatgaacaatcacaaccacttagatcaataggtggatcatttctagtccctccagaattcccactccaagggtgtactcacttcacaagtaatcatcattctgacttatttaaccattggttagttttgtccattcctgaatatcacataaacagaaccacacaatatgtgttttaaaacatctggcttcttttcttaaaacatagtatctgtgggatgcctccatgctgttaaatgtagaaatagttcatgacttttcattactgggtgataccacattgcatgaacatactgcagtctattgatctagtcccttgctgatggacagctgggctgtttccagtttaggacaacaggctgggcattttaggaggcagcacagagcagaatggctacaggcatgtctcttacagccacacaaccccgactcaaatcctagctctgctgcagaccagctgtgtgaccttgggcaagtgactcaccctcgctgagctgcagtttcctcttctgtgaagtggagattatggtagcagtacttactcagagggttgtcatgaggatcaagtaagaagtcacatgaaatcacagcctgcagcctaccagagccagagcccagtaaatggcagctgttaaatgattattgtgggaggaggtagcaattatgaatgtcagctctgaaatctgatctgaattcacatttcaggctaaatgaagcaatcattagtaaacactcagcatagggctagcaaataataagctcacaatttattatccttattgatacctgatatgtaaatactagtagcctttacaacaagcattcccatgataggttttgccatttgatagagaacagaactgtttctcagggatgtgcagcatttctggtcacagagcaagaacaaggtggtgtagggaccctgcttatcctaccctgccctccagatgcagggaccccactcccacccacccctacagcctcaccttgagtatcagagaaggtgatggtggagagccacctcccagactggcctgggctgcttcctgggcccatttctgtccctctctgggtttcacagcttcccatcccacccaaaggtgcactggtgctgaccctgggcagtgctgtgggcagtgaaggccggatgaggtccctgagtgacagcaggctctgaattgccgcaagtgtcaccatggtaaagtttctttcctgctctgtgcctcagtttcctcatctgtgaaggggcaatggtgatagcatctgcttcacaggggccctgtgggtgctgaatcagagggcccaggtgaggttacgcctggggtcagggcagggccaccaggggtgtccgggggccacgcgagcctttgagaggtgccgcaggtcttgagtccacataccaactgccacccacacaggccgacgtcccttccaacggtgcagcggggctaaggtcacttgcaatcgtggagaagagacagtgacctggggttggggcaggagcctacgtcaagacagagtcacggatgggtggggctcagtccctcccttggagggaaccccccaggactgtggcagacccccttgcaaggtcctcatcggctccagggcaggcccagcctctgccatgggtgtgagggagagttgagggctctatgacgcccccctccccagataactcaaggcccggggagggagctttgggttgagatggtgtcgtcaggggctagtgggcaggtgtgcaaagccccaggctgggcccagagaaattcagcagcaggtttcagggcagcaggaggtcggctgggagggtggatccttatgcatctctctgtctcatcccctctgaccgcctcagccagggggagagaatggagctcggtgagcagccccagtgggcctgctatgaattacaggaccccctgcaaattcacacacatgcttgccccctgctgtgctactgacagcaaaggcagaatctgagctgctgggacttgcccaaggctgccagctgcagatgctggagccagacagaagcccaggccgccttcacagtctgcatagttccagtgcaacaaggaacctaaagggttaaccagcattagcacagggcccagcaagtcactcccaggtacctgctcaagagaacagaaaacatgtctgcacaaaaacctgcacagccaagctcacagcagcaccatccacagcagccacagtgcaacaacccaatgtccacagcaactgacgcacagaga

SEQ ID NO: 56480 - DNA, 697 bp, Homo sapiens
agcaccccagtgggtggagtgaagactgggctggcacactgagacagtggagtccaccgggagctcaggggactcagggactcttcagcccctatctgggaacccactagggttgggacccctgtgccagacctggcccagctcggggagggctctgcactacccgctgcctgtggtctggcccagcccctgccagcaccggcccatggtgatgtcactcagcatgcccagtgcctgcagcacttctctggtctctggccccagacccactggccggccggacgctcgatatattctgttttgaaagaaaacaaactcttttgaaacactgctgctgggagcacaggctgaaagtctcgcccccacactcctttcccctcccatgggagctggtgcacatctgagcatcggggaaacctgacaggtggggccacatgtggggcagatgccccttccccaccctccaaggcagcagacgggtacagagcccctgctgtgtggctgcctgggatgcagagacagcattgagactgaaggcaatagggagctattgaaggattgagagggagagtgactgggtcagataagtgtctcaggaagttggggcagtgcgacccccattggaaacatgttgcagttggtgtgagttgaactaggggcacgatggggtgacaaatgtgaatgacatttaacacaa

SEQ ID NO: 56481 - DNA, 2114 bp, Homo sapiens
gctcactgtaagagctgggtgtttgtcagatttctttattttttccttatttgctttgaaatcaagtttttttaaacaatataaatgacagataaatgttcaagacatacatgcaaaagaaacaaaaaaatctaaaagaacatttaaatccctacaaatctcacctgccaaagaaactacttatattagtcagggttaggttctagtgtgaataatagacacctccccaaatagcagtggactaaacaacacagaaattgctttctctctcaagtgagagtctagaaatgggataggaggtggttggtcctgctctgcaaagcctttggagacagtcacctcctgactattctctgagccgttaacctggaggtatggttcttgcctttgggtccaaaacagcagccagagctccagccatcacgtccaagtcccaggcagcaagaaaaaagaagggatgaacaaagtgcatgtcacttgccttttaaggaagacttttggaagctacaatatgtccttttctttatcttcttttcccatgtgtaacatggccacacctagctgcaagagagtccagatagatggtctttactacaggtgggccatgtgtctttttcactgtaaaggggatcacaggtagcttcccacgcccacaaataaagattcacagatttttaaaggctgcttgcaattccatcaggcagaggtttgatgatttcaccagtatcaacagacatgcagaccattgccagttttctggtattacagcccctgacacccctggatgtatcatctttgcaccgggttggaacattccttcccgtaagttcccagaagtagaaatgctgagtcaaagaggatacacttttgacatttggacatgaattgagaaattgcccttcagaaaggttggcccagtttgcaatcctcctcaccatgctgtgggggctcaggatggagctgagaatgtccccagacctgaggctcagctgcccctgctgggtccctcttggcattgtgggtttgctcccatatttactccaaatttaggactttttcctcccttccccatggtagaggtcggggaagtgtgcccccaatcctcccagtgggatccttggggaagcccctgccttggacaacaccaatcatgaggtcccaacccctctagatgacagcaaggagcaggagcctcccatagtgcctggggctgttgtttgagctaagcaggggcaggtgcctggggctgttgtttgagctaaacaggggcagtggctgccaccctgaatgaggggctggggcaggcatcctgtgggtgatcaccctggcccctcaatcagatggacaaggagtacagccaccaagccttgagatgctgtgctgcaaatgcccggaaatgtgcatcagcctggctggggcaggcctgacggctcctaaccgcagctggcagcagggtgccagatttcactccaaataaaaatacaggatgcccagttaaatctgaatttctgataaacaacaaaagttttagtataacctaaatactgtatggacaaaggatcgaagaaagtgcatgctactcgcctgtttaaggaagcttcctagaagatgtaacatgtcctttctcctttatctcccatgggtgacacagccccacccagccgcatcctttactttatttggcagccctcactggcagcactggggcccctggaagcagcaagcccagtggaaaaaacctggactttgacaccagacagcctggattcaaatcttggcctttgcctctggtagctgtggacttctggcctagtcacttaacccctctgtccctcagtttcctcgtctatacatatgggggcaagaatagcacctacttaatgagggcataatgaatattacaggaaagacgtctgccttcagcgacatggaagtacagattagctctatgcctttcctctatgcaacgttcagaaatgttgtatacattttaactaacatccttttcagtgcatagctaaggggcacgagaaaacaagggaaatctctgcggtgtggaaataaagacagaattaaagcgaagggtgggaagtttgtggggtgaggccgcagaa

SEQ ID NO: 56482 - DNA, 668 bp, Homo sapiens
aaatgtttttaacgtgccttttttcttacccctgctaaggtaaaatgagtgcctcagtttggggtcagcagaggggagaagaagccagagatgctgagaaggaactttcttttcccttttcagagaaaaggatttctgctttcaaatccgctgtttcctgaggctgggtgctgagttcagctgcccctggaggagcagcagctctgggccgctggcagggccgcatcctcttcagtctggacaaattccctgcagccaggggaagtggcccatgcctgctgtcctggtatgcaacatcggacctgcatgctggaatttgacccttttcctgcctgacacccagcaaaataaaccccagggaagggatcaatgcctgcaaccggaatccagaagaaagaggagtgacagataagccctgggtcagaggccagtgaggtcaggacctcccagggacggacacacagcccaaggtttgggtgtgagatttcagagccccaggtaataaaaataaaagagttaaggtgcctagcagctcagtccctcacagtgctacctggggcaaggatggaaattcacctcagtttgctgtggttgctattggctgaatcatgtcctcccaaaattcatatgttggagtgtacctcgggatgtggtatctcaggatacct

SEQ ID NO: 56483 - DNA, 615 bp, Homo sapiens
ctgccagcgtcgggggctgcttggagcctgacatcttccacccctccatgccgggcccttcacactcggctgcgagcttccccagtgatgccacgctgatcctgcccaccacctcaaatcaggcccactcactagacccacttcacaggaaaggaaaccaaggctcagcttgaagatgccacttgccctagggcgcttggagagacagaaggagaggccaacagctgaaccaacggtgaccccaggcctctgcttacccaagcacctgctgatgggcatttgggtggtttccagcttggggctgttacaaataaagccgctgggaacctttgtgtacgagatttggggaggctgtgcactttaatctccctttggagaatacccaggagtggaatggctgagtcacacatagatggatatttagctttggaagaatctgcagaagaggtttccaaagagctggtacccgtggtgtgggaggggtccagtggccccatgtcctcgctggcactgagtcggtcagtcatttttatttcagcgtcctactaggcggatactgggtcacgctcactggggttcattggggactccagttacctatgctaggctacttga

SEQ ID NO: 56484 - DNA, 925 bp, Homo sapiens
ggctctgcaggccagcaccggggaccccacccatgttatgctccactttccagggagggaaactgaggctcacagaggtgaagtcaccctgacaagccccacagaccatggcccaggcttgctagactctagggacagagcccttcttcccctcaatgaggccactgacctctccaggtgaacgttgttggtgcagcagggcatgaaccagctcacgtgcctggcccactggccagaccacagcatggctctagctgccctgtccctggctgcattgctcacagccgacaggggcagacaggtgtagacacagccgcccagccctgcagcccggcatcccaggaatgtggtcagccacccacaccactgcccccaccccagccaggcgtgctgtgtcagccctgggccctcctgcccttccctccaagccccgcaggtcgcccaactcccagggcggctgcattcactgttcatcccccaggggaagaaaggccgggaccaggggctggccctgggcctgcaccaaccagggatcctgctctaaggacctgacagctgctgctttgcccttagaggaaaggagacctttagagagacaggaggaaagagagagcaagagagagtgagagagagagagagagagagagacagggagagagggagagagagagagagacagagagaaagggagagagagagacagagaggcagagacggagaacactccaacccaaatatcctgtcccagttttgagcacagcttggaggtgtccccctgctaggggaggggttccagactccaatgtgtctctttagtgaagaatgccctgaaagccttctagagaattgtgggtgcttctcccacccaccccatcttgttgggagccttgctgattgaatacctggctcccctgaatatgtctcg

SEQ ID NO: 56485 - DNA, 716 bp, Homo sapiens
ggtctctttggggaccaagccttcagataataaaaatagccgtacggacagtaacacaaacccacctcacttatccaaattctgaaatccaaaaacctctgaatcccagaattttctcataacttacttggcatcaaaacctgacctggaatttttggcaacagaaaaagttccaccagaacaaatcttcacttgtgttctttagggtgaacagccatctgtttcgtggattcgaatacgggacacagcccagccgcactgggagggttgcaataatagatgatattctcacccaattccctttctaaaatccacaaaaaggcccagtcttttggcagaagggtggcctttggcccttctgcaaagatcctgctgtcagttggaaggaggtcaggagtccacatttctagttcccgtcctgccactcctggtttctctctgtggcagaatggaagcggctcctgagtgaggctgccgggcaggtgaataagaagctccctgaatgaagccccctgcacgaagggaagctgtcggccaccctgtttctgggactgatggcccttgaggaagggttggtcttattgccccgtgggaaagagatttgggtccaggagacctgggtcctcgtggtggagctcccttctataggtggaataattggggctcatcgtggcctcatttttctctttgcaaagcatgaggactgggagcagaga

SEQ ID NO: 56486 - DNA, 2277 bp, Homo sapiens
gtgagactctgtctcaaaaaaaaaaaaaaaaaaaaaaagagagagagagagaggagagagagagaaaagaaaaaacaagtgggtggtatatatgtggaagaacataaaaaagaccagaaggaaccacatctcagtgtcagcatgtgagctctgatggtctctgctgaggttgcctgcggtgccctaactcttctctgttttctgattgcttttgcaatcaacaggtattattctcatgagcagaaaaacgccctgttgtgcacatttgggatgagagaagggtgctgcaggtgaggagaagacaaaggggtggagtgggccagcttctctagtgtggcatcttctcctctcctccttgcctggctgcctggagcctgagggtcacagcctccagcctcttggcttgcactctcggcctctgcacgcagccttatcttccccagaacgcacactcaccttccgcttccctcaggacctgccacctccaaacctctgcccatgctgggtcctccactgggccaccctctcctgcccagctcggcaggtgcacatcttcctagcctggggggcctgctcagaaggcagctctttcaggaagcccctggctggagagaccccaccttcctgccgcctcctctggcctctctggtgagctgcccactctcttccttgagtcagagttcaaggtgtggctgtcttgcctgtgagggcaaagtctgcagccgactcgtctccctggctgtcagctccacaaggcgggcgggtgctcagtaaacattactaaactcatcagccccctttgggcaaacgggacagtggggcgaggcctggcgtggctggaaaagcagtctggatgccccagttgcggctggctcaacggctttatctgacagccctgggcaccaagacaaagaggcgttccctggctgccttggcctcctctctcccaggggaaggcagggtgacatggcgagcctgggccacacagtgagcccaggccggagccagcagccggttcccaacactggctagggcccttctgcaggcctgaccctgagcacatcccaggaccccgtcagcttcccagggagagttcccaggagtctgtgctggcgtggagaggagctgggggcccctgggtgtgcggctgcagacgtcacgggcacccagaaccctgaccagagtcaatgttgtcgtccccttggcatgctggaaaaaaaattgctcagacagggctggagggctctcagaccctttgtatcctcttctctgagtcttgggaaattgagaagtcctctgagagcttcccttcacctgatagtcccaccctcaggatggagctgaggcagagtctgcactcctcaaccctcttctctgtgaaacagttaggaaatgtctgcagacatcatcatccggactcaactcctcttccctgctatgaatcgtgaaacaaagtgttcaggtcaccacagtgaggactctggcactgagccggcactgggcgggatcagtagcttggatggaatgccggcagggtccctgctgacctcatcatgtggaagagtttcggagaggtcaggagttgccaagggcctgcagacaacgccgtgtgaggaggacagtgtgaggtagcacaggcctcttcgattcccaaggttccctggaatcctcaggattcccaaggaacccttggatcaccccagcaccacctagcccagggacagagccaggcctgagtgcacagcccgctagcaactgtgtaacaggtgccaggcacctacagtgtgctgggcatggggctgaggtggggctgtgctggcaatgctgcagacagcatgtttacaccaagcacagctacaagcccaggaccagcttccctccttccgtcagagcagccactggggcagccagtgttactagatccccacttgacacatgaggaggcaccaggaggctgtgccactcagccgatctagcggtccacacatcagagtccatactctgccaccattagaatggggcttgtgatggctgccctcactcagttcaggggtccccaccagaatctctcaggccacaccctgggacctcagatacactctgggcaagtggcaggggccctgaaaggtccagagtccagccaacttcaggtctcccaggcaaaaggagccagacctcccactcaccccctcgaacccagcagtcactccaacagggcttctctgacagtccaggctgatgcagctcactgtggcaaaagaccttccctgaatcagg

SEQ ID NO: 56487 - DNA, 2046 bp, Homo sapiens
acagtcccggcatgagtacacacagaacctggcaggagggtcttctaatggccactgggcctgcacccctgctgtgggcccagagccccatgcacctgcttcttgtccacctccagaagggtgttgccttctgcacatccttgttgaatgatgtcccaagggagccctgagatgtcacaacttcaggtgactcccctgcctcccaaggacacttacagaggtgttttcacaaaggacacctcacaaaggcacagcttttaaggacctctagtgtgaaacgggaatgtttcaggcactagaaaaggcccagcagtttctggaaggagaagaggacacccctctgactctgccaagtgggccggccctgtgtcgcgctggcccacgcagctgctgagccctgctgttgggcagcaatcagcgatgggtggccgtgggcaggttccctgcactcctggggcctcgtcttcagtctgtgctttgcattgtcctcctcctgctgggtcaaaccctgggctcaggaccgtctgcaggtcacctcctccctgaagccgtccacagcaccagagtcttcactggctcctttgttttctctgaaggcagagaatcttctagtgcatgtgatttacaatggtttgtgtcctggtcttatctgctactgctgaccagtagtttgacacaagtgggctgtgctaaaatctctgaaccacccaaccccccgccaccaccactcaccccacaccttgtcctgagctcagcatgtcactgcgtatgggaagtggggggcggggtggagttcatggccagatcctccaggtcaggtgctttgcaggctaaatcttacttgacctcctagcaattgggtgatgtagtgcccaggccacagatgaggatccagagagtaggagaggcaaagggttttcccccaggaacatgatggagccaggagttggacccagacccttaaggttccaaggtcttctcatcccctctcagtcgaggtcagctggaggggagaataaatgtgctgggggctcaggagttcttggagtcagggttgatgatgccactgacctcactggacttaacattcattcaacaaatatttgtcccagacaccagaagaaccaggggaagctccacccctagccccaggtgcctgcctaggcgcaggcaacactgcggatgaggtgggaccctctcttgggggcgtgagctagaagagcaggcattggccataggctctggcttgctgcagaggtgccttttgtctggcaaggggagcacaggtgggggatggggctggccccagccaggacattgtctgtgtcactcagcagcagactgactggcgcctgctgcctggccagcaatgctgacccctctgcctgccctagccaatatttgaggtcaggaggcaagtacagcatctgtgggcagacgacagggccaatggggttctcctccaggccttctgctgccactctgcttcctgaagccaggaggcccagttcaggtgctccgccagggctcccgtggtcctgcctgcaggggcgaggtagcaggacccccttgtttagcctctgctgcatccttagctgcagcagggagcctgccaggcaggtgtgcggtgagtacctctcgccgaggccccctaggcactcttgtgtcagggtggtgctgtctgagatcctggaggcatctcaaatggggaccctttcttaaccacagacaggcaggacagcgatgtcttcctgcatgacagaaggggaaactgaggcccagagtgatgcagcccgggacctcccaggacaaggtccaagctcttacctcaggtatggagtttccatgataactgtgggtcactgcagccccactgccgggcctggggtctgcactgtcactagcatccccagggacttgagggatggcacagctttgggaagaaatcctgcccgtggaggggtctgtgccctgccccactcggaccatctcagccctagatattagctagctgtgggccatctgggggagcatctgagaaccggg

SEQ ID NO: 56488 - DNA, 1301 bp, Homo sapiens
ctaccttgctttgagggtggtttggatgttctctcttccctctcttttctttctgcccccaacagagagacagttgtggggacaactgaaggggcttggtactggcatctggagggcagaggccagagatgctgctaaataccctacagggcccaggacagtccccacagcagagaattatccggccgcattgcaggatagagaaatcctgggacaagtggctgtggacgtccaggtgtggtcattcctccagccacagcaggctttcagaagttgtcctgagactgcaatgcaggggggcactgtactcaggagcagggtggtccccacctgggctgaggacagatctttgggaggcagcagtggcctgagccctggaccaggatgcaggggtcccggctctcgttctccctcattcccccactgctcaaatgtgtcactcctgccttgccacccccatttacttgtctgaggcaggagctgatctaggagctggggaaccactcacaggtcttgggcaaaggtcagtgcctgcatagacttggccagcacagtgtgcttgagcccaccatctcagcctcctcaccacggggattgtgcggccagggaagtgctggcttgcttccaggttggtttgggtgttttctatttcctctcttctcgtggcgcccacccgcccccccgccccgccctgccccaggttcccattgaaatgccggccaaaaggacagctacacaggcagttccagaccgcagccttccagggccctgctctgagcagctgcctgagagtcccaggccgggcgtacattgttccatttttggaattcttcgggagtgagagcagcctcggctgtcaacagtgctctgttcacagaggccggcccggcaaaggagagagggcgagctattgtccagggctgggctgcgggctgcaggaatgtgctggaatgccggcccgcatggcacagtcccagagcggggcctttgtgtgcaaacaccaccgggcagcagggccatcacataaataacgatgacctcacccccagatatcaggctctgtggtgggatggggtgggggcgggggccggcccccagaaaggagaccacaggggaggcgcacccttccccacacacagggcactgcagcagcctctgtgcaggaacgccagccagagtggggttggggtggatgtctgcccctggaagcaggctgcatttactgtctggggccaattgatacccctcagtgcctgagacctgggcatcaggactcagagcctcaactccaaagggtcctg

SEQ ID NO: 56489 - DNA, 1603 bp, Homo sapiens
ccgtgggagaggagaagagcgtcccaggacaccacccaccagagcagctcaagcccccaagccaatccctgccctggttccacaccccagcccccactgaaaccccggaggcaaagcgtcgctctagctcttattcttagcatcgaacttgctcccactacggtgggaataaggtacctggcgccggtgcatgtaacaatgggccgggggctcaggcggcaggttcattctgagaaccctccacctccttaagacatttcttgaggacttgggtttatgatgagtgagtcatggagccacataattagagataggaaaggcagctttgccagggcctcgacttggaccagaacgttctacttttagattcatggaacaatcacatctcactggacctgagacaagtgaggaaactgagccccagagaggcaaccgggactctcggtggagtacatggggagcagggacaagatgaatgggggtcccacatctccagaggtctggtgatctggctaatacatggcatcagaagtaccaacagctgtaggaagggaggctgcatctccagccccccaggaaggcatgggaccagtccagtctgaagaaggagctgggggcaaccctgagggtcagctcaggcctcagagcagaggacagctgggatcatgattggtttttttcaatctcagcctcagagcaatgctccaagaacaggaacctaaaggaagccaggctacgagatctggcacttgcatctgctcctggaagccagcctggcctctggaggcctgagaacctggtgccactgtgaggacctcatgccactgtgaggacctggtgccagtgtgaggacctggtgccactgggctctcgctctgggcttttcctttcagttatcagtctgcagtggagactggtttccactgccagggtgaggatgtttggacaccatgagaaccctctcgaaattccagggttttgaatttcaagctgagctgggtcccggtagtattcaggttcacaggaagttggcacaaatcagcctcctgcttatgatgggcagtggggagggggtcaaggaaagcctcttaggaggtcacaatgacatctcagacaccagcgagtgcttgtgacacatactgctgaatgaagtctgggtgaatcagaaacacgaggctgcatttcccttggaatacactcggggttaataattacatgagaaatcacttggcaaatccatgtggggtgttgctgaacccaaaacattcaagaagatgtttgactaatcccatccctgggcatggcccattctttccaagagggcaggggatggctttaaacaactatgggccacatgcttgcaacccacaaggcctggctgctttccaagagtgtttctctgcccttgaacatctaggaatcgagttcacctggggagaggggatttttttcccaagtgattctatgggaattgattacctgattctctggttctaaaacttcaacagcatctactgggaaaatgaggtggggggaacacggggcgggggacggggggaggtgaggtgggcgatggctcctgggggacttgttaagaaatatt

SEQ ID NO: 56490 - DNA, 7567 bp, Homo sapiens
attacggattccagtagggccgagcacactccttcctgcccgtctttacagatgaacatgctatcgctccagcagtacaacccgccttattacgtaaaaaagcagcccctatctacccgcagggaaggagtatgttcggcaccacagctggactggtgctcgagttaagcgtcctgggaggtccgcatgcgctccggaaccgtaatgcgcgctttttctaagccttacggtaaacgcggacgcagggcaaccacgtggcggtggaaccgaggcccggcgggaatgcgcggaatgcgcggcgcggcctcgcgcggttcccgagccacggcccagggtccggcggcgcgcgctctcgcctcctcccctcacctctcccagccgcaccccggccctggccctgccgcccagaactcgctgggcaagtcgtgccccgcgtgaacacacagaaggggcttggggaccgagcgcggcccatcagtccctcagaccctgaggacccagaattccctaaggggtccgaatccgagtcctgcccccagcccttaaggcacgggctccagggaccccaggggaagggcgcggggcattaggtacgcaacccgtttccccgcacctggaaaaaaactccctttccctcccctcccctgcttgttgagtgtccggataaccagaactctaaggcgccccgtaataacgaccccgctgtccctccacccacccccaagtgccaaagcgagggatggaagcgctttcaagcgttccaagggcattgaggagcgagctggagaggcgcggggatgcggggtcctccccgcagtcttccggaaagggcgggggagggcgcggcaagttccggagtggggcatgccgtgggagcccacgagggcctcagcgcggatcctccgccggaaaaccggctcccgcgagccgccgccgcaggtttcctaggccccgcgagtcccgcagcgaagccctgcgtctccgtccgacgcgggggtctgctcagcctcgggtgggccgcggccaggcctgactgcgggggagagggccgaacgtgacctccgaggtcacccccagccagctttctctcctgtggtcggaagtggttttcttctcgatctgggcgcctactccccaccacttggtctgagaggggctggggccggaaggccagggaatctctggtggatttgggggttcatattgctcagggtaccagccgatgcgttttgaggggcgggagtcgaggaattagaatcgcctttaaccctcaagagttgcgccttcagcctcgggatcccagatgcgtcgttggagccagggccgcccccctacctgttgggtttgcgttttaactccagcgcacaccttgccggcagccctcggagctaggggaggggtctcgtttccccgcagcccgccggacagacgactggggcacgggaggggcggtggcagggtggtctgtgtgtggctgaaactaattgatctggagcggaaacgcacgtctgcggttggggcgatggggggggcggtgcggctgtccatgtgccgagcgtgtggctgtctcgggtgggcactggggccggagttcgccccggcccacctcgcagttttggggcgcctgggatcggcgctacgtaagcgaagcagagctgccatagcacgtgggccgccacgcgcaccccaaaagcaagcagtgtggggggaaggggagctcgagcgccttcggagcccaggggccggctttcggaagcgttttcccgggcgacttaagggcttaacaatggaaaactcgcggagcctgagccaagtcctttcaagtcgccgccaggtatgcggctgcaggtgaccccacctgggtgcgcccgcccgccagccgccctggtggaaaagcgggtgcgggaggtcgctggcgaaaggtcgggactggtccctgcaccacccgcccccaacccaagccccgagccccgcggcgcgcagccgcgctgagtcccggggtctgcgtcgcggcgcgccggttcctgaatgaacgcgctcccttcccccgcctgaatgaaggttcccacagccagggacggtggcgaacacgcgcctgcagcggaattcgctttctcctgaccgaccatccgcccaggccgcggtcaccggggcgggggccagggggcgaggaaagcgtgaaggtgatttcagttaattttggattttctttcaaacaacgtggttaccctcccgactgggccacttgccctttgtctccaaatggtcaccaagaaataagaacagagcactttaaatgagcccagaatccgcagttcctgcttcgtggtgggttttaagaagacagtgtaaagtaaaactgcaaccgaaaagttttttaaagttgcttttctctttggaaaaaataaaatcaaaatgctttctctgcgcttcttgaagcaatgaccctcaaaagcccagaggtattggccccctcgggggacccgggggccgccaagcagggttcccccaggtgggggctgggcagctggcgctccccgccgggccccaaattccagcgccgggccccaaattccagcgcctcccccgcgggttcctggacggctctttacgctcgctaaccgggcttgcaattttgcgctcgtccctgagccgggaaatcaacgaagttcctagtcgagatctgcccggtccgcctagtaacagcgccgcgcccccattggctcatgctaattccagtttcctctgtcttgcgcccgggatgggggggtgaagctccctcctggacccagagccggttgtgccggagtgggcgagcctctttatgccctgctgcccctagccgacttcggcccgcttcgcgcctcgggctgggccagggcgcacgcggggctcggggcccctcgccccacgggatgggagaggccgggtgatagctccgggccccataaatcatccaggcggccgccgggtcgggattttatgaatgaaaaagcagctgggccgcccttgtgcgcgggctgatgctctgaggcttggctatgcgggggccaacgcgattgtgggtgctcggggagtgggggggggcacgaccgtaggtgctccctgctggggcaacccatcgctccccatgcggaatccgggggtaattacccccccaggacccggaatattagtaatcctaattcccggcgggggagggggcgcgggaggaattcaccctgaaaggtgggggtggggggggtcgcatcttgctgtgagcaccctggcgaaggggagagggctttttctatcagttttctttgagcttttactgttaagagggtacggtggtttgatgacactgaactatattcaaaaggaagtaaatgaacagttttcttaatttggggcaggtactgtaaaaataaaaacaaaagttaagacagtaaaatgtccttttattttttaatgcaccaaagagacagaacctgtaattttaaaaactgtgtattttaatttacatctgcttaagtttgcgataatattggggaccctctcatgtaaccacgaacacctatcgattttgctaaaaatcagatcagtacactcgtttgtttaattgataattgttctgaattatgccggctcctgccagccccctcacgctcacgaattcagtcccagggcaaattctaaaggtgaagggacgtctacacccccaacaaaaccaattaggaaccttcggtggtcttgtcccaggcagaggggactaatatttccagcaatttaatttcttttttaattaaaaaaaatgagtcagaatggagatcactgtttctcagctttccattcagaggtgtgtttctcccggttaaattgccggcacgggaagggagggggtgcagttggggacccccgcaaggaccgactggtcaaggtaggaaggcagcccgaagagtctccaggctagaaggacaagatgaaggaaatgctggccaccatcttgggctgctgctggaattttcgggcatttattttattttattttttgagcgagcgcatgctaagctgaaatccctttaacttttagggttacccccttgggcatttgcaacgacgcccctgtgcgccggaatgaaacttgcacaggggttgtgtgcccggtcctccccgtccttgcatgctaaattagttcttgcaatttacacgtgttaatgaaaatgaaagaagatgcagtcgctgagattctttggccgtctgtccgcccgtgggtgccctcgtggcgttcttggaaatgcgcccattctgccggcttggatatggggtgtcgccgcgccccagtcaccccttctcgtggtctccccaggctgcgtgtggcctgccggccttcctagttgtcccctactgcagagccacctccacctcaccccctaaatcccgggggacccactcgaggcggacggggccccctgcacccctcttccctggcggggagaaaggctgcagcggggcgatttgcatttctatgaaaaccggactacaggggcaactccgccgcagggcaggcgcggcgcctcagggatggcttttgggctctgcccctcgctgctcccggcgtttggcgcccgcgccccctccccctgcgcccgcccccgcccccctcccgctcccattctctgccgggctttgatctttgcttaacaacagtaacgtcacacggactacaggggagttttgttgaagttgcaaagtcctggagcctccagagggctgtcggcgcagtagcagcgagcagcagagtccgcacgctccggcgaggggcagaagagcgcgagggagcgcggggcagcagaagcgagagccgagcgcggacccagccaggacccacagccctccccagctgcccaggaagagccccagccatggaacaccagctcctgtgctgcgaagtggaaaccatccgccgcgcgtaccccgatgccaacctcctcaacgaccgggtgctgcgggccatgctgaaggcggaggagacctgcgcgccctcggtgtcctacttcaaatgtgtgcagaaggaggtcctgccgtccatgcggaagatcgtcgccacctggatgctggaggtgcggggcttcgggcggctctcttaagacttccctgcaacttgttgcccagacccacgtttctttgctactcacccccctcccttctctcccgctagaactttgaagtttgccgtggtgtttctagggatccgtattttcaaaataaaaattgcgggtattttctgaaggaggaaggggtgggggtgggggtgctagaagtagcgtttcgtgggaggggagaagggggtccgggaggggtgccttcgggagaagccagtgccaggggcaccccaatgggcccgagggtgcgggctggcaggctgggtgcgctttgtgtcccccgcctgcgccccagcccggctgcgcctcagcggccgggagccgccaactccggggggagggggcatagatttgatttttaaattaatatccatggacacgtatgcaagggccgctcgtgccagtattatgcgccatctttgctcttttattgcaaagcaaaagtgtttattaataattgggggcagggtgggggcggggagcggccgccgggcgctggggccgcagctaagggccgcgcggctgccgggagcccgcgggaggggcgcagggacgcggcatgggtagttttggggggacgccgctagggaagggggggcctttgttcaagcagcgagtcccggggcgccccgaacgggcagcctgggccggagagcacggcgagctgcaaggtcgcgtggcccccaagacgccagggcttgatccccgtctgcagggatatcggcttggaggaccttctccgagcgagccgggggcctgggagcacattttcagaccttcggtgggcgcctgaggggcccgcaagtattttaaaataatttttgaaagtgcggcgtggtgcccttgcgagagggaaacgccgcccgcgcccagggggaagggggggccccggagtttgaattcctggggctccccccggagcctgtaacgaactcccaacccccggcctgggtaaagggtcgcccgagggtcattttcagggtttttttatgcacttagttatttttttaatatttttaaatattttttgaaaagatgacgtctggggaaatgcggcgcggcggcctgggacgccacctttgtgtctcgcaggcgcggcgcccaaccccgcggcccgttccgcggccccgcaccccagttggtgtcgacccccagtcagagggaccacggagctccagggcgggccagggtcccgggggccggcagcccgcgccgccgcgcacgccgcccagctgtgcccgctcccgcccccaccgtgccagcctcgcggggactttccctttcagtttcggggagggtgggtactggggacgcgcgggggagggggcgcatcacgggaagctcctgccgcccccagccccgacccctcggcgccctccagacctggcggccctgccaagcgcgatggggggtgcgggggcgtgcgggggggcggcgcgacctggcggcggcggtcacgggccccgtgcctccgtaggtctgcgaggaacagaagtgcgaggaggaggtcttcccgctggccatgaactacctggaccgcttcctgtcgctggagcccgtgaaaaagagccgcctgcagctgctgggggccacttgcatgttcgtggcctctaagatgaaggagaccatccccctgacggccgagaagctgtgcatctacaccgacaactccatccggcccgaggagctgctggtaaccactggaccccgccgccccccgccccccgcgagccgcacgcaggaccacggggccggggaaggtgcaggcggtggcggccggcccgcctctgacatatctgctcctccgagggagggcggccccgccgccgggcgtccctgtccggggagcgggcgggatcctagccgccctcgtcccgccgccctgtgtgcgcttgcctgcgactcccaccgcgttcgcgccccgcggtgtggccgaaaagtgggcggcgcgcgccctccagcggctgcacgaggagcgccgcgctcggcgctgagcctccagttccaggtggtgggaggtctttttgtttccacttgcagagtcttttcacgcggcgggcgccttttctgttttgatctgggattgcgtgttgccccagctcccttgagtccccagcattcgccagccctcccctccaacatccaggaccgcacgagacgcaggggccagtgctctgagccggaggtgcggcgtggcccggcccccgtgctgccggcttccccgcgcccccgggctggcccgcacctcccctgatggccgctcaccctgtgttcgcagcaaatggagctgctcctggtgaacaagctcaagtggaacctggccgcaatgaccccgcacgatttcattgaacacttcctctccaaaatgccagaggcggaggagaacaaacagatcatccgcaaacacgcgcagaccttcgttg

SEQ ID NO: 56491 - DNA, 919 bp, Homo sapiens
accccagcgtggtgcctgcctctttgcttcctgggctggccgtgagccagggacgcgtgtcctggtgccctagaaccagggcagggtggcaggcttggcggatgtgggaggccgcagcctgtcctgtgcgctgtgggaagttcagcagcatcctgacctccatccccgggatgacagtcacgccacccgccgtgacaaccaagaatgtctcctgacactgccacatccccgggggtggggacagaatccagccaggagcaggcacacccctcccaactgggaggaagccctcagcacaggtgtgtgaggtgggaggcggtgtcctgtccccgggaggctccagagaataatttgcaggctgcctggctgggtgagcccacctccaaccacgcgagacaacagctccggcctgggtgacgtgagcggtgcccattgatggggaacatcttccccctcttccttgccccaccagtttgtcttcccgggttatttgcagataggaaaataaataaagccggcattcgttaaccctcttctggcgcaaactgctgtttgctctggatgaatcatggtcctttggcgacgccaggctccgggagagcaaagcaccgtgtcagggccatgatccggggtggcctttcactgggatcgtggggacctggaggccgccttataggacacccatgacgcccacctctggatttcaggtgcacgtgactggacttaacttcaaaccccagggtggaggcaggtagtgggagtgccctgggaaggtgtcctcggaccttggtcactgctcctgaacccatctgtgaggctggtttgtcctcatcccaagctaagtggaagctcaggtcccaagccaccgatgggtgctacttgtcagctgcaggttgaatctccgtggcctttatgaagc

SEQ ID NO: 56492 - DNA, 1399 bp, Homo sapiens
agcactgaccctgaggcccaacagtggaactgccactatcttaacctgcagtcaccaaacatgcaaggagtgggctgcagcgccccatgaagcagggtgcatagctccccacttaatagttgtgtgaccctggaaagtgactgtgcctcctagtctgtaaattccgaagaataataggatccacttactaagtagggctgaagtagataaccagggtggaacgtttagctcagtgtctgactcacagcgcgagctaaataaacgtcagcgcctgactgctaaatgttcggccgctttcttaactaacatctatggacgcgtcctctgggccgggcactggaagtcagccaggaggcaactcacagctcccccactgtcgcagcacgaggggctccccaggggctctggagggaaaaggggtgtggtcgggtacatctatcagcacatccatgaatactgccgtatgtcctatgattaaggaaccagaaaaaaaggcagctcccagatggcaaaggtctgtcctcccagaggacgaggcggcctcggaggaggggaaccaccaggctgagcagatgtttggggcagccctgacagggaaggcgggtctggaagagcagctgggcacgtgccccgccggagcgggccaggagaagaggaccagagcatcaggcccacacttgtccctgcgtccacggccaccaggcgctccccaatgcgcacgcccaagggacgccaggctccagcagccgccctgggccgcagccggcggcgaagccgctgggagacgaccagacagggcggggtgcgggcccggcctcaccacccacctctcatccgccatcacgatggcatcgaatatgtcctgactgccagccatagcggcaagcagcccgcccttggcccccgggtttctgcagccccgcggtgccgtagcagacccggcagcttcaggcacaaatgctccgcttgggaggagacgagacccacttccggaagcggcggcgcggggcaggccgggtaagaacggcacgcgggagggcccaaagcagcctgtacatggcgcatgcgcggctgcagcggtgggcggggccggcctcgactgaagccccgccctggggtcctttcgccctgcccagctccagcaaagggcctgtctgtccgcgctgggagcgtccattggccgcgcgcgtggagagccgacctgtattttaccactgcagatagaaccgaatttcccaaagtggctccgaaagaaccaaggaagaaatgggaagtcatcagctggcgcggtggctcacgcctgtcatcccagcactttgggaggccgaggcgcgcggatcacctgagttcgggagttcgagaccagcctggccaacatggtgaaacctcgtctttactg

SEQ ID NO: 56493 - DNA, 2694 bp, Homo sapiens
ccccagtcctctaattcctgtccccagaactacccacagttttattgttttctatacttctttccagagaggttctctgcatatataagcatgcatatatatatatatcttttttaaattattattttgagatggggcctcactctgtcacccagactggaatgcagtggcactgtcatagctcactgcagccttgaactcctggactcaaggaatcctcccacttcacttcccaagaagctagaactacaggcatgagtcaccacacctggctgatgtttacatttttttgtagagatgacatcttgctgtattgcccaggctggtctcaaactcctggcctcaagtgatcctcccacctcggcctcccaaagtggtacatgctcttttaaatgacaaattatattatactatagactgtgtcctgaatttacttcttctactccacaatataccttcaataacaaaccaactgtgaaattgccaagactcaatataacaaaggtttatttatccactgttctcctccaagtccagcacaggtcactgggggttctgctccacgtggtcacgcagggacccaggcctagaaggttcaccaggttgtgacacagtcattgcaacctcttccacgtggcttggtagagaaacagagagtgtgaagaattcacaactggtttttggttccctttttacatagacatttcaaacatacccaagtgtagatagtgtaaacagacccccatataccaatacccagcctcagcaaggatcaatatttcactgttcttgttccaacaatgacctcattccccacgcccaccatttttgctgagtcatttcacctgtacatacttcagtgcatatctaacagatacagagtttttttacataaccataatacatgatcccacctagccaattaacaatataattcagtttccagaccatttccatttgtttcaacagttaaaaactgtctttttaaagtgtttttttttaaacagcctcactcataagacttcatttaactttaatcacctttcaaaggtaatatcttcaagcacagtcatactctgaggtgtactagaggtcaagtttttaacatgtgatttttgggtacacaattcagtcgtgtgtgtatacacacacacacacacacacacacacacggttttggaaaaaacaaactcaaactgaagaaaaaggttatagtaaaagttctccttcctaccctgtctccagtcctctaattcctgtccccagaagcacccacagttttatcgttttctatacttgcttccagagaggttatctgcatatataagcatacatatgtatatgccttttttttctttttttttttgagatggggcctcactctgtcacccagactggaatgcagtggcactgtcatagctcactgcagccttgaactcctggactcaaggaatcctcccacttcacttcccaagaagctagaactacaggcatgcgccaccacacctggctgatatttacattttttgtagagatgacatctcgctatattgcccaggctggtctcgaactcctggcctcaagtgatcctcccatctcagcttcccaaaatggtacacacccttttaaatgacaaattatattacattatagttggtgtcctgaatttacttcttctactccacaatataccttcaataacaaaccaactgtgaaattgccaagactcaatataacaaaggtttgttaatccactgttctcctccaagtccagcacaggtcactggaggttctgctccatgtggtcatgcagggacccaagcctagaaggttcaccaggttgtgacacagtcactgcaacctcttccacatggcttggtagagaaagagggagtgtgaagaatccacatttggcttttggttttcttttcagtttctattatagacatttcaaacatacccaagtgtaggtagtgtaaacagacccccatataccaatacccagcctcagcaaggatcaatatttcactgttcttgttccaacaatgacctcattccccacccccaccttttcttgctgaatcatttcacctgcagatacttcagtgcatatctaacagatacagattttttacgtaaccataatacatgatccccctagcaaattaacgatataattcagtacccagaccatttccgtttatttcaatagttaaaaactgtctttttaaagttttttttaacagcctcacccatatgacctcatttaaccttaatcaactcttcaaaggtcatatctccaagtacagtcatactttgaggtgcactggaggttttttttttttttgagacggagttttactcttgttgcccaggctggagtgcaatggcgggattttagctcactgcaacttctgcctcctgggttcaagtggttctcctgcctcagcctcccaagcagctgggattacaggcatgcgccattatgctgggttaatttttttgtatttagtagagacgggcttttaccatgttagtcagggtggtctcgaactcctgaccttaggtgatccacccgccttggcctcccaaagtgctgggattacagacatgagccacagtgcctggctaagtttttaacatatgagttttggggccacaattcagtcacttatgtgtgtgtatacacaccta

SEQ ID NO: 56494 - DNA, 887 bp, Homo sapiens
tcctggcatttaaaaagttcctgggtatttcattggcactttgggaaacactgataaactgggttgtcatcttaggataggtcttttaaataaattgcgtgtgatccgatctgggtcccagatgaaagcatctgttccccacctatctcagaaatcactgtgtgcctttatcattctaaggccttctggtctgcagcagttctgagaaccatcagccccgctgtctcctccattcagtcaccaagggccttccaggcaggctgccaggaggcagatctcagcagcccctcccccaggccaggccaggccaggccggcgcccagctggtggccggaaatgtgtgctgagggaagccttgtcttagaacattcatagtccacggggttgagaggtgccagtgggcaagtgccatcccacaccggtgtcattaccccttggcgacccaggacaggcgcaggcgggagccggaagggctgggcagtaaacacactgcaggacggcctcagtcaggttcctgcctaagtctgcaaaggtcactgaactgcaggtgggtgacgaggtacctgtgctaataagctcctgataagaggctcattgcagcaacccaggctcctgccgagcccacggatggctgggacaaagcatcggacagcaagcgtgatttctcccaaactcccaaaaatgccaaatgatcaataaacaaggaacacaaaaccgaatgattggaggaccttcttctatttacttggcttgtcctttgggagaaattagtatcactttctccatacagaaaacgaaatgacttcaagtttctagaagaatgtggcatttttatttaagaaagaggccaggcgaggtggctcatgcctgtaatcccagcactttgg

SEQ ID NO: 56495 - DNA, 2948 bp, Homo sapiens
ctggagcaatgtctgcatagcctctatgcattcagcctaaaaccaagctcctttggccggcatgcaaggcctgctacaaccaggcctttgtcagtcaccccaccagtgccctccaccccatgccttcccccacacactgctttagccacactgacactttctctgttcctgagctgacaaatgtgttcttcccacaggtctccccaggctcaatgtccctcgccttcgcctcccaccatcgcccagcttcactgtctttaacacaccgaccacaatccgaaaccatcctgttgtctgtgtcgtcattacctgcctctcaccaagcacagattcactcaggatggggctatcctgttcaccagtctatgcacagcgcatgccacagagagggctttgaaatgagtcaatcaatcaacggatgggcttattcctcccacagggcatgtgtgtgtctattttatgatcacgtgggtagcagctggctgcgaaggggatgagcttggacatcccaccaccgttttcttccctctgcttgttcctgctgccacagcccatggggtcagatgatcaggtgtggtcctagccaggtcccgagcgtgtctgagtaacagggagcgaggaatagatcaacacaggcttagccacaggcggctgtaccaggcattcacgttcggcccccttccccattctgatgctccatcagcatttccatggcagggaagcagaggctgagaggagatgtttcctgagcttttctaagcactgagcacgggctgaggccttgccctgtgtaacactttggccttttccgtggttcctcgcaacagccttgtgctgcagcagtggctggtggtttcatgagttccatttatcggatgagactcagcgagacctcaaggcttgtcctcagccgccaggccagggactcagctggatggcatccgggccagtgactcccactggctctttgcccgggccccactgctccagctgccccatgcgtgacctggtcccaaaaccttgtccagcctggtgtgtaaacaggcttccctcacggctgaggccagtttgatgtgcctggcacagggcctgacaccagcatgtgctccgccagcagcagcgtggtgacatcatcatcgtcatcgtcaccatcctcaactggggagtttgcatctgactcaaagtcgaactcgccctctggaagcgggagctgtttacggggaacagaagagcaaagcccaggtcctgagctgccaccccttgtatggggacagggacccaggcccttgtgggcacccagggagtctctggcccaccccactcatgggggccgtgcacctttggaatcccttgtgccttgccccttcttccgtccaccggcagagctaggtcccacataaaaaagggcttgaggtgggcgagcgcctgcctttgtcatccagtgccattaaggccggaatttctcatgggaaaaggagcattttggctgcatgaaaggtgggggggtgcagcacggcctgggttccagggacgcccgacctggagccgtttgaagtccacccgttatctgccgctggggctgtttggcttctgtgggggcataaacagggtgattgaagtaggcggttgtgtctttccggacgacaaaagtccccttgctaattgccacatcaaatgatcgggaaccccccagtggaagccctcaaattaccgtgaatactcactgctgcctcaaggccgccgcggagcccccaccccgggcagccgccccgcgcaccagctcgggttgcacgcgggggaggcacaggaaggcctccgaggatttgttctgcttggctgccggctcgctatgccagcccccagcccggccgcagccccctttgtctctggccgccagagccagcacacaggccagccgcacgaagtcccccgcggtagagggaggtcttctctctgtggccacgcttcgggacagggtccccgctcagccccagcctccgcaccttcaaggaaactatcacagagctgaggtcaccttgtgcccatacacaccaaaagcatccaagcacacagtttctttggtctctttgttgtccctgcctggtgggaagacgtggacacccactggtcagcacccctcactgtcccacgcctgtaacaggcacccagtgggcccggctcctttatcaatccggggatgcacttctctgcgcgctccccgtgctggccgaacccttcacacctgttgccttgttcaactccatcagtcattaccccatttaatagaggaaaaactgagccttggggaggtcaagtgtctcaccccaggaccccaggacatgctccccacctgtgctctctggttgctcttgggcaggcaggggagagaccctggtcactcagtggtgaaaactaatcctgccctaccaccacctgggtgatttcagggttgtgcggccactgctcctgaggagcacacggcccccagtggccctgtcccaggctggccacctcctgaggcctagcatagattacccactggggtggccctgactacccccaggccagcttcatacccacctggcatccaatgacaggcaacacctgcctcagtcctcactcaccaactctcagcatgatgggagatgataaaacgacagaaatgggtacgatgggatccctggagcacaggacacgaaacagagccacccggcccctctgaaggagagcaggtgttagccaggtcaggggtggagggaggaaggccaggaagccagggtgtgccaaggtgccatggcagcagagtggggcctgcagccgcagaggatggggacgaggctgtgaatgggctacagcagcggtggcattttctgcctccagcagacgttttctgagtagccgctcatgcaggtggcctctgccgtgccctggctggcctgggctgcctg

SEQ ID NO: 56496 - DNA, 2568 bp, Homo sapiens
agagggacagctcgagaaatgaatgtgagaatgggactgtgtgggaaccccctggagaatccacggggcaaatatctttatgttccaacccgatttcctcttgtggaatctcgactataaaatcagcaacacagctgtactaataacaaaaaaaagcatcaatgttcaaccacctatgctgtgccaggctcagtgctaagcacttcattctatgaaatcttctggaatcttctcaatagccccacaaagggggctctgacacagcccctattttatgcaaaccaaggctctgaaaggctcaagtcttcccaaggtgatttagggcacgcttgctgaaataataaccaagacatttatttggggttaaaatcctgatattccagactgaaatagctgcccctcacatcctcctccagccctgcacccatggccccgagccccactgtgggtgaaagagcaggagggccctccctgtgaaacagcgtcggccgcttggcaggggtattgctctgccctgagttcacgctgataacgcgcccaagggcaatcacatcgtaacagcccggaattgttctcagtctagaacggacaataaaccgcccgggcagaatgtctcctcatcattctgccgccagccaactggctccaagagttgtcatcttgaatttgtgcccaactcaaggtgccggcccaggctgggtcacggggccacagggcgctttccaggaaggcacgcagaaggcattccagcacgagaaggtgaagcagcgcggaggttattgacttgacatgggtcattttgccccggcgtaccccacgggatactgctatcctatatctccggcagggcattctctgggcaaacaagcccacagccataaatggtggcctttgcacacccggaatcgctgcctcatggtgtttggatcactgacccggtttgtttatttattgagagtatttttagctcgcccgcggttacccccggggtcaccaattttcctttttaatcttctctttgaatagaaaggaaatggacagtaaggtgcctgtcactcgaacgctggggtaagtctggggcagtgcatacgccaccgaggtcacactcacgtcagggacgacactgccacagccagcaaatctcactcagccagccctcgagggcaccagtgtgtgagccgaccccgggcctggccagagaagagggtcgcggtgtccgtgcagggattcaccgagagtccagaccccagaggggcaagcggtcagcaccacagtctcgccccgcagcgctgaccgcagggtctatggaacccattggcccccctgcaagagctccagaggtgatcccccacatcctgtgagagatcaagtgtattccagagaagattcccaggtcgctccggtttcctcccagttctggtgtccttgactactggctctgccatctaccaccctcatgcctcagttttcccatctctaaagtgggggctaacaagagcgtctactccataagtttgtccagagaggtgagtggggcgaagtgcgcctgtgtgcagtgaagcgcgcctgtccgcggtggagcgcacctgtccgcggtggagcgctcatgtgtgcggtggagcgcgcctgtgcgtggtaagtggtggtgattgttgctaccatcgctgttcccatcagttcccgccacatgcatctgtcaagggcccccaggaagcagatgacccacccccaggggtgggcgagatcaggaagccaggaaaggatggttggtgaagccccttgttattgtctgaggccagaaggaggcagttacagaacccagcaagagagggagctgtccatggagccggatgggagctgtcgtggctgtgcgtaggggaggcacacactgccccctgcggctgggcaggaaggaagccagcccctctctccttcccagctctgatcggttgctggcaacccccactggccgcttcaagtggggactccaaagccaggaagctggggaaccagctggtctcctgcggcagagaaacagggtgaggagtcggggctggacctggaggggcaggcggagagtgactagcagagtgagtgtccagtccctccctgtccgggtgcctttctgtcagccacactccaggttctgcagggaagaaaggctctgagttggggtctggagaggcccgagcctggcacctgtggccaggctgggtcattatcccctgaagggaagcagggctgggctgaaggtggggagcctccctgacctgcctaagcaaggctttgtgcaccttgtgtcaataaatccaagagcaggaacgtatgtcatcaagcggctggcggtgccatctggccaaagcaggaggcagcctctgggacagtcacatggacgatgaggccagacagggctgcacccctccctcggaaaccagaagcactgactgcctttcagccagacatccctcagtgatgctgaacaacaattaggaatcaaatccccaaatgtcctcctggcctctttccaacaggaagagccgcccggccttccctttttgcaggactggg

SEQ ID NO: 56497 - DNA, 981 bp, Homo sapiens
aaagggagggagggagagagagaaagaaagaaaaagaaagaaagaaagagaaaggaagaaagaaagagaaagggagggagggagagaaagaaagaaaaagaaagaaagagaaaggaagaaagaaagaaagagaaagggagggagggagagaaagaaagaaagagaaagaagaaaagaaaagaaggaagaaagaagaaagaaagagagaaagaaaaggaaagaaagaaaataataaacatggacaatatctcacaaatacttagatatcgatttcatgttgaaatgttaatatattgggtttattgggttaaacaaaatatagggttaaaattaagttcacctgtttccttttacttttttattgtggctagtagaaatttttaaattacctatgtgaccagccccaggaaggggaaggtttgaaaggcccccttgccctggtctaaccccaaccaacctttgctatcctgcctgagttgcggccaccagcacacccctaccatcctgcacccagacggcaaacacaaatgctggagtgaccaccgagggctgggattagactacaggccagctccccagggctgcggaagcagaatgagtgcccagctggccagccggggtcagtgaccagcagtgtatggccccggccaccactggggtgcctgctagctgctgctgagtcataggaacaagaaatttcttggccaaactacaaggaaactgcttccccacggctggtgtccctattttgacagtggtcaataggtcacctgccggtcacgtccccaggaaacccagacttggaagctgtcacagatgcctggattacctccactgccagaaaagggtgtgtgttggagggggtgtctttcacaatatatttttaattttgactacttcagaaaagaacaaagcaggccagttgtggtggctcatgcctgtaatcccaacaatttgagaggctgaggcaggcagatcact

SEQ ID NO: 56498 - DNA, 1243 bp, Homo sapiens
gcctagctggcctctgctccaccccaggcctggttctggagcgcgcgtgtagaaatggggctggctgctacggcgggcttatctgggcctgcagggccgccttatctcccacagcttctcattgccagtcactggtttatgcttttatgagtgcagtttgctccttctagggaagcactgagcgatctctgaaggtgcctggccatgggggcacagggttccttcctcctaaagcgctggtcccatgccagccctggctctgcagctgctgtgggtatcttgcatgggtgagtgcctgagtggaggctgtggtggtctcaaggggcttttgccagaagtgatcagaagaggagccttcaggagggaaaccccaggtggcccccacaccttcttttgtttgcccatttgatctgccccacaccggacacactttgatctcaccagcccagtctctaaggtcctgcctgagagggtgggccaagtcctgcactggaagctgggaggctggaatcagatcttcacactgtgcctccactgtcctctgagcctcagtttcctcacctgtaacatgagcagaaagtttgcagccacctcgcctggcaggatggccatggggaaccacaggaggggagggggcagcgtcgagggtcccatggccagccagcatgggccaacccatgtgtcacagttcatagaaggtcttaggagcctggtccctccccctccccctccccccaggatgtttgtagggtgaggcaaccggcaggtgcctggttaagccctggggtctggagagcggtttctaactccaggcccctgtgagctgccaagacctccacctcctccctagggcccccgggggtctgtttgctctgtctgcttttgagaatcagattataatgggagcctgggtcagtttctggatttgtggcctcaggacctcccagaaggagcagagctgaaggccaagagcctggctcctgtcctgtcctgtcacttactgccctgtgaccacaggcaggtcactgcacctctctgagtcacagctttctcatcttccaagcggggagagtccttgaaacaggctgcaaccattagattcattcattcaacaaatatttgctgagcatctactatgtgccaggcatgtgtgctggggacacaatagagatctaaacagacaacaaacaagatattacttttaatgacaaaactgttttgccattcattttaatggcaaaaa

SEQ ID NO: 56499 - DNA, 3656 bp, Homo sapiens
ttgcatgattttctgctgggtggaaatggtgtgtcttgtagaaggagcactttgatctgacttgcataaagttgccacaactctagaagcaatctagaggcaaagccacctttcgtgtgagctcaagacagaattcagaagcctagaggcagggaaacccacgcgtccagattccatccttcccaaatgttctacattgtgaaacaaagagatgaaaacccggagaggtcagtggtcccgttcaggcccattgaatactctgaaacattggggcaaccccaaggctctgagcattacagctcatggaaatctcccaagggcctcagctctgagtgacacccatcccagttcacctgggtgttccttggcacagggaaaatggccggcctcgccccatcccatggcacccacctgagctgaccggctcggccctgcagccagcgatggccatatccaggccacacgccccaacctcctgtacttcaggatccttcgagaactttcttgaaatccctggagagtctggttctgtgggtctatgaaaggccctgggtactggtgcttttttaaaactccctggtatttttgactcacagccaggtggagctgcggttcctcctggttgccagggcagcctttgcccctcacagtgagcgtgcacgtggcgtcccagagcctgtgctgggtgggcaatgctgagtccacagacagcctcagcgagcccccaccctactgctctcctagacgtgcccacgagtgagtgcggagtagcttccccagccctgctccccaccggcctccaggtcctgggtcttccctgctgatctgagcccctccattgcctgacaccagcgaagggggcacaacttcacactgggctcacttcgtcaaggggaccctgagtcaccagggtgtgtccagagaacaaagaccgggcaggggaggggcaggacaggacagggtggctcaaacttccaggagcgctgggctggaggcctcctgatatctgcgaggctgactcacggtggagggagcagccggctgtgctgtcctcatgagcaggagtggccgtgataagggacagattttaaacgattagagaaagagccctctggcagcctgtgctgcccggcctcctggaggaatgaggccccatccctagaagcgtgccaataaggaggggtgacggtgacccacccgaaagggggatctgagagagtgtaatgaagggactattataaaaggtgtgagcagagaaaggggaaacccaaggaagggggcgtgcccagagcccccccactggcagcagcaggtgggagctgtggagtctttcatcccaaagggggccgaacaggctggagccaggctggaggaaggaccacccaggagaagccacctcctttagcaaaggaaccaggccatggcagacagggagccagggacacattcctcaacttctctctcccctgaaaattattctcccatcagccaaactgaacagaggacacagggcaaggaggatgtgggggcatgcacagccctgtaggtcagcgcccagggcacagggctggggaggagggtggagggtggctcttagggacctggggtggcccattaagtccactgctgggaagaatttggggtaaaccaggccctggctcctagcaggatcaggatgcggagcagaagctcacggatgtggccatcttcccgggcacatgcactgctttggaattggccatcggggcttatgggtcaagttggacttgctgggtgatgtcacccccagtgcaaagaatcaggctccccaccggggacttcttggtgactcacacaggccagccctctcccggagtggtgaggcagctctttggatgacaaactgggcaggaacaatgagacagtgtgggcctgcattcctgagaatgaagggatttcccttccaagtgcaaggctgtcctgtgctggcctcacccatgaccctactctgcctctgggtgctgcagtgtggcaggtgcccacactggcccccagaagggctggaaggaggcagggaggctggcttattggctcaccattcagcccatggagccaggagaccctgagagtgaccgagggaccttgtcgaacactttggaaagtcacaagaactggatgcggctgaccaagttccacaggtcatgggggaagagagagagagctgtttgcttcagcaggaaaatgcatcccaggaaaacaaagtgccgggtccagcacccacacacgtgcagcccatggggatacgactagcagaatgactaggacccacctagatatgggtgcagtcgcttcctaaacaatcgattcattttccaattcattgtaccatcattgcccatcttagctggaagcctagactcttcctcctgaagactcacccactgatgtagaccgtccaagaacattaggacttacacagcccataggattcactctgatttccaagccaaagacagagggcactagaccatcaatccacagagcccctggtttgaccgaggttgtttctgttgccaccacagggtgtcgctgttgaacactgggttgtgcatccaggctccctgccatggggggacctgctcaggccctcctggtgccccatgcttggctccaaagggctgtggattcaaggctcgccactgttccccatcaggagcccccatcgctacataggcaggaccaactccctgcaaccttgtgctcagctgggaagccggtgggtggggtcccgttgagcactgtgggttctcagggccctctactgtccgtgaacctcagttggaaccattctagtccatccaagagtctcttaagggggccagggctcctactcccatcccaccaagaggctccttgctccctggacagatctggccacgtccttcccagcaaccagctcaacaggggtcctggagagaaggagattgtcaggcacagaaggttctgctctcatcctctccagaccccacagacctagcctttctccacgccaccactctctttatccctccagtcagaaaagcagatagcaccttcccacccttcaccacaataaaaaaaagtgacatttcactccacctgacaccctgccagttggaactgaagtctgacgctgatgataacggcctggatcctgagttctgggagtaggaccctgggttggaggtggaggaggagtaggggaagctgggcagggagaggcaccgggggaagggaagagaaagaggaggaagaacaagttctcctttcctcaactcaggaccgcactattaggaacattttgaaacagaagaaatgggactttgtcctccttcctcctttatttggcagttttgtttgtcccagtgctgcttgctcaagctcccacgggtagcactcaccttcctccgtgtcctgggatcccagacacaccccaagagagcctgtcccagcagtgcagggcatcttcatttgggtgttagcaggaaagcacactgcacaaacaaattcacactaaagtgagagtggctgatagatagtgacccctctaagagctaggagcattctctacagaagtggtttcagagcctaattattcactaattggtgggcttcacacccaagtcaaaggaaacatg

SEQ ID NO: 56500 - DNA, 3324 bp, Homo sapiens
aagcaagttccaaaggcagaggcagacagggtgagcatttgcaaaaatgagcaaattcgctggaaaagaacggatttttatttttggtttgttctcgacgtgtcggagagtcaagacagagggaggaggaatgtgaattaagcaataaaatgtttaccaaggagccctcgaatgactccggcgtgctgccaaagttctgtgatccctgaactgagattgttcgaggacccgtttcttcctcggtggcccccgatggccctgctgagatgcagggatgcggtggcatcgctctgtcattcctcaggcagggtcccttcccagctggtctgagccactcacacctagagggcatgagcacttggacctccaagggcagagggggctcagaggccagcctccacctctctttcgtggacaggatttctgtccaggagcagcagggaatggtactcctatgccaactacacagcccgcggactttggacctagccttcagtatgtgctggcagcacagggttgtcccttgagggagccctggcaggaccctttgttgcactgttggaagctgcaccctccagtcttcactcctttgtcactaacctctaggttctcagagcctggattacagctccagcctctccagagaggagcagttagatatgtggcagtcagtcacactctagtgtaaatgaagccagccgtggtctttcttggtggctgctgcctgaatggaagtgggatccccttcaggatgttagacagccacgggactgcaagggctgcagggccacgggagggtccctcataggggccggggtgcacagctgccggtggaaagccgtgccccttctcctgctgtccccaaagccccagggaatctccttcggagccatgggtagccttcctcctagggcagaggctgagaagggtggtaggagaactacatgatctggtctgaggtgtggctggatcctggtgctgggactgacctggggcaaatctggggagtctctctgcactcagctctctcttctggaaaaatgggaatgagactcctggaaggactggagtcaagcggctgtgctttctctggtgatgttcacggtctgacgctggagatggaagaggcttctatctctggctactgcccccgtctctctttagactaggaacctgagcatccagctctcctgggaaagtgcatctctcctgccaagagaagttgtgaaatgcggctgccgggtcgcagggtaaagagaaagaggcagtctgggagcctcaagagacccggatgcggccaggcacggtggctcacacctgtaatcccagcactttgggaggccgaggcgggtggatcacaaggtcaggagttcgagaacagcctggccaatatggtgaaaccccgtctttactaaaaatacaaaaattagccaggcgtggtggtgggcacctgtagtcccagctacttaggaggctgaggcaggagaatcgcttgaacctggggggcagaggttgcagtgagctgagatcatgccactgcactccagcctggacaacagagtgagactcatctcaaaaaacaaacaaacaaacaaaacgaaagagagacctggatgcaggagcatggccaggatgaactgtgtccctccccatcaatcagaaagggggttccccggtgtgagaggggaattgccatgcaattgcaggggtgagggtgacgtgttctcagagcttcagagagaatccctgctaacaggaaatgcagacaaacaggaagagaggaaggggagggcaaaggagggaaggctgggggaagttctttctcccgaggagaccccaaagaggtgaggctccacatcagaagcccgagcagaaccccgcggccacagtgcgcacggctgcagagagcccaggcactgtgcttcggtcccagccccagccttggcctcaagggaagggttttctcagacccacggggaacagcagcccccggagcccagagctgagctgacagcaccgtggtgttcactttccaagtgccaccagccccatcgatcagtcctcctgggaatgtcatgttaggaaaggttcgtgaactgtggtcccgaccagcacgcgggaggcaggggctgtttgctttagcaacaacttcacacaggtctgaagcgaaatgtttacataaggggaactctgtgacctcgggaaggtcactccccttctctggggctgttttttcatgtctgtcatgataagggaggagttcaaatgtggcctcgcagggagtggggacccagggaaggcctccattgattctgcagtgagaggcagaaatgccacctttaaaagggtggaagttaatttctctaacagaaaacaagtcaagaggtgggcattccaggatcccaaggctggtaggggcctcatgcagtcatcggacaccctgtgttctctcaggccgccctcccatgctcagcacggatatccaccttgtggcccaagatggctgcttgggctcaagtcatcacatatgcgttccagccagcaggaaacagaaagggcaaagagaggcactctcccttcttggaagctgccccctggcctgaacttagtccatggccacacctggctgcagagaacaggacatgcagtttttgttctgggttgtcacatgtcaggtaaaaactaggcaatctcttactgagaaaaaggccaagaataaatattgggggtggggaggagaactgtcagtctgtgacacaggttcaggacagaattcctagtccctgtgctgggggggcaccaactagctggagacctggggtttcacttcttccctctgagtctcagtttcctcatctgtaaaaggggagagttggtccccatggtctctgggtcctctccagcctagaccacgtgtgattctatgttccacacaatttgcctcatggagctttctagatttgaagctctgctaggacagagagttttgtgtgttctgttctctgctgtatcctagaactgtgcctggcacgtggtctgtgtgtttgctgagcagctgaatgatggctggtgttttaacaggttgaatttgtatagaggccacttgcttttgctctcttctttaaaaaagagaaacttctaaaaagtttctaagaaaaaaacttttcattttttctttttctttttactcctcctcctcctcccttccttcttgtttgttttgtttttgttttttagatactcagacttttcctcactggctgcctccctgtcttccttcccagaccatggactggggctgtcggaggaggccaagtgagagaa

SEQ ID NO: 56501 - DNA, 1590 bp, Homo sapiens
ctgcaaccatgtgaggagaaaacccctcaagtgtgttcaattacagaaagcactttctatatgaagctaccatcctcaaataatgacttacaagcctatttagagttcgtaatctcaactctgtcttattgccaagagtcttggcattggtgctatttatgctgaaacaaccaggctgtgttttctttgatcatatattgagtgtaaatatttgcaccattaattagagtcagtttaattccaaaaactcgagcgatgcgggcaacctctaatggtaaacaggcctctagatgttagtcatacctgcaagattccatgctgagaggcctcccttgagcctttcacctgtctcagccctacaaacaaacaaaggttgaagagaggccaagggtccggagacagattttgaacgtagtgaatgacagggactaaagatgagctttttcctattatttccatacccttctttttgctcctggtaataacattttgcaactggtgtattgagttcacccatgccaattccaaattccagagagataagcagaaggttggcatggtgctctggaaagagctttggagttgactagaaatctctagaatcagttggacccggattttaatccaaattctgccgcttaccagctgcatggacttgagcaagccattcttcctctctgcgtcagtttcctgagctataaatggggacaataattcatacttcatacgaatgagacaacagagataaaaataataaagtggatatttaattctagctgtatggcattgcccaggctctctgagcctggggactcctccctacatcttaaaaggaagatatcaagtatgcgggactcagggtcagctcacaaagcctgcgtaacacacagaagcaatcctcattcttccttttcctccaaatgcagcagcccagccatgagtgtcctgcaaaacacttttaggggcaaagggagccaacgtgaagtggcacaagaacttggccaacaggagaattgcaacacgtggtgagaacgtagttcacttgcccttctctttctgtctttcggggatgtcatggagaaagtctcagcttggtgccaggaggtccatcatgcctccatagcacacccgtctccctggccaactgtgccgtgccgtggttcagggcctccccagggtatcccagggaattgaataacattagctcatttttatggtgctttatgaaacttccgttcatggccagtgcttcttcctctccactttcagtagtgatattgggttctttaaaaataaagttcgataagccctaaaaagggaggaaattttgtcacaggctacaacatgggtgaaccttgaggacattacacccactgaaagaggccagtcccaaaaagataaacaccacatgttccaattcatctgaggtccctagagcagccacattcacagagacagaaactagaatggtggtgccagcgctggggttagggaagtggggaatgggagtgagcattccacgggtgcagagcttaggttttggaagataaaaaagttgtaggggccaggcatggtggctcacacctgtaa

SEQ ID NO: 56502 - DNA, 1841 bp, Homo sapiens
cacaggctgtggcttgcgggagggaacccggggaggggaggggggtgggcagaggcgaatttctggattcaagttcaggaccccagtgacctgtaacctccagctctcctttccatccctgggcttcagcctcctcgtgtgacaaattgacagtgattcgtcggggtcctgccgcctgggggagggggccagggcgctcttctgatgcgggaaccagggccactcacggaaccgccccgcgcccagggctgcgcccgtctctcgggggctggctcaaggccccctcctgtagtcaacaccccttccctggggccctggctgggggtgcacctcgcagggccgctcggggccccactgcccgccccaactgataagacggtctgggagcggtggagacgcgccccgcgcagcgggaggccgggggcgggccgggacctggggaccagccgctgctcctctgcagcgtcccgcgccgctcgctgggagtccggggagcgcggggcggggcgagggcggtgtccgcaggtaacccccggggggtggggaggtctgcccgggacccccagaccaaaaagccgagggggaggagcggcgcggccgtgagcgagggcagccaagtttggctacagcacgcgcggcttcgctcctgcctctggggaggagagaggggacagtcccctcccgagctaggctcggaccttggcccccagagccgccgcagacctccaggggtgacttcgtcgctccctagtctggactcgctaggtcccgggtgcaccggagtcgcgcagcgaacgcgccatgcaggagggcgacatcggcctggaggggctgccccccagggaagtccccacagtcggtgagtatccagggcggcacggggggtgagggaccgcgagcgcggccgcagtggatctgggacgccccaggggcagtggcttgcggaggactcaggggcgcacgaggagcaggaggcagggacccccacctctggtggcggggacagtcctcccccctccgcgctgctcccggtgaaggcgagaggggagggactgtgtcggtcacaggtcgctggggcactgacagacaaacagacgacagacagagccccggggctgggctggggctgggggcgccgccgggcaggggcccctgcgcggcccctggggagacatctgctaggccggcccaggctgttcccaatcccgggggagcgtcttgcagcggatacgaggttttcggatgtttttacaggcgctattaatacacataatatttccgtgctattctggagatttatttgtgatataaagtcactactatgactcgaaatcataatggaaactgagaggaacttagagagccggagacaaatgaggcctggacgctaggccggagggggagtccctgacttcctcccccctggctgcacataaatcaccacccaggatatttttgtaccaataattttaaaataaatgacccaagccctgtttcctggatgattctcccctcccagttcagaggttattaaataaacctaagagtgggatagtgacaagggggccgcagtgtgcagtgggttttatttaattacacgctgagctctgcccttctgaagccctggttaggaggcagtgccctgcaatcaggatgccaccgccaacccgggactgctaactatagcatgggaagccctccttttattcttcccccctccctcccccgacttttcttcttttcgaattcccatggagaaacttattctgatgcgtgcctttcaaacagccgggtctggcttctttctagaagtgacactgtatactcatcaaattaaaggc

SEQ ID NO: 56503 - DNA, 775 bp, Homo sapiens
gctcaccagcagcatctgagaacataacaggattctaatgtgttggctttacgcaccatctggccctcctcacccgctaacataaacgccaggggaaaagggccatgtctcttgggctcatctctgaatcaatgcctagcacagggactgtcacttactaagtgctcaataaacatttgctgaatgaatgaggcatttgtactgcagcttttctttctgctgcaaattggccagggacccacgtgccttactgaggatcaaacaggctggggttcctatccttttgtgaatgtggaggcattggaggcaggagggagggctatcacatggccaccctggggagtgtctgatgagagtactaggggtttccctagcactgggaaaaagggaagggaggccccaaagagttctattcagagcacggcccatactgctttattgtgaaagtttctgagccaggtgtaaccaaatgctcgctgctgccaagataaagtctcaggaaggaacttacagaggactcccaggggaattcccataagaaaacctttgtaactgcaaccaagtgaggtcactttttggatggagataataaagtggggacatagctacccaaaatgagcccttgggaaaaaaaatgaacggagaggttttctttttgcctgtaattagctagatgtttcatttgtgtgtttgaggcactcacagaggaagaaaatggaatgtgacatctgctttataagggaaagcttgttagtgaaagatagagatgggccgg

SEQ ID NO: 56504 - DNA, 1046 bp, Homo sapiens
ccttccatgcctggtggtggggttgtcctgtggtgctttccctcctttgcaggcaaaggggcaccctcttccctctgcacacaggcctgctctgcgcaaagatgaggcctcccccatgagctgggcctgtgcagttgccctgcccaggggagagctgactcattcacagccctcaaaagcccactcggctcatttgcttcaagagccatttgtagggggtgtttcctggggccaagtgctgctgccagctgaattgactggtgctggctgctggcagggaggagtctccacccccagatgacctcaatcctttctcccagcaaactttcaacccaccagtcactgtagcctgatcagggtcaaagccatgaaggtcacggccacggcacaggcctctgagggcgcccaggtgctctggagggacagtgtgtgtcccgcttcctgcaacgactgtaacaaatttccacaaactggtggcttaagacagcagaaatgtgttctcccacggttctggaggtgagaagtctggaatgagagtgtgagcaggccacactccctctagaggccctggggcagggcccttcctgcctcttcgagcttcccgggctccaggcgttcctcagcttgagctgcatcactccagcctcttcctcggtcttcactgggccttctctctcctctgtgtgtctgtgtcctgtgtccaaatttccctcttcttataaaaactccactcattagattagggccactggaggagtgggtcaagagggcactcccctctggggaaggcaggctggcacagctttttggagggaggcaaatggctcctaggtggtgccaccaggaggggtggggagggtacctttgctcagggcagagggaaacaaaagcaaaaaccaagtcctgcttgtgggaggccctggccctctcagggaagcgaaagttgctcagtctccaaaaacacttggcctgagatgaccgaagacgccttgggggctgcagcccaggcttattgctttggaagtcaccggctgtgggaaattggc

SEQ ID NO: 56505 - DNA, 728 bp, Homo sapiens
tacagaggatataggcaaagggcatcagaaggagaaaatccctgtgaggatgagcagagagctaaggcactcttcccaaaccccccacataaagaagcgcaaggttctgcacaagtgatagtttaaaatattggggcttttgcacttaacgcaaaagacaaagacaaaaaagaacatttgaacacacaggggcagccagaggcaggaaagcctgaacagagcccagcagggactctgcttagtcaatatttgctgtattgacaaactattgttcttgccgcatcccagaccaggaaggggcagaacaacaggatctagtgggccacaccttcctctctgcagccaagtgggctcctatgttgggggaccccatgggactcggtgctgttagacactccaaggaccaggggtgcagtggtaccacagcccctcttggccaagcctccttttctttcctggaaatccccagtggggctgtgcacagggaaacaaggtgctgctttccagccagccgagagctatgacccgtggagctgcctggcagcgggaccagggctagtgtcaggtccagccctccaggaggattgtgtccacccatgcagacatcagctgccgatggccagctaggagtgtgttgggagaagactcagcagctgagcgtgtggagagaaaaggaaggggccaagccctgcgctggcgaacttttcacttattatgaccctgctttt

SEQ ID NO: 56506 - DNA, 1374 bp, Homo sapiens
tcagtgggctccagggagatgactgccccgggagagactcccccaggagcgcgggcagctggagggggcgggtcggcaggaaccaggcaagctccccggaggaggtgagtgctgagtgacagcaggagtttgccagggtggagggaaaggggcagagatccagactccaatctcagaagcttcactccccccggaggcggaggtgacgcgccacagaagcgcctgccactcggggactttatttcaggtggggctattgaaagttcccccctttcacacccggtatgaaaaccctcaaaaatccaaaggggcactttccctggataaaaataaaacttggaggggcccgcaggaatggaatactttttcttcctgtgtttaaatttctacggaaaatctgaccggcgcggccaccgcccctgccataggcgggcggagagcgcttatatctttaaggcaaaggcgggccggctggcgtccaagttcctgaccaggcgcgggccggcccgcgggaccagcagccgggtggcggcgcgatcggccccgagaggctcaggcgccccccgcatcgagcgcgcgggccgggcgggccagggcggcgggcggagcgggaggcggccacgtccccggcgggcctgggcgcggggaggcccggccccctgcgagcgcgccgcgaacgctgcggtctccgcccgcagaggccgccggggccgtggatggggagggcgcgccgcccggcggtcccagcgcacaggcggccacgatgagggtcaacgagaagtactcgacgctcccggccgaggaccgcagcgtccacatcatcaacatctgcgccatcgaggacatcggctacctgccgtccgagggcacggtgagtgcgggcggccgcgacccgggcgggagggccgcgcacctgcgccttggcgagggcgggaaccgggcggcggcagggcctcctgggaccccagggcgggggccgcaccctccgcgcagggttcgcggcgcccacccgcgcacgtgcgtgccgggaagggcgcgccggccctggccaagtgcgtgcgccccgcctgcgctctgagcgttccgagcgcggcgcccactccgcccagcgcagcgccgggcccccaggcatggcccggcctcggagctctgcggccccgaagccgcctcacccggggctgcagctcggagcccaaccaagagctcacggctggcgccctggatgggaccttcccttcctggctcgcggccaggggtacctgttggggcagccagggtgagggtgatggtgggggtcttgggtgaaggccaagttggtcgccactccacgatgatggtaactgccaggccccactgcttcactatcctctgggg

SEQ ID NO: 56507 - DNA, 498 bp, Homo sapiens
tgttttgtgagcttggaaggctgaatcagaggcgcgcgctgtgggaggcagaccctgggagcagcatctgccggtagatggccagacaggctggaggctgcagccatggagcaggggcctgttggtgcagggcaggcagcatggcagggagagcctcccagggcatccccggcaccactcaagccaacagttgttgctcagtcattaccctgagtcacccaacgaaggcggctctgtacacacgagggccagagggcgtgggctgcatttcaaaagttcctatcctgttctcaggtgtgaaactcatacatgcacaagtcaaccacaagataagttcatccaattcaggctgcggttcccagcctgtgacttttgcctctcttcattcccaagttcaagggtggaaatgacttcattgtttctgtgcagagatataagaagaaatgacttgaaagccagaggccaggttgaatgcaatttgtttccatttccctctgt

SEQ ID NO: 56508 - DNA, 894 bp, Homo sapiens
gggctccaggcgaccacgtggggggaccctccaggccagcgaggcccaagcacagctctgtccaaaggccacaggtgctcgggccctgcctggcgcagcatgccgtccctgcactccatcagggaggccctcttctcggatgatgcccctcgggaactgatagtgccctagggagcgtcctcacgtagccacaggaaactgaggtggaaaccaggcggccagctcgagggatgaggcacagctctgtggaccattagcagcttggagttgcctgttaggttctacccagcatggctttttttattttttcttatttcggaaacccagattgctgatcgacctgtctgtcttgataaccggccaaacccctcgggaattccagcaatgcaggcttggctttagcaatggtcccatcacactgccactgtgggaatatctggtttttaaacaaactgctccatactgctatctcccgtggccccctagagtccttcaaacaaataaggaaactgaggcagggcaggccctgttggagccctaaccccgcccccttggtcaccccagggcacccaccagcggtgcccatccataccagtggctcactgtcctctgcacccaaaggtgactgaccgtgcaggtgctgccgcaggccacgtgtggggaaggtgcaagcgcagggtcattaacaccccaggagtgacccccagccaagaaagggccagagcgggtgcatgatcacccaacttcctcaccctctgggtactggcagtgggatgtgcccttcaaggtcactccgagggtccccagcaggacggaccccagctgcacatagcggtggccgctccttaacccacccctgtcagcctccctccccttcaccctactctggcacct

SEQ ID NO: 56509 - DNA, 1722 bp, Homo sapiens
attgactataaaggggaatttgggctgaccctgccctgcaagggctccaagtctcagaaaagccctaaaatgttagtttggttatttttcgaaccactcctgccaagtatctctaaagcagaggtatagtttagaaaatgtatccactgagcctgtctgtaaagacccaatcagtcttaggaaagaaactgactctttgcagcacaaaaagaccatatctggtcaatttttgtttaagtgatgttttgatacatgaataacacctaaaatattccaccccacccccacccccgaatcaaagctctgaggaatctggcttatctcccttttggtgttaatttggtcctaggcaggagaaaggtttccctttgtttgctaatatggtatgaggtcctgggcacttgggtttggttgtggtaaagatcaaggtagtccagacttggtggggattgtaaggctggctttaggctaggagctcaaagccggaggaaaatggtgagtgtaaggtgaggattctccccatgagccctggaggaagcctgggggacctccatcttccttccttccttcccttggagggtggccccagcagggaggctctgccagcccaggggttggccatgccagctcggcccttccaccacatggtcagaaatgcaaacagcagttactcaggattcagccgctgtgggcggagatgaggccaaagccaaggcctctgcccagcaggcgacctggagcgaagcgggaggtgcgtgctccctgcagcttccgccccatccccaccaagcttgcagggaagccccagcatggagccgcctgctgcccttgtacctccggtcctctctgaagaagagagcttcctgctctttgtattttggctaaaggcggtgaagtgagaggcggagggggatttaaaaccagcagaaaaaggcttcttgttgggctgatggtgtttgtgcgagaagctgaggtgggcagggaggagagcctaggagagcggtagggctcatgggcaggccgttggtgtacgccttggccctgcctgtccccagtcccaccactgtggactccaggccatcctcagtccaggtggtcactgtggcctgggccacatgctggcgatgatggggatggccttccacatgcctgttctctggaagaggggctcgcgttgtgcccaactggggacgtcctgcccccaaccccccaaaacgctgctttcttctgccctcaagaggccctcagaagagaggaggctgagtgaggggcatgagataaaccccgaaaggccggctcctggctcgtgtttaaaactcactgctgctgcaaagtgcttggctattgcataataatgacaacagcgttggtgaccacgtgatggccgaggggtgccaggcactgttccaagggccacactcgtgttggttgttggttgtttaatcctcctgacaacctattaacacggcttctcttcactatcagcaaccccattctgcagccgggaaaactaaggccacacggatcacaaaatgcaagagctgagatacaaacccagagctagctgaccgtagagtgcaggttctcccaacggctgtgtgtgcctactcaccctgcccgacccctgctcccatgcacacacacacacttcctccatgctccaggctgtggctgcaatgaattcttcttaacctatccatcttttgtgccagatacatgcag

SEQ ID NO: 56510 - DNA, 872 bp, Homo sapiens
gacacagctttgtcttcaacttgggagtttcattcagcgaacaaacgttggttgagcacctaggatgtgccccacacgcccctggtcctggggatgcgggggagatggaccagggagactggaagggagcctgctgcagggcgtgcctgttgtgggcccgactgccccatggcagggcaggggacgcgcccgctggggtggagggcctccctcgctgagtcacccacaggcctggcgctccagctgcacctccgcatgctggcacggggacagacatcctggaggcctcttggcaggaccgaggggttttccaaggaaagcccttgttccccggagctggccagggagtggtccccacgcctcgcagcagggcttctccttagtcagggtgtggtgagggctgcaggcattttcctgggcagggtgcagtcaccatgtgtcactggcagatgcctgcagaagccggtggtaacggcccagaacatgaaataagagcttttctaggtttctgaaagctgcagacaccctctggggcaaacagacccatcccaggctgcaactgggagacacacagggcagccccaggcctcctgggcctgcctgtcctgggagccacctgtgactgtgccagcagggaccggacctgccctctgcacccttgcatgggagcaaatatgcgatttcctggaacacggggacacagggtgacaagacagcctgtgtcctgcgggtggtttcacgcctgggtgaggagcctggctttgctgtgtgcttctcctgcccagccctcggtccatccatcctcaatgagggctcagaatggggcatccacacccctgggcagggcggggcagggcagggtgagggagccc

SEQ ID NO: 56511 - DNA, 2324 bp, Homo sapiens
ctttggaaatcatgtattatttaaatcacatgtttaaacgcacataaacttctgagtagtgttttctgcacacacaagatgtctccaggggcaccaaagaatgcattttccacgtttgtccctaaacgttaatgcataagtaaccttggtcaccaacagatgtgagggcacgtgacgttcgggctgcgccctccccgccccggccctgcacacagtagggccgcaccgcgctttgcaaacaggtggactcggcagaggcgcgaccgccctcaccgcagagagctgggccacctgcaggctctcaggacacccaaggccccacctcccacccggaaaagagacgatacgccgggcgcaggcgcagaagccgcgcccgtccgcggcgccgccagccagggcggaaacggctgcggcttcgctagggacgcatgcgcgggtcccttagttttcgcgagataacggtcgaaaacgcgctcttgtcgatttcctgtagtgaatcaggcaccggagtgcaggttcgggggtggaatccttgggccgctgggcaagcggcgagacctggccagggccagcgagccgaggacagagggcgcacggagggccgggccgcagccccggccgcttgcagaccccgccatggacccgttcctggtgctgctgcactcggtgtcgtccagcctgtcgagcagcgagctgaccgagctcaagttcctatgcctcgggcgcgtgggcaagcgcaagctggagcgcgtgcagagcggcctagacctcttctccatgctgctggagcagaacgacctggagcccgggcacaccgagctcctgcgcgagctgctcgcctccctgcggcgccacgacctgctgcggcgcgtcgacgacttcgaggcgggggcggcggccggggccgcgcctggggaagaaggtgggcgcggggccgggccgggggagccagggcctggtcgcccggctgtaggtgctgcgaggctcctccggttggcctccaggcgcctcccctttgccgggtttgatttgcgtgggttttctccgtacagccctggttttgcagatgggagagccagaaacgcagaaaagttaacttattcgaggttgcagggcgtggacacgcacagtcctttttcctccacccacttctgcccgggtaaattagaaaactcactgaagaaaagatgagtcagagaaggtgtgggggaggggcagaggttgggtgagcctgcctcgcatcatttcctttctgtctcggaatatgcttttcacggctgtctgagagtaatactagcattcagtaactcctacccaggggcttacagtgtgccgcttacccttgtaactgccaaatacaattttcgcagtagccctgtggcttagatactgttagctatcactgttcccattttacagaggacaggactgtggctcacaggttaagtggctttgtcgaaatgcgcagccgataactgacggagctaggcttgagccaagcagtccggcctccggatgggtagtgttagccactacactgcctctctggtcaagttcattgtggagtggcttcctgtcctgctctcggtcactccctctccaccctcgcctgtggattgcagcagcttccaggataaaaaagaaaccctgagtacagcagagtttctcagccctaccccccttgttctcagagtcgggagaggcttgggagtgctctggggacgcctctcagaggcttcaagctgtagcttggaatcagccattcagtcaccaatcagatagggcctaaatgtgtcaccatgggtttcactctgtaaagactggtgcctgttggggacaggatggacagaacagctctctgcctgagagcagtcaagtccagattttaaaaaaaatcagtactgaacaaacaaaacaggacgtagaaaaatcgggttttatggatatttaatgtctggaaaaacactgataaattgcattttaaaggcggtctacgaaacatagctgacatttgagatgtatgtgtgcttggttttatttatatcgtcatgtagttactgtgtgctgggaaaagtacaccagaaggtgagcggtgggtatggacaggttggtagcgggcgactctgccttcctccccagaagttcagcatagcggttaagggtcgactctggcaccacactcttagggtttcagaacatggctctgccatcgtctagctacacgatctcaggaatgtccattagcttccctgtgcctcaatttcctcatctgtacagtcatggtaacacagtgcccagcccacagggctgtcagagctgcggga

SEQ ID NO: 56512 - DNA, 808 bp, Homo sapiens
cccaccctcccccgcagcccttgcccctgctgtttcctctccctgcagccttcctcactatccaccccaagccccccagctcagaagacatccttctgatgcaggcttgcccatgcacccactcacagtgggatccctgcagcccccactcctgcccgggtcctgcttcctctagcgcgactccctgagggctgcttccagcactttccagcggcttctgagtgaaggcttattttgtgtttgctgagtgaatgagtaaacagcagcgatcaaaggcccactagcgtctctcaggggcctgagttccttgcaagcaggaaagcaaaagatgcctccgccccagggtttcagattcctggattccccttcagctttcacttttggttgggcttcccagcccagtcagtcggactgtgaaagcacctgccccgcagtaggcacgggcagggcaagagggcatcttctcaggggagccaggtatgccccttggtctgccacccatgcatcatatgcccctgttccctgagcctctgctccccgcccctggtccacatacccccgccccggtgcccttcactctgaccaggcccagtgagctccagccaggaaccccagggaggagtccccaccacctgagtcactgcaggccatcccaggggtcctactcgccaggaagggttgacgcccacgtacacatacacctctgggctcctggcactctgagctgtatgtttcattctggttcattcaccattcattcatttactcggtagattcttagcaaagggctaccagctcagaccgggag

SEQ ID NO: 56513 - DNA, 365 bp, Homo sapiens
aggcctgacacttagcatctgtgtaaacttagacaagtaaacccatccacaaaatggatgattacagtagctacctagaagggatgttgtgaggattctgtgacttgtttgtaaactacagagtaagtacaccagtaaagatgtgttcagcctctcttgttacaggtgtgatcacaccatcatgatgtgattttgtaacaggatgattttgtaacacgatgacattttgtaacagacacagagccagggacaataccactgagctgctgaagcaacccgccctgcttctggcctccaagtcacatgagctaatactttaaaaaaaaaaaaaaaagcattatacgggccaggcacagtggctcaca

SEQ ID NO: 56514 - DNA, 2025 bp, Homo sapiens
gtggcgtgcgcctgtaatcccagctacacgggaggttgaggcaggagaatcacttgaacccgggaggcagaggttgcagtgagccgagatggcgccattgcactccagcctgggtgacaagagtgaaacaacgtctggaaaaaaaaaaaaacttgcggaaaagatgaaatgaccaagactcgcgcagtgctgcccgtcaggctctcaactagtcgctcttcacatctgattcatgtcttaaagcagcctcgcaggtaggtctgcatcattttcccatcctacatcggaggcgctgaagcccaggcgggtttcccgagtcgcccgggcccacgctgcagagtgaaagccacagcggcaaagcctgcactctggacgctgcgccgggacgtccccaggtgcggcaggcagcgctccgtaagtgggtcctggcgggaactccgtccttctgaacccagatcaggcccagggagaccgtaggggcgccgcggcgggcggggtctgggtcctcggtggtgactgaagcctcggttcgctcttctgcaaggtgcgaatccagagcctccagctcgggagggacctgacgtgccggacgcgtccagctcagaactcgaggcgcggtagacactcagcaaaggcctccggcgtccctgcagccgtggggggaaactggggacgcccggaggaagacgctgacccggcgagcacctgagcgcccacctgtggctcatcccggagaccgccccctcccccgcgacccgggcggggcctggggggcgtggctcccgtctcgctcagccaatcagtgccccggggccgcctcccgccccctcctgaggagacagcgcttgcgtactcgggccaaggtgctcctcgggccccgcccccggggcggtgctgacgctcgcgccgacgcgctcgacgtcgggcacgtagacgccggcgccgcgcagccgggcccgctcctcctccgctccgccagtgtccggccgcgggccggccttagtgactggggcggcgggccccggggccgcggcgtggggcgggcaggcggacgccggccgcgggctgctttcgtcggctcccaagctctcccggagcgagcagccgcccgcgagccgccgcggagcctcctcgcccgctcccgccggcgagcaaggtaagggagcgggacactgaggcaggctcggggcccaggcgtcaccggcgcgtcccggtctccgcggcggccacgcagccgattagatgtctccgcggggaagggtgcgctccgggacgggtgggggcgaggccgcggcgccgggtcgcgctgggagagctccggcgggacacccgcgccccaagggacggctccggggactgcgcgctgcccctccccgagccccgcgccccgtgacccgggcgctggggcgaggggcggggacctgtggccgctgaaagccctggcccgagcgggctccgttgtcaacggtcctcaccccccggggttcggggcttccgccgcacctgatacaggaggggaggagtgcggctcgagcaggctggaggtcaccatccccatcaggtgcgccgtctggggcatccccctctcaggggtccaccgcgcccccagtactgcccgaaaggctcagaagcgacttcccctttccctggcgctgtctttatatcccagacacttaatagactctcgtaatctcacctttcacttttccctctttcctagccgcccccggctgtatcgacctgctatatttccattgtggattttttttttcggttgtaaacttacgtaagttaggttgaccaaccgttgcagccattggaaaacacttctaccagcgtttaacgaatccggttccttttagtgctcaccaaatccagcccaagaattcagggagccgtcagttcttcccgggagctgactgcacacattcctgcaagatgcctgatggattttgtacttgtcagttttgctggttgtatgctccttctgtgcttttcctgaaaaatgattgggtgacatgtgtt

SEQ ID NO: 56515 - DNA, 680 bp, Homo sapiens
cttatgtaaggtattttacactcatattcaattttttgctttcagctaatgattcttaaagaacagaataatcagaaaaaaactctaacagatggagtgctggacataaaccatgaacaagaaaatacaccaagcacgagtggaaaggcaagtctgtaggctttgtctttattctgtttgatttcatttgttcacagtatgtgtcgggttatgtggaaaacagttgctaaagtaccggcttagagctgaagtggtcatgaaagttgtgtaatccaacagattgcataagtcagttttgattttagctatttcctggaagtatttttattttatagctcaccaaacaagggtatttaaggatttttttttccccctatcagagatcttctgatggttctttaagccacgaggaagaccttgctaaagtaattgagctccaagaaatcataagtaagcagtcaagggaacagagccaaatgaaagaacgcctggcttccctttccagtcatgtgacagaactggaagaggatctggacacggctagaaaagatctcatcaaatctgaagaaatgaacacaaaattgcaacgagatgtccgtgaagtgagcaataacaaaaactacagtcttgtcatgaagttgtatgtttgggacgttttagttaaatgattttttttctct

SEQ ID NO: 56516 - DNA, 2577 bp, Homo sapiens
gcgcctggcccaaacttcatgatgtctcttatcagcttaacttcctccgaggacttcccgtgtctcccagaataaagaccgaggtcttcgctgtgctctatcggcctctgcatgacctggcccctctcacaccacagctccgctgcaccactagccctctaccatgctgagctgagcctcctccagttcccctgctgcaagaccgttcctgccttgggacctctgttggccctgctgttggaacctgctgttggcctgcctggaaaattcttccctccttaccttgtttactcttatagggccttcacatcttggctaacatgtgaatcgcccaaagaaacctctggtctcccaggggttcaggtcctaccgtctccccaatacgatgttatgaaactctcacttcttggcatttatctcatttcccaggtgagtacccatgtggtttaacgcttgactcaccttctaggctgctatgtccctgtggccggggctcgcgtccctggcacgcatgtggccctttcttggaggggaggtgcatggtgagcggacgaggacggctgagggcgcgcgcggagggaggatggagagatgaagaggctccccgctcccggactcagggcacgtgcgtctcctcggctggcttccttcccccggccccgggcagcgccgcggatcctgagaccccgccgcgggctgtgtgctgctcagcgcccatcctctgcgcgcgcaacgctacttccgggcgagctctgcagactcgccacaggccgggctagcgcttagccagctgcgggcggacccccgggactcttgcgggccaagacgcgggaggaggcggggcagggggcggggtcgcgcggggacccggatgcggccccgcccccgccctcggaaccggaagtagagcctggtgcctgggagcggctggcgcggcggaatccagggccgacccgggccggaccgaccccaggcggcggtgagcgagcgcggcgtccgcccggggtgcaggccgggctctgcttcttccctcctgtggcgtcgcctggccgcgaaaggggaaggaagcggcggccgcagcggtctcaccgctcttccgcttgcggtttcgggggccggggcagagtggcgaggctttcccggcctggggcggggcagggcgagggccgggggtccgcgagggccacgaggacgggtctgggcccaaggaggccgggcagggggcaagggggcacggagggcttggggctggggtccgcggaggaaggttagaaaggggccaaattggggtatcagctctgaggggagggtccctgggcgccggggggctccagggcaggagaggggccaggctgggaggggtcttgggtccgagggaataggagagggggatgggctccgagggggagggtattagggcccgagggagaggggctgggcctgtggggttcgggggtctgagcggagggggccggggttcgaggggccaaggaaggtgggtgtggggggtctcaaggaaagggcgaggggtctgagagggaggtgtctgggtgcagagggaaagggatgaggtccgaggggaggagattggggtctgacgggaaggggtccaggcgcagagctactgggatggggtccgagggaagggaattggggttcgaggggaaggggtcggggctcggaggaaaggtatagggtccgaggggaggggattggggctccaggggaagggatccaggcgcagggaaaagggatggggtccgcggggtcaaggcggttggggtgcgcgactttgaggggctcgctgtgggacgtggcggagcagctggggatccgcccggcctgcacctgagcggaggttttgcaatcaggtcagtggaggcagcgaggcgcggctgcagctagtcgtgaggctctaaatttggaaccgtccctccttcggggtgtgtttaaaatcaccagaacggtgctttggggctttctgttacgtttccatcacctggatagtctaagggatgcctgatccctgaagctggaaggccttgggtgagaagggacagggcttcctcccgctggaatctgtggacgtttggggccccttggggaggaattcattttctgctgaaggaagctccggaggcatccggtgagcgctccctggaatcccatgcgctccctttgggctcagtgttgacttggctgcgcaggctctgtcggggggacttcacccactaggtccttcaggcatgatccagccctcaagcccggccgggcccaaggccgtggcgcaggaggggctggccgcctgcccctgtctccattcacgtgtttgaccgtgtgggtgagtcactggctccagagcactgagtcagtcctgtttctcctctggttagagaagtattcgccagatactcaaggaacaaggaagagtcttttaagtgggactcaataaaaagttggggaggcagggttgttttgatattaggtcccctagaactagaagctaaccttctgctatatcttactgaaaagaaatttcttttgacctggggcaggggtgcggtggctcacacctgt

SEQ ID NO: 56517 - DNA, 1966 bp, Homo sapiens
cctttcttgggcagtcaaaacttgtttctatggaaatgggatttttacaccactgcttatctgtcatttcaaaaagcatggctggttttcaattttccctagaaaaactcatttctttttcctcggtaggaattcccttcatccaatttcgtgcctcattttgcccagggccattcacagctcttaatttttagatgcatttaaaggtggtggtgagtcgcccaggcggtgaactcaggtgagagttcttaaggctccctctgatcctcagatgatcaaatgcccagggcccatcagtgaagaccacgcccagcaaaggagacatgctgagagataggtctgtggctgagaggagacagccctcacggcaagggggacagctctggtgccctggcaactccgtcctggacccccccccagtggtggttctgactgccccccacttgtccttgtcagtgtgtcccgtggccgtggcgcacctccatgggggctttgtcccaagtgctcagcctggtgaggttattagatccgagaagcaagggcgagggagaggattgagcctagtttagtgcctacagtgaatgctcttcatctttgtcctctggcctcaggccatcctgtttctagtccaactctgagtgtaaagtgtaacccttggccgggagcaagaagggaacagacatggcctctgggagcttggcagtgccagtgaacccctagtgactaagcctgctgttatcggccgcagggtgacctcctagtgactaagcctgctattagcctcttgctgaccaaagagcttggcctaaggacagtcagaggcctgagagcagccccgcccgcggcagtctcagccttgcaggtgttcggtttgccagttggtcattccttccaaggcagtccctggctcccacaaggtgaggagtcaaaccctgagccagctccatgggttggaggtctagttccgcgtcttcctgtgaagtagcctcggctcagtagcttcaccgccctgccttctgcttccttgttcacacagtgggaaaaattacaggccctggctcaggggtgccgtggaatgtagtgcctggcgtttggtgaatgctttgtgtcataggtgtgggctcctgttcttactgtaagagagccgggctataaataacaggacagctgggaggcggccgttcttggcactcacgcgtgggtcggcggtggtatgcagctgctctccttcagagtacagcaggattctgccctatgaagtctgctttgagccagccccctctcagggtccccctggagaaatgcagggcagagaaaccctagagacgctgcaagttggggtcccactcccctgtgggcaccccaggagctggcccagcctgaagacgagtagaggggatgagctgtccagctgccactcagggagaggtctccatggacggggtccctggactccccgagtggagtgctcaggggagcacagcttggtgcaggatgccctgctgacctgaacagtggattccttcctccagccctagagccattcccttccagctccttccttactgcagacattgcttacaaggggaagtgagagtcaggaaaccccagcctgtgtcccagctctgcctcctgctggctgtgtatgtggacaagccacttatcctctgaaaaatgggtgtgactcatacctgctccccagttgtcataaaaattacccacccatgagaaagtgttttgtaaaaatgtgaaacactaagataaggcctctttaattattgcttccacatagagtaatgacggaagagccacattagtatgtaatggggaagggttaaactagtcagtttttcagatttttggcccagtgcagtgactcatgcctgcaatcccagcactttgggaggctgaggtgagtggttcgtttgagcccaggagttcgagaccagcctgggacacatggtga

SEQ ID NO: 56518 - DNA, 469 bp, Homo sapiens
accagagggacatgggcctctgtcactcctggctggtggaggccccatcctcacctctgacctgcatagaaagaaacacctgccctgcttctctcgggggctgtcactgctccaagcctcggcttcagcctccctcagcaggtcccacgggcattctccgcaggggcattcaacttcccgccgccctgcccctcccacggcctctgaaatctctttggctccttctcccctgggctggctgacatttcacaatctgggacggcttagtgtcactgtctatcctgggaattccggcacactagctgatctgaaatggcaaatcgcaccatccatggggccactgtgatcaaatgtccctacccgtgggacattcacttatctttcacgtccacctctgaggtgaaccttttattaccacacagcttgagtgataacatctatctgtctcatgagactcccgatctggaga

SEQ ID NO: 56519 - DNA, 832 bp, Homo sapiens
gaagaaataaaaccatccttgtttgcagaagacatgattgtccccatagaaaatccattggaatccttgaaaaaactactagaacaagtgatttttagcaagactgaagaaggcaacaggaatatacagcaatcaattatatttctatataattgcaatgaatgattggaagttgaaatgtcaaaacaactctatttacaaacgccaacagaaaataagacatgcttaggagaaaatcttggcgaaagatgtgaaagatttacacactgaaaacaacaaaacactgctgcaagaaactacagatgactcgataaccgaggtgccaccttgcaatgtgagtctcaaagtccaccttcatgcaaacctctgctggccaattaaggttacaggacttccaggcacaggacatcccgggagctgacaaccagtgttcacgctgtaacctgcctgccacttgggaatgacaagcatcttgctgaatttcccggggacaaatgtcattatcttcactttgcacttgcagaaaaacatgactcagaagcaaatagctctgggcatccttattccaggtgtactcacaattacatctaactccagatgtgccgaccaacaccttgttatttatcagaacaaaccacggggcacagaatatgtgcttttctttgaatggagtctacctgctggcattctttatcaagaggtacaggatagaaggaaagagaacagaggaagtggtttccaaagaaaaatgtggaggaggtgacaagctttgttaatttatggtctgggcagttaaaacagcttttcctaccagggtaggagcagagggaaa

SEQ ID NO: 56520 - DNA, 956 bp, Homo sapiens
cctcagaggccactggttccccagccccatcccctcctcattcctcccctcagggcctagacaggtcatggaaccacatctcagaatgtgcacagcagcacagagggcacacaaccagccactctctgcagctcaggtccttgtaccttaagaacagcctacctggcgggtgggcaggtgactgaacccatttcagagatccatagactgaggtcagagaggtgagggtactcccagcccctcggcgagacaaggcagagctaggacccaggtcttccaactccacactcaacatcatacccacatctcaggctacccctcctcaggagctggcttccaggtggctctgcccaggtgtcaaaaggggtcgatgttggccagaatgacccaccgggaaagcagccagcacacagagtcactaaaggtgacctttgggaagtctctgagtcataggccagtcagagcacaccatggacaatcctcttgtccatgtgggattcctgaccaggtcccacccaaagggcacagcaaggctgtctccatccacctggccggctccactgcctgctgtgccaaagtcacctgccctggttaagtcaatgagcatgcaaggggcaacaatgagcacggcactgacccagggtcaaagccatgggaaactgccttggaaaaaacggagccagatgccaccaggatagttggcactggggctgggtgactttgaccctttttctctgttttccaaattttctgtggagcagcaaaataagaagtaaattgagatatggaaaacactgtgtgtccgcaggactgtacacacaggcatgctcatggagcaggtggccctgtggggttccagtgatctcaggtaccacctgcaagggtgggtcagcttttggaatcaagggtcacaccagcgtaatgaccatctgtgagggggaggcgcagggtctagg

SEQ ID NO: 56521 - DNA, 830 bp, Homo sapiens
tctggcctcagcctcccgaatagctgggattataggcttccgctaccacacccagctaatttttgtatttttagtagagacagggtttcacgatgttggccaggctgatcttgaactcctgacctcaggtgatccgtgcgccttggcttcccaaagtgctgggattacaggcgtgagacatcgtgcccggcccattttaaattttatttctaacagtctcagataggccaagcctcctacattaggtttgtttgcttgttgtggtgaattacattctctctgatttttcccttcttctttccaagaaaaggggaaattagcaagtttctaatctattttcagtgctttgctgagatgcaggtaaagtttaaccaagaagcaaaaacaaatcgacagagcaggacagcactgacgccagggccagctgccccgtgtgaccccgtctctctcagccaggtcttccagtcctcgcttccagaatccaaacagctctaactagtcctcagtgtgacaccgtcactggaggctgaccctgcaccaggcctctctggaaggtggcacactcagggtcactcttgcctctccaggctggagagcaaaatgccgagaaaagaattcctctgtgttcctgcctgcttcccaggcaggcttacctaaatttcaacaaattccactgcaaaaaaaaaagaaagattggtgtccgagaggtatactgggtttggcagtctgagggctcccaagaaaagcttttaagggccttaagacacctaaaacccacacatgaagaaaaccacagctgccctgaacatccaactagtccagcgtccctg

SEQ ID NO: 56522 - DNA, 1235 bp, Homo sapiens
accatttcccacgcattagactggtaaatatcaggaaataccaagtcttgctgaggaggaggggcccagggagttctcacaccatgtgggtgggattgtaacttggtacaacccctgggaaagcaatttgagaacactggtgaaagctagctctgtgcacggtgaaagccccgggctaggcaacttctcctctaaggaggtacccggggaagccccgccagccctgcatagaagaatgttccctgcagcacagtctgaaagaacaagatcctgaaaacaacccaaatgtcaacaggaagagaaagaataaaatgcggttaaccattccatagaatgtataaactgagctacatgatcaactcagggtggatttttttaagtgactattaaggaaacatcaaggcaaagcttccagcgagcgggaagtgcccggaagccccgcttcccctgccccacacaggcgacccaaggccccatgggacaaacaaacacgtaccttcgccagcaactgcatatgagatcagcaaatgacccattgcacaatcagcctgcgtttaagatcatgaggcaaccggaaagcatctaatcagttaatcagctacattttgcaggagacactctcccccctgctactgtctctggtccctgtttttcttgggatccagctctaggctggggctgaacccacaaagatgagacacccccaccaggttcccagggagcagcaccttgcctcactggaagacaccagacatgggaaggagtcatgtcccacaatttctcccacactcagggtcacccctactttctcctgagacccatgaagaaaggtggggcctccttctgtgagaaagcagcctaggctggagcgagtgggtaaaagatctcagctttagtatctcaagaccagacgggcctggggctggacgctgcttttgaaggtgttttctaaaagcaaggactcaagatacttgcacaaccatgttcgcagtagcattattcacaacagccagagggtgaagccacccaggtcctcaaggatggatgaatgtataaacaaaatgtggcccatccacacaatggaatattactcagccacaaaaaggaaggaaattctgacacacgctacaacatggatgaggcttgagaacattatgctgagtgaattaagccagactcaaaaagacaaacactgcatgattccacttggatgaggtccctacagaagtcaaaga

SEQ ID NO: 56523 - DNA, 3914 bp, Homo sapiens
cctatcaggacaagagtctccctcaagccccctcagaggacagtgacatccggcatagaaacccacagctcccacctaccaatccccctcttagagcagacacgacggctttccctcagaattaacactgaacccagatgggggccgagctcgctctcctcactccacccccacaggctcaaccctattaggaccctcaaccttgtttccaacccacaagtagttggaaaactccaaaagcaatcggcccggggctgttctggacctgctgaaccctctggggcaccaggctcggttcctagtgcacagaagggcgtcactaactatgtgatgcggaccgcagggcaccggggttaaggctgaatctgccaggtccttttccaggggcgcagaacttcccttgtggctgggtcggcaaaaccgaggcccacatcccagatagagatcaaatcgccctcccccaccgggggacttccgaaattacctctctggatctggaagcttaattagctgattggcctcattaacgttcgaacttgagtttcaaacgaaaaagaggtcactcaactatccaatttacaacctcgaatttccacccgaaaaccactttattttcggatggcctctgaggacgcccaggcccctgccagcagctgccagcccccgagagccttacgtactttcgcctgacccccccaccacccacccctcacctgcctggctcgagcgccttctcagttccaggcgccccgagcccctttaaaagatcggctgcgaaaacccacggtcacctgcaccaccctttctccctctgggtgctccagccccacggaaaggcaagcctcgcccacgcgcccacccacctcgagcagggtgtccgcacgcagacccgcctggagggcgccgcgctgcacccccacgccaagccccagaaccctggcggcgaggtccaccccagcccccgcatccccccgaacccgggcggcgaggcccgctgcggtggtcgcacctgctggctcagtccggcggctccagcccaagtgacgagtgcgctgtcggcgtctctgggagcggtccccgcgcctggcgcccggggccggggccacccggtggaggcgcctgggccgcgggctgggcgggcggagctgcccggccgccggggaggagggatgcccgggcgaaagttgccagggaaacttgatcaactcgagcgcgccggtgccagcttcctgcataattcacggacggtggcggccgggctgcgcccgccgggtctccctatcccagctggtgagcacggcgggccggggtcgggcacccggctgtggctcagcgcgacccccgggacctgggcgcccgacccgccacccccgggcccgcaccaggcgcgccggccccggcctctccgcgacagctgctgctgccgccgcgcgcgcctggatgggagctctgcgtgcagggccagggtgaccgcagcggggtctcgggggacctggcggccacggttcgggtctccgcccccgcgcgccacctggcggccccgcgccggctcctccgctgggctcgctggcccgggtcctagggctggcgggcggtgacccggggcaaggagaccccgggagagcgggggaggtcgcgccacacgcgctgttccagaggaaggggcaggacgcgccagagactacgtggtccatgcgcgcaggagataaagcgggggctccttcctgcgctctgcccccacgccgcttccaaagctttcgacaccggcccctgcccgggaagaaaggcatgcagggggaagggctctctacggaaaatcgacccccacctggacacgcggctcactccccccagcgcccacctctccagcctctctgggtccaggactgcgcttacccggtagttggtgctcccggaatcgagatgcccccaaaatgccgtcagtgagcaggatcgggtgcccaagggccacctcccgtcctccccggcccgcgccctgcgtccccggccgccgcctcacctggctcggcgagtcgggggcgggtccgagccccccgggagcgccagcgtccgcgcacacctggatcggccgcgggaacccgagcggcgccgcgcccagccccgccggagctcaggagccgccgccgcggctcaggtgcagggggtggggaaggacccggccccgcccggcgcgggagctggctccggcgagggtgggggaggggccctctcgccgccgaaaggacgcgtgcggcccaggacccgcgggcgacccgacctggacccccacccccgcccacgccgcggacctcagtcccccgccccgaccccgctcccgcccgcggctgcggctcgggcgtgcgcgtggggtctgttgtggcaaccccgggagaccgcggggcgccctggccgcctctgccccgccccgggctgcgtggctcacggacctccccctccctggccaaagccggcggacgagaaagtccctgatttttgtaaagtccggttcggtctgcacggttatcccgaacgcagctggctcccgccacagagtatttataataataggatttggaaatagaggctgcctgcacatcaaaacgtttgcagagcaaacgaaaactttgtacccgggtgatacgccggcgtctgctgcccaggccaccagttctggggcgccttccgcccaggggtgcacaacggtatctccgccagctgccctccaagccaagaaaagccagggggtggggtggggggagcaaaagccaacggctcgggtgaatcccagaggccaaaggcaccctccggagactccaggaatcctgttattatccaggactccggattgctaggtttgcggaagcccaaaggggcgggtcctgagcttggagctgtggccgccgtgtgagccatcggctgatagattttctcaaggccttaatcattcactgggagtctcccccagtacgagctgcgtgtttctgagtaagctcttgaggtctctgtgttctgagttttccagtattctggaaggtgtgggtggggatcagagtccaagctgtggagtagaactgtctccagaaccctggagcccggcattatgcaaacccctaactgtgccccctacatagagtgagtgtgtgtgtgtgtgtgtgtgtaagtcagtctatcttacaggacatgcctgagaggtttgcatgggctggtgacttcaacataccaaaggcaaagttaaatatttgctctagatacttttttttttcagcttgcataattgtcccacatttcaaagaagtctttaaaagcacttaggttaaaaaaaaaaaagttgtgtttggggcctgaatatttcaggacacacatggaataaatattgtaactccttgagggcagctgccttatgtaaatgtctttctcgtcgctgcttccttaagcatacacttgataaaatatttgttgaatgaataaaggagtcaatcaatcaaaaaataataatccccaaaacaggaagaaggacgccctgacaggatcctgcaggcatcctttgtttggcatggaagctggggtgcctgggagaggtgtgagcaggacaatcggatgttctttgggttggccggtggcagatgcaagacctgggttgcagggagtgggggtgggggctctacctttccataacagtccatcagtaccctccccaccaaagaaggcaagtcatctgaataaagtggtgtatttaccctgcaaacccagctcaaagacctatcctcaggatatttccctcctctcaccagattcccacccctggaacaccccttcctaggtttctagaaccactgctgcagatagaccaggcagctggtcacagttcaattgtgaacatttttcggctatctccatgcaaggtttaagaccga

SEQ ID NO: 56524 - DNA, 1087 bp, Homo sapiens
tccacagtgttgatggataccgatgcaagcccttctggggaagacacagtgagagcctctctcagccatgcattcctcagcctgactgcaaggtcgcagccccctacaaagcccagtctgagtgcttcccaggctgccatgtgccaggtctccctcccacggctgtcctggaaggctctgctttgcaccaacttgccagcacttggcattagtcaaccctctagcttttaccaatctgatgggtgtaaagggaattcctgcgttttactttgcatttctctgattcctgtgggtttgagcagctcttcattgaattgtgtgtcatttgcactttcccttctgggaattgtctgttggggttggctttctgtcaacttaaacaggagcaaacttggttacttttaattaaaagcaggctcgtggcagcaggggagttttacatgcataggaaggtcaggtccagccctgcccatcttcgtgcatactctctctttggtcactgctgtgcggcatggtgagcttggcacctggccttcagaatgcagccacagaagggagttcatgggctaggcattctgctaagggacacagctgtctctggctcctgcatccaattactggactctctgcttcattgctctggtggagctgccagcctgagtctccacatgttctttcaacactcccttggtggccagcccagtgtgcttttaatcattgacaagcaagaggatgccacagagaaggatgttggctgctgttcaggcatttggggactggcagggagggctgctgtccacgacggaggatgccacaagtggattcaagactgagttttttgtttttctatccatcaactcaagcatttgttattttgtttgtgttacacatagtccaattatactcttttagctatttttaaatgtacaataaatttttattgattctagtcaccctgttgtgctatcaaatgctagatcttattcattctaattatatttttgtacccattagccatcccctttctctccttcccaccccccaactaccctttgcagcatctggtaaccatcattctactctctat

SEQ ID NO: 56525 - DNA, 1745 bp, Homo sapiens
ctgccgatgttctccgggacactgaggttttggtcgtgggcattatgtcaacagtttaaaataggcatttttagaatcctgtgatataattgctttcagattcagcctttaaaaaaagtttctttgagcctatggtggctccaattcagaagagaacatcttctaagtcactccgtgagacccacatttcagtagcagtcttatgccatttcgttcattaaacaagtatttattgagtgcctgctgtatgccagacacagtctgaagatgcagcagggaactagccacacccctgccctcaggaagctgaccttccagtggggagacatcagcaatagaagtaaataatcaatatgctggggaccaccagggatgtaaagaaagctgggtgcggtaggcagggtacggcctcccagtgaagtgtccaatcccgggagcctgcgaatatcttacctgatgtggaaaaaggggccatgtagatgtgactagggccttgaggcggggagatgatcctggattatttggatgggcacggtgtcatcacagagtccttaggatagggaggcggggtccctgtgggtaggagatgtggcaacacaagtggaagtctattcagcatgggacagagactggaagatgctacgcagctagtttggcctcgcaggtagggaccacgagccgagccaaggaccacaggcggccgctagaagccagacaaggcaaggaaacaagttctccccggagcctccagcagaacccaaccctgatgaccccttgattttagcccagtgagactccagactttcagaattgctacagaataaatgtcttgtttgaagctactaagtttgtggtcctttgttgcagcatccccagggcactcctacgcgaggtcaggaagtgaatttaatgttagtgtagggacgggggacaggaaagtcctgcctgacaaggtgacatttaagcggatgcagggtaaagcgtggcttgttctgcggcagcagccacgctgatccagagctcagagcccagcccaacactgggggacgtgacacagtgaggaagtatgaagctccagcaggaacgccagccagagggagcaccaggaatgagtcatgtcagcctggacgtgcccagccccaaattccagcatagctgctcaccagccagtcactcgacctccccaaacgtgcttgttctgtttgtcatcagttcagtgatgtggccacagaatccgctccaaagggccgcgtggtgggttgcgtggtgacttcccgcagagggtacatccacccaggacctgtgtgtgcggccttgtttggaaaaagggtctttgcagatgtgattaaggaaatgctgaggttattctgcatgggagcggctgtacctccagcgtcctcatgagagaagagaagggaagggcagaggacacggaggggatgtgatggaaacacagagcagacactggggtgatgcatctacattcccaggagcatcgtggatcaccagcaggtaccagatcccagaagagacaaggaaggaccctcccctagagcctccagaggaaccagccctgtgacaccttgattttcgacttctggcctccagccgggcgtggtggctcacacctgcaatcccagcagttcgggaggctgaggcaggtggatcacttgtggtcaggagtttgagaccagcctggccaacatggtgaaaccccgtctctactaaaaatacaaaaattagcc

SEQ ID NO: 56526 - DNA, 517 bp, Homo sapiens
gctgggattacaggcaccccccaaaatgcccagctagtttttttgtacttttagtcaagacagggtttcaccacgttggccaggctggtctcgaactcctgacctcaggtgatccacctgcctcggcctcccaaagtgctgggattacagtcatggtccaccatgcctggctgtggagactcattctaaccagacaacttaatcgcttctatctgcaaatacacaattcctctggaagcaaagaatgaggccgcaattgcgtaatttgaacttttgtgcagccttatgaactgatgcctggaaaagactttgcctggttttcctgtgcaaacataaaaagtggtgaagtgttaggcaggtggtccgttcggctccccagcaaccccttcccacatgtctgttgggcagtgaacacatttttttctttttcttttcttttcttttttttttttttttgagacggagtctcactctgttgcccaggctggagtgcagtggcgtgatctcggctcactgc

SEQ ID NO: 56527 - DNA, 1640 bp, Homo sapiens
cttattctcctgtctaacccaaacattgtactctgtgacctacattgcccctttgcctctcctccttaggtttaaatttggcctctaccagttgctagttctgtcatttggggtgagttgctttaaaccccaggcctcagtttcccaagaaatcagctgtgccatcaaagacagtgcctgcaatctgcgcagctcctcccaggacagagatatgtgctgagcaattgattgttaaatgtggaccagaaagcagatctgctggagccaacagcaagcagggtggtttctgagaaaggcctcacctcgctttcgaaggttgaggttggagagggtggggtgtatcaggattgaatctactcatgggaaaatagcctctctgaatgtgcccactggattcctgccctgaccctgtcctggggtactggatgcctgccccttatcagagggcagtgccatgccctgtaaagcacagttcagatggccctggcaattggtccgagccgtccttcattctggaagggggcaaaggccaggccagcttcccagggatcaggcactgtggcttcactgggaacagaatgctctctgtacatggagaatggtagaggctggcactgtctaatctgagctcctggatcaccctgttctcgcccagagagaagctggctccatctggggatgagtgagggcagacgtgtctggtgggacagagcctgggccacagccttgcacctgcagaacccattgtacaaacacacagtgcatggaagaggaacctgcagcccagcacaaagctgctcaaacagaaaccaaaccaaaagctaacctcagccaattcagaggcaggtccacatctgaaccaagagctctcccagcaaattggcctggaaagcccttctcacatcaaggcaggaagataataatgaccctcatctttcaaaagaggaagctgagacactgagagggtaggtcccctgaaggtcatacagctcttaaatgctggggccaggattccaacgcaggcagggaggcccggatctgagctcacagtgaccacaccccagcctctgtgaactgaatttacgcaatgtctgggaagaaaaggcagggtccactccgctcagagccatgcagggcagtgtgctcccgtctccccggcatttgaatcactcttgtggtgtgtgtccagcacagatgcacgggacccctcaggcccatatcctcaaacaggtagtggtggggcaccagtgcacgaacactagggctcagcagtcagcctgggcgggtcacagttccgataccctccaggctgtctgggaggcggcctggctgtgggaccagttctcatgtgaagcaatgaagccactctgagcttggccccctgccctggcatgggcactgggctgcctgtgtgaaactcttgtttctccaggtgcaagacaaacctggcactctttctggcttctccattcacttgccgggggcaggtggccaagcctggtttcatctccttgggggggaatggaatactctccacattcaacccaaaaacagccccagcaaagggctgacatgggagggagaggggcagggtggcgccacgcacccacgggcacccaatgctttgacgccgagaccca

SEQ ID NO: 56528 - DNA, 2567 bp, Homo sapiens
ccgatccctagttcccacactgactggtgttaatccagaccacccacatgcacacttgccttacaggaaggctaagtagaatggggtggcattcgtcttgccccaagccatggataagctacaaggggacaatgcctggtaccaacattatcaattatgtaaaacactgggaaattgcaaaagggtcaggggatgtgtaacctcagaactaaagtgtgaaaaagccactgggagaatgttgtcaaaagggattaaaacaagaccaaagaagtacttttagcttattacagagttcattcacccaggagtcagctctttagccacaagcattgagttgtgcaataaacatctaagtaacatccttcccaatagacggctgggaacagacaaaggggaggtgccctggtatgttgtattttactcataagaggcacagacagtcgttggcactcgagagctggtggaccagtctgtctgtactttcaacgctgtgaagccatagcctgcgcccacgatccagggcactgagatacacttacctccagcctcttgccaaatagtttcacagcagaagggaacttttccttcttgaaccggccccttaaaagtttctagacacctgtgctccaaatgcctgcttgatccttctcaaccggctaaagtcctgcaaggaacacaaaaatgaataagaccgcaggcagctgacatttcaggagagggcagaagctcaaggcccacagtaggagtcaagcaagaggcagaaggtccagtgctcagggcttcaacagccgcatgtcagggaggacggcggacaagccagtcccatcgcaaagctgctgtgcctggctcagcactgacaaagagggaggcgaacaacaggtggggcaggagaaagagccgccgcggagcgcggcatggggccaggagccgaccccggagccaggcagccttcgcccggggaagctccagacagcgcggggacagagcatccctcagacgccggctcgtgggggagggggactatccacgcctccgccccgcctccccggagccccagcggcccctcgcctgtgagctggaccctctccccacctgcgcgcacgccccctacccctgaccccaccctcgccctgtgagtgggcacctgctcacctgggcaagcgccccccactgcgcacaccttcccctggcctcacctgcgcacaccttggccactcacctgcgcacacctcggcccctcacctgcgcccaccttcccctggcctcgcttgcgcgcgctgctccacgccgcctaccctctagccaggggtcggagtcacccgcagggcaggggcgcccgcccccggatgatgtcagcgattgcctgccaatcggaggcggaccctgcacgcccggcggctccgcgccccgtgattggtcgaggagcctgagctgactccgggcccaccgcgcccgccattcggcagcggccggactcgagattgacggcccaggccccgccctgccgccccaccggcccgcccgggccctagtgggtgggcgcagcctctggcgcttcttcgggatcccagctgaccagctgggggtggggcgtggcggagtggccacgtgggccgcgcggagaacgcgccaggctcatcacctggatcatcgtgcctcagtttccccctcggcaaatggggcttcagcggctcgcgacgcacattgatggagcgtatgtccaggcgccggtgcaccgcaaggagcaaaacagacacagttcttggtcctagggctcacgtcccggggcgaagaggatcctccataaacgatcaggtaaacacatgggtgtcagggaaggctcgccgctgggagaccgccaaagtgacccgagatggagtctgggtggcctgcttattaggggggcacacctgtgcgaggacgggaggggagggagcagcaggactgggcaaagggagaagctgagccacagtgcgagccggacgcacgggccacgttgcgagggcatgacctggggcgaggcagccctggaggagggggcagctgaaggtgtctgctgaccccacacccaacagctcgggtaacaggccttactgtcagagcgatctggttgccacgtctctgtggccctcagagagacatcatgttttcttttttccctgcacctttttgttttgaaaaatgttcagcatacaaacaagttgaacgtaaagtgagcacgcagattcctaggttcagcaggggtgagcagctggccacgtttcatttctctccctctgtgtttatatatgtgtatttttcttttttcctccccactcagcccccaccattagctgcagataccgtgatacccccctcccaaatacttcggtatccaactccttaagaacaagaacctcctatattaccaaaatacaatgaccacatcagttcaatgctgttatctattttccatctccagtttcccgcggttgtcccaataatgccctttacagcccttttgttattgttgttttgttttgctttgttaagacgggggtctctgtcacacaggctggagtgtagtg

SEQ ID NO: 56529 - DNA, 2130 bp, Homo sapiens
cctcctgttacctgttgaatatgtatgtttagccaatcccttcagcatagcgctcctgccccaacccctcctccttggacgtgcctgtctctggccttggctggagacagattcccagcctcagacagatggccgccaccttgcaggctacgaccgtttacaagaaataaagccttctctttttccaaatttgtgaattgtgtgtttttaaactaacatgaatgacagaaggaaggatggcctcttcaagcaacgatgatgaggcagttatttatatgggggaaaaatggattctaccgtgggtggactaaagaggaaatgtgaaaaaataaaaagtgagaaaccgctggtagtgaatcggtgcaagcgccctggagaagagacttggcaatatttagtaaagtcaaacagcacgaaccctactactctgcaaagctgctgcaggaactggcggaacgaggtcacgaaggaaaccttgccggaaaggaaattgcagcagtgcctgtgtgcgtgcgtctgttggcaaaacgctgctaataacgtcaatgcccatccgctattgaataaacctgctttactgccactatggaataccaaactgcagaaaaataattaaaagaacgtatctcatattacaggggaaaaaatcaagttgcagaagcacattcaagtgcagttcctgtagtttcagaaaaggcaaacagtgcgctacctgagctacttacacacgtggtacaggagtgaaaggggcaggagagggttcccaagaattcagcgccatccgcccagggtggcgggattcccagcacggagaatcgattgctatcgtctgctgtcccgcgggcacgatggagcgctcctaccgtactctccacttttggtgtatttggaacgtttcatgccgtattaaaataaaacatggctaagctggatgtggggtggcggtgtgggataaaatagaggggtgctgcagctgggcggtgagccccctgcacctgtgcacctgaacgggtttgcccgcaagggccgggccggggccggggcctgggacgtgggtggagccggggcgggggcggggcccttcgcggtgccgtgaacgctgaggccacctcgctgcgcaggcgcggtcgtgagctcctcagacggggcggggcgatccgtaggcagggcctgacgccgcagtcctccttggccggagcctcaacggatgggcggggagggggcggggccgggcaacccggaaggtccggcgtcccagccgcctacctcgctgggaccctggtcttgctgtcccccgctggcctcctgcccaagcgactgcggccaggatgggccggaaggtgaccgtggccacctgcgcactcaaccagtgggccctggacttcgagggcaatttgcaaagaattttaaagagtgagtctggggcggcgggggcaccggtttggggtggcgcacgggcaccgtggctgggcccaggcttgcccgtggcgtgctcacagccttgccctgggaaactctcggccctgggcatgggatcaggtgagataatgggcaatgaccccgccagtggtacgtgctcaggtcctcgtcgggaagtgagtgtttatagttcccggggacgagcgatatacaaggcacggttaagaaaagtctggcggcttaggcgggaggcctggggatggacccgtgttctgatatctctggggtcccgtggttgggactgagctgcccattctcggagatatctaagttgaacagaatggctgcgcactggcggggatggtgtgcagaggccagagattgatggtctctggtccccgtgggccttcctggtgggagaaggcgtcccagaaagggaagtagaaaaagacgcctgtcatcccagcattttgggggggccggagggggtggaagtcacctgaggtcaggagttcaagaccagcctggccatcatggtgaaacaccgtctctactaaaaatacaaaaatcagccgggcgtggtggcctcgaagatagggtgtggttgttgaaaggtcaccatctaattttcgttcatatggacgcaccgtggaggatgaaaagttaaactattacacctgcacctaaatgggcaagcctgcaggtgtagtc

SEQ ID NO: 56530 - DNA, 602 bp, Homo sapiens
gcagagtgcgagaggaggggacagctgctggaactcggtggtcctgtattgaaatttatggccacacttgttgctggcttcaaagtctcaccagtccgccagttcagtcttgatttcaccagaaaaagtctgcctcaattttccccctataaccgtgcctccccatccccatggtccccacttcctggctggagtttccttccaccaagatgaggcagcatcctggccccacgggtcgcaggttgagctgagctctgcactgcgggatttccccagactgtgctctctgagtcagccccggcggatttccccagtccttggcagttactggggatggaagagaaaaagtgctaagatggagactgtcatctcccctggcccatctggcccgtatcccagctcctgctgaaggagctttggacgggacaggacagggagcgatggggtgactggggtagccctcactgaaggcagcacagggtctcacctgtccctctgttgggaccctgggggtcttacacccccgacattgcaccacagtgagggtcaggaagggtgagaaggcacggaggtgtgagtttgggagtgtcaagaaatgcatc

SEQ ID NO: 56531 - DNA, 2026 bp, Homo sapiens
agtggaagaaatttctaagcagcaaacattcaagctgtggcctgactgaatctaacatcgtattctcacatgcaagagcacataaatgaattaaagttggaatttatatttaaaagggaatcaaagtgtaaaagtttggaaactttgcagcatggccatgtggcagagaatgaaaaagcattatcaggagaggaatccaagcaggctatagagcaaccacctgctagagatattagcatgactcaaaaaacaaacaaaaaaacccaagtgctaatagccaacacaattggaaaagacttcaaatgcatttcaaaagtgtttgagacagcccctctcatcactgacctagaggtctaggaggacaccatggtttcaggggctcaccccaggccctcactgccctgcatagccttggagcactgctccccacacataggctactccagctccagcctcagctcaaaagaccccaaatgtaactctggcttcagagggtgcaagccataagccttggtagctcccatgtggtgttaagcctgtaggtgcgtagaatacaagagtgaaggaggcttgggatcctctacctagattgcagaggatttatgagaaagcctgggcactcaggcagaagcctgctgcaggggcagagcccgcacagaggatatatactagggcagtgtagaggggaaatgtggagtaggaggcccacacagagtccccactggggcattgcttaattgagctgtggggaggaggacaccatcctccaggccccagaatggtagagccactggcagcttacatcttgagcatggagaagctgcaggcacacaactccaacccatgagagcagctgcagggtgcgaaccttgcaaagccacaagggtggagttccccaaggccttaggagcccacccctcactccagtgtaccctggatgtgggactgggagtccaaggacattattttggagctttaagatttaatggctgccctgctggatttcagacatgcatggggtctgtagccccttcctttgggctgatttctcccttttggaatgggaatgtttacccaatgcctccaccctcatgtatcttcaaagtaaataatgtgttttgattttcacaagttcattggtggaagggacttggacttgggactttggacttgatgttggaatgagtcaagacattgagaggactgttgggaagagatgattctattctgcaatgtaaggacatgagatttgaggggtcaaggggataatgatacagttgggatgtcccctccaaatctcttgtcgaaatgtaatccccagtgttgaaggaggggcctgcaaggaggtgtttaggtcatgggggcggatccctcatgactggcttagcgccatctccttggtgatgagtgtgttcactcagatctggttgttcgcaagtgtgtggcccctcctcaccccttgctcccactctcacgatgtggtgagcctgctcctgcttcaccttccaccatgaggaaaagctccctgagggcctgcccagaagctgagcagaggtgggtgccatgcttgtgcagcctgcagaaccatgagccattctaacctttcctttataaattacccagcttcaagtatttctttagagcaatgcaaaactgagaatggcatgagtaaaatataaagaccatggataattttgaaatctaaaaatgtgaaattaatattcctgggggagtcaacacaggaaagatgagagcacgtgggcaaaggctgttgcccattggtcacatgtggtcagcagagagcaggtgaccagcaccctggagctttgcgggaagcaccagacagcctggagctgaggtttcaattgtaggggccaaaacaaatagggaaaaagacaaatttagtaaacaaagaaagtagatgctcaactgagccaggaggaagtcactagcaaagaggaaaaaaaatagagctctggaaaaatagcgtaaacagtcacaaggaagcgaccctgtattgtgcctg

SEQ ID NO: 56532 - DNA, 2367 bp, Homo sapiens
aaaaaacaggtaagtttaacttttattgtattatctagcttttaaaaaataagcaaataaatcataatgccagtagtcaatttagggtgatgggtgtacagtatttacaatattctccgtattaagtgtcacaaaataaaaatgattatttttaagtaaatgggatgcctgtggatgatgtagataattccctgtaattttctgttggtcccaatgtaaagctgacttttctagacgttctgtgggctcacaggccatcctagttccattcaccagacagatccaggcggacgcccagaggcgtgtgagctggggctacaggcttgcaaggtatcgagttcaccggctgctgaaaaatcagttatgaaggtatacgtaggggtgggacagtgaatggtgtataaaaaggagggtaaggcagaagctggggccgcaggatgtgggttagaaaagtgtgccgaggtgtgtgaactggcatgacagcctaagtaagacgcggaatgtgggtgccctggaggtcccgcaaggctcttcagctctcagtttcgggagctcaagccgcaccgctgctttcacagctcatcgggaacaggctgctcagttcatttccttgatggccaccctcctccctctcggccactcccctccccatcaacaaatcccaacgcccctcacccgggaccgtggacctcgaggagccaccgttgcctcggatctcggaccaccaaacctattctcccgccaattcggccttctgaccttcgccttctgaccccgagagctactcttccgtcttccgtagcacaggaatgcgttctggggcttcaagaagctgctgtttttgaaaatgagtcctaccgaggcaagatggcaggtgctgcagccaggaaaatacatttccgtgtgttttaatatttattttcactcactacaactctttcgtggagggagcggaatttaaacttccgggtcagcctcagtgcagcttgggaaacgtagttcctagtccccacgtctcgctccttggagcccagactgagggagcgtcgcgaaagttgcccgttttggaacgctcccatttggctctccaaagggaagaattggttaaatagttgcactgaaaataatgcgattcaaatttctcattttccaagaacgctcccttgctgaagcttgcaagggcacggtactcccctctccttgaccctgaaacgtgcagcaagtagataacctcctgatccctgacagtctccgcctgtgttgatgccccgccccctctgctggagtccgagccgccgattggctaggagcacttgagcagcggaagcagctggctcgcgcggggactgcggtgagggggcgagccgtgaagatggcggcagtggtggaggtggaggttggaggtggtgctgctggggaacgggagctggatgaggtaagcggagttgagagacgaggagagactcaacctgagactgaggggaggggcagtgaggtatcgggaggtgggggtcttaggagagaagggaaagatcctgagagggaaggagctgactagggggcgggtgcgtggagagcgaagtcagaggcactcctgacttggggactccgaggcggccttgggagtagaagacttgcattagcctcaagggtgaagatggaggacagagagagaggtcggaggggtgggggtgttaagattttgtgattactagctgggtgtcttagggtaggaccgaagggctaagaggtagtttgagttggagggacgtgaatttcttcaggggaaggctgggcttctactgtgggagaggactctgtctaagcctagggtgggggttggggacacagaccgggaaagagtgctaatccactagtagtatagctttgagttatcttaaagttggaactgttttatttatcgttccattctaagactttgtatctaatgcatgctcagtaaagttttggccaacgaatgaaggaacaagtggatgaataaatgattgtatgccggaattcatgcatttattcacttaataaacattatgacttttgctccgggttctgggccaggtgctagggagacaaggggcccctccgttgaagagcccacagtctagtggtgggagacagacaagaagactagtcattgcattagagatataatggtggcactgagaagtgtgcaacatttcagcttgggatagggaaggcttcccggagttgctgagttttaaacgataaataagtgtctctctcttcttctggatttatgagttccttgaaggtgagctccttgagattgtatgttccctttacctatctaataggcatttaaagactggtgtattaaaataccagtgg

SEQ ID NO: 56533 - DNA, 5451 bp, Homo sapiens
gtctgtaatcccagcactttgggaggctgaggtgggaggatcacttgaggtcaggagttcgagaccagcttgggcaacatgatgaaaccccgtctctactaaaaatacaaaaaattagccaggcgtggtggcatgcacctgtaatcccagccactcgggagactgaggcaggagaatcacttaaagctaggaggtggaggttgcagtgagccgagattgtgccactgcactcctgcctgggcaacagagcgagactctgtctcaaaaaaaaagaggaacttaggtgaatgacatggatcagatgtgcattatagaaagatcattcttggggcagaaatggaggagggactaaggggcaggaaaaatttgccttaatccaggcaagtagggcttccaaatttatctaattctaaaatgcacataatttctggtgtattatatatactgcaggagagcatatgttaagtcccaaaggagctgggagcagaggaaggtaaaactggaaagacagctaggggtcaggtcatggccttgtgtggtcccaagagctcactgtccgtgctcctgtggagggcattgtgtagtctactaaggagttcttactttcacaggcagcattaggacaccagaagatttgaacttgggtgacacagtgactcgagaagtacatgaggttgaaggacctggattaagtttgtagactgagtaataggaaggaaggaaaagatagtagatatatttcttaccccactgatctaggccttctggtactaccagccatgaactttggttttcccttctccctaaatcttccttcagtcctagctgtatgctgtgttaagtttggaaagtatttactgctggctattaaagatcaagtaggattatgttagtatttctcttacaaggaagagtcacttttttgttgtttttttttttgagacagggtcttctgtcacccaggctggagtgcagtggtgtgatcatggctcactgcagtctgaacctcctgggctcaagtgatcctcctgcctcagcctcctgagtagctgggactacaggtgtgtgccaccacacttggctaatttttaaattttttgtagagatggagtcttgctatgttacccagctgggtctcccaactcctggcctcaagtgatcctcctgcctcgggctcccaaagtgttgagattacaggcatgagccaacatgtctggccaagattcacttttatttatttatttttaagatttttaatttttttcacatggccactgtgccaaaaggagtcacttttaaacttagtagccgttggctgtatcagatggctttcccagttcctctggattcttctgcaatatcatccccactgtttgttcaagagagaattaagagagaattactcagtgtctgagtatttcccaagcatttgctttgtgtctagttctaagtgtgaagtgtgaaggggatgctgaacaagtaagtcatttatccttgtttccaaagcagttaatattatttaacatctgtctgtcatttattgaacacatacagtataccagattatgagctagttctctgaaatacaaagaagaatacgactcaaatgatcctttaaccatttcagatccactaggatggctaaatgggaaaaactgtttgcaaatcatatattaataaggtatttgtctatagaagatataaagagcttttacaactcatcaataataaaaaaaataacctagtaaaaaatgggcaaaaggccaggcccagtagcttacacctgtaatcccagcactttgggaggctgaggagggtggatcacttgaacccgggagttcaagaccagcttgggcaacatagagaaaccccatcttccctgaaaataaaaaatagccagacatggtggctcgtttctgtagtccctgctactcgggaggctgaggtgggagtatcacttgagcccaggaggttgaggctgcagtgagttatgtttgtgccactgcactccagcctgggtaacagagtaagactctgccttaaaaaagaaaagaaaagaaaagaaaagaaaaatccgcacagaaacttatacacaaatattgataggaacattactcataatagccccaagtagaaataacctaaatgtctatcctctgatgaaaggataaataaaatgtgtctgcctatgcaatggaatattatttagtaagaaaaggagtgaactcctgataagtgctataacatgggtgatgggtgatccttgaaaacattttgatgagtgaaagaagacagtcacaaaagatcacatactcaatgaatgaatttatttatttatttttgagataaggtcttgccgtgttgcccaggctggtctgtaactcctgactcacaggattttcccctgtcaccctccacagagtagctgggtttacaggcatatgctgtcacattcagctgctgaatgaattcatttgtatgaaaggtccagaaaaggcaaatatatagcagtataaaagaaattaatggttaccagggcttggggatgggaatgaggagttagtaaatgagcatgaggttttttttttttttttagagtgacggaaatgatttaaaataagatggttgcatcttattttatttattattattatgtttttggagacagaatctccctctgttacccaggctggagtgcagtggtgcagtctcagctcactgcagcctctgcctcccgggttcaagtggttctcctgcttcagcctcctaagtagctgggattacaggtgctctggctcttttttttttttttttttttgagacagtatcgctctgtcacccaggctggagtgcagttgcatgatctcggcttgctgcaacctccgcttcctgggttccagcaattctcctgcctcagcctccctagtagctgggattacaggcatgcgccaccacacctggctaacttgtattttaagtagagacggggtttcaccatgttgcccatgtggtctcaacctcctgacctcagatgacccgcctgcctggcctcccaaagtgttaagattacaggcttgagccactgtgcctggctggttgcatcttattttaaatatactaacaataattgaatttcttacttaaaatggatgatatggctaggcatggtggctcacacctgtaatccgagcactttgggaggccagcgccggaggatcacttgagcccagaagtttgtagagacctcatctttacagaaaataacaaaaattacccaggcatggtggcatgtgcctatagtcctagctactcaggaggctgaggcaggaggatcccttgagcccagaaggttgagactgcagtgagctatgatcaagccactgcgctacaacctgagtgacaaagacctgtctcaaaaaaaaaaaaggaattgggcagtgaaggagtgaaggtgagtagagaattctagagagaaaagacggcagcagccaaagaaagcactgagggatgaaagagatagatagttcaatgtggctggaatgtaagccatttggtggagagtggtgaaataaggtcgctggttgggccatattatgaagtcctttgtgtgtcctactaaggagtttgaactttaaccccaaggcaatagaaagtcatcaaagtttgtcaaagtagtaggatgatgcaatcaggtgtgtgtctaataaagatcactgtggctgctgctgtgtcatgaatctgtgctggcaaagttagagtcggggagatcattttggaggccactccaattgttagagaaagagcaagggataaagtctgaactaaggcactatggcaatgaaaaactcaagggagattttatagatgtttagatatgatcagcacatgaactgtatgggctgtaaaggccttaggagttcatagaggatagttctgttctgaaagattctggaggaggtgacacctagattggatctttaaagatgggtaaaaagtttgagtatatggaaagctgcagtgcatataggaaagagtgagagaggagggccagagagggaggaagccagactgaaaaataggaatttgatgggatagcaattgaagaaccaaagaagcaaacttagttgctcccaaatttgaaaagtttaatttaaaaaggtttttggccaggtgcggtggctcacgcctgtaatcccagcactttgagaggccgaggcagttggataacttgaggtcagaagttcgagaccagccttgtcaacgtggtgaaaccccatctttactaaacgtacaaaaattagccgggcgtggtggctgcacttgtagccccacctacttgggaggctgaggcatgagaatcgcttgaacctggaaggtagaggttgcagtgacctgagattgcgccactgcactccagcctgggcaacagagtgaaactgtctccaaaaaaaaaaaaaaaaaaaaaaaaaagcttatcaactcagctggccaggaggttgtgctttctgatgaggggtgggggtaaagggcaggcagcagctgtagcagctgttagagccaacatctactttcacttcactgcccaaagtgtgccacccttgtcaggctaaccatatccagtgtctgcatgatctccagctgatttatgactttggtggcctgaaaggtgaggtttccacttcaacttattagccttgaattcttggcaaagctgaggagttggggaagaatgtgaatgagaggagaatggggagctacaaatgtggtagcctgtgaacctttggacttcacttgttatcttaatcacgcagaataccacagtatctgaaccccaccagatagagacagttagcctggttgtgctgaacctaccaggtttcatgagctagctaatctgtctttttctctggggcttacacagcattttgtgtatatgtcaaaggttatccttatcatattattttatatttaatagtctgtctctccctacttcttggactgtgaatacatcaagggcaaaggttgggcttattcctctttaatgttttgtgaaagaatgaagtcttggctgggcatggtggttcacgcctgtaatcctagcactttggcaggctggggtgagcgggtcacttgagcccagaagttcaagagcagccaggacaacatgtggagaccccttatctacaaaaaatttaagaattagctgggtgtggtggcacgtgcctatagtcccagctactcaggaaactgaggtgggaggattgcttaggcctggaaagtcgacactgcagtgatctgtgattgcactacggcactccagcttgggcgacagagtgagaccctgtctcaaaaaaacaaaaacaggccaggcatggtggctaatgcccgtaatcccaacactttgggaggcccaggcaggcagatcacttgaggtcaggagttcaagaccaa

SEQ ID NO: 56534 - DNA, 782 bp, Homo sapiens
aacttgactctctagtgacagagccttcaggggaggggaggccactgacattttctttaggatgacaggggcaacagacttgaactccaccagccacctctccttttctgccacccagtgaatgaggaaaggcaagacactccagtgtaggagctagaggccctggacacagaggatcgatgtccccgcgctctcagctcctgatctttgggagggtggttgggctgagtaccttacctgggcagtgagtttctgcctctcttcctggaaccgctgcctctcctccaggaccttgaccttggcaccctcatacttggcagtcatcacctccagctcccgggcagtgctctgtgcttctcgctgcacctcagccagacgggtctcagcatcagcacgtacggctgccaactcttggacatacttctcccgggcctggtccaactccacttccagaaactgccggccaaggttggcccgctcacccagcccccggttctcctctgccagcaggccatgcgccttcttcagcatgctcagctgctctgcatagctggccttctctgcccgcagctgctgagctgttcgctcctgctctgccaccttctgccgcagaggaatcagctccccaagctcccgctgggcccgcagcagctctgcccgcagtcccccagcggcctgcttgctctgctccagctcctcacggtggcgtttctcggcagcggcctgctcggcctgcagctgctggcagaggtgcttagctggcagcagctcactcaccaggg

SEQ ID NO: 56535 - DNA, 2360 bp, Homo sapiens
actagcttgggctgaagcctcctcttcacacagaccactccatctttgtagcctagagtttggcacagaaccccaaagccctggagaggaacaagggagggattacagaggaaaccaagcttctctggtttcttcaaaagtggcttacagatgtctgccccttctccccgttctctggagggtccagatcaggatgatggcaaaagagctgcaatcaggaaccagacctgcaaccaggcctgcagccatgtattgtactggggcgcgtacacatacacacacacacacacacacacacacacacacacacacacacacacacacacacacacacacacactgacctgggccccccaccactatattcacacaccctggtccctatcagctgacaaaatgaaccttttttcactgcccaccaccgtgcacacacccacggcctcacgcagaaatggtgaagccctctcctgagctgtctctacagctcaacgtgcaggcaaacacgctttccttctctgaacaaaaacatgctgacatctacgcaagggggaaagaaagcaaccctttgctctgaaaggcgccaactcccggatgttggcaagctctgctccacagcgcctgtttctgagtatgtttacttgctctccctcttctctccctcccctttaaggatggcgcaggaaagggaggtgaggggggagaatccaccccaccccctcgtccatgtttgaacaaaaacccagagaaagagtgagggagaaaaagtctcggtgcgggggggccttaccagactcctaaagccaaacgtatctacaggttttaatccgccattagcatttaaatcttgaaaggagaggaggaagggggggccagtggaaagtaaccccacacacaaaagaaaagttgttggttttcttctcagtctgcctggcaggagcgatcttcctggctgacagccagaagtgcgtcacagccaggagtctgctttctttaaaggcacagcaagcttccccgatctgggagcgacagcaagcaggggactctcagtgggggtggggcccagagggagggggtgcactggagaggaggggctgcaaaggggaaggctggaggcttggtccacgaacaagaaaagcaggacgaatgggggcggcgggttgagggtgaaggcacaagcaggcaggcaaaattactgaactccaacagcagcaagagccaaggcaaactgtggcataaacacacaaaacacatcttacagtggcctgcctgacaaactgggatcaaccggacactcccccttcgctctgttttccacccagagtttaaggcagcagtaataatctgtccatctctctggacagcaatggaagggtaggacaagggctgtcctgataattagatcagcccctgcctggcggaccgcagggcaaggaggaagacccgggaacagaggctttgaagaacaagcaacatgcaggccctctgatcgggggcaccttcctgccggccccagggcaggctgtgtctttaagtacaaccatgccactcacacacaaagcgccctgccaccttccatgggcaccgcctgccctgctctgggacacggccacccactaaatccattccccgagggaatctctccagcccataccttctgcgtggcaaggccaggatgccgtgctgtgcccgctcctccccctccgccacccaaacaagaagcccaggcagattctggccctggagtacaggcctgcgctgtcctgtgctgcgtgctattgtcggctgtggaatggccgccaaaatcccagctgtgctgccagaacctaatcccctgttccgctgagcatttatggggaggggctgaggggccaaggcacgagaccgagtacgccaggcactggctgcagcccttaacagacgcaggcacggggacttgtagactctgcttctcctacatggctgaaaacaaaagatgtctgactcttagaagacaaaatcacagcatttccccccactgaatagcgaacttcaccaaggctgaaagggaagcccaccagatggtcaacaggcaccccctaatcttatgccacaaacatttactgagcacctactatgtgtaaggcactcctataggaaactgtaggaagtatacaaagatgaattaagcccagcatccgcactgaggtaggttgtaattcacaggagataagaaatatgacttgaagattaatttcaaactggtgtgctaacttccataaaagctgtaaagaaaaattctaaccagtttagaatagggaaggattacgaaaatgaagtgccattttaatttggaccttgaaacacacaggtagcatttcccc

SEQ ID NO: 56536 - DNA, 1705 bp, Homo sapiens
cacaattactttgaaggggtcaaacttaaaaacattctaattgccccataattacaatcaagggggcaagacatgtacaatatctgtcacatttgttcaactattatatcactttataattacacattatataatgataaattttggccctggaagaaatcttcaagatcatataatcctaactgtccctttttacatatgagaaaagttcagtccattgaggttaggcaatttgtccctggtcacacatctggttagcaacagtcaggatgagaaacccagacacccaaactcccagcataatgcacccacacatacttatgtatacagctcctcctcccctgcttctcacttccttcactcccctgatcaaaagggacagaaataacttgggacactaaagcacaccaagaatggttctgaaacccagtagcagagaaatgatggcttaaaaaccaggacttctctgcagtggcctcaatggccaatgtttagtgtctggctcacaagagttctgggcaatctacctcagagcaagggccaatgaaaacctctggacaccaccctcccacagttagaaaaatatctttattaaacctctctgctctcctcctacagtaacctgtttgcctcaaataattgaaagacaaagacaatcactttgaagaatctgggtcagggaaaaagtaaatggtagagatcctgctcaggacaaagctgacctatgaaaaactagagggcagaaaccattttgacttacctcctggtggaagcctccacacactagaacagggtgatctccagcagtctggcttagaattagtttccacctagggaaggggcaaagggacaggaatgattattcattcccctaacccacccactcttagtgagctcagcctcacattatcctgggcaaccccagcgttctgtggatcagacagcaagcagaagggaagccatgcaggccaggtcaacggggtgagtcagtggcagagcaggaagagtcactggggcagaaattctggccttctgtggcaagactgccaagccacacccacacttggtcagcactgtgaaggccctgccctgttaggatttcagtctttaagccagaaaacttcttcctcaggaggccccacaccactctcattttcaagtgtctctcctcctgctcaaaaatcttccagttttcttctccctaaagcatcatatctaaattctttggcttaactttccaaatcctccattatatggcctcaagtcatttattcaaccttatttcccactattctacagaatatactctgaattgatcaagccagtcttcccacttctctctgcgtgagccaagccttttctcatttccctgctttcaattatccaggagtggtaaattcaaacatcttcaggggtcaggcaggtaacagaaacaaattatccaggcaaggcccagtggctcacagcggtaatcccagcactttgggaagccaaggtgggcagatcgcttgagctcaggagttccagaccaacctgggcaacatagtaaaactccgtctctacaaaaatacaaaaaattagctaggtgtggtggagtgtgcctgggtcccacccacttgggaggctgcagtgagctgagaccgtgccactggactccagcctgggcaacagagcgaaaccacgtatccaaacaaaacaaaatgaa

SEQ ID NO: 56537 - DNA, 1687 bp, Homo sapiens
cgtccccatttatgcccaacccataaacccaaagtagagccaacctcgcactggctacgtaacccgggccaagctaaacattataaacctcaggctccccatctttaaagtataacaggtggttagaagattaaaaagataaacatttggcaggtcattgtggacggtgtagctcagaaaatgctgactactgcactaccataactactgctattgttaacgataaaaggcaaagactttccaggacccgacccctcgcttacaagcctttcgggaacttgccctatacccccgaccccagtcaccttcagatttaattccacagacacgcccccaaacagaccctcccctttaaggcaccccccccccccccggctcctccctctcaggcgcctctcctcacaaaccttacccccatagattctgccctttcggactcggttatggaggaggccttccgctcgcagcggcctctccagcaccccttttaggcctgagcacccgcaggggtgcccaggccgcacgccaaacgcgggcccgcgccggttacctggctgcgcgctcccgctctgcctcgcgattctccggaatcgtacctcttcgtgggctcgcgccagcgctgtgagcgcacaattagtttaaactatggccccgccccctcgcgctgccctctgattggcctctgtcggcggggcccgcttaaggacccgggaaaaggaagtttgagggccactgggaaagagaaggggtatcaccgcttccggaccccggcctgtacttgaaggcaaagagaactacaaatcccagcgtcacccgcggccttgaagccccgcccctgacaaactgaaggtcccggtaagcatcgcgtcagtacttatggcgcctgccgggttgtggtgacgaaagcagttgccatggagttgctctgagtaaccctgaggcagtgggacgccaagactggagaggaagcgactgcgggtgagtcgggcgggaaaacaggaaacccgttctaggggacaagagatctatggagaagggaggggcactcacagaacgactaagaaccttcctgctcggggatctgagatttcccccaccgaccctcatcacctttcacagcgaacaagatacaacactcacatgggacagactgggcgagggggagcagagggagggataggcgttgagatatatatccatacagatttggggatgcttaagaaccacccccagggccgggagcggtggctcacgcctgtaatcccaacactgggagaccaaggcgggcggaccacttaaggccaggagttcgagaccagcctgagaaacatggcgaaccctgtctctaccaaaaacataaaaaaattagccgggcttggtggcgcgctccagtggccccagctactagggaggctgaggtagaaggatcgcttgagcccggagattgaagctgcagtgagccgtgatcacgcaactacactccagcctgggctatagagcgatacctccatctcaaaacaaaacaaaacgaaacaaaacaaaaacaaaacaaaacaacgaaccccgcccccaacgcaaacataaagctcccaaaatcggatgcttcaagttccaggcataacctgggagatcagaaacgccctcagaaatggggttggttttcctctgaggaactgagaccctcttc

SEQ ID NO: 56538 - DNA, 613 bp, Homo sapiens
cctggatataccactccatccttggtaagagcagctccagccagcatcaagttttaggcaactctgtcccaccagtgattccctctgagcttggcctccaccccatgcttggtggcattccccaagctgctaccttatcacatggggcactagttcatgtggggttattttgaccttaattttgattcatctgtgtcattctgtttcagggttctaaggaggtatggggagggaagcaggattaggaattcatgagctggggtacgccgttccagtaccctcctgcaaccccaggccccaattgtgggtcctgctcactctaggattaaggcagagagccatctggtggatgttgcctgacctgcatctgaggaggaggagaggtgggggtggaagggcaaagggtgtccttccagtagagagcagaagagagtgaagaaagctggctagcttccgcaaatactaaatacttccttccccaggggtgaactagggaaccaaaggcttagcagcaatgggaactggacctcattttgaaaaagtgggagtgaggctttggggtgttccatacaccggggttctaacataatcctattccctattctctctcctc

SEQ ID NO: 56539 - DNA, 2174 bp, Homo sapiens
agccacccttgcttcccatacaaacgacattttcctaggcttaagcccttaatccaaaatacgttcactgaagaacgaactacttcccaagtaccagtgatataatctatttttgtgaccatcttccccattagaccgtgagctacctgaaacctttctactctctcaggtctactatatgttcaaatgtagaatccgggcttagagacgatcaaaaaaggagagtagacagcaacttgagacttcatccttgaatgtcaggccaggcagggcagggattagagtgtggggagaagtgagaatgcactaagaggaagagggagaatttaaaactgtacaggtctccccagcctaaccctttctccaaaggtatcagatctacagccaaattctcagaataggcatgtctccagctaaaggaaccctcaggccccaggcagactgcactgaggcaagccaaactcagaaccaaatgaacttcccgctccatttctcttttcccacaatctagccaaagctaaatcctctttgttgcttcccagacaatttcccacatgtcccgatgtcctcactgtatcgattaaatccttcattggccaattcaaaggccaccaacttccagagtcgtcccctggccctagactagcagcgaccttccttctgcaaccccagggactaagacgatacacgaattcctgattcatctcaggacagactaactcagggcctcagcttacccacccctaaaatggattcgcaaagcccactaatacacagaagacacaggaagctggggaagggagtgtttcccggggacctagactgaggatccttgaatctgaaaagttttgaaggtaggagcaaacggaagtggtgggagcgagccggacaggcggctgcctgcacaccccgaggcggggactgtgtagaaatctggggctttaacaggggtaggagcccggcttggcgtctcctctgtaatctgtcccctccaggcctccgtattcagtgagccctgcagtccggctgcccgtcctccgcaggtttctttctgggccccatgccccagtgtcttagccctcattcccgagccccgcctgccgcggccgcacctggtccgagtcctcgttctcgctgctgtagcagcaccccatggccggggtcgggccgggcgctcaggccgcgccgaggagggacggcgtccgtgaggagcccttccggtcacatgacccgcggcggcctcccgcaggcaaccacccgcccccaccccccgtaccccctgtcccggagccgcttggccgcctcagtcaataccccggcttccggtcccgcccgctagcgcgtgatcgttgtcaaccaatgggaaggcgtaaccgtacacgcaagcacgtgatgcggggaaagggcggggcggatcacatgacttcatctttccagtctctaaactggcagtagtggccatcgtgaattgtgttatgcgttctcgtggccactaggccacttttctgggccattgagcgaactcgtaccaaatgccctcgtatgcccttgtgatatactcttctaaatgccatgcgaggggcgactgggatccaggcctgatgctccagatcgtacggtctgggtgcacacacacagatgatccagatgaccagtacctagtcggggaacacagagggtgtatcgcccagctgggctgggggtgaatacacagagggtgtattctccacctgggctggggatctgcgacttacaggaagaagggaccttatactaccttcacatgctgacgcgcagcggagataaatcctggtagaggagatagaagccacctcactgacctctctgctttcaggcttttatctttaattctgccttttttaacagcacccattgtaatcgaacgcacaaagctgaccatcagttctcttttcctaacccccgctccatgtcttcccttgggccctgaacacaggtccaagtccgtccaagattgtatagtgatccatttgttgttcatgagcgtgtgattgggtgttcaccagcatgtatcaaatgtgccaccctcaaatcttgttttggcacattacccgtctgacataacaagagcctgacacctctcccactgcatgttctggggtgaggggtggaggggtcagcaatgtgtttcactg

SEQ ID NO: 56540 - DNA, 2725 bp, Homo sapiens
gattgtaggatgagttattgggttctggaggcactgttgggtgggtgggtggatctcttagttattatatttatctagtgtggaaggccccacagagccccttccacgtcccaggctctgctccagctgggttaagtcaatgcatatttgaaatagaggaaggagctcgagggactgacccgggctccgtcaacaggttcaacgtagcaaagtgaaagttctctcccaggttaaagggattctcccacggcggcccaggagatggtggcggcgggcgcccggctggaggcctgcgcctttaaggagccagggggcggaggggcggggcaggaagacgactccccggagacgccgccaccggctaggtctttttttgggagggggcgggccagacccttttatgggctccgccccctttgcggctgccgcgtcccccttccgccctcggctggaggggaggaagctaggggggcgttgcagcggaccccgtctgggagctccccgctgggcgtccggcccgcggaggcgcgagtttgctgactcggagggagccgctggggcgggggcgagtgctaataatacccgttcgttccgcagccgcgctttacagtttacacagctgtcaccttcgtttctccttaattaataataaaaatagccgccgttcgggagcgcgggctgggcgccaggcccggtgccgagcgcggtacgagctcggcccccagagccggccctcgccacaggatccccattttccagagcgggaagccgacgctcaaccccgcgccgcgacttgcccgaggtcacccagtgggccagcggctccgggaccgaggcgcggggcggggtgaggcgaggcgcggtgctgcccccggctccccggggcggcgcggggcggggcgggcggcgcggagggcgggggcgcgcgcggatggccatcttaagtggccgcctggagcccagggccgctgtccggggaagggggcgccggagcagcccgggaggtgggggtctgcgtgcggcggccgggatcccgggagggaactttctactagacgggccagggatcctcctggcttcggactgctgaaccccctcaaggcccggcctgcgggtgtggggggtggtgctggggaacttggccgagagggggaagggctctgcggggctgggaggggctgcgtgagaggctcgagaacgtcgcacctcgtctgggccccccgccagagtaagaatcttcagaagcctggttagccagggaatctccccgcaggctttgccgggggacggttcccgtggagttgggggttcagatctaagagggggctgcatttcgcaggagttgggggccccgcccgcttgggtggagggaagaggatgggtagggggtggtcctggatccttcgcaggtttggggaactcgatgcagccaagctgtaagggggacgagaggaagagccatggagtggaatcagacctttatggggcttaggggtcatatcattgggagaactgagaagcgctgaattctccagggggtgcctggatcccgaagtgtcggggccaggatggggggactcggatttcgatggggatttggggactggatctcctcgggtgaatgatgggggcaggatcattgtggggtctgggaggtcccgggcccttcgggaaggtgggggcaccgtccccgcaggaggagctgggggcaggggcggcccgggctgcgggccgagcggagggggagggggcggcagccggccctgcgctccgctcctgcccctcccccgccgcctctgaacaaacttttctttctcttcaagttgaggccggcgctgcaggcagcggcggctgcgcggtgaacgaggcggcctgcgcggcggagtgctgagtcccgatccccggctctgtccggcccacggatcctcaagcccgggccccgggcccggccccagcctcagccctgagcgtctcggggcggatggcgcggggcggcgggggcgggcggtgctgagccctgcgcgggccatggcctcggcctgcggggcgccgggcccggggggcgccctgggcagccaggccccctcctggtaccaccgcgacctgagccgggcggccgcggaggagctgctggcccgggcgggccgcgatggcagcttcctggtccgagacagcgagagcgtggcgggggccttcgcgctctgcgtcctgtgagtggggcgggggctccttgcgggctggcgtggaccgggagcgcgggcacggccgggtgtggaaagggcccgggtgagggtttctggggcggtgggacgccagacccgcctccaccccccagagtgggagccttggctttctcctgggtctgaggagggacgcaggggcacttcctgctgtgtgtctgggggcactttcaggagccttgagggtagagaatatggggttctgtggcccagtgtgactgtgatgacgaaaaattcgggcattccccggcagaccccttcaggcatcctccaggtagaagggagcaggggagaggatgtgcattccacgttgtgtgcagtcccgtttggatagggactgagtggtgagcaggagagggagtcggggcagagggactgacggggtgtgtggggatgcctggcagcttccttagggcccctttcggtgctttggggttctgcctggccgtgtatgggtggtgggggcggtgatgggtggtgtagag

SEQ ID NO: 56541 - DNA, 1288 bp, Homo sapiens
aataaataaataaataaataaataaataaataaataaataaataaataaattgaggtcaagctggcattagaaccgagtcaggttgttcctgactctggcacctttggtggcggggggtaggggggagcggtttggcaacttctctaaaccatctggcggttgcccttaaaacaccccataatttccgtttcctggagatctcaggaaagaggaattggaccaggcagaatatgagaaacataaggggaccatgctataatattagatgtttagtccaatatccccattgtacagatggataaaatgatgcccagagaggggaagcggatctatggtacgagattatacaactccgaggtgatgaggtctctagggcaacaccctgcccctgtaaccagatgatgtctgagtccctccaagacttaggctctaaggatctaaacctataagtacctcccaccctcctaagatacgaagttaggacaatcttcccgcctctcccttcctcaaacccagatctcataatcacccttgttggacggactcttgctgtagcaatgaaccaccagcgctgcggccagggcgcacatgcccagtccggccctgctggggaccccgttccagctgtcctgtcctgggagtgtttcttcgggaccaggaaggcgtccccaagtggcagccgcgaggcatttggtatcgaagcgtcctccctggcgccccccggtggctgccccacgtccggagaacaaggccggcgatgttccagggcgccccccggtggctaccctcagccactgcggctccccgagactcccagtagtcacattccggccggaagcacctccatggccccggagcgttggggacctgagcagccggaggagtagccgtggcgccagtgcttttctcctcaacaccagggaccccagcatcttgacagctgcttcgataaccccgtggtgccggcccctgtgctgaccacgtccaacatggctgccgcggcgcgttcgaagacgccgcgaacagggtggagttgcgcactacctcacgggagaggtagtccacagccctaagcctttccccagctggagaataaataaactacgtttcccagaaggctgtgggattgcgtcacaatgactgcgggattatagaagcccggggcatattgggaaatagagttcgggtgaaggggcgtggcgattagagttaaagattagaatcccaagacttctttcctagtttagttgaagcacacgacacactttttttttttttttttttttg

SEQ ID NO: 56542 - DNA, 677 bp, Homo sapiens
tagttaaaatagacatacttagtcattgactgaaccccttccattggctgcatgattcaccattgtttagtgtctctccttcacccactcctatggcctctgtggcttcatgacatggatgacctggagaagagatacgtagatgggcctcttggaatgggcatagagtatgaaggcaatcatgtcccacaaaaatacccaacagaggtcatccactgcagatgagtcactcagtgatcaggtggacaagatgactggatgtgcagatgtcagttggcctccttccccagcccctccagttgttgctcaatggaccaggtacaaagtgtcaagatggaagagatggaagctgcacacaagcttaacaacatctatatcctctcaccaaagcttatttggctaccaccactagtgagtgcccagctgccaactgcagaagccaaggatgagtccccagtatggcaccattccccagagaaactagccaggaatctctggtggtaactgatttaataggaacccttccttcattgaggacagaaagtgctctcatgggaatagatatgtttccagagtttttttccttgttcctaatgcttctaccagaaccatgtcattttttttttttttttttgagacagggttttgctctatcacccaggctagagtgaaatgtt

SEQ ID NO: 56543 - DNA, 2225 bp, Homo sapiens
tgaggaattggacaacagcgatgaggatgtggtgcagcaccaggaccatgctcgcagccgcccgcccgcccgccggcccggccgctgcgctcggtcagcgcgtccgcgacagcttcgcctggtccgcccgagtgtccgccccggccccgccccggcccgccccccgcccgcccccggcccgccccggccccgcctatgtccccgccaccgcggaccgcacctctcggcccgtcggatcctccgaccccaccggacacccggccgctgtcaccccgcttctgtctcgccctgggttccctcggcccttccagctggcctgctgtcagcctgcgctcgctgcccctcgccccgtcgccacttctctcgcatctcgcaggggccgctctcagagcctccaccctgtctgatcgcaccctgtttccccgccaccactctggggtccggggcccggccagagccccaggcagagaccggcgcagtggggtggggtggggagggaaggggaaggggggcaggggccgcggacaccgcaggagcctcgggcttgctcctctccctcagcctaggaggcagggggaagtcgggagaatgttggaggtcgctgtgagacggacaggccctggagcagtcgcccatctgcgagggagacacgtgcgcacagacaccgagcgcacacacggcggccgccactgactggggcccccaggcctgggtgggcaggtctctgtcgccgtccccggagccggagagggtgcaggccccagggccacacggtccgcagttccgcggtgggacccgcgctccgggagcgcgtttctccgcagagcggcttctgggttcaggagcctgcggcagccgcgacgctcctgcgccccctgccgtcccatcgcggcggcgcaatccggcctcagttgccggctgcccggaggggccgcgtccggggattcagcgggtcaccggggtcagctccctgcccggaccgacccggttcttaggcctctgcttggcatgaaagcggttggggcggcaggacgtgtctggactggagggtgcgcttgggtctcgctaggcctttgccagcgacttgccgcatgaccttgctcggatcccctccccccacttcctgggcctcagttttctcatctccctcacaggacggccaggaggaccaaacccgggaatggcgggaaggtagagtcccccgacagccctcaatgtggtctgacctgaatccccccgtcaactgcactgccggcccctctctctgcagctcccctcctcaccaactcttggacggtgactcagtgagctcccagcctcccagcctcccagcctcccagcctccccacctcagctgggtgattcatcagggccctttctccctggggagtgattttctcaatgttgagtcattgtgcccattcctggacacagtccaggcagctggcacatagccttggcagagcccggccaccccaccaactcagggggcagccctccatgccagcgtttctcccacctttctttctgaggcatgctctggcatgctctcccccactcaccctcagtggctccctaccaccagcacaataaagcccgagccctgagcctggcgggccagaccctctacagctgaacccttgcttggtcatccagctctgactcccctccccaccattccttacatttctacttcttgctcttctcacatcaatgactgactgactctcacctccaggcctttgcccatgccaccccacccccaataccctcccagatccttccctcctgcctgtcatttaggggccatttgaaggcccacctcctctgggagggcttccctggttactaccttatccctctgggtagcccttttttgtgtctttcctgggagtcacatctggggacttaggagaggtgtagagtaagtgatctgggccaagtcaatgtattttactgaatcttccaaacaggggcaattcatcctacttattaacactgtagaaaaaattacctgggctaagatgtgtaaaggttctggcccccacagggcctcccttcctatttttggcctcagttttctcttccgtaaaaggggatgacccatgtaagggctgttggaaggactaggtctgagtctgagctcagtgcacaagtctcttggtaaattctgagcatgtgtcactggctcagtcctgggctctggacaaggctgggtgagatac

SEQ ID NO: 56544 - DNA, 2476 bp, Homo sapiens
tataatgacctgggattattaactccattgtgctcagggcatgcctcctcctccaggaagtccatcaaaccgctccctccctcctctaagcccacacaacctgtttgaccttccaccaccagacctacactcagctttcccacaggccagccctgctgtctgggcaggaggtggcagaggcccctttcccatggcagctctaagcgcttcccaggcctggccctgtgctggctcctgagggcagcagcaggaggaagttcatcctcagggagctcacagaagtactgagctcttcctgggtccagcccaggcctggcctggcctggcagaaagagcaggtgcagttatccgctgggccctatggaaaagatgagccaagggcacagggcagggctgaagagtgccgggtgggtggacaggacttggttagaggtctatgtccccaataagccaagcacaggattgttgaattcattagggatccacggtaactcaggaaaggggagaccagcccccacactccataagcacccaccacagcaccagtcctggggaggaggggtaagcagcacaccatctccccatcaccctggtctgggggtgagaggttcagaatcacagcacccttgaacttgacagtgaaataagccaaactaagcctccccaacgaatccccagaggggtgtagggaggtgggagcagagaagtaaggtgatcagcaccaggcccccaaggggcaagaaccccaaagaggagtattctgtggggcagagtctgagaaaggcccagaaaacaggcaccgtgggctcctggtggacccaggagaggcgtatggggaggtggagacctagaaagcccagggaagagggagggatgagacaaggggagaaaaggaaaaggcaggggaaaaagagaagaagtggggaaagtgaaataagacaaaactctaagagaaaaaaagagaagggggaggagagcagcacagaaaaccaggccagaggtgacagacagggacttcagccctcccagggcctccctcctacgtgcccaacagcaacaacagcaacggcggcacctcgcttaccctcagacgcctgctgggtcttggggctgaggactcccacagctccggccaggcgggctgcgtatgcccaagaatgtcgtgtacctgcccgtgcaagcctgggtcccgcctgggctggtctcgcaaacagcctggcccctggcccctgggtgggtctgaggctgcgttctcttggaggtttttgagcccaggtatggctttgcacctgtgatttatgtctttaagtgtttgtgaatcacttctctacgtgcgtgtgtgtttgtttctgtgtataactgtggatctgtccaggaggaaaggacagagagagagagagagagagaaagacagagggagagagagagagagtgtgtgtgagtgtgtgtgactctgtgtgtctgtgtgtatgtgtgtgtgtatgtctgcacccagctctggtctcccggaggcttcctgctttgtgtctcccccacctcctgcagccgtggccaacacacacacttcctgaaaacactgagaaagcgaaaagtcacccagaatcccccggggcagacacttcctccccgcccccaggctgcacccccacccaagctgggaagagacaaccaacagtgtccactgatcttgcaggccctcacagggtggatgcccaggaagtcctgactgacaagccctggcggtggcctctccaccactccacccgcataaggagacagagaggctaggaaagaggctctctgaagggcgcaagttctgccctggcaacaagtgatcagcctccaggaagaccagggattggctggactgcagggcagtcaagggcacaggagggaagccttggcagtgtggctccagctgggcagctgccttctgggcacacactccttcttcctgaggtgcctccaggcatccaggtatcagagggggacaccaaaggccagagcaagctgggaggggatctgcggcatgaccctggaacctcacatcagaaacgacccctctgccaccctcagggaagccagttcacagggctcatgtctgcggcatttaagagctgagtagacctgacctgaagccaggaggcagggtctgggcaccggcttcccttctgcagggctgggtgactctgggcaagtttctcagcatctctgggctcctcagcaagcaccccaccacgagtttaaattaatggtagggtgccgagtgcagtggctcacacctgtaatcccagtgctttgggaggtcgaggcaggagcattgcttgagcccaggagttcaagaccagcatgggcaacaaaggaatacctcgtctttacaaaagatttaaaaattagccaggtgtggtagcacacacttgtagtcccagctacttgggaggctgaggtgggaggattgcttgagcccaggagttcg

SEQ ID NO: 56545 - DNA, 979 bp, Homo sapiens
cggcccaaggatgagaaaaagagacattccacaggaagaccatgtggaacacaatccatgcattgccccccaccatctttcacatctggggtcatctgcctccaggtgggactgtcctcctcagatccctggttggaatgcacatacagtctgggggcctggccaggggtaggggaaggtggaaaaaatgttatctctgatcagagctggggacactggggttgattcagcggcagcctctgagttttgtggggcatgcacattggatggggatgtctccccacccaccaaatcctcatgctgttcagaaccctggagtggccacccttagcacagaactcctttctaaaacataacacctctctgcacagggctgtggagggtgctgactctaacctgcccaagaccagagaaagaaatgagaagagctgcccgagggactggactctgctccagagcggggactgggtcagcttagctggggtcacacactgttcaaggctgcctcggtcaccacccggggaaagcacctcactcagccctgggaggtgctcaaagagtaagatcaaagtgaagtcagacaaaggaggcaatgaacacctgggtcctgaccctgtctctctaccaccctcccaatgtattcttacacaagttacttagcctctctgtgcctcagtttccttatctgtagaatgtcacctaatttcttgggttattggcagggtggaattggttaatatggataaaactttacaacagtgctataggcatgtttgctgacctcattctcactgatgttattactcagctttctctaaggctgttacttccactatgatattggagggtgatggtcgtcttatgctcttatgcaattatgtaaatcattagatgacaaatgtgcagtgtccagcacacagcaggtactcaacaaagaatgttccctctcccagccgggagtggtggctcacacctgtaa

SEQ ID NO: 56546 - DNA, 1439 bp, Homo sapiens
cagcgtgaccccattccctgagcacatactttctttcaccagcaactgggccaggtaggggctctggggaagccatgccccatttactggtggggaattgagatgcagagaccggaagtagcctgcccaaggtcactggagccccaggcccagggcatagggtcgtacagatctccagaaatgtaaaggtctcagcggccaacgaggtgggagccttcacttcacagatgggaaccccaaggcgcccgagggcggctgactccagagacccttcacgccaaagggctacgggctggaagccccgggtcccgctggttcaccccccttccctaccgtctctggcccgctggcttatcctcaagaggcgacccccccatcacgcccaaaaaggtaaacagacaagatgacccggggaagcagaagcagcgcgcggcctcggcgttcctttctgcagaatggggaaactgcaggccaatgtggcgaggggcctgcagacggggaggctccggcagccgcactgacctgttttgagtaaagactccacgcggggaccaggcgtaccggcgccgccaccgacttacaccgccaccgccaaattgcagcaaggggccgggcgcgcccacccccccgggcgcttccgcccgccccacgtgactcccggggaggggaaggtggggctggggcagggcagggcagggccccgccccctcatcggcccctccccccgcctagtcacggtcctggagttggttggcctggcccgcccgccggacccgtcggtctgtgtctctctcctgcccctctagctgcttgcgggtcttccgactgtctcctgaggctcaggtctaacccccgccacctcgcccgctgagtccacctctccctgagtctccctgctctcgccacccctcttctggtgagtctgccctgacatacaccccacccacaagagggccacacccccagggggataggaggcagttgaaggccgtcagtggtgcctgaccacctcctctaggaaatccttcctccaccacattcttcaagggtatctcacttccctccctgggtgcccacaggcagggttgtggggaagctacccacccagccacacctcccaaggatccctcagcggaaggctgcagcctgaggttccagcacccacacctagagaacaggagattcccacccatcctcccagcacatacacagatgagggtaccaagcttggcagacatttctgggtcctgtgtccagaacacctccggggccagccacgccagagaccttccctgggcttcaatttctttatatgcacaaagggtatatttggaagaacagatctcacattgcgggggatgagggtttaccccctgagaagaggaaagtgtcattaattggagcacctactgcatgctagtcccagtgctgggcaattt

SEQ ID NO: 56547 - DNA, 518 bp, Homo sapiens
atactatgtaccctgggtgcctcccacatctcaccctgccctgcccttccattcatcctttcaccattctctgaagcctgctgtgtgccagacctgtgtgcaactgtgtggtgggagaccggcggtgaaccagacctgagccctgccccaaagaggttccgccaagtagagtggtaagggacagggacacaaaacctcaagatagcacgagcagggctaggagaggcgaatgcacatgaactgcatggtagagtgcacctgagcccaaaaggataaggccctgagccactgaggggcaggaaagggcatttcagcagggggacgagtggtgcaaaggcctggaggcttaaacaaacaagtacagtgcagggtccagtgcccaagctgtatctcactctaccccccacctctctcccgccccctgactgtgttctctgggatgtcttgccagtgctgagcattagagaaggtggactctccactccagggaggggcagcagtctctcccaagacccagg

SEQ ID NO: 56548 - DNA, 2869 bp, Homo sapiens
ctgaagacaggcagggcagataaggaagctgagtcccaggcagagaacttgcccagggccacacagcgaggactctggatcctggtgttctttccccaacatcctcaacccaaaccaggcacctcctccaggaagacttccctaacacctccagccacctctgatctttcccttgtctgagctcctccaacccaaagtctagacactgactacctggggtcatgctctctgggagcctgttccccaaggacagctctggaactacttcttccaggtccccccatgccaagtcagagctggaaccaggcagctcagggcctaaccctggattctggatccccttctagggacctctctgatggcatagactggcaagaccttagccaccatcctcactctgtgtccagcagggcagcctcccctacgctggcctaaggttaggacagcctctacagaccacctgcccagcaacttcctgtatggggaaactgtgccccacagcaggcagagccaagctagagcctgaactgacccagtccaaggccctaaaactagatgaagtcatgcgcctgccaccgccgataagaagactgacccagaaaggtgaaatgacccccaaagtcacatagtgaggactggactcttgcccagctgggtctcctctaaggtgccctcccacaatgacacagcacagggagacccacgggcccaatcatgttaataacccagcccaagggagtggcgagatctcagccttggcgagtcaaggacctaggtcctgatctagcttcagccatgtccggctgtttggctgtgcacaagtgaattcctgctctgagcctcagtttccacatctgcttgatgggattaaggagacctgtcccacacgtggccctgaccttccccatgacccttttaagtcccagagactagtaagagtgggaagggccttggagacccctgagccatctggcatttcatagggtgagagggtgaggtgctgaggggtcatgagctgagcactggctttggtgtctggaacccaggtggcctgtggtgtggggtaggtggacagtgagacagggctgggaggggccgcctgagcttttcccaaaggggaaggggaggagcagcaggacaggaagtcagaggagacaggtccccactgcccagcttcctgtggccagcagagcctcaggctctcagccacaccccctcccacacctgctccagggccaggtctctcctgtcatgggctcaggctcttatcaggcctcattcctgccccaaggctgcctgtgcagtgggtaggaggtcacctggaactgtctgtcctctctccaccagggtctgaagacctctgaggagatacgcaggtctcccctgcctctcatgcggccagcctcaggagaacagagcacgtgagcatccaggccagggcctcacaggccacgtcctctgctgtctgcctgctcctcatctctccccagctgggtgctgagttcagaggctcttggagccaagagggcccaatggcacagacgggcaagcagcccagagaggggcaggaatgtgcccaaggtcacatgcaacagccaggactggaccccagctggccctggttgaatgactgacagaagctcttggtctcccgtttctcacaccaatacaggtgccatgaggaagctgacctgggctttgagagacctgagttcaggctccaagctgccccctgccttgtacccaggatccacattcagcatctgtccctgggacagggactgaactgtcaggaggtagtgtctgtctcttttccagtattcagagcacagtgcagccctggggccaggtcaggctggaggccaggagggagggaaggggtggaggtggcctccaacagcccctttctctttgtcctggctccaactactgggccttgagccacagtggcttccagggacctctggacccaggtaaggggaagagagatgaggaagaggaattgaatcaggtagatagctaggtggagtcccacccccaccctgggatcaggagcacggggcatgtccaggggtcagctggctttcccagctctggggacaggcccagagcaggctgaggcaggagaggggagggggaaaggggggcagaagctcagcaaacacctgcagttgagtcccagcctcctggagtgacccagtcatccccagggattctggctccagacctgctgggtgaccttggcaagccactcccctttgtgggcctcggctttctcatccatcaaacaagaataggatgatgagaacaacgcgtcctccaggccttcaaagagttattgatggggttaaaggccacagtgttgactaagatgcgagcccatgtggagaggggcaggggctctggagccaggctggcatgggttccactcttgcctcagctgtggcatgaccttaggcaaataacattacctcactcagcctcagtttctttgtttgtaacacagagacaagactacactgccccagactagcctcggggtaaattagatgatggggagaaatgcttggctcagagcagggctctcattatcagaaatgggattatctgcatggaacctgggagtcctgcaatcttggggatgggaagctcacaggcctctgtccatctctcccagagctccaactagctgtgctgagaggatcaggagtgggagctggcaccttggggtgcccataaccagggtcccagcctccttcctgggtctgggctctgctcacctcctctccccaccctctctccattgtagggagcaaagctggggaggcaccctgcagggagaagcaaggcaggaggactgccaagatgc

SEQ ID NO: 56549 - DNA, 3941 bp, Homo sapiens
ggtatgacatagggattaccaagggctctttggcacctccaacatctgttcagtctgaaagaaaaggagggtagggtcctggctgcccagggtgtatgcctgtccagaagcctacaacaccccagtttttccaagtccccgccacccacaaggaaggccacctgacaagtctgatctggccacgagtggtctgttgcagtcagcctggccccagacccaccaattccaggcctgggctgggtagggtttattcattaaccaagccagatggaggaggtagctccgccctattgacacagagggtgggagtactggcctcagttcagacccctcctcctctgactttctggagtgccagcttggtggggaaactacacttctcccccagtgtgcactgcccgcctgaagcctttcccaggtcacagtcaggctctcgtgaattcccttctcacctttcattcaatttgttccttggttctttcctcccccctctcttccaccaatatccctgctctaactgtgttggatgctggggacgcaaagaggacaggacctgagaggctgaagcgggtggatcacttgaggtcaggagttcaagaccagcctggccaatgtggtgaaaccctatctctactacaaatacaaaaattagctgagtgtggtggtgtgcaccagcagtcccagctactgctgggaggcaggagaatcacttgaacctgggaggtggagattgcagtgagctaagatctcgctactacacttcagcctgagagacagagtgaggcttctcaaaaaaaaaagaaaaaaggataggagacctgtccctgctctcagggaacaaccagctgggacatgccagctgccttccccatccctgctcctcaggctcagacacaggttctgaggccctgggcagcgaatcccaaagtgggagacacacatggaaacccagagggaaaaacagtcagatggccaaggtgcagacagagtcagaggggagaaggggaggcagaaagtgaaaagcagataatcgtgtggggatggacagaactatatgtaaatgattaagacaaagtgaggcagaagggctcagggtcagaggggaaaggtcagacatctcaggtcttggtaaggggccaagatacatgcctgaactaagtctgagactaggtcccaggcagaaggggagggtggactcctccacatttccaggaggatagcagaagggagaaggcaaggaagaggaaggcgaagggcacagcctattgccagagcccattgcaaggggacctaccagccctggaaatgcagcacccacagcaacatcagatgtgttgggggcagctattgaggcccttaaaccagagtcttcacgagcccctgccccatctggtcccctgggggatatgcgttcccagggtcccaaaccccaagcctgccctgcacggcaaagagaggagaattgtggggttgggaagagcaggggagatggctgtgagcgactgatgtgtctgcaactgctccctatgttggcttcccttgaccccaggccccttccttccccagcccacctgtagcctggctctgtgcaaggcaggggtattggagccctgccttcaggatctgccagccacaatcctgagtccctgcaggaggctaagggagcagccagggagggagggaagggaaagagcaagagcagggcatcgggcagtaaggaatcgggtcctgggcaacccagggtgcagaaagcggggaaggagacccagctcaggctgagaaccaggaatcagggagagaagggcccagtctcccacctggagtaactcaagtcaggaaccaggtgcaggcttccccagcagaggggtccctgagggagaccactctcctagaagggcctggcagcagcccagatccctggaacaggcaggggcatgcagaagcctgggttccagctgagagaggcagggtgagtcactcctgctctccaggcctcggttggcccatctgtgtgatggggcttggcccagcagactgtgtctcctcccggtccctggaaggagactctctctgggcccagatatacagccaggtgtctagcccggagagaggaccaggagactccgggagagaggcagtaagggtgcagtggaggctgcaggtatagcgggcaaccctaccttgatcttgtgcagcgtccgatccatctccacagcctgcacccagacagacaccccagccctgctataggtcaggttccagcccacctcagcctcacactctgaccggaagctgcgaaagtcttggtcatcgggcacctggacactctcacggcccaggaccggccgaggcccttggggctctgtagaggccgccagcttctccatggggagtgtggggaggcccagggccctggtcctagtccggctctcctgggtcctccgcggaggctccgacaacgtcgacgcggctgcagatgctgacgccaccttcctgggacctgcaagaccggtttggggacgggaatcagtgcgctgggggcgcgggtggggctgttcggggtcctggcgggtggggagctggagagaggtaggggctggccccagggaagggcggacgggcgctggacagcctcggggtccccctcccgaggagcgccccagaccccctggggccggcgtggggactgcgtatgggacgcggtggccggcgggcgcccgtcgggacccagggactggccgggacccgaggggagggacggtgcggcggggcccgcggagcgacctgctcaactaactcgcagcgacgccgggcgggcgcggggcgggtggcggggcaggaggggcgccctccaggccgggctgctcacctttgcccgccgctccgccggggcccgccggggccggggtgccagcgccgccgccgcagctgcccgggagacccggggccgcgcgggggctctggtgggaggagcagtgggtcccgccgcccggccccgccccgggccccagccccgcgcgcccctcccggctaggctgggggctcgggggctcgggggctcggcggccgcggctcgggattttccaggctgcggaggtgaagctgacggatctccgagccccgccccgccccaccccgcagggtcctagcgcccgcccccgccggccctgggaggggaccctgcgcgcgaggggcaagtccccagcggggacagggaaaggggtgaggagatgccaagacagagtgggctctgcgaggaagggccacgaggtgcaagaagaggaattctggaagttaacggtgaaccccttctctccaccacctcccatactcacaggtacacacctctgcaacaacctacagtatttacacacaggcacgctgtccccagaacaacccagagacgcccccatgcaataccccagagatccaaagatgggcacacacccccatgacaatcaagagactaactcgcagggatgacagccccacagcagctcagagatgcccacagcttgcatcccccaccaagctagaggcacaccaagcctacacacacccaaccccattcccactgggctgtgcaaacccagcaggaagccgatccaacccacaaggctcaaggttcacaagctggccagatgtgggcaaaatctccaccccagtctcactcctacctgggagcttgaaccgggactccctccagccccacactctggcccttgtccaccagcaccccttctcagcatgcacacaacgcgcgtgtacacacacacacacatgcacgcacacacgcacacctgctatggactagactaggctctcaagagcatctggcccagggctctgggctctcttacctccccaggcagagttggccagagctccatagctacctgcaccagcgctcctgccatcccttccagccagggaggctcccc

SEQ ID NO: 56550 - DNA, 804 bp, Homo sapiens
acaccactaagtaagcagtttcaacccagatggcctggccaagccattatacaagaccactgagcagggaactttgtggcatctgtcctgcttcctcttccagccttctccccaccccatcctctgatccctgcacctctgaaccctgggagctgccctctgggcctcgcaggggccgttgcctcccctaggctcaggggagggagaagtctagctgcaatccctaccgccaccaccatacaggacttcagagttgacagaatccccagcaggtggggaggcctcttgacaggagaacaggcctagagagggccagaggcttgtcccaggtgggcagggcctgaaacagaaccaggtggattctccttccggagggttcccaggcccagatggccacaccccgctctgcctgctgggtcctcccgctgtcgatgtctattggacactggcgcctgccaggaactcagttcgattgcggggtcgatgcgtccttccaaaagcccgggagtttcctgtcagaggcgcctgatccatctgcctgaccccaggccctcccttcagctctgtgctcaggctgggtgggggtgggggcatcggtgtcttgtgtcttcaggaaggacaaggttgtctaggccttcctccaccaaggtgggcaagaactccagccctgggaccacagcttcttttctggcaacccacacaacttccttcttttggtttcttcttcttttttatctcaaagttggggcctcagtgtcctgactcagtacagtttccacctcctggaactggtggggactctgg

SEQ ID NO: 56551 - DNA, 763 bp, Homo sapiens
gagcctggagggttgagagggaagagaggtagctgaaatgacatcttgtccccctccctcacccccaatccaagcagagctgcgaaaggcctggtgtcaatggcatttgctccttgcacccacacagcccctcctcaatgtctgacagctgcatgctgggacagcagtgaggcacagggggtctggccatgtctagccagagggcagcatggcactgagaggtccacattccaggggctggctcccaggaccgcgtgaggactggtgtgggtggaattctctaggggctctgtctgagaatggggctgaaggctctgccctgggtcaaggttcaccctaggttccaaacccacacctggaacaggcctgcagcaggctcagcttccatgggcactgctatctggggactcctgccaaccactgctccctgccgtgagtccctggtgttctgggtcagcaggtatctccacaggcttcccgggggaagactgcctctttcagcaccttctaaatttagggcttgggctccgtgactcactcctctgagcctgctttgctcccctcctccaggaatgtgctcccacaggatctgcatcctctgctgcctcagactgatgaaggccccacaatcctgcagcagccacacgcacaccaaggagagctctcggccccactcgccccagaccggccctgggtttctcccgactgggccctgtactctccttcccttacctctccatcttcccaaccctccctgcaaacc

SEQ ID NO: 56552 - DNA, 1986 bp, Homo sapiens
agggtctcccagcccttcccccaacctacccccaaaacctctaagagcactctagagagaatcagctgcatacagcccagctccaccgctccaagggtcagagaaaagtccccttccctggggttagctgcatgatcctgcaggtgccatggtgtgcctaggtgccacctcgcttcacctggctggggagtggctcctagacctcagctcaatgcgcatcacttccccttctcatcagccaggccagcccaggtatcacctccagctccactgcccccagatggagttacctgagtacccaattcctcccaagctcagaaacagtgtccactgccttcccactcctttccattcagagtctgtccccttagtgctgccccctcatctgtcacacctgggttctttcccttacttgggccactgacctgagaagcagggtctgtacagctccagcaacactctcctcttcctccagaattctccagatcctcctcagcttcttggctctggtgctcatctcaacacagcagggtcttcctccatcaggccaaggtgggggtaggagaagaattgggaacagggactcccctaggttctcagggtacagtcagtcaatctaagcctgtatccaacaaagacactgacccctggggtacaaggaagggctccaggcccaaaggcaggaggattaggctttagctcttgctcacagcctgctgagacctggggcaagcccctgtccctctttgggccctcaggtttgcaatttgcagaatgaggaaatgggttcctcaatctacaatcacctgactataataatattttgcctttatataccgcgtgggtaaattcctgaaagtaaactaagctgttttcacccctggatctcatttgatcctcccaacagcctgtttgcatttacaaatgagaaagctcagttccctaagggaacaaaattacccaaagtcacacagcaagctggaagcagagcctgggtgcagtccttgaatcctgatccttccctggtcctttactctctatgatgctggaaatctgcctgacttcctctaacctgttgtcccatttgtaaaaggactgttgtgaggactgaattaggagaggcgatgaagagggtcattccttgtgaatcataaaagaaaggaccacagaacgatgactggaccgttaggttactatttattacggttatcttcgctcaggcgcccccacgtgtcgatcccgagactctcggcttgcgcaggcgctctttggtgtttacagcggccgcgaagccccgcgtttgcgcgtgcgcttcccgcccgggaccgcccagaggtcccggactaggggcggactaggggccgctctgcctcccgccccctagtggttgtggccgctctgtcaccacggctcccggggcctctgtcggctccactttggttgagacgtctccacagcccaacaacggcggcgatctgaggagaggcaggagaaaatacggcgcgctcggcatcgtccttctgaccggggactccagcatctcagtcatcgcgtcaccaagccccacgtgcaggttctggcatccatcatggcaaactggagaccgcggtgaattccaccggaatggcgcgcgcattgccacatgggaactgtagttcttggctaggacctttctggggctgggccgctggaaaaactacatttctcaggagctcaagagtcaggctgacagaaagggggcccgcggcatgttgggagatggagtttggggggttcgtgctagcagggaaacagtgaagcaatggagccaagtgttctgagcctgggcctgtgggtttgagttgggcaggagttacacagtagctcttataagagaggagtagcattgttgcggcttttagaaagaatgctacttattagttgtgtgatctgagcgatcaagacaaatgcccctttatcttttttatttatttattttttgagaca

SEQ ID NO: 56553 - DNA, 772 bp, Homo sapiens
tgagatttgcagggtacaaacatccaaactatagcagcatacaaatatctgttcaagtccctgcttttgattcttttgatcttgtggatatgaacccaggaatggaattgctggatcatatgatggttgtacgtttaaccttttgagaaacttccaaactattttccacatcagctgcaccaccagccattcccaccagcaatgcatgagggttctattttctccacttcctccctgacactgttattttattttaaaaaaattacagccatctcagtagatataaagtgctagctcattgtggttttttatttgcacttccctactgatgatgttgagcaatttttcacatgcttattggccatttgtatatttactttgaagaaatgtctatttatttatttttgagacagtgtctcaatccatcgcccaggctggagtgcagtgatgtgatcgctgctcactgcaacctctgcctcccgggttcaagcgattctcctgcctcagcctcctaagtagctgggactacaggcaagtgccaccacacccagctaatttttgtatttttagtagatatggtgtttcactatgttggccaggctggtcttcagctcctgacctcaggtgatctgcccgccttggcctcccagtgtgctgggattacaggcatgagccaccgtgtctggcctgaagaaatgtctacttaaatcctttgcttggccaggtgtggtggctcatatctttagtctcaggaggctgaggtgggaggatt

SEQ ID NO: 56554 - DNA, 2415 bp, Homo sapiens
cagctggccctgggtctccatgggtactgtgcctgtctcctgggcatggcttttgctgaacgttaccacccatcttcaacacaaatactccttcaagagacaggtcaggcctggtttggggctagaggtacagagacatctaggacccaggtcctgccctaaggggcaccgcacagattacaggatggtgtgataactggtgacggttataactcgaactcaactggggctggtgtctgagaagcttgaactcagtgtaggggcaggaaagttctcctggaggaggtgatgcatgattaggagccaggccccctagaggcgacgatgttccaaacatcaggctcggcctgtgcaaaggccatgggcgtctaagacaatgacatgtgggggactgagcccagctcactggaagcagagcaggctacactgacctgggggcgtctaggccttcactgctttctacgtcctctgacccatccccatcagaatctcaacagactcgtcacctccagggcctgcactgctctcccatcgttgcccaacttctctcgttccctagggatgttcaagtctgccaacactcagagggcagggcctgctggcatgccccagggtgaggctgtgcccagcgagtccctcctttcgtgtctcacagtagcctgagcctgcagagctggctctctagcatctagctagagacggtttgaccacagttccctgcgacccatgattcactttcgagggtacccacaagagatgtgtctgctcctccagacgccgcccaatggggtgaagcgtctggccctgagtcaggatgctggggtgctggccgtctcagctacccactcctttgcaaccccaggcaagcaagctcgttctctcctcccggccaggggctttctagatgaaatcagctgcacccctttactctcagggacctaaaatttcggcgaccatgtggagccgtaaacccttctgcctcctgtcctcccagccccgcacccacctggcgttttcgtgtcacggaacctctgcacgtgctcttctcgaggcctagagtccctctctccctctggccaactcctatttcatccctcacagacccaactcgaacgccatcatccccggaaagcggggattcctcccttcagtctctgcttccttatcttgctgtcctgctgcgccgcgccctcagtgtacgcgcagagcccggggctgagggcctctgggtccctggctgggtgcgcggccaggagcgcgacggcctgggaagcaccagcggctctcgaactcggcccgggcgcggcggggttaagacacccgggccttgagggccccgcctccggagcgctccacccgcgtgggggaagcctccccggaggctccgacctcgctcctgcttatgaccctcgcagccacaggagcccccacttaggtgaacatttcggacggggccccggcggttcagacccggaggcggctcctcccggaggcagatcctcccggcgtcggccttcggtcctccccgccaaagccctcttgggacaagccggggattccccgccgccgcccgccccctggcgtcacggagtccccgcgaggccccgccccggcctggcgccgtcctgggcgggaggaacgcgccgctaggcgggagagcgcggccatggcggggccgggcgtccccggtgcccccgcagcgcgctggaaacgccacatcgtgcggcagctgcggcttcgggaccgtacgcaaaaggcgcttttcctggagctggtgccggcctgtgagtgcgccccggtgctgagaggatggcggctgaggggacgcggctacgggcgcggggagagggtttggctggctcctccgcctgtgacccgagtgcgctgtgccttatgccttgagcctgtgcgttacgcccatcccgactgccaggactccgccccttgccatccaggctctggttagaacctggacgagcccctcctggtccccctgccctcgtcgcccctcaggacgggctctgcctcccacaagctgggcttccgagacgcaagtgcgtcctcgggtgttggttttgcagggtctcttttgcctccccacccgggcagtccccggggtaggggcttgatcagtgcacttagtctcggtagcgcagtgaaagaacgcgggacttgtccagagcagccacttattggcccatccggagaggggcgacactcggaacctctaaggaggaggctgtgcatctcaggctctgccgctgacaggcgacgctggcacaggcttatggaacacctccctgtcagcctacccagcctgagggggcatcagggggccccgggctgctggtggatgctggctgagcccagcgaagtcggactctcagaattgtttctgggcagctggtcaggata

SEQ ID NO: 56555 - DNA, 835 bp, Homo sapiens
tgtctcaaaacaaaaacaaaaccaaaaccaaaaacaaaacaaaacaaaaaaacaaagctagagccagtgctaggcctgcctcaagcctttactcactgatctccagcaattactgtttgcaacccttccttctctctctcatattttttaaagacgagacttcattgctcagatgatatggttcttatttagtgacccaaaggtttcaaaggctccagctttcaaatcaaagtctgtctaagttcctcgatggaggcagctggctgcagtggggagaagggagatgagtcactcgcagcctttaccccagcgatccagggccctggggttcctccggacttggttagctaggaaggctgctgcgcctggccccttcctgtcaggagtggcctggctaggctgttcctcatccctgtctctgtccttgttcctcagggggccccactgcacccaggtcatccctgtgcagggccgggtcacctccctgagcctcagccacgaccaactgcacctgctcagctgttcccgagacaacacactcaaggtcatcgacctgcgtgtcagcaacatccgccaggtgttcaggtaccagcctcatgcctgctgaccctgtggcctttgctgggacagctgagcctctcttctcctgtaatagaccctcttggagccctccctggaggcccctccagaccaggtcctgctgaggtaccaaacccctcgacaaagaggaagctctggaagctcactgcagagggcagagactagtgatgacctctgttctgaccccagccctgtctgtcctcagggccgatggcttcaagtgtggttctgactg

SEQ ID NO: 56556 - DNA, 945 bp, Homo sapiens
tgaacagaagtaacatttgctcctttaaggactagatcttaagagaataggtgtgtcttctccatgctctctttcccctatccactggctagaactcaaataaatcaatgacacaggtttagccaggccatgagagaaagtgatggactaccctgctatctgagtctctgaataacttcatgaggcaaatgctacctatctactccaaaccattgcattagaaataattaacacctatcttttgtgaaccactgcattttgggtcttcctattctaattgtttagcctttatcctaattaatacaggattagtatctggtgtaggatattgctgtaacaaaaaaactaatataggtggcatctgttaagtggcagagttgtaagcagtgatgaaacagatgctgcagattgggaagctggtaaaccttgttacactatgacaaaacatctggcatatgataacacagcaaacgagagcgacagattacgcagctctagggcagagtttctcaaccttggcactgacttatacgtaaagcacttactacaaggcttggcatttagctcaataaatgtttgctctggtgttattattacacatttctgaactgtgggattgtaaaatttatcaccattttcccatatagtgcttgcctttgctagaatccttaaaaatctcacccctacactaagatcagataaatattctcccatgtttttctctattacatttatctttaacaaacctataacttactttggcctggtttgatggaagaaacaaaatttttcttcctaagagtctcaatgtcatgacttttaaaatctgttattttcccattgatttgaggtttaccctttcacaatctctttataaattcttaatatctaactgagatcaatcatgcttgctgaggaaatgaggctagcgttcagtatagcaga

SEQ ID NO: 56557 - DNA, 744 bp, Homo sapiens
tacaggtgcacgccaccacacctggctaatttttgtatttttagtagagatggggtttcaccatattggtcaggctggtcttgaattcctgacctcaggtgatccacccggcttggccatccaaagtgctgggattacaggcgtgagccaccacacccggccttatcaaacattctttgcccaggaatgtcagttaaattcaggtctgagattacttcatcaatggaagagaaaagcaccagaggtagttaaactctctaaatattctgatattgagtaaggtggcagtaattcaattagatctgatgaatgcactggaaatttgaaatgcagtatttcctcctggttgggaagttatactagtattaattctctgcccctaccttacaccctctttctgcacaatcagacacacacacacacacacacaaacacacacacacacacactttcttccaactcaaaatcactggccagtgatcacataggttactcactatgtttgttttgaaagagatattttttggcaaagataaaacacaggcattcttatacaaatatgtttaactgactaatattaggtgagtgctctaaagaaattaacattttacataaagacacatatacatctaacatattgatttcatgctactagaatcatctttggcaaacggaaaattggggggtttttggtgggaaaggtgtttgtaaaaatgttctgaaaatcctaatgacaattagaat

SEQ ID NO: 56558 - DNA, 511 bp, Homo sapiens
gataaaacataccatcaaaagatatttgaaaaccattatttaaacagacaatctgtagagtagaaaagcagaaatatcctttaagaatactgaagtccaaaaggacaaacatcgtgattccatttatatgaagtatctagactaggcaaatttatagaaacagaaagtagattcaggggctgtgggaggagacaaaggggaattactgcttaatgattacagaatatctatttgggttgatgaaaatgttctggaaatagtggtgatagttgcacaacactgtgaatgccaatgaattttacccttaaaaatagttaaaatgataaattttatgttatgtatattttaccacaataaaaaaaatctgatcacaagccccaccccataaaaaaaactaaactcattctctcagttcaaattaaatgcttactatctttgacctacaaccttgcttccctaagtgtcttacttatctggaccagcagatgtccattatacattaataggttaa

SEQ ID NO: 56559 - DNA, 4281 bp, Homo sapiens
ggttgactggctcacccccagatattaaccattaaccacaagtgttggtttaaaaatctaactgtgtaaaaccgttaaggtcaataaaatgattgttacaattccgtggaaagattatttaaacaagaatctttaattattataatttgactagtaagacttttaaggtccttgttttttctgaatactatgtgtgcattataggtcccccactgaaggaaaaagtttgtattgtgttagttccagttctaatttccagctgagtcaaagttctaacagccttaaagcaggaaatccaaaaggaaattccatcatcagttcctggggcttggtaactcaaaggttctttgaaacagacaaacagaagtccttgaactatttactatagccttacctcatatcttcaagcaaatcacattctgcttgatgtttggcttgaagttttgtcatctgctcaacttgaatgtttttcagttcttgtgtaactttcacctaaaatataccatatatttatgaaggtctttttacaaatttaacccaaaaaaattgcttcaggaaaatacatctgtcagaatatgtctcttgctcgcctctcccctgaaggccataaatccaatattcgccatctagttttatttattgaagatacttatttaatgaaaaattaaagccaaatagcctgaacagaggttaaatgaaaatacacgactataaatattacaaactaaagacgtgcaaaataaactgccagtcattccatttcatgcacaagctcaatccacgtctaggtcttcctacagttttaaaagagcctgtcttctatttctaaaaaagattcaaagacattaaccaccaggagaggtgagcagagtgtggatgggggctgggagcctaagagtgcctgatacccaatgaccaatatttacacaatcatgataatatgcctgaatcgactacataaattactccataatggctgcgaaaaagcacactgtctcagaatgatgccctcgacttgctgacagcgcatcaaatcacaatctctttctcacaaaggagaaagcaaaagtgaccttccagcatatgcagtgcttttaaactaccccgggaagccgatccccgtggaggctccacttcaaacagcggagaacagcaaatgcctgctggccagagagcctcgcccgccaggccggggccccagggttcgaagttaacggtcagtctggaatctcggcctcagcagtgggaccacccggaggggtgggggtacatgttcgaaagaaaaggactcacttaaatggagaaacccggattaggaaagagagaaagcagcggcagcagacacgggtgagttaggcgttaggcaaatgtttgcccacgaggggaggacagaacggcctcatccacccagtgcccagagtagacattcagtatccatctgtaggattaaaaagacaaggacacagcctcggcccctgggaaagctggggaagggcgcagcggggagactgatgacaagccgggtgcatccgtcactcccaccctggtcatccaaccccggatcgcagtgcacaccccacgcacctcccgggcccggtcctcgcttttctgaagacagcacgacagcctcctcgcccctcagccggggacgaggcaggacccgtcaatccttaatttgttttcccttggggtggggaggcggtgactattccaacttcttttcggccgccccgtgggaaaagcaggccaaaccctaaggctaggctagaaacaaatcccccgcaaatttgcaaacgggcggggctggcgacaagcggctggagggctcaaagctggtgcagactaaacaatcacacacgcacaaggctctgcaaagctgcaggggcgtccccgcctccccctcggtgcagccccgagaatgcactttgcagcgggcagcattgccatgcgcgcgcacacacacaaatgcacacccgaaactcttgtgaaatgtctgggggtctcctgcgttagaggacggacgagccccggcggcccctctgtcggaaaggcaactcacacgcgcgccccccacctggagccggcggcaagtcggtgacaagcccaagacgagggcggtcacggccccttgcgggagggggaaggggcgcagcggtcgccccagccgcgttccgcgtacgcatctctccgaaccccaaagccccccagctgcgcccttaccttcctcggcggcggctgcatgatgctgaagggacatcaatcctccccgacggcagcgttagcaaggaccaggaggaggaggagggccggagaggaggggacggcccagcgagcgcgcgcgtgtgtgaaaggagcgcttaagaagcaagacttgccccggagggagcaggccagcgggcggcaggcggaccccagccagagagcgagtgtgaggagacgagggaggagcaccgggaaggcttggggcccgggcggcccgggcggcccgggggtgtgtgaggaaggaggcggagacggcgagggggcgggggccccaggagcaggggcgcgagggtctcagccggccgggcggcgggttagccgcagccgcgttgtccgcgctcccggtcggccgcctgcgccgccgctcccggcggacgcagcggcccccaccccacccactcaggcggcccggccctcgctgggcctaacgcccccgcccgcccgggaggaggaaggtggcgccgctctccccgctagggctccaccactcaggccgcgggaatttccggcctcgccgcgcggcgcagcgccccgctccggatgctgagggaaccgctctgtccagagcggggttcgaggggccggtccgggctgccaggagggagctaggccacggcacggggcttcgtaccgcggcaggggaagggggaagctaacggattggtcggtgggtgggaggtgtagaaacgccagcgccacgcgaaaatcccccctttctctccgagagtggcacgttccagacgcctcctgccctccctcccccacgctgggagccagccgggggcttcccgcgcgctttcccgccagctcgccccggcgcgcgcgtctccgctcgggggcgcgcacgtgggcgggagagggctccgcgccgacgcacgcgcacaggccgcccccgcctcctgcctgcctttgcgtgtgtgtgtgtgtgtgtgtgtgtgtgtgtgtgtgtgtgtgtgtgtgtgtgtgtgtgtgtcggggggcgcgggggacgacgctcgcagggaaacgtttgcagtggggaggggggcgcagcatgcctgtgggatacgagaattccggcgttttcttcctctcagcccctcaacaccctactctccctaccagctagatgtgcgcgagagaggcgagcaaggacaagtcgctttgcggctggccgcaggtgccaggccattgcgattgtagggcggaaaggcagttgctctgcaaaggaaacggcggcactctactgcagggcattcaagtcaaacatcactgactccgctgagagggagccaagagaacgttaaggccgaggcccccgtttcacagacggggaggcaagtgcccatagagggaagcctttctaaaggttacacagcaggactagaatctgcgtcaggaagtgttctatgggttattttaaaaaagaaacaggtgcaggataataagcacgaggaaaagtagaagaggcaggagaggccatagaggaagcccttgtctgggagtcaggatctctgggtgccagtccactttgcctgctccttaacaggctaggtgagctcggcttccttatctgccagtgagggtgcttatctaagcagtgcaccccaccaccacacatgaaccttcctgctctgttcagaccatctacgggggagtttatcgacctcccttggggtcctcagaagaggaatacctcttccccatgcccagggaggttttttttttttttttgagtcacggggctgtgtggaggctgagctggattactccaccgttttttcagaagttgagatcccagacagctgttctcagaagtgcagtcaggcctaagaggaaggtgaatgaggcctggatagacgagtaacttcccagatgaccacatgaccagaaattgaaaaggtggaacttcaacccaggttgtttacattgagttagactagattcttgtacagaaaagtgacagagctgtgttttgaataagattaatctagagctgtgtatgaactaggagactagtcttgctttttctggcttcaa

SEQ ID NO: 56560 - DNA, 1256 bp, Homo sapiens
gcttagagtttttgatcaagtcttgaaacctcttttcagccaggtttccttgtctataaaggagagataatggctctttgcagggttgcagtgggaatcaaatgggaatgtttatgtaaagtgcctgcaactgtgctggcccacaagtgtgtttcctttgttgagttttccttcagtttcccgtcattttgttatggctttatttgtaagttaaaaaataaaccacaaaaagaggaatttccatgggggagattgagccccactagaatcttagttctgctccttactcattgtgaggacctggaaagtccctgcctctcccttagcccgggttttctcatctgtaacaccaggggttccaccagggagtttctccagagcctagcctgggaggtatgggatgctaccaagtctgtgagcccctttcagggaaaggacccttcaggctgagctgggtaaggagggccaggcagggatcaggggagagagaggagagttgtgggagagggacagcaggatgcagaggtggcagttctgtcaccaccatgggctggcctgtgaagggagcaggccctgttcaggatgcctgcctgcctgttttcccacagcctgctgagttaatgccaaaacaaaatacacttgcttgctccctgcccgagggcagcaggccaaaataagtgtcctggagggctggcagacaccctggcatcccgcctgtcctccgtgggcatccgcccttcccctgtctgcggcaccaccctcagccaaagctggcctagggtgtggagaggagcctccccagggtctgcactcctcctcccatttgcagccttcgtaagtggacacttccaacccctacacctgcctgtcctcccagtccagccttggcccgagatgtgatctaattctcactatgctgctgtgggcagagcacatggcatcagaatgctaggagctgctgtcgggcgccatgggagggaattccccaactcaggaaagctcttccagcggaaaggagcaggtggcgagcctccctgaagagacagacactgccaacgctacaggcagagccaatcgtggggtaagaagtgtcaaatctaccacccccggccttctgtctgatgcttgtctacactgtgtacattaataataatagctcatgctttataatagttactatgtggcagacagccttccaagcacttcgcataaaaaactaatgtaattctcacaactctgaggtaggtactattact

SEQ ID NO: 56561 - DNA, 720 bp, Homo sapiens
atgcatctattttgtgccaagccctaaatgggccctggggctcaggatgacccagtccctttccctaagtgcattcaagctggggagtatgctgaccaccatgcatgatgtggtgacctagtccattataaacagggtccaaactagtggtgcccagaggagacccctatcctctagggatactccttggcaagacctccctagcctcctcccactgcttcctggtgggcagggcagccaacagcagtcccagtggggaggagaactctgagttccacccctggctgcctctctaggagaatcagatccaggatggggcgggcccctgccaggtctggcagggtgaactgggcctttccaccctggaagccctcttccggctagagggcagtatctgggcacagccccacagtgacgctgctcacaggcctcactgccagtgggtatgatgtcatgcaccaccctaggtgacctttgcagcccacgtaatgggtgtgatgctgtgaacctgccatctgccagctgtccaggagcagaccaacccaggagggccttatctcctgggctcgagctcaggacgcccaagcgcaggactatcttaatcttaagtgccctggagacctctccatgtatgtgcactgcacggaagtcctctggccctccagctcaacctgctccatgcatttccacagaacttcaaggaaagggaagcctctgtgg

SEQ ID NO: 56562 - DNA, 585 bp, Homo sapiens
taacaaatcagagaaaaagattcagaagtgcgaagcagtttgccgaaggccgcacagatggtagatggcaatgcaggaactttggcccaggtctgcccacttctacagcctgcactcttgttcttacccaggctgggttgggtttaggacccagggctgacaatgcaaggacatggtagggaggaggaaaccaggagtaaattccaggcactgcccttgctcccaatctcccagttgtcccagtgacaaaaataaaccgaagtgaccttggacagcggagccctgcctcccactgaaagtttctttttttctctttctctctttctttctttctttttttctctctctctctttcttccttttttaagtctattgatccacactcagcaataaagccacacaaaataaacagctgatggacaaaaagcatggctcctggcttgctgagtttctcacctccaagtggtttcaggcctcagaacctcagattctcagatcaatttagaaatttgtagactctcacagccctaacatgaggggtgtcccaggctgctggtcagccccaccagtggaggaatccacgac

SEQ ID NO: 56563 - DNA, 748 bp, Homo sapiens
caaagatggtacagaggattctcgtatatcctcacccactttcctctactgctaacgtcttatattggccacggcaaatgaaccagtattagtaaattattattaactaaaatccatactttatttacatttccttcgtttttacctaatgtcctttttctgtcccaggattccatccaaggtgccacgttacacttaaacatcatgcctccatcctttcttcctggtctgagagagttgctcagactctcctggtttttgatgatcttgagagttttgagtattcatcatcaggtattgtgcagactgttaatttgggctttgctgttggttttctcatgattagacttggttgagttcttgcgaggaaggtcacagaggtgaagtgccactctcattgcattatatcaagggaacattccatcagcatgactcatcaccattgataacaggcttgatcacatgacagagggagtgattgtcagacttctccatggcgaagttactcaaaggatgcattccaatcactgagatggaaggggcagtaccccctggcagtctgtatggtgggaacccatgagagaacccacccgataggtaaatttcagagggcaatgttcaagttctgggttcaactgccccatctcagcatctaaggctatgggctctaccagcactggcaggaaccaggtctgattcatttccatgttctcaatacccagcacaaggttgtcggttgaatgtataa

SEQ ID NO: 56564 - DNA, 666 bp, Homo sapiens
ctgggctgcttatcttacctccaccattcagtctattttccacattatagctggagtggtcattctaaagtgcccatctatcctactctgaatccttccctggcttcccattacttacaggaacaaggacactttcctgggatgataaaaaaaggacagcagatatgactgatgagactaatctccatatcctgtgaaaatgctcaagaagatatgcagaaatccaaaagcttgcagtgatgctttagaaactaaagataagagaagatcacagggtaaagtgcaagggagaaattgcgctaaccagatggtagatggggccagattgagaaacacattcttagacaacacaccacctgctactccctttggaacagaacagcatgtgtcatctgtgccgttaactgaccatgtcttatcccccacctttcaaggcctttaaggacaaagaccatatctaatttatcttggtatctctggcacccggcacaggacttgacacatagtaggcactcaatacatatttattgaatgaatcagaggattaaatgaattaatgaatgaagaaccgaaggttccaaagtagataagagagactaatccccactgcctacaccagtctcagagactcaggggcagcagtgaccagatggatgtttggtcatg

SEQ ID NO: 56565 - DNA, 2023 bp, Homo sapiens
ccccagcaggactgcagaggcggctcagccactatgggctgtgtgtccactctgctactgctcctggtggggctgcagccagcacccttcctggcagccaggcccagtcagctgatatggagcccaagagggcccaaggccccgaaggcccggggcaagttccttggctacaggaagaggcctcctctgcacttgtccagccagcggagcgattggctccatttcacaggaaagaagaccctgccagggaatggaactgggtcaaggtctcccagagtcagtgctgaagccagacaggaacctacactcctgattcctagaccagaaatgagagagaggcggggtgctcattcattcatccattcacaccttcaaggattgagcacctcccaggacctctaggacagcagcaggaagaaggcagacctggttcctgccctcgggagctcacagtctccgaacgggtcagacatgcagccggtagcccgaccagggaaggccattagagtggggttgacgacagagaagagaggtaaagcagctcaagataaggggccagagtggggagttcagggagctgctgataagattaaggcagggaaagtggggagcacgggagaggcgggatcctgagtaccctgctttcctaaccacggtaatggagagaggcacccccttcccccactttcaagcaagggaggtacgtccttagcctggggttccgagcaggtatctcccagtaggtcccttcctggccagccgggctggggcaggggcgggacaggggtagggtggcgcggtggctgggcgcaaaggtcccgcagtgggccacgcaggcaccgggctgacctggcaaaactttggcgtctctgaaaacctctggtaaccagctcccttctagcgtgagggagccgggaggcctccttctggcccggcagtgagagcgtcgccgcccgaccctcccgttgcagcaccggtacagacacgctgaccccgcggccttgtcgctgggcggcgtcccggagcgggtggcgcggtgtctacccgggcgggttgagggcggtgccagggtcagtcaaaagtccgccccgccccctgcctggcccggcttcggggttggggaacagcgcagggaggtgggtagccgggctcccaggcacgtgggtctctgcggctgcggcgggacccgggcactggcacccgggagcggcggcgacggcaccctgagaggagaagcgcagcgcagtggcgagaggtggggtggggcgtctggagggaacaaggcgctgggagaggcccggggaagcggcgggccagactggcgcaggtgcggactgggcgcggggcaggggagggcgctgtggagcggctgtcgccccggggcacagttgcgagccggcgtgtagcgcataactggacggcttgaacgcgcctgtgggtccgtggttgaactttgtctccacgggagcgtcggtctcggtgagtgtggacgggcgccccagtagtgaggctgtgcgcgtcagcgtactggggaggtctgcgtgttagcgggtgagtgtgtgcgcccctcggggcgactggccaagcctgcggaacttgtctgtgtgtgctccgatgtgagcgtccccgtggcgtgaggcggtggccggtgcccagagacgcgaacccctggagaccccctaccactgtcctaaccccagggtcactctgggtggccacctaccattggtaatgttgagggggcagttgcagggagtgggcgggggaggagggagtggccagaaaggacagttaagcctctgtccccgggcttttaatctggcaaatggtgcggtagaaagggtcagtcaggagaaaggcgataccccaccccccaacccgaaggctgccagtggccctcttggggtcctccaggagcgcagcccaagggttggggactgctggagaccagaattgccagctcgggatttgtggggtccatggctgctgttcctctcagcatggcatccccagcttcccagga

SEQ ID NO: 56566 - DNA, 1236 bp, Homo sapiens
gattgggttgatgactggggcacagagggtatagtgaccctgtatagtaggtaggtaccataagtagccctgtttacccaggctcagagagggtaggtggctctccctaggtcacacagcaagttggtggtcgatcccagcctgtctgactcctcaggggaaggaagcgaactcttgacccctgacatcctgtgccctttctgctaactcaccggccaggggccaagcaagggggtttccaggcctttatttcccagcaggcaggcaggccaaggttaggaagcctcttccacatccagcctggtctgagctggttcctgcctcagctggctggcagacagtgactcaggcttccagctcctgcctttggccaacaggtcccctcatccatgctagatatgaaggcctcaggggattggggaggctgtggggtcatgtaaagtttatcctgagaccataggatctacgcagcctgaagggctaggccccttgtcatttcttcctatgtccatactgagtcgctcctgctctagaactgaccccatggttgtcgcctgaactgaaaaaaggaaactggaagaggctgtctctgctgtgaggggaggggctgccgtgttttgccaaaggtgtacccgggtggagatgggcggtggatgcttgaggccagggcctctatgtcagacagacagggcgtggtgctgaccctgtcgtccctgccacgtccccagtggctcctgtgaccacatcgaccagggtgaggacctgagaacgagagcttcagctcatctggggagggtgagtggaaggaaggttggagagtgggtcaagaggaactgagactggaaacccagtccggaggctgctcagtgccagccccgaggggaggccccccactgtgggcagaccagccttgccctcacccctccctggctgtgtgacggaacggggctggctgtcctctggcgccatctcatggctacagggtctcaatgcagggaagacctaactcccctgggaatcccctgatctgagcatccaagctccgattttggggggaacaatggagaagggggccttagggtcaagaagaacatgttgaaatgccacctggctgggatagcttggaaaactcactggcccttcctgagccttagtttcttcgtctataaaggggagggaataatccaccccccaccaaattgcccagaactgcagataaaacatctggcacagaat

SEQ ID NO: 56567 - DNA, 1474 bp, Homo sapiens
aggggcagaggtggctctagttacactggcaatgctgagaggacccagaggagtatctcagtctccagtctctttatcttgcttcgcacaactccttgcttggttcagagccttgaagaggcggatacaagaggccctctgggcaccgccgcccagtcccgcgcagccccctgcagttcccaggggcgcgagagagggcgacgtagagcagcaccgcccagcggcagagcggcgagcccctccgcggctcggggtgagtcgggcgcggggcgcagaccgcgctctgacgtcgggggcggagcggccgtgacgcgcgggggcgggtctgcgcaccttcccggcccagccggcgattcattcaaaaggcgcgcaggctgcgcggctgtccgggcgctcgccgagccgggccgcggcgccgagtcgaacggggagccgagctggagctgccgcggcgcagccaggtaaggagggcgcgcggagcgcccatccagagtctgctctccgcggccgggccagcgggatacggaccctagtggcgccccctgcctccccgtgtctctgaggaagttcgcgggctcggcggatgcggcagcccggccgcgcgcccccccaccccactcctcccgcctcgcgtcctgtcccggcgccttccgcgcaccggccaccgccagtctccgagccccgtgacctgcaggtcctccggccgcgactccgggccggccctgcgtggtggctgtcggggggcgcgcggggaagcagcggaacttgcggtgtgaggggccggcggggcccggagcggtccccggcccgggaaacttggaccgagaccaggttgtggtgcgggctggacggcggcgcctcggcgcggctgcggcgcggggcggccaagggggggtctggatggtgtcagcccgtgactgtgggtgacacggcgcgtgaggcggcctggccgggcgaacgtgtggctgggacactgggcggtgacgccgggccgagcgggcgacacagaggggctctgtgtgtgggagacaggcagcgtgtgtgcgtgtgttgtgtgagggaaagacccggggtcactggggtcacgaagtgcgtggcttggggcgtgaccggcgcagggccagggccacccgttactgtgagtgtgaaatagagggagaggagcccaagtgactgagaacgagccgagctcgctggcgccatggtgtgcgtgtggggtcaagtggtgtcagtgtgtgtgtgtgtgtgtgtgtgtctgcgcctagggtgatgatgagtaagaggcaggaggaggagggaccggacctaggacaccttccggcagatgtggggcgatgaggaagttggggagccaggagacaagggtctccaggactgtccccacgagggcacccctcaggagttcagcttggtgaggagatggaccctgagggataggccctggctgagggagaaagccgaggctgggcaacat

SEQ ID NO: 56568 - DNA, 924 bp, Homo sapiens
gaaagaacaacagaacagaggtgaagacaagaccaaagactcaaacgctgtctcctacatgaagcttcacagacccttccaactaaaactaatcactatcctctatcccaaaaatacatggtgacagtgccattctagaaacacttcatgttagaagatttagttgtttatgcaactgcttccctcctggactatgagctctgaaagcagagtctattttattaacctatggagtgccccactggctaataaagagccaagaacaccaagacatgtacattatgtacagtatggacatgtacattatgtacagtatgtacatatacatgtacatgtatgattaacagaattgaaccaaagagtgttagagcttggtaggacctcaaagatcatttaatttaagcccttcattttgcaactgggaaaacaaagactaagtgactcactcaaagtcacagagcaggtcacaaatccagaacaggacctcaggcccctagagtcccagccaaaagagtggcagtgaggctgctcttctactcaaaggacaagagatctcctgtgcttattggttagttcaaagacactgagccattgcagtgggaggtctaaggctctgaatcaggaactgttacattccaagcggttgacactctgaataccaggccaagtcctttgtctcaggacagaagggctcagaaaaacctggcagaaccacccttgtttgatgcagaggccccagaacattttaggctgcagccttgggcaaagagccaggaagagttttattgtgatgaagacgtagaaaaattggggaaaaaatggaggatgggcacaatgaagaggtagattcctagcagcaccaacgccaggaaagcactcttgatggaaaaggaagtacacttttagaagaagttaggtcatgcc

SEQ ID NO: 56569 - DNA, 861 bp, Homo sapiens
ttatttttacacaaaaagattatgttaatcctactgagaattgacacaaatgcaagggtgaaatacaatgggagagcaataaagaggaaatcccatcagactcccaggaggtcactttcatttcagaatgtctgtcatcagcaaagccaagttcaatgagtaaagagagaaatgaaacttgatgggtgaagaagatggcaagctaagacccactgctaaaatccataagttcctcaagatcatggaacctgtcaattaccatatagcgtgacaaaggccatggaaggaaggcagcagcaggaatgtggcaaagtcaagagaaggtcaaggtagcctttgttgaagatgactaatttaaaggagaaagacattagcctagaggaaaagggcattctaggaaaaagggagagcctagagaatagaaacagcttaacatgccttgggaaatgacatgtatttcagtgttgctagagtccaaagtgcaaggcaggctgtggtgaaagatgtagttgcaaaagtcatcaggggcctgtctcagaggacctgaatatctggtctaccattaagccaagcagctatacatgagtcagtcaacaagggtaccattccagtagaagagagagttaggcagcattataataaagataagtgatgggtggttagagcagaagaggaacacccaatccagcctgggggctcatgaaaggcctctaagagaaaatgccaaagtaaggcacaaaggaaaaatggggctaaggtcccagcactttgggaggtcgaggcgggtggatctcttgaggtcaggagctcgagaccagcctggcgaacatggcgaaaccccatctctactaaaaatataaa

SEQ ID NO: 56570 - DNA, 1890 bp, Homo sapiens
tccatcatcctgccccaggtccaccccaaattccacccttctgaattaacactacgcagggccctaaccaaccctgtacatgccactcactctccgttgaaatcattcccctgcccctcaccccagctcagatcccaagctgtcaactgctccaggccaaacccaaatcaccaccctcattcagtcccctcccccattaaaagccatcccaccctagtctcatcttccacctcgccccaagaccatcccgaattccaacccgacgcccccaccccactctcctgtcccaggttgggttattctccatcaaaagtcctcctcccttgtcgcccgccccccaacctgcttgggtcccaccctcaccccacccccggccagcgcctggacaagtctcccccgccagcccgccgttccatcgcgacctcaaccccctccccccaacctgcacgggggctccgcagcctcccctctcattctcgccagcgccaccggcccagactcaggaccagcggaccctgtggcggggggagtctcctcaccggtgagcagctgcaggcgaaaacggcggcggcggcggctgaggcggcgatgcccttgtcttctccggaggctacggcggcgacgctctcgcccgtgtccagtagggtggcggatggcgcgcggggaccggagcctcctcctcagcgactcggctctgaatcctctgcagtagccgccgaggagcccgacgggtggggggaggggacgctcggctgcgggcgagggaggaggaggcggagggaggaggcgggggaccgctcagaagggcagggaaggaggagccggcgcggcgccgcgacacgtcccacagcctcagagcgccgggaccacaactcccggcatgccctgctttagcccgcgcgcggcctgcgcctcccgccgcgagcccggtgcagaggggccgcgccctctccggtcacggacagtggaataaagccaaccatccgctggcgaattttgtagactcaaagaccacctgtgaggaaagtcaggtcgcccgaggccccatccccaaggggccgtactcgcagcgtctccatcctctttgcatagacacccccctccccccgcccacacacacacacacactctctgtctctccctctctccctctctccctctctccctctccctctcgtctctgtctctggactacacctcccagcatgcccctcagcttcctattctccttccggacccttctcagacccggtactacagttcccagggagtgtggtccctgcgaaatgctgggagatggagttctcggttcttcctccatgttaagaaaaagaagtgaaagagaggcaaaagggaaggaatacgccagcccaccgaggatgggccttgatgggctagatcacctgtgattctgttcatccctcgccatctccgtttcagctgtctctcaccagaactaatgccggagcttcctcgctggtctccctgcaaatttgaggacgattcggcaacttgaatccaaacgacaaagggcatatcctcttcttgacccagctccattacttttaagaatttaccttaaaaagatgatcgaacaatttcgaaaagatgaatgcacaaagttgttatatgacgtagttaattatgaagggagtaaatgttcatcgatagggtgctgcttaaataagacgtgacatatacatacaatgcaatactaaggagccatttaaaatgatataaatctattgacatgaaaagctattcacaatttattcttcggggaaaaagttgattacacaacagcatgtctacacgagtgcatttatgtgaggtttgacacaatattctacaagcatggagagatttcaggaaagaggttcgccaaaatat

SEQ ID NO: 56571 - DNA, 2467 bp, Homo sapiens
tatatcattggaaaatactcaagaaggaatgaataattaacatttccccagtaattcccttttgtaccaccatgagactcagacgctgcttcatgttgaaaagagaaaaaggggaggtgagatgagaaaaattccaagtaaaatgatcatgacatagcatctggcagagattgaaaaatcatcaacattgccaaaagaattgtcagtgatgaaagtcaagagaacaaaatgaggttttccgacaagccacagccccatctaacctaaggggcaaaaatctccactgccgacgctacccctttcacccccaaccaccccatgctcaagtcgtctccaattcagatgtttcctctatggcccagactaatttcccacccaggtgaaaatcatttaattttttctactaccaccccttcccaccttccacgacatcagcacttcgcagggccaagcctctggggaaaacaacgcccagatcccaccctccttggccaaggttgaagagggcccgctctcgggagtggggcttccctgagtgggcctcacagagctgaggaactgggaaaagagcaaggaataagggtggggctcaagaaagggggccggggtacgggcaatgaccgagaccggaggaagaaagggatggacaagaggctgggcggggtgaggtctggggagggagggcagatcgaccggagatggccggactgcggggaacggagccggggagtcgaggattgaagaacccggggaacagggtaaaaactcggccactggcgaagagccagtggcaccggggggcacatcgggaagggctgcggtggcaacgagcgcggacgcgaggcgggcagggagcctccgcggacggaagggccgcaccgggggcggtgcggggacgctgcggccagctgccaggagtaggggagccacgcactcaccgctttgctcccccaggaacaccagcttgaatttcctcagcggattcccgaagtctccgcccgtggacattgtggaactagaggagcggccgccgcctcagcctagagacctcccggaccgatgctgctccagccagctgacgaaaaaggcgagcggaagggcgggcaccgagctctctcggcccctgcaaggcccggtggaggagcccggctggagggcagcaggactctccacagactggcagccgccgccgcctcccggcagagtagcctagcaccgagcgaggcccgcggctgggaagggaaggagggcggtgtcggcaggagccaggggtgtcctctggcttcccaaagctagggccgttccctccttccgcactcggctcccagacctggggaagagaagctgagggtggcggagccggaaccgcagacgtatctgggacctctcacgcgcagcgcctgagcttccacagctgccgccgccgccgcagcccaacctgctgagtgcgcgagcctctggagcggcgcggggcgagcccgggcgcgagcctgcggccccgccggccgctggcgtgcgtgcgtgcgtgcatgcgtgcgcgccaccgccatcgccatcgccttcctggtttggacagctctaccggctcctcccgcacggcggcgacggggcaggttaggtttccactggcgtcaaaagaagccaggaggaggcggggcaagccagggataagttagtgggaggctggagcccttacgtcacttacataatgagccaatcggaaggggctgagggcgagcccacacgcgagtgaggtggcagcgtgagagcgcgcgcagccctcgagctgtggaaagcggagcactgtggcggccataagaagtgtggcgcctctcagcctgaggggaggggaaggaaagaaaggggagggggagaagggtggggcggaggcggggccgggacaaaggtggaatatgatcccccaaaaagtgtgggtggggtcctatagccttaaaatttgtaatgggagcctctttcctgagccctcagccgtgcctcacagtcctcagatcccttcttcaccattgcacacaccccaccttctccatcctctcatcataattcctcacaggcatcttactaaataacattctcctccattgctcccaggaatgttataactgccagaatcatggcctcccaattttgcagatgaggaaactgaagcttagagggagtaaatgacttgcaaaatccataaagcgggctgggcgcggtggcccacggctgtaatcccagcactttgggaggcggaggcgagtggatcacgaggtcaagagatcgagaccatcctggccaacatggtgaaaccctgtctctactaaaaatgcaaaaattagctgggggtggtggcgcgcgcctgtagtcccagctactcgggaagctgaggcaggagaatcgcttgaacccgggaggcggaggttgcagtgagccgagatcacaccactgcactccagcctggcgacag

SEQ ID NO: 56572 - DNA, 2266 bp, Homo sapiens
acaatagccaacaggtagaaacaacccaagtgtctgttaacagatgaacggataaacaaattgtggtatattcatacaagggaatactattcaactctaaagcaaaataaagtattaatacatggtacaacatagatgaaccttgaaaacattatgctaagtgaaactatgcagacagaaaacctcgactattgtgtgattccacttatgtgaaatatagcaaattcatagaaacagaaagggtcctggagattaacaggagctagtaggagaggttaatggggagttattgcttactgggcaatggattctgcttggggtaatgaaaaattttggaaatagataatgacgatgattgcacgacactgtgaatgtaattaatgccactgaattatacacatattgttaaaatggaaatttttctcatatatatttgactacaatttttaaaaaacgagctgactatagagtgactttaagtagagtgactataaactccagaacagtccacatttatgactgttgtgtggattgtaattattgatagtatacccctagactctcaaagctatcccagtttgaacaataaattatatagccacccaatctctaagatctcattttgaatgattctgcaatcctaacatcgggcattaggaccttacaaaggttttgcgatgacatcacctctggaaaactagaacccacaggcctccagggaaccggaggctgggcggaagatgtgtgcacttcacacaaacgcccagctcccaagtgagaatcatttcagtggtaaatcatctctttacttggggttccaagagcccacgactaaagggaaacacttgcagaatgtgtcggatggagtcagcgacgccagaaacagagaatagccccaccctcccctgtcaagccacactcaacatggccgccagcgtccatgtggaggagggagcgcgcctcctctcgcagccccagaggggcgggccctgggaaccgaacgagcttcagcagaccaatggggagaggcaaggggcggggttggcctgggtcttcggccagagggcggtgaggttgacttgaactggcgggtcttgttgtgccggggctgccacgttatttccagcttttgaggtggattttgcccgctggtgtgccaccgtcagcgcttccgggttgaactccagctgagctgagctgatcagatcccaccctacccagtacttgtccctcctcttccaagccagccctaatcaaagccttgttggcccctccctctcatttgagatgactcatctctgtatcccaacgacgcggcaccaggtgtggcctgacacgtttgagcttaaaacctttttttctgattataaaaatatatgcatattttaggaaattaagaaaagtgtaatggaaacaaaagtgatttactgtcccatcggccagaaacaatcataattaacctttgtcattctttttttccctctgtgtgtctattttaacacaattgggacaatgctgtataacttatgtattatcgtttgcatattaagtgtttttctttgtgattttaaatgcatggataggataaagtattccatggatgaatgactgtgatttttatatttttccgttgagcatttaaactttgagcctgggcacagtggctcacacctgtaatcccagcactttgggaggccaaggcgggcggatcacctgaggtcaggagttcgagaccagcctgaccaacatggtgaaactccatctctactaaaaatacaaaattagctgggcgtggtggcacacgcctgtaatcccagctacttgggaggctgaggcaggagaattgcttgaacctgggaggcagaggttgcagtgagccaagatcacgccactgcactccagcccgggaaacgagcgaaacaccatttcaaaaataaataaataaataaaaataaaaaataaactttgagtggatagcctcttggagatggggcaggtcgggaaggagagacagctaagaactggctattccacagcttcaccttctctttgcaaagttgttccacaagaattacaagattgtagagtctttcaacattttaggatcttagggttctaaagtagtacaattgagaaactcagaatcataacatcttgggtgagtaaggaccccagaaaaaacaagtccaagcctctaccaaatagtttcactctgtctcaaaaacaaacaaacaaaacctgtctctatgaaaaaaaaatagaaaaa

SEQ ID NO: 56573 - DNA, 1973 bp, Homo sapiens
actaaatgaacccatacacccataaagaaccgacctggcacatactagcatttgattgattttttttttcttatttaaaatttcacttctaaaaccccaatagcatttattaggcaataatcaatcactgtactggaggaggtatgcctggtccattatatttccaagcataattaattgtcgtatctgtgttacctcagtactttgcacacaattctggtatttcacttaccatactagatactaattatttgttactagatactaattattttttgctattattttgattgagttcctcaaggactgagatcctgactaatttattccagcatctagcacaggacgtggaaatctgacttctaaactcaatttaagagatgattggctgggcctggtggctcacgcttgtaatcccagcactttaggaggccgaggcgggcggatcacctgaggtcgggagttcaagaccagcctgacaaacatggagaaacctcatctctagtaaaaatataaaaattaggcgggcgtggtggcgggcacctgtaatcccagctacttggagacagaattgcttgaacccgagaggcggaggtggcagtgagctgagatcgtgccactacactccagcctgcgcaacagagcgagactccgtctcaaacaaacaaaaaagtcagatctgtgctagacgctgaaaggaattaatcagacaggatctcagtcttttaagaactttcaaatacagagaagaggtggtaacaaatcattagtgtataatattgtaagcgaaaaattagaattgtgtgctaagtactggggtaacacagagatggtaattaattctttctggagaaacagcagtgaatgtgacaacctgagtgagggtggaaagcaggagaatttctagactctgaatttcagaagcttccggaactaaaatgatgtggaagttgagtgagtctcggtgggatattgctgctgcacctggtcaaggccgttccttcagtgttttcagacgccctgggaacgcggctgcagggtccggtcttcggtttgcacagctagaggccgcgcagcagcaaaggatgagcggaaccttggaaaaggtaacgtagattccacgcacgcggggcgcggggagatggcggacggtgcagagaggggagatggcggagggtgcagagcggggaggtggcggcgcgcggacatccggggatgagacactggggcgcccaaggtccttcccagcagcacatgcggctgcctggcgttgaaggggctgagcagattcctttccacccggggcgaactctgccgagccgacccgtgccacgcccacaccacatgccactctctccacccagtttctggaaaagggagagctctgcgatgggaatcacgacaccaggatacggtcccgattaactgtgtgaccttgggcaggtcattttatatttgcattcagttatcaacttccagaattttttctaagaatgcagttttgacttgctgaactgatgaggatgtgaagctacctggtaataaggaaacagcagtaataaactaggtttttgttcttttctttcttttttttttttttttttttttgacggatttcgctctgttgcccaggctggagtgcagtggtgcgatcccggctcaccacaaccttcgccttccgggttcaagcgattctcctgcctcagcctcctcagtagctgggactacaggcgcgggacaccatgccgggctaatttttgtatttttagtagagacggggtttcactgtgttggccaggctggtctcgaattcctgaccacgtgatctgcccgcctcggcctcccaaagtgccgggattacaggcatgagccaccgcgccctgcaataattaacaacattttcgtttccaaaaccttatttaagtgactgtcataaaaccgtatgaaccactataaatgtgttcctgggcttt

SEQ ID NO: 56574 - DNA, 544 bp, Homo sapiens
attgaaagatttttaaagcctccatttgaaaccctggggttttgtgtctttctttagtaaggagttgccttttctctcaggaggctgcaatgttaatgtgacagcaggaaacccacttattgacatgacacaggggaaaagaattcagttgaacttattggaaatcagaggctttcaaacttgtaaattttataattaaaacaactggctaattaagcagtttaaccactggtaatttgaccaaaacctttcatttaaggggcagaatggttcatttaacagtggtttgaaccagcttcttaattaagcagatgctctaattataggaattgctccaaactgaattttaaaatgcctccttgccaaggaattccagtagataagaggctgaggcaaacatttgcagtactttcacctacgatgtgttatcatcgcaaagatcctttttggttctgctttttgaaattacagatagatgattgagtttctatgtactacttaaagatggtgattgacatatgagttttcttttttatttacataa

SEQ ID NO: 56575 - DNA, 1759 bp, Homo sapiens
gtgcagtggcgcgatctcagctcactgcaacctctgcctcctgtgttcaagcaattcttctgcctcagcctcctgagtagctgggattacaggtgcctgccaccaagcccggctaatttttgtatttttagtagagacggggtttcaccatgttggccagggtggccttgaactcctgatctcaggcgatccgcccgccttgggctcccaaaatgctgggattagaggcgtgagccaccgcccctggccttaaacatttttaaatgagtaattcagtagcatttatttagtacattcataatgttctgcagtcaccagctctatctagttccaaaacccctccctgccattggatcagagccatgcttattcacttacatactgtctctggttgctttaatgttacagtggcagagttgggtagctgtatgtgtattgcctctatatcatatgggcaatgggcagtgtcacatgttttccatttggaaacctggaaaaaacagtcttttccagttgctcagctgttatcaatatgtggaagcaggaatcaggatttcataaactgacaagatagtggagcttaaggactttaggatgcagccaacctaattgtctcttttagctagtacaggttaggggcccatagagggcaatcctttgcccaaggtcatgggatatgtcactggaaaagggcagcaggatttaaatctcttgattcctagtccatctttttctatcacatcactcagggatgagtcaggcttcttacacaggaggcagctggattctgtcaccttggagctcttgtgtcactgacctagctgatgatttatcctctcgccagagtcagagaacttttgttgctcatgattagtttgccctgagacaaagggaaattactcttaatgccttatcctggtaagagggactggagatactctgattgccagaacctcagggttacaaaacaactgtgagctttgactcttctggagggaggtccagaaggaaatggatgttcttaggatcacatggcagtgaaaccaaacggaacacaagtcttctggctccaggctgaaaataccttcccttccctccctgagacaacctgctaaaggaaaagaggcaaacaaacctgggttgtgctggcttccacatttattcattttgaagctgagttattctggcctcattgaacctcagatttctgatctgaagagtgaggataatccctttttagggatttgagatggagataatataaatataatgagctagtaatgctcagtaaatgttgtatttccttcccttctaaaacttctttggcatactcttaaaagatttttttcattgaggtataatttatatatagtgacacatagatcttcagtgtacatttgatcaattctgaaaatacatctacctacccatgaaacccatacttgtatcaagataaagaacatgtccatcaccccaaaaagttccctcataatcatctttttcttccccccgcctcccctgccccgagacgaagtcttgctctgtcgcccaggctggagtgcagtggcacaatcttggttcactgcaacctctgcctcccgggttcaagcaattctcctgcctcagcctcccaagtagctgggattacaggcatacgccaccatgcccggctaatttttgtatttttagtaaatactaattaattttttatttttagtttcaccatgttggccaggctgctctcaaactggctggtctc

SEQ ID NO: 56576 - DNA, 2166 bp, Homo sapiens
agcaggtggttgagatagaatctgacacatgagagcaaaaaaaaaaaaaagttcagtgatgggagaatacagtgtgagaataagacaatattaaactggcgatataagtaagtgatcatcacaaggctttgtaggacatagtagggagtttaagactttttattctgagggcaatggggaatcacaagagggagttaggcactttacacaactcatttgccttggaggcggtataacttaagcaagagggagaaaatgggctttgaaacagacttggacctagctttgtcactgcctcatttggtgcccttggacacatcatttaataacctctctggaagcacagagatgaagccgggtgccatggctcacgcctgtaatcccaacactgggaggctgaggcgggaggatggtttgcgcccagcctgggcaacactgtgagccgtgatcacgccactgcattccagcctgggttacagcgggagaccctgtctcaaaaaaaaaaaaaaagaaaaaaaaaaaggtaaggtttgtaaggaggctggtatgtctaaagagttcaataaatgatagttttctcttcctaaatacactgttaactctttaaatagggccaggagcaaataatttagagaaagaacagtggaatagaaagtgccttgatcctaaaccaagagatccgtgttcaaatcccagcactacgccttactatgtaatctttttcattttagttttcccattaataatatttaattcgcacaattagaatgaagattaatataacgaatgaaaagcgcttgggctactataggactcagtaaatgctgctgtactctcctctcaccaccttttggcttcagtctcctctggagtaaaatgacgacgacccctgctcagagatcagggtaggctagatggttggcagctggatcgtggaggctggcctaaacaaggaagtcatggaaaggatcttaaagcagaaaaatgctggcagccacgaggcctgaggcgcctcaggcgtatcgaggactttgaactttgaggacgcatgcgcgcgcgcggccgctgatcgcagccccgttgtgcccgcaacgcctcctgaagaacgcggtacgcgatgctcaccgaacaggtgggagaagagggcccgaacgcacgctcctacgcggcggcttgggtttcgcaggcggttggggatcctctgtacatcctttcaggaaccagcccctcgtggggagcgtgcacacggaaggggcggggaatgtgaaaaagtcacgttttcattggtggcctcttggtgttgagcccacctctgtcctcgccgcacgcttctcggggactcacttccgggaaggggcggaagaggtgggctggtggaggcggggtcgagatggcggcgcctttgaggattcagagcgactgggcgcaagccctcaggtgaatccaggcccagaacagagtcagaggaggcgggtagtggatgttgctttgcgtcaaggagagccatgcctggtccaggatatcaataggggttacttcgtcaattgtcgagggatatggagggaacagggtccggaaaaagaagtatcaaacccgtatggtcattctctgaaaagctatccctaggccaagggagcacatgagctgtgtgatccccgcgtcagaactagtatcagtgagttggagaaagacagggatactgggaggcaggaaggcttttggccaagcagtcatttagcaaatattgattagtcgtcagttacttccagaagtctctgtactcaccaccactttgtgtatgtgatggaacctttgtattctcctaggcccctaatgctatattaggcatactggacgatactattaaggaaactaatactgtgtccaggccccatactggatgcttggtggagctcagatgtatactctaaatataagtgatggttcctgctcttcaagaagctgacatccaggccaggcgcagtggctcatgcctgtaatcccagcactttggaaaactgagattggtggatcagttgaggtcagaagttcgagaccagcctgaccaacatggtgaaactccgtctctactaaaaatacagaaattagtcgggcttggtggtgggcgcctataatcccagctactcgggaggctgaggcaggaga

SEQ ID NO: 56577 - DNA, 521 bp, Homo sapiens
ttatagataataaagggcttcaaaaactataaaatcgataggcattttggacattataacactcgatcttaattccatcatcttttttggcaggcagttccctgttgaggtatggtatgagggctgggtagataagaatgttcagccacctactggactcccctgacactaccctggcaaaagtggagcactgactcataccgcctcacactgcagacaggggaggtggaagttcagcttcccccttggtcctgtgtcatcttcttggtgaaagtaggacacagttgcaccacctgacttgcatcacctcattgccttctagtggcgttataagcttggttccctgctgactgacacctgggaaggggtggtgggcacctcagggcacctctttgtgcctgtcactgccaggtggggatggaaactgagctcactgctagatcctgtgacagtaccctacttaacctggtcaaccccactgggtaggggaatgggagtgctgctgccggcttccatgggag

SEQ ID NO: 56578 - DNA, 609 bp, Homo sapiens
atttttaaaatgtaaaagtaaagtcagtatttttaattgtatagttctgtgagttttgacaaatatatccagttgtataaataataccacagtgagatacagaacataataaatgttttctttgtaataagtgaatcgctaacaaaatcagtaatcaaccatcagtattggtgctgtgtgggcactaccagctgatcagcctcactgttattaacatagtttatttgtcatgcaggtgaacgggaggttggaacagaggccaaaatgctgctcttggcccgggaagataagaaacttcagtgcttgggactacagagcaggcagctggcaagtggttcctatatgacctttgaactctgaggcaacctgggtcactctgtgtcttagaaagctattttggaaacatttctacttgctccctgtgttcacttttgagaaggctgcgtgagtaagaggcagtacagtgtaatgattaagagttgtgggatttggaataagggcaacatttaaatcccagttcttttttttttttttttttggagacagagtctcactctgtcgcccaggttggatggagtgcagtggcgcaatctcggttcagctcactgc

SEQ ID NO: 56579 - DNA, 1444 bp, Homo sapiens
ccatccctggcaaagggtcaggccccaaaagtcctgagtagagctggggtacaggatctcctgtactgaggtaagcagtgctagaccaggcaagttctccccgccccactgtcttccccccttctttggtaacagtgagcctctggtctgggatgagggctaaagttctgttcttttccacagtagcccctttaagtgacataaacattgactcaggagctgaaaactgaaagtaaacagccgcctgggtctggctggctaggtggacctgccaatggattgctgcatcagaggccgagtgagggctcaatatagctgcctgccttgctcaactttcacccctttggctggctgcctttccctggggtggctctcagagtctggcctggactagaacttccttgatactacagagagcagcaaactcagcagccacaagtaggagcagaggggaagtgaggacaaggcacttagactagaggcccagccctgagaggcaaatcccaaatctgacctgctcagcccggctgccgcatggctctggtctcatgctctgagctcaccctccatgcctaaattagaggtctggtcatgtggttcttattaccgatatgctccctccgtgccacaccccacctgatgccaccctctccttactccaagaagccttcccggacaggcccattctacagggcctacgtcactccctcaccctgggccttagtctatgctacgaaggggcctgactagggcaagactcctcaacccttttttttgtttgtttttttaaacagggcctggttcaaaagatgatcctcaatcttctgaacccaagctctgccagagagagggctccaaagtccaggttttgagagggaagggttaaaagttatactcttacaagaagagctcctggctcctcctggactctggcctcagagtggctcaggcaacctgagactagcacctgcccagcagacctatgagccccttcctaaaaagtgtctgccaacttgcagtctgggccagggtggcgccagccaattttggctgtttctcctgacctctatacacccgtggccaagttgcttatcttctaaaagctctgtatggcctttatcagagatactttgacctttaggtctctcttaggctctgcagaaagctagggacttggtggtttaatgaaatgaggcaataggtcaggacctcttgccccaagaggggcagctcagccgtcaggcctggaccacaggctgagaagaaacccaggatcagtaagttccctcaggccccctactgatctgatctggtggctttgtggagagctgggattctctaccaggactatttatctttcagctgcttctggtttgtggaaaggaaaccaaaggatagatttttttttttcagacacagtttcactctgtcgcccaggctgaag

SEQ ID NO: 56580 - DNA, 658 bp, Homo sapiens
gagaagattacctcttgtagggaagtgaaagggaaagggtggcatcagaaagtgataatccaggatccttaccagatctcttgatcagcagctcttttgttggaacttttactactccaagcagatactctttgcatgactcaatactgattatatcacttgctgttaaatcaagcaaaaaagaaaaattatttgatggtctattcatcaaggggctagtttacagtatatccacacaaccctccccttatatgcactaaatcttagttttgtaaaatgcattagagattatcttgctcttgctcatgccccaatcaaagcctgaatgccttcatttttttttttttttggcagggtctcactctctcatccaggctggaatgcagtggtgcaatcataactcactgcaccttgaactcttgggctcaagtgatcctcccacttcggcctcccaaagtgctgggattataggtttgggccactgtgcccagcccattttttaaattaaatgttttgaaaaaaattcaggtatacagaaaagttgcaaaaatataataatgaactcctacacacccttcatctcgatacacccattaacactgacacatttgctttatttctctctacactatctttctcttacatacttagtacatat

SEQ ID NO: 56581 - DNA, 929 bp, Homo sapiens
acaattataagcactgagtaattattcagaaataccttggtggtttaatacggctgtctttaaatggtgtgagatgctggactctagcaagactgcctgtttttatttgacttagttcaaacaagagtcttggttctctttgtaggctggctaacaagcagagcaatcccataaacgtagtttagtctgactcagttcacaaatacatacatacctgaaagaagatccttggtagggaggttgtttgaagaaagaatgcatgagtcactgtgactcttggcaactgttctaatttgaggctggaattcagaactgttcagaagggacatctgcttccgtggagctctgcctttcagagttacagactctaaactctgtcctgaattaagactgtgctgtagtccaaaggaagaatcctttattgtatcagggttctctgcaaagcatacatggtcttttcccctgtttttttaaaaagggagaacatcagcaatatataatctattatggtaacattctattttgtcagagacagaaagtagaccagtggttttggcaaggtagtttggacctcaaaaagcgtgacttatttgcaatacaactttgtaaatctctttttcatctcccaaattatagaaataatagatgctttacctacagtgagggagtcatagcttaaatgagacaataaaacgaagagctcagcagagcctgacacaaagcaaatgcttcataaataattacttaaaacaaaaacctgattcttattccattctgtttcacagaatagctccctgtccctcttttccctcatgaacatctgtcctgcatctggatatcatttagtcatttatctgtatgttggcttctccgctagattgtgagtagtcctggaaaacagaaatcatgtcttacttatttctaggccc

SEQ ID NO: 56582 - DNA, 2215 bp, Homo sapiens
tcattcattcaactaacatttaccgagtcctgctttgtactaatccttggtcattcagtaatgtataaaacgtgattcttgcccacaatcacacaacaaatgatataatccctttgccaatttatgtttcttcctgtccctgtggacctcgaaagctacacacacacatacatttcacttcgttatcaaaaccaatcccatcattgtttgttcttctcctctacagtcatcctaccggtaaccttcatctcattaatcgcctgtctgtggcccctaccccagcccctaattcctttctattctctggagggccaattgcccttccttttaaccttctggttccctggctacttccttcttacgtcccttttcttgtttatccagcgggggtgcgggtctccctaaaattccttacaccctgctctcctattacgctttcctcaatctttgatcgctcaggttacctctttttttgcgcccacggctgcccccagacccttggccttttcgttgtttcatgatgagcccgagctcttcttcaccagctcaactccgtctccagcacctaagcagtatcctcccgccatccctccccacggcgcctgcgttccccggcaaccggcgccgctgggcagcctgggaggcaggaaaaagcgactcttcctctaacagtctccggaaaacggtgcgaagagaaggcgccaagacgccttccctccaatacactacaatacccaggacgctttgctacaatacctctccggggttggctggggggcgcctccagctgcgcaagcgcatagggatgcgccctttgtggactccattgcgcagggtgcattgccctgaagagcgctcctccttccggtgaaagtcgtcgggttcccagccgggagtctgcggagttctcatactctgttacccagcttcctttgtatgagtgctgttgcgcacttccggtggaagcgctgaagcgagtgggtggagtttacggagccggtgggcggtaggcggtgctacgggtagctgggtgctgtccaaaggcgacagggcgtcgttaggggagcgagtcgtgaccggttgggccacactcaacgtgggacgaagcttcgcctactgtttgactacgtgcgtgcagcctcccctcgatgtcggccctcgaaaagagcatgcacctcggccgccttccctctcgcccacctctacccggcagcgggggcagtcagagcggagccaagatgcgaatggggtacgtgacccataccccttctccctatgggccaggccccagccgttggagaatggtatctctgggcgttcatagaggcacgggaaaggagtctactgataggagaaaatgttggcggcctggagatatttagatggagtagaaggcagattggggtactaggggaggcgccaagtcaatagaaattggaggaaaaataacgttgttgaagggagaggggaatgaggcaaaggttggggaagctgagagactaacataagggatctgagaatcacttccacaataaaggaggcttagaaaagggagtagaacggtgacaaaggtggaggagaatcggccagggaaggtggagggaagtggggaatgactgagagaaaagttgaggggaattgggccaacaactaaggaaaggtttgggaggagtagatattatcagagttctaatatctgcactgtgagaactagatactagaaaagctgaggggggtagaaaacactcgagacagggctggagaaggaaagaggagaactaggaagcagacgattctagagaattcccagaggtgtaaagacagattcagcgaatgagaggtgagattaggtctcttaagggagaatgagaaagtttagggagtaggcctaaggtaaggtggagaacatagccacgaagattgttaagggtagtaggaatgtgctgagaagctggacaggataagggagagagaagaaggagaggactgaagaatttacagagtgagaagctggacaggataagggagagagaagaaggagagaactgaagaatttacagagtgaccataggctctaaagattgagagatgactataaatacggtttggtgaatggaagtgctgcagttgtaaggtctgggaagcttagaggaagatttgggcaatcagtttttgctgggctagtagatctgagggaagcgacgtactggcctaa

SEQ ID NO: 56583 - DNA, 2875 bp, Homo sapiens
taaatgcctaattacctatgcattcctcatgttaagtctgcccagtccactttgttctctacctcaacaaactcacagcattgagatacaaagaggaataagacaaaacccctgccttcaaagctgctatggtgtagagacatctgaacagagggacccgggtacagtgggaaaagcttgtgatttagagaaatgtgacgagtccctgatcctctgtgatcctaagtcaagtatttaaccattaacctctctaagggtcagtgtgttgtctataaaattgggatgataataatatctacttcacagacttataaagattgtgagaggcaatgcttatgaagacactttgtgaactatacattagtgttacttttaaacacaggaaaatctctgctctactgcaagacaagccaggatagggcaaaggccaaacagcagagttcagtctcttttcctgaatgtcttgttgaggttctgacaaagtggcaactttggaatcagaatttacgtccctgggaagtgagaaagtgctccctaaagccagtgggtctcctggggagacgataaggctctgagggaacagccttggcatgatatggaagaccatttctttgctctttgcttttgatggattagtgtgttcattctttcaaatagagtgcaagcagagtgctatgccacatgctcttaggttacagagatccccaagacagagctattgccttctaagagctcatggattatgggggaaaggacaaacacaaatataactaagaacaaagtaaggtacagtgaaaaattgagaaacagactttaaagtgctgggaagcacagaggaaggagaagttcattccagtggggcactcaggtaagatagtgacatttaagccaaattttgaagagtgcataaaatttcaatagatggaaaagatgtaggagtattccagcctgaagaaacagcataagcacagacatggaggtgtggcaataaattatgaataaggagataggaagaagtaacgggagatacagctggagaagcaggctcagggcatgacatagaaaactgaaaacactgtgatatggaatctggactttatggataatgggtactcagtgaaggtgtgtgagcaggaaaatgatttggcaattagaagttccctggtgacctttgggagaccagctccagcgaagttgtgaggacagaaccaaaagtcaaagagttgaagagtgatgcaagtggagaaagaaagtagtttcttgttcggaaaagggaagaaaataccacctgctcccctggaagcaattaacccaaggctgaattttctctctgacactagaatatcagaaaggttagaaaaagcaatgaggctgaggtcatagggaccttccataggttagagaataactactaatatgaaaggcccttaatgtaccagaccaagtaagttaagccaaatgattctgaatcacagctttcatcactcacctcccttcccagacagcacaaactgatctccatcctgaggtctggcctccccccaaggatgctgacgtcactgtctcacatgtctttggtggatgtaagtaaagggctgcagtggggggtgggcagggctggaggggtgggataaagctgggctctcacagctgaatctgctcctctacagaagccatcagggccagagtctatttgtccttctggtctcattcttggcaagtcatgctttcaatatgagtcaggaggtgggaatggaatcttgtaaagttaaattacaaatgtggacaggactgtatcttctggaaaagcaatcctgtttaggagaacaactatagacatattttttggtttagggcagaggagctcttccaagtctctctcgaatggccttctagttaaaccctcagatgatctaacaacctgggaaaggggagtggaaacttcaccctcttaaaaagaatgtacagctataaacgtgaactagggattctccacctctggaggtccctgaatggctgttgctgactggcagtcagctatgctacggcccgagggtgggcagcaggtatgaccaaggaagggcccttcttaccttttgctgatgcggtactccacttgtaactgcttctcccctgatgccaccactgacctctgtagctggtgggaagaatgtaagacaaagtccaagtggttatgatgcaaaaggaaagttttgtcacttccacagacatatttctctcttaagcatcaacataacagatgccagttcctccttaattagaggacattttgcatgtgggactaatttagtgacagctatcaatcctgaaaataaaagatcataagtgaccaaagatcgtagagttgaaaataacctttaacactgtgtctagtcgacagtaagcactcaataaaagtttgctgagttgaatttaactgttatttgaatcccttttgtatctgtaagactgtgagttaggtaagaacaggggctatttctcattcgtctttgtttcccagggtcaggcacagggcctgacctatggtaagcacttcgtaagtgtttgtcgaattaaatgaacacctccagcaacaggaaactctctacactcagaggcagcctgctccttttgaatattctaatgaaagcctttccttacagagaatcagagtctgtttttgctacaaccacttttttaaaaaattgatatataatagttacagatgttgagggtacttgtgagattttcatagctgcaactgccttgattatgaaaagacaacaacagttttgataacactagtttaactaaatgcctctcttttgttctgaatgtctaggtatagcatttaaattattattattattatctt

SEQ ID NO: 56584 - DNA, 1615 bp, Homo sapiens
agtaagggtgccagaaaccactttcaggtatgtggagaaggaagtcaagggagaaaaagggaaaggaaatcgttgtttagggtataacttacaatgatgatgatttttttttttttttttttgaagaaagagggaagacagcacttgaaaggaaagagggtaaagaagaggaagggaggttacaattgagagcactgcagaaggaagcgatgcagatgttgccgcccggctctggcagtccgaaggagcaaccccacgcataggtgggtggcaacgccctgctccgctgccccccgctcggtgtcccgagccatctcctctgcagcccgcggggcgctgggtgggcacaggaaagagcagactgtgtgggggaggcgacggcgtttgccgggctgaccaggtacccaccttatcccagcggagccactgcccgatggccgtgtccagctgagggtccccggtgtggtagggggcgtggagcaggttggagttcagatccccctctgtgttttcagccatggcgaccagacaggcgtacgggccgggggccggcgaagacactgagttggggtggggggtggcttggggttcgctcaccagggtccaggcgtccccacctcactgaagggcatcggagaccaaccgcagggtgttcgtaacagctcctgccgcggcgtcagggaaccgggagagagggggtttatggccgcctgctccccagcggaccaggtccgggtctctgggcgaagtgactgaggcggtcgcgccgcgagagaacaacagtcccagatgtctgggtcctggctccgccgccgccgccgccgcccgccccgcctacggccccgccccgcgccttaggccccgccccttcccgcccttgctgatttaagtccccgaagttctagactggagcccgggagcgcgctccccacgcctccgaagtagtgggggtttacagcccgtccgggtggtgaggcaatagtgcacggttctttttattttttaatttgccaagggtctcctttcctcgatctgctctcacggctaccactagcaagctgcctttgcgcttgccctgcaggtccccagcgcgcgcgcaggcccccagtttctcttgggggcacgcgccggttgggggaggaggggcagtgcgagctgtccgcgcactgcctcacgggagttgtagttctttcctttgtctgagctcagcggagaccgccgccgagactacgactcccagcagctccgcgttccccctttcctcaaaagaaaaagatctacctcgaggtagttccctacagacacgccctatccctattagttatgctgcgctgtgtggccctggcattaaattaaacaaggaatgacatagtaaggggacaaagtggtatccgtttagtgctgtgcagtttacgaatcgcgttctatcgcctcaatccctcagtaaggtacaggggcgtagtccttttccgtttcacacacaaagaagaaactgactccctgagacacctctcctaagaggccgagttcgtgagcggtcaaactagggttccaatctcatttcagatcccctcagctggcagttattttattaggtcggtgcaaaagtaattgc

SEQ ID NO: 56585 - DNA, 915 bp, Homo sapiens
gactccccagctcatggagcagccaaggggtattgggatacacagtctcctatggtgaccctggggatagatactgacaattggcaagccaaaactaacttagaaaagggctgttgttgcccaagttggaactggccaaatttgaaacatgctagtagtgactgggccttacacaggatgcccttctaagcagtctgttgtgtccaattctgctctgggaacagccacattctgccttaggatccagctgccagccataagcggaattttagaactgattctggtttctacccaacacagatgcagaactactccctcatatttttttttactttttgaattttaaaaaatattttcgtattttaaaaatatgtttttatgtgttactttttatctgttgtaatactgacttgaagtagggatagggcaacgtacttgtccccccacataagaattggaaaattttactgcttaaaatggatgatgactcatttgaccctcaggaactgtttcctaatgaatcactgacttgaattatgtcatttatttattctgtctctccttttgtgttagttccctggcctcatgttggtgaaaagggagtttggtgatgtgtaacctttaaaaagtgcatttattacacatttcccagcaccatgtaatttgagcattgtgattctggctttttattatgtctcttttgtgcttaatttcagtttttttttattcctgaatgttctgcaatctctctttactaaatgcttgaattacaagtatacgcaaaaaaagctggcttttatgacttgctaagacaaggatgttgtgttccggatttataattatagcactgggggaaaatattttatttcaaaaagactaaattagttctacttcaaaagagtttcagttaattaa

SEQ ID NO: 56586 - DNA, 863 bp, Homo sapiens
ccggccctcacctccgttggtccagccccgtcagaccccgcccccaggcctcaagctccgacctcggctctcaggtaccgccctgctccgcggcgctcaccgatcgcgcagatcttgcgatcgtctagccagacgccagtgtagggcgggggccgcgcgcgggcgtcctgcaggccctggagctcgcacaggcgcacggcgcacgcctccagcgacgctacgtgcatgcgcaagcgcaggccgagacgccgcaggtcgagtaccgggtggcaaagcagctggcccgggccgtggaaggtggccaggccaccgcggcctgtgacgcgcacctcggcgcccaaggcccgtagccgcgcagtttcctcgggcgtcaggccgccgcgcagcccggccgtatacacgggccccgcgggctcgcagagcaggagcgcgcccgcctcagtccccgacggggcctcaatgcctggctcggcctgcagccgccgcagccagcggtcctgcagccccagtagctcggcgtacggcacccgacccaggcgcaccaaccgaacggcgggttgccgcatcgtgcccaccgttgcgtccgcggggccccgccctctccgtgggcctgggggcgtggcctgaggggcggggactcgggggcacaccccgagccgcagctcccaggtgcgtgttaaaagctggaggggggatatgtgatcccaggaccaaaagcgcggggccagactcatcggttcattcaacaaccagtatttagtgcctgctgtgttctgcaggccctgccataggcgcttgatacagcggtgcatagcgtatgagaaagatctgtcctggtaagcttacattcttacagcagacga

SEQ ID NO: 56587 - DNA, 1136 bp, Homo sapiens
ggctttcccgggtttcatcacgcgcagccaacctcggtagggaaatattatacccaatgacatctgttgagagaccatattcactaatgtttattacagtataataataattgttctattttatcgttagttatttttgttaatctcttactgtgcctaatttataaattaaactttatcataggtacgtaggtataggaaaaaaccagccaggaggccccgcacttcggtgttttctactagctctgcctacctccgtctgcgccgtctccctgactagtttgacccttcgagggccgccgtagtgcgtcgcctccgttgccggggaaacgacccgggacctgggagggagcaaagacgtttcccgccggcgggagctgtggctgtgattgagagaggggttagaggcgggtcccagcgctgccgcaccatggcggaccagctttatctggaaaatatagacgagttcgtcacggaccaaaacaagatcgtgagcagctactactggggaacgcgggcgtgcgaccggggtcctgggcccggctagggcggcgggagccttgaccctctgtctgcttgtggcttcgtggggaccaggggagacaggtccccacgaggggacctgggcgagctctgtgccccagagcgagcgaggactcgtcgggaaggtcctccagcacacacggaagtccgcgtcccttgggtgggcgtgctgggaacagagcctggggctggagccgcggagaccgggcgcggagggagggccgttggctgagagttctaaggcgtccctacacctttcttttaaggtggttggcgtttaaagttttaagtttacagttgaggaaatcgtgtcttaactgtgttaagttacaagttgcgtaacctccagatactgtttcctcttcctggaaatttaagcattgatagaggtttgatccgcttcacacgggtgaggaaaagatcgagcgaattgatggatgtgagtgcactttgcaaaccgtgatgattgagtgcctgctgtgtgccaaggcactttaatctttacagtgacctccccgcaccccatcccaggtcggtggtggtatcccgagatgaggaaattgaagctgaggggccaaataacttgtttattt

SEQ ID NO: 56588 - DNA, 422 bp, Homo sapiens
cagcagttatagaaatattcctcattaattattacagccacatagtgccacattgatagatataccttagcttattcagcaatcccttattggtagttgttatttatgatctttggctattacaaatattaatagtgctgtagtgaatagcttagtgtctgtgtgttttgtatatttttgctagtgtgttttagggttacattcctagagtaggattgctcggtcaaagggtgagtgcatgtgtacttttgttggatgttgccaaatatcactctgcttcttgttcccaccaacaatgtatgagagtgcctgtttccatatagcattatgttataatatgttttagggctatttatatttctttttctgtgaactgtctgttcctaccacttgcccttttttttttttttccttttttgaga

SEQ ID NO: 56589 - DNA, 1132 bp, Homo sapiens
ctttttacccttccctctcctcaagcagaaggaagcagtcactttcattgctgagaactgtgctgcttggagttggaggaggagtggcacaagcactccattagccaacccagctggtgtctcactaggtcacatgccccccaggtccacaagctccaagcccagcacaacactaagacttgcctaggagttgcagtccttgtggcacagactgcctttcaagtttacttaggaccccagaacactttagcccacagtgctgaggcttccctaaactcaggttctgactgctgggataggcgattcctctctggctatggctggtctaagtgctccttccatggacacacatctgctgagttcagcccagttttgctgagttcaaagtcccacagttgctgcactctccctcccccaaccacacagattctctgtaccaagggcactgcaaggggatgagggaggggtggcattggtgattcaagactataatttcgaagttaaaaccaggtactgtgattgcttacctgatttttggttcctataaaggtgcttttcttatgtaaatagttgttaaaatttggtgttcctgtggggaggatgatcactggaagcttctattcagctatcttactctgtctctgatgagggaaattaaagaaactaaattaatggagtaatataccacatttgtagattggaagaacgcaatattgttaacttgtcagttctctccaaatggatcaataggttcaaagcaatgccaatcaaatttctagtaggcttttttgtagaaattggtaagttgaagttctaaaatttgcatggaaatggaaaagatgtagtataaagcagtcttgtaataagacagaggtgaagaacttacatttgatttctagacttacagtagtgccacagtagtcaagacagtgtggtgttgacataaagatagaaaaaatagatcaatgggacagaatagttagtctgtaaatagtggttgattttcatccaaggaggaaaagcaattcaatgtggaaagaaaagtctgttcaacaaacgatgctggaacaactggctattaaaatgtttttagaagaaaatatatagaagaacattttcatcatctttggat

SEQ ID NO: 56590 - DNA, 3061 bp, Homo sapiens
tgtgccactgcagtccgcagtccggcctgggcgacagagtgagactccgtctcaaaaaaaaaaaaaaaaaaaaaagatgagaagacatttcctagacagacaaggtgaaaggcatcccaggaagctcgtgctaagatgagcggtaacagggatgacgggctcagggaacagtgctgaatttggtgacttaaaccacagcctgtgtgggagtggcaaaggcgagggagtggagtcggcagaggccacacacgaagggtgctgcaggcaggtgaatgtttggacttgatcccgttcatgatggggaagccattgaagtgttttaagcaggggagataggatcccatgtgccttttagaaacaccctcctagcttataaacgccaggggacagaggaccctcccttttctctcgtgtcctgggcctcctggagaggtgccagggcaggtcctacgagcgcatgttctttgtggagtgccaggcctggtatttcttttccttcctggggggtgaggcttcccatccagcaacaggaaggatgaaactcaatcctatctcagggtttttcacccaaggatgaatcagaatccaccatggaattttctaaatgacaaacacttgggctgcatcccatttactaaatcatgcattcatttcagaaatgtttctcgagcacatagcacatgtggacactgttccaggtagtagggacacagcaatgggcaaagcccctgccttcatggagcttacagtcagaatctctggggcaggccctgacatctgtgtttagaaaagctccagtggtgaccccaaagcccaggattatggactgaattgtgttcccccaaattcacacatttcattcctaacccccagtacctgagggtatgactgtatttggagatggggtctttaaagaggtaattaaagtaaaatgaggtattggggtgggccctaatccactatgacttgtgtccttataagaagagattaggacacggacaggcacagagtgaagaccatgtgaggacacagggagaagatggccaactacaagccaaggagggaggcctcagaagaaaccagcactaccaacaccttgatctcagacttccagcctccggaactgtgaggagacacatgcctcttgtttaagtcaccagtctttattatggcagccttagcaaatgaatacacccagcctcacccaggaactactgcttaaaaaacacaagaggatacagaacacaaataggaagcacctctgaagcacctctgggcagtgtgggctgcataacccagagcttagagatctctctataggtttgtccctgacagaagccagttccattcacaaaggcaccactatcctggaagtgtgggtgtttcagagcagcctcctggtggggccctgccttaaaccctggcaggcctgccaggagctcctcctcacccacagagggccacatccacagaaatgatgacaaagggcccttaggttcttgcgttccacaaggaggctccagtgggaacaggccttgggaaccaaggacctgtgctgcccagagaaacccaggatgggcgaggagccggcctgaggtcacacagcctgaaggacagcatctgagctggactctcaccccctgctcttgtcccagctgcttccttttgcagccctggcacctcgcccaaatctgctgccacccgcttcactttcccaccctctcccctccacctctctggctctgactaaggccaggagcatgatttcagaatgatgaaacccagctcctgaggtcacgccggcctcatcgtagtggctgtaattttgcacggcctcatcccccgcagtaagctggggaagctgccaggcctttggcacatgtctggggggcaatgtgaggatgagacagttagaagagatcacttcaagccaggtcaagaggaatttttggttacataccatctcttgtcccagccctggtctgggagacacagactgataatgcagccttattatgctcacgtcatacctttggccatcatcccacttaatcccctttatacacacagtttccaagccaacaccaccaaactgcctgcacgtccgtccccacgctgtgctgattcacatctctggggttttgctcctgctgttgctgttacctctgtgtggactactcttccctcctcttcctccaccctccttatctactttgctaactcctgctcttcctttagggcctagctgtgctgtcacctttcccaggaaaccttctctgaccatgccctcagcaggtaggcctgtatatttctctctgtacttgcataatcatctatctttatgtccttgcattgcatgtgaattatctgctcacataaccatttccccatccagaatgggagcttcttaaacttcttgcttgggatggggttgggactagatctggttcatcttggtgtcccagcccccagttcagaactgaacatagaatgagtcggtaagtgttgattgaatgtcagcccaccccctacccaacacacacaaagatagataaggcctccatttacagagagaaaagcccaagaggagttttttgacctgtttaatgtcccagggtgagttagtatcaggacagggattagcatccagctctttgggagcttagactagttcttatgcacgaaggacagcattcatagagcagccagccaaagggacccactcaacacctgtgaaaagaagaggggggcagggaagaaaagaaacaaagggatcacttagcctgagccaaactgggcatattcattgtcaaatgctgttgtaacaaatcaccacatgggcgcggtgctcatgcctgtaatcccagcactttaagaggccaaggcaggcatatcacctgaggtcaaggagttcgagaccagcctggccaacgtgatgaaactccatctctactaaaaatacaaaaattagctgggcgtggtggtgcacacctgtaaccccagctacttgggaggctgaggcaggagaatcacttgaacccaggaggcagaggttgcagtg

SEQ ID NO: 56591 - DNA, 2467 bp, Homo sapiens
gccctggctgtggtgacaactcactgtgaggactgggaccattctctatcccttctggatcttggtttccacccctgtaaaatggggataaccaggtctgccttgtggagttgctaggagagcatgcaggagactggatatgaacccagaaggcagggctgagggtaatgcaacttcttatttattaatatataataacaacaattatacagctcatatctgcaactgttaggtctttgttatgtcttggtcactttgtctggactggccgtgaccttcagctccagggtctgggctaggaagacgttccagtgacctgcatggaggagggcagaagagggaagaggcgtatgtgtctgcacgtgcacaacagaggcagcagctgggggttggaaaagccttgggccaggaggaactgcaagggccagggtttggagcccacagggagcctggaggcgagtgtgccatcacactgggtgtgatggggcacatgacccagctttcaaacaaccttgggggacagaactggtttcctgacacctgttggtaatactcccctctgtgacctcccctccccgacctgaaaccccacctgggtccatcttcctaaaagtaaggtatagaaggaaagtggaaacattccagtagagagggagtgggcagtacccaggtttgggggctcagacctcccctctccacagccctttctccctccaccctcagaaccaaatccagccagctctgcttcaccttcccgctctggagttaggaaatctctggcgcagacacccgctggattcctgtgctgggaactgacgtctgtggctgacagcccctcctcccggcaccagcagcctgggaactccccgaaaggctctggcccgtgtccttgccttcttcctgccccggccccattcctcagcccaagctcctaccttcgtgggggccagcgagcagtcggaagtgctgtgcctctttctggaagtcttgcttcctgactttcttgatctgagtcaagtggaagattcctgagggcagagacaaggatgtgagcaggcaaggcaaaaacctacagtcggtgaaaagtgaaacagggtgacttagcacagaacggacccaatcactccctcccccaccccattctgatcagacacaaaatcctgctgatgacatttcctcaatattttgaatccattctcctatctctctgccactatcctcactcaggcccctgttgtcttgtctgggtcactacactagagtcctaacccctttcactccccctctaatctgcaatcctagctctggtcattagaacatgtatacgtcaccctgtcattccccttccctgacgtcctgtcgcctccacagtgaagcctgttttcttctgtctgttctctttgctgatcctgctcctgtcacctgcaccatcctgctctcacaacacccacctgtccccagtgcagggagggagggaagtggaaggcaggagggagaggaggaagaaaggaaagagaaggagggaaaaaggaaaggagggcaggaagggaggaaggaaggttggctggctcatgtgaactggtcacgcttttctcagggcatagaacatatgataaaaatcaataggtgtgtttattcagataccaaagaactagcaagtggcagagttacagtggcttgcctgtgccctagccctaaccaagtacttgacgtcccctgaggaggccaagccttttcaaatgccgttccctctgctggaatatcttctactattgccttctatttctacttttttttctttttttttttttttgacggagtttcactcttgttgcccaggctgaagtacaatggtatgatctcagctcactgcaacttctgcctcccgggttcaagcgattctcctgcctcagcctcctgagtagcttggattacaggtgcccgccaccacacctggctaatttttttttttttttgtatttttagtagagactgggttttagcatgtaagccatgctaaactcctgacctcaaatgatccacctgccttggcctcccaaagcacaagctgggattacaggcgtgagccactgcacctggccacgacttctactattagcaccaaatgaactcctacctgtgctccaagccttagctgggaagtcttccctaatccacccgaggcaattcctccttggggcacccacagcacctggcttccatctgtgattgtgcctgtttctaatgtgctctcattgtgtctactcctgcttcctctaccagactggggactcccagagggctctcctctctgggtcccttgagcctggcccacatttggcatgtagaatgaatgaatccctggatggatggatggatggatggatggatagatagatgaacaaatacacacacacacacacacacacacacacacacacacacacacacaccccacatacccagt

SEQ ID NO: 56592 - DNA, 1684 bp, Homo sapiens
acaaagctacccccatccttaggagagagctcaggccctcatatcaaatgaacactaaggcaggtttctgagtaactcacatattccccactcactttctcctcagttatcaaggcattacaggataagtacgtgtatcaaagtttaacatcgttcagaattgccagtaaagcccctcagttcccacctctttcagttcagtaagaggaaactgcaaggacttttcgagagtgcggctgatgaccgcataataaagaataactaataaatattaatgaagtatcccctctggccaatcaggtctgaggagaaccctctttgggctcacagaagcctcgcccctcatgaatatgtagatagcactgcccaccgcgcgtactgccccgccctccactcttctccctcgcaaccgactctcccttcaaacgggaaacaagatggcggctgcaggtccgagtactcgggcctcttccgcggcggcagcagccgctctgagtcggcggggccggcggggccgctgtgacgagacggcggcagctaagactggggccccaggcccggcttctggaccttcgctgttggtgttgtcgccgccgttgctgcagccgccgctgccgccgcggccggaggaatcgggctgcgccgggtgcctggagccccccggagaagcagcggccctgccgtgcggccactcgctttgccgaggctgcgcccaacgcgccgccgacgcggcgggcccgggttgccctcgctgccgcgcccgcggcccaggctgggcccgccgtcgggcccgcgacgacggccaggccgactcagaggtgctgggcgagtgcgcccgccgcagccaacccgagcgctgccgcccgcgccgggacgggggcgcggctgccgcggggcccaggccagagcaggagccgcgtgccgcgcctgcggagccaggtggagcttccccacttccccttagggtctggagcgaggccgagcgcgccccggcccggcctggtgagggggtggagagtcccgggccctactcgggcgggtgtggagagttctcgtgggattagaacccgggctctacccaggtgcagtgtgtttgtgaattttgaacttcagagtgaaggacaggcacgttgcatgcggaggggcggtgagggcaccctgtgccttacgtaagtccgaagtttggagggaaacagaattgttggaacaagttaggggcaggttggaattggtgtgtgggagtgggaggggccttggatcagagaagtgcttggtttaatgttggatgaagagtttgggggtcatattgcttggagagatgtggctcctggccttgaaagggtcagtgaagggtgtggagaatccggagtttagggaacaggttgaatttgaggatgtgaagggagcttttcagactcgagagcagagggggttgggagcacacttgtgcagttgttttcatacattttggaaaatgtatgcttagcacagaacttggcacatagtgaggaagcagtaagtgactgtcgtttatatttgtaatactagtactactaagtccagtagtgcctgacagaaaagctggcttgggtttaaaagttttggaaacaaaggttgggtggcaggggctgcttctatctccttggcagtatgggtttcctactggcttgctggcaattaaaag

SEQ ID NO: 56593 - DNA, 802 bp, Homo sapiens
gaggcaggagattcgcttcaacccgggaggtagaggttgcagtgagccgagattgcgccactgcactccagtctgggcgacagagcgagactctctctgaaaaacaaataaacaaaacacgaaaattgaatagataaacaattgaatagtgccttacttatcccttctcatcccatctcaacttccctgttcacttagggttaacatttctgcatttaaaaaatttcccctttctgtgaaaagcaagtagttctggtttattactcagttgacagacaatgtttgctatgtgtgcagcctaaattacatttaggactaatgaataatgaaaccatgtgattgtagtgcaagaggacaggaattccctagtctgtaaggatttgtttaaaatatgtaaaatgactcatttctttatccttaatgacacatatccgagaatttgagagtgtccttatgtgttataccaatacaggaaacatttgccttgtgctaagatgttttttaaagctcttgatgagattacatgcactctaccaactaaacagtaattactattgaagaatagctccaatgtatgaattcagaattgaacagcaggaatttaggaggtatttgtttattcatattttcactccctgtcttctagttaatcctgaaagagttgcctaccttgaattaatttgtatctgagttggcttgagtatatgatgtaggatatgtttgttaaatttcattccactaattcagtgagcattttgaggggcacacattgtgcaagatgatgcaataaaaaaagatgaat

SEQ ID NO: 56594 - DNA, 981 bp, Homo sapiens
ttccaggccctagttcttaaacatttctaaacacactcttggccaaaagggaaaactgctttcaagggaaggactcagtcctggcaggattcatcacatggcccttgataaccctagctccctgacaacatttctaaacacaccctgggccaaaagggaacctgctgctttgaagggaaggacctagtactggcaagattcatcccctgttgactaaagagcccttcggccctgaataaccagcagcaatactgagggagtacactatgggccttaaggcctgagatgtcctggcttcaggggtgatggagcacatttccagatgtagtggctatggtgaaagactcaaacagaagtttgagaaaagcagagggaaaagtaaaagagagtttgtcttgcaccattggcactggctcggccacagtaaggtaaagcaacaagcagcctcttaaggtctctgagtccagacctaggttcctggacagcatttctgggcccactctgggcaagagaggagttcactgctctgaagggtgagtcccaggcctggtagcatttaccacaacctgtgggaagatcccttgggctttaagcaaatattgtcagtggcctggcagaaacccccatgaactggtggtggtagccacagagaggctcctctgcctgtggaaaggggagggaagcgtgggaaggactttgtactatggtttgagtgccagcttagctgcagtagaatagaatatcgtgtaaattgctaaggtgcttgactccactcgctggctcccagacagcatctctggacacacccagggcctggggaaacttgccaacctgaagggaagggcactgggcaaagcccagtgctgtgttggcttcgggtctgacacagcaccagtggtgggggccacaggggtgcttgcatcaccgcaccctcagtttcagatggcttggaaaagagagagattccatatgtttggcaga

SEQ ID NO: 56595 - DNA, 2136 bp, Homo sapiens
aatagagcatggtataatacaatactgctatttgataactctgtcatggagtagtagtccaccagagtagcaaccaggtctatcttgatcccctgtatccgttagtacaatattggtgctcaatatacatttgtgaaaaaaataattaaaatctagaatactattacatcctaaaaccgtaaaagcagagtgtcagaagggatatatattggttttgattttttttaaatgccggcttgaaaaccgagttcagatacatgctatctggctttgggtaggttctttagtttcctcctcatctaacagggctgttgtgggactcagtgagagagaggatggctggaagtgcacataggatactgcctggcagactgtaggcactcagtaaacgcgagttctccgttaacacgaaaacattacaaacagctaaaatgacagctgcttgagagaataatcggtaagtgccacaaccgggctagaaaaggatgaaggacaagctcctgcccactcctttggaaactccacacctgggccggagaaagactcgaattcgaaaactaagtttcagtcgcacctgcctccggcgtcgcttcagcctccgaggggtctgcggaggcgacgtcccagtcaggagggatgcgcgcctgcgagccccccggggatctcggagccgctccactgcggtgcctgccgctatcttccccacgccttagtaactgcgacgcgacggcagacagtgtaggcggcaaccgacggccgggacgtctaacctcaagtcccagcaagccccgcggccacgtcctctgactacctcgcgccagcaagacccaaactacggatcccgattgactccgcgcggcgcgtcacgctgtcagctccagccaatcggcttcagacaagtcggaggggagggagacgcagaggcggacaagatggcggcggcagctgtacagggcgggagaagcggtggtagcggaggctgtagtggggctggtggtgcttccaactgcgggacaggaagtggccgtagcggcttgttggataaggtgaggagccggttcttgggaacagttgaatcctggggaggcctgggaggcggcgagccaaccttcccatcccggtctcccttattttctacggccttttgaggggagcccttgtgtgaccactatcacaaccctacgcacgcttggagcctgcccttgccctcatcacacttcaaacctggacccggtcctctttagaacttcttcttttctcgcaagtgttctggtcctggtcgccacacctttttcggtaatttgatttttcctatatttaatcgtgtccatctcttttctcctggggggctgggtgcactgttgtcagtgcccatttcacagacacggaaaaccgaagcccaaagattaaagaatcagtatcccccaaactctctaccaccatcacccttgcgtgctgctacagattccaaagtgcttcttgtccttttgcttactgaagtttttaggcgttttatcatgataggcgaatactgaaaatatttgagtattgactgttctactgggctgacaagaagcctttaagatttttctttttttcctgttgtttttccccgccctctcctctcttccctccacctccctctttgctaccaagtgcactgctgcccgctcacgcttgcccctttcctccctctgctcatccaaaaaaattttttttaactgcagtcctagcaacaagggtttaaaagaaaagaaaaaaaggaaaactgtccctgggttggcctttcttgctctttgcacagcatcttggaagaaacagttgcacggagaacaacgtcctggtgttgattttgcctctaattagctttgtgaccttgaaatatgcttgctctctctatatctgttttctcatctgcaaagtgagagatttagccttaaaatgagggacttaactctaaattcccttccagttctctcattgtagggccctgggctggtttgatgagaattgttaagcatggtgtctttaatatagtaagcagaatttttgaatataattgaaaacagctttcagacttccctgtgcataacacatggtaggtgcttaagaaatgaaaacatgattatgttgagg

SEQ ID NO: 56596 - DNA, 534 bp, Homo sapiens
ccagtttctgtcagtttaattagagtgacaggtggagtggcatacttatgggagaattcatcaaaagccaagatggcatagaaatgaaaggtgcatatcgttgggagacaattcttcatgggtctctagcatttctgcatattttgcaaagagaggcactgactatctttgttccagactatttgtccaggaatgtttgtatagtaaacaaccttagaaggtatcagagcaaagggcgcacatgctcactgcccattattgaagattcaggttccctaacctcaaagttcctctcctttaaggcacttcattacatgtgcaggtatcatctggctctctgcgtcatcatatgggaattggggctcagaactggaacaaatgctggtactctggctactgctattgctgtaagtaacaaactatcctttttacaggtagtaacaggctatcttgttagcttgcaggtaagataaaaatctcagacccttcacaattcttgacagccccactcctacttctgcctgtcccatatct

SEQ ID NO: 56597 - DNA, 1593 bp, Homo sapiens
ctcccacgtaggccttccaaagcgctgagattgtaggcataagccaccaggcccagcctattacctttacgttgtacttagtcccagataaaaaatgaccttagatcagtcctttcctctttggctggggagaggggggcttaaattccggtactgtgaaacagaagaatggactcagtgctatgtgacaaatctatgtatgtaaatgtgtgtatatacacacacataaattatatatatgaatatattttcattttcatattttgcaaggagagtagccaatgctctggacctctggtcctttttgtagggtaccctctgaggccgggaacctttgctcaactctcaggctgtccagggaagctttaggcggtgataccgagctacagaccaatataagagctcggggctgtggcactgaagagaggaggcggccgttgggaactgaggtgggcccagggcttgagctgagttggcgagggtggaggtggtgccggtcccacgccgtggtggggaccgagctgcgggctggagggaggggcagcgccgagggggcgggacggggagggctcgcggagtaggccaacggttggccccaaccgccactgactacagcctgcgcccgcctcttttcgttgccgttacctgtttccggcagtcgacacgctcttcgcttctcggggcttgtctccgtgtcctccgtctcagttgtttctccctctctatcctcctctgtctcagtctccccagccttggggccggtgcctcttccgggcttcggcgaatgagacctgcggacctgcccccgcgccccatggaagaatccccggcgtccagctctgccccgacagagacggaggagccggggtccagtgcaggtgagcggggttgggagacaggagagctccccgaggaggactcaactgtggggacaggttgagcaagaccatctgcgtttgggaaatccagccttggattattgagacagagccacctagtcggctaggatctgacctggccagagaattcttggctagtcctatttttattcgttctcacagaagccgaacttaaacctcagaattatcactccagagatgaaagggaactgagactggaaaagccctgcttaccaaaggtctctgggcggcagaaagagccctgagcttcagtttcaacttaggagacctgggtcttggtccagattttactgtggagtggcgttcagtaagctttgtccccatcccgggcccgagttttcccatctataccatgagagggtttagactacagatcttcaaaggtctggcacgtggtaggtgctccttaaatattacttgttaggagtgaataaatgagataggaaggcctcctgggattcactggaggctcattgggttagttggaggctgtggaattacattattatagtctgagaagtaggcggtattatctccattttataagtgaggaaactgaagctcagaagtaaagtgacttgctagtaagtgtcaaagataagtcagacttcagagtccatgctaggctatactctctcccagtaagaaagcgggaaggacttgatgggaaagt

SEQ ID NO: 56598 - DNA, 707 bp, Homo sapiens
ttctgtgtctgatctacttcatttttttgtatctgatatttggcattttgtagtacagatacaacatagtttgtctaataactcatctgttgatgaacatttaagttctatctcattcttgctattatgaaaactattataattaatttccttttaacatgcatttggggtcacatgtgctcaaatatttctcggagatagacagatccttagaagtagaacttctgggccaagcagtcagcacattttcaaatggaatggggtgtgcatgtgcagggactatcccagcttcaaacccagaagctttgaggatgctgagtcacagtgatgactgagatgaccctgttacacccggcctgatgcttctgcccaggaccaggggaaaacccatgcatgaagggttcatttcagcctgcagaagagacttccctattagacctctgcagactgtagactttcaactgcagactgggaggttactaagtccttagcagctgagtacagaacacgatggaaatgaaaacatggtacaacagaggttacagccctctcctgacctgataaacttcatgatggagctaaagatggtttgggaagtttctttgaatcacaagcagaactgtatgtgctgtctcctcctgtctggatctactcactacttgctaaagagaagaattttggtttgggataaatttatgtggatcttc

SEQ ID NO: 56599 - DNA, 1372 bp, Homo sapiens
gggtgggatgggtgctcacagctgttggcacagagccaggcacatggccggagttcagtgaaggtgtgttaaatgaatgagtgaatgactggaggagcaggaagggacacgatttactcagctggagccagggaacccagccaaacctcgttgatgagaccgagacttagaggacaacagaaagacaggcccctgaccccctcttcaagccgtttcccctctcaaaggagacaaagatagagacagacagagcagagaaaaagagaaaagtgtagtcagacagtgcagacaggcaggctcaaacgaagaggcacacaggaggtcggagaacacaatatcaacaggtatcagcgagagaatgcagggaaaggtagggaggtcaaaccgggagagagggctgcagcagagactgggagagacaaagaggcaggagacagagcaggaaagagaatcagacggggacaggtgacggagagctacagacagacctgcaggcagcatcagaagatccacccagaagaccaggagattgagagtgacctgcagagacctgcatgggtctctgtgcagtgaggtctcttactatagagtggggaggaggctggaggaaaaaggtcttgaagctctgcctgcagggtgacaaggaatcgccttgtagcgagggcagtgtttctgggaacagagcacctggcccaacactttctgggaaggcagtatgggtagaagaaacaaaggatctttctactgggagtactccaggttagacgccctatagcagtcacctttggcctctttcccagctgttgatcctcccctgggctgtgtgagcctcacagccatttgggcaaggccccacttgctcccagaagcccagcagggagagcttcataggccatggagacagacccagctgaggagcagctgcagggactccaggagaacgcagccatggcttggggactgcagtacggcaggaagggtgggatggatgcctcctctcggggcacctcacaggacagatgagaatgaggtcagatttgggtgggatggttgggggggcggtgtgaatgggccattgacaaaccaaattccccatcagccttggctcagtatggatgggagggatggagagcggggagtgtgggaactaactagagactttggctgcactacacctccccacaagtccccccagtactatttttctgacccctgcagggcccagctctggaatattctccaggtgcccactgaccttccacacagacagcaggaagctgaccccagcatctgcctggtgggccattgggtgccatctctagccttgcttcccgagacccattctgggctgtggccaggctcaccacactac

SEQ ID NO: 56600 - DNA, 2097 bp, Homo sapiens
tggcctcctcttcccctctttctggacaaatctgtactgaaggctccaatgttcccagcctgtgcctggtgaacacaggcctgagggagctggctctgcaggaagcctgccctgaccccagggtctctggtgccaaaacagcctgaagacggtcatttgggtcactttgtgtttggagcactacagcttcatgatccgagtgagatgggataacatggaccccttaaggggtcaatttaagcagagagagagattagctgggaccacatggagggaacagagcatggccttgagccatagctgcctatctctgagcctctggctccttgttttaggcatagagagactctccctccaggccctagttgctattttttaggtcatcctgggtctagatggggtagccagggttacaactgggaacaggaagtctcagctcagggtccctgactgagctgggaaaccaccagaaagtttgcctggcccctccgcaaacctgccagatctccttcaagaaacaacagctggagtctcacaaagctggacctcaagcatgctattgtcctcccagcagaccacccaaggtcctgctgggaggaatttcccaaatatgacagccaagcccaatgcctggagacatgcccccttcctgcctttgactctctctcctccagaatgctgggccaggccgaacaaggaactggagcattcagggcccttatgctgcccccatcccaactcatgcacaccaccgcagtccccacccacagaccccgtgctccagccttctcttccccttcatttagtttagttcaattcaacaatcttgttcttttattgagacggagtttcactcttgttgcctaggctggagtgcaatggcacaatctcggctcactgcaccctcggcctcccagattccagcaattctcatacctcaacctcccaagtagcggggattacaggcacatgccaccatgcccggctaattttggtatttttagtagagacagagtttcaccatgttggccaggctggtttcgagctcctgacctcaggtgatccgcctgcttcagcctcccaaagtgctgagattacaggtgtgagccaccacgaggccaggcgtgagccaggcctcgaaagataagtggtttgctggggaagaagaacactccacgctgagggggtacagctggtacaaaggctttgaggtggaaaagaacatgatgaatttggggaatggcaagaatctattggagccagggaataatgctcactagggtggggggtacgtgggatgggactggcttccactagccttgacctccttgggactgagcctgtactcacggtttgcagacgcagctgggagttggggaggggctaaccattgttgaggaccacagtataccaggcataggacattttcctttaatcctaataaaaacactgggagatagacactgctcactcacttacagagaagaaaacaggcttagagaggctaaatcagatgtcttaggtcacatagctacgatatgacaaaacaaatatttgaatccaaagtcttctcacccagaggctttcagcagggaactaacatgatccaccaggactgggggagtacaagacaacctctgccctgggggagtttattgcctagtcaggcagataagagggaaacataagtaatgcaagagagtgaccggcagaaattggcctgggagtggggttttatggagggagagatgagagatgagctgggctgcaggagcttggcagggggatctgcaggcccagggaaccccaagcaactttaggaggtaggaagggcccaaggcaggggcttgtggccttgaagttgtctgcctcccaccccaacacctctggagggaggtgtctgccattatcatgaggaatggattgcccagcatctgctgctgatgttaccagaaaggggtctggatccagaccccaagagagggctcttggatctcgtgcaagaaagaattcagtgtgagtctgtaaagtgaaagcaagtttattaggaaagtaaaggaataaaagaatggctactccataggcagagcagccccg

SEQ ID NO: 56601 - DNA, 2544 bp, Homo sapiens
ctatcctaggttttatgacctgcttctactgttttctcaaatgtggccaaggtgccatatttggagaatagtgtgtcctgaattccatcagtaaatactgttatattcaccttacaaatggggaaactgaggctcagaaagctcagggatgtgcccaggctcacacagtgggcttgtagcacatctgggattccaacccaggtctgaggccttaaagcctattctcagcctcacatttccctgagatctgtcctttgctgctgggaggcagccaaaggaggcagaatcctgggcctttcccacagagaacaggtaaaggaaggcggtccttgcagtcaggctggtctctgaaaccttgctcctcatcacccagactcaggtggtgtggagaaggctgactctacccatgaagggcagccccttgaagggtgagtctctgactgaccagatacctgggaaacgaagtttgtggctgacagactttcaggaacttgtctgactgtcttatgaggagctgcaggcaggtggctgactgacggcctgaacggacagctctcctgaaagacagtagcccgccggctggctggcttaccagcaggtggacacgatgtgcctgcatgagtgatcagccaagtgaccgactgacagtcagacacacagacccattgcgggccagctcgggctgtgggtccctagcccctggagccacctggcctacctgggaccccaaaacttagctgcccacctgggagagagagggactgggttttttaaactagggcctggctctctgccccaggtcccttcattcccgcaggcaaccgcctgcccagcccaggttcagtcccatggccgtcccatcctcctgtcaggggtggcccctgacaaaggccccacagcacagggcagggtctcagtgcccttccacaggaggacacgcagtcctggactggaccatccttccaaggggagttccgccctgagtcagggaggcgaaggtttgctgtcagcgcgtcagcagagaccccagcccacaggaaaggctcggagggggtgggcagcctgcctgacaagccccattcagtgaccagctgacccccaatacatgactcgtgctcctctcagaacccggaggaatgtggccagtgcttccctcccctgcccagaggcacaggctgtggactttgccctccacaaacagccatatctctaaaggataaagtactcccaggaaggctttgagccttggcagaaaaggctgggattgaagcttcagggagagccagaggtgaggctggagtgggagatcacctgaggcaggtgagcaggctccatgagtgggcaggtgagaggccagggggctggaactggggctagacaggctggggcacagcaaggatgccaccagtatacccaggaagctaagtggagggtccagggtctggcctggaggcgggggcctcacattctgagctggcccacaggcttccacccctctcccccatccattccttgggtttccttcagagctggggctccaggtcaaggacttctgctcccagcctcagctcccgctctctcacctggttggcttggccccttggtggactggcactgctacctatgaagtgacttggctaggtttgggtgggccaagacagagaaaagcactgtgcttcttccccctgtcaaacttgtacaaggagcattgagtgatgttgagtttaacacttacctgggcttgagtcctgggaccaatgctaaccagcaaagctagttcctctgagcctgggtgtccttatcagaagcatagagataataagacaccaaagggacggagctgtggagagggttcatgggccagtgcacagaaagcctgtggcatggagcccagactacagcaggaaacccactgcggctggtgagaggagctgaggctcagaaatggtcccctccacctcctctgggagcctttgctttgaactgccttatttcctccttgcctttaaagtgactcccactgagtgtcccatgacactcctcttccctaggccaatttcccgtctcctcgtcaggtgtcagttttgtttcaacagttccttgcttcctctgagtgtttatgccccgcagagggactcctccctagccacacgcacttccatttcctcagccaaattcctcaacctgtttgtatagacatttctccaaagcaagatatacaaatggcagtaggcacatgaaaagatgctcaatatcattagtcattagaaaaatgcaaaccaaaaccacactgagataccacctctaccctatgaggatggctataattgaaaaggcagacaatgaaagtattagcaaagatgtagagaaattgggacattgctggagggagtgtaaaatggtgttgccactgtggaaaatggtttggcagttcctcacatggttaaacatagcattattgtatatgaacatatgacccagcaattccgctcctaggtgtacacccaagagaattgaaaatgtatgtctccatacaaatttgta

SEQ ID NO: 56602 - DNA, 2096 bp, Homo sapiens
tagagacaaatagtagatgagtgtttgtcagggaagagggaggaatggagggtgactacagatgggtacgggacttcttatgagtgaatgaaaatattctggaattagatagtggagatagttgtatggctttgtaaatgtactaaaacccactggattgtgcacttttaaaagggtggattttatggctatgaattacatctcaattttaaaaatcatcaggctcccaggtaccttgtaagaggagcacaaaaacttcacctgtggtggttcagggcctccgtagccccctccctgagtttgtctttagccctggagatagagtgagagtcccccagatcagaggaatcctgaggtcaattttcaggctccagaaagcatgctgagtgaaaggaaactcctgccggtggtgagagggacatgaaacaatggaggcttccggcaggaagtggagccgcagaaggggaggaagaccaaggaggcctgggctgccaggaggagcaggtggtttcagtctaaatagaggggtggagtctcaaggttggacttctgggctccccactgagagtgagctcaggagaccctgggaaatgcctctgaaggggctcagctttcctctcattgcagtgagtgagatactgatggttaccatagttaccatgtgaggaaagccaacatgcataagggaggccaagggtccaagacagctctgtgtcctcagttatcaccccatgggcctctgtccacaagagtgttaagtgagacgagctcagagggccctttctgccctgaccagcaacatggtctgatggtgtgatttggggattggctggttagctctgtgatgacatgcacaggggttccctgtgcaggggttgaaatctactccaatacaccccagaaaagcctttattccctgactatggacctagccttgaccctgcacctgccccagatctctgatcctagactgagccagacagtcccaggcccagactcagtctccaagagcacaggatgtctcacaacccaaggcaggctgagagtcttcacggcttaccctactgctggggccactacctgcaggtgtgttgtgtagagaggtcagcagcttctccctagaagggaagtttttctgggagcagagtgaagtgtgaaataggtacccagtaggtatttgatcagtaggggcacagggatacacacccttttaggaaagtcccttccagaactgtgacctaagaatgaggaaggctgaaggtgatttgattctcagattctcatcaaccactaagaactcttcttcctgaaagaccttggttctgaggtctagggctatctaatcaggtcagggccattctcggggattctatctattctctttccctggttttctgtccctcagggccagcgggtgaggtaccccaggtaccagacaaggaaaccaaagccacaatgggcacagaaaacacacctggaggcaaagccagcccagaccctcaggacgtgcggccaagtgtgttccataacatcaaggtacctctcagggcctggcaggggcctccgagtctagaagagcaggctctgccacgtgctggtggtgtaatgccaaggaagactttctctgagcctcggtttcctcatctatagaatgtgtggctgtgaggatcaaagggatgatctgcgaaagcactcagctgggtttcgggcacatggaaggtggccagtacatgttcgctcctcccagagaggaaaggggtgttcttggagtagtacaggatgaggcaccccttgtttcccactttcccagagaaacagagaagtgccctggggatcccgaacctatgtggatactgggagtcctagctccaccaagggcagctgtgaacatccaacgtccactggagcccactgggtgccaggcgctgtgccaggtgccactcacacgtgatcttatttagttctcacaatatccctgggaactcgggctgttgtcctcattgtacagatgaggaaactgagactcagaacagagtgaatatattaagctctgtcataaatactctattttttaatcctttgaagtttttcttctc

SEQ ID NO: 56603 - DNA, 1399 bp, Homo sapiens
atctccacagtggagaagcgcttcggcctctccagccagacgtcggggctgctggcctccttcaacgaggtacaggccccacccagccacaggggtggacactgagggaggcttgcaccgcaccttccaccagcctcccctctcactaccctaccttaaggccttcccctcccagtgccctcaggcaacccctgtcccagcgcctgcctgaaacctcagagcgtttgcagctgtcttctaggacttggacttggctgtctccccttgggaacctctaatgggtcgggtcctggaatatttcggagctagccagggtccccatatccacccactcccactttgtgtcctttaccttttcaggcacccaactattgcctgtcccaggaaggaatcaaagaaagccacttcaacagtagtgagagaggcttaaatcgcatcaagagcagaacctctgggccttgggatggtcgcgggagggataccgcggcgcagggtgtctgtccttagaactgcctggggattcacaggcctgtggggcccgcagccaagcagggaggagcagatgagctgctttgggtggatttggagatcagagtccagctgtgccccagtccttcagtccttcccccgccagatgtttttaccctgaaggaagttgtctttctcccctgtccccagggcagagtcccatgaaattctccccccttggtaatgtgtcatatttctcacaacccaaggccgtccagctgcagtgtccccagatcctcctcagcacccgcctcataggtgggaggggaaagtccttactttgctctgggagtttgggcaagtcactcccctgtctctgggcctcagggccctatctatgaatacggccactatggagtgtggctgtcctttccagggtcagccatcccctggctcccctgctgatactgatccactcccccagcgaggagtgtctgggactcacccaaggtcaccaatcaataagcagcagagccaatgcaccccctgctcatggtggcagagactgtccctgccctgcatgcactgaagtcacctcctgaactcacatcctaggattgtgatcctaaggctcaaaaggtcaagccttgggccaggcacggtggctcatgcctgtaatcccagcactttgggaggctgaggtgggtggatcacttgaggtcaggagtttgagacctgcctggccgacatggtgaaaccccgtctctactaaaaatgcaaaaattagctgagcatggtggcgcatgcctgtaatctcagctacttgggaggctgaggcaggagaattgctcgaacctgggaggaagaggttgcagtgagctgagatcacaccattgcactccagccagggcgatgagagaaattccgtctc

SEQ ID NO: 56604 - DNA, 894 bp, Homo sapiens
atttgaaagatgaagaaaccaaggcccagagtgggtaagggcctctgtcaaagtcacacagcaagtcccaggcagcctccgtggaaggcttctttcacgttcttgaccttggttcacatggctctttgcagcccaagggagtggctctccgtgctgggttgacacagctcagagtcccagctccataaatggagggccgcagagagaaggctgcttctacagccacatttgggataataatagtgtgagggtctcctcaagtttgctcaccaaatattggtgagctccagggaacaaatgtcaggtactaaattaagaaattcttttctgtactctgcatctgtgtcccaagctgacactgaaccctcccccaaagtgaatgccaagggccccagggccctccacaatccagccccagctgccccaccctgttccactgtgccttcagccctggccttgccctcatactttgtgatctagccattctgagcttctcattctcccggcacggtgccctttcaagtccctgggttttgcgtgtactgtgacctctccctggaacacccctcccctccctctttttctggaaaattgtgtttattcttccggacccagttcaaactacaccacctttgaccaccccgccccacccaggggccaccgttgctatggcacttgcaaatgcctcagctcagaaaggtggtgtagggcagtttaagagcatggactctgaagccagacctcctgagttccaatcctggccctgtcaccttactagttgctgtctaagcatcagtttcctcacctatgaaacaggcataatgagagcactcacccttgaggtttgttgtggggctcaaattatttttatacacagcacttagaacagtacct

SEQ ID NO: 56605 - DNA, 1385 bp, Homo sapiens
atacaatctctctgatggaggttacgtagtccctgaatggagcgagaccctgccttgtctgatggaagagacctgacctctgtgatggagaaggcccctgtctgataagggagacgtagtccttgaactagaggaggttcctgggggagacattgcccttgagttaagggaagcccctacctaattggaagaagcatagtccctagactgagggagaacctgttctatttgacagaggatacctggcctctagctgggtgaggctcctggctgatgaggaagacagagtcactgacttgagggaggccctggcttgtctgatgggggagacactgtgctgtgctaagggaagccctgtctcatggcaaaggtctgcctcagagctggagatgggccctggaattcccctgcaggtagacctatctcagtgaaaggcatagcctctgccctccaggaattttccatctattccggtgccatgctgtggatgctgaggagagatgggggatggctacaaagcacactgcagtgatcagtgcaggagaatggactggaagcaatccatgagatggagccctttggagtcaggcagccagagaggcacaggatgggggagggaggatagaagggaggatggaccttgtactaggagccaggagaccctaggaaactcctggccttaaactggcctctggatgaacttgggcgagcccctgtccctctctagactctaccatgcagtaggggcacctgtacaacctggaccatgccagattgaaattcatggctcaatataaggcctcagatgccctggccagagcagcttatggcaagaaggctgagcagctacctggggtcagagcgagcctcatacctcttcactctaatgctagttaaatgcatggtgtgcagcaaggaaccagggacaggaggcaggcctggcacagaaaagagggggaattccacagcccccacccaccgtcctgaactgtttgtttttattttctggttcccaaggaaacagatcctagcctggcccagggggctagggaaccagctggcttggccctgctctgaggacagacagaaatcttcccatgacagaggccctggtcctgctgctgcaggaacagaaggagcccccacctggcccagagaatccccatggccctaccagcccagccgggcaagtgttttgctcctctccctccataccttatatttgacttcagtcttgcctactgcaggcagaaacacaggttagtggagagaggatttcatgtgtctaacagaaaatgtccttgacactttcacctgggctgcccctaccaatgagcatcacttggctgctggagcccagagaggaaaggacttacccacccttt

SEQ ID NO: 56606 - DNA, 1274 bp, Homo sapiens
taagctctgggttctaattcactgaagagaccatttgggaccaactgagctaggcaagaagaactttccatatttctgcacaaccgcaggtactaacagctgcaagaaccgacggtctcccttcgctcagcgtcttcccacgttacctctcactgaacccccacaggatctctgtaatgggtcctgttattagccccatttcacagatgaatacagcaaggctcagagaggtgaagtcaccccacagctggaacagggtagagcctggagccaggactctccccacagaagcaatcagctccaggtggtcaatgacagcgaggagcggaggaaggactccctagctcttatctgctcagctttccagctgctagcagagggttctgggaagtgcttcacccttggcagagtcccctggcactgcctcctgatgggccctcagctcagacagtgccagccttcccactcccacccccaccccgagggagatgtgccaagatgttgtcagacacacacaagcactgtctggcagaggaggaagaggaaatattttgtggctgatgatcttccttccctctctgatagagtgccccctcaccccagggagggagaggagctcactttgccccatgccccacttccccactccacaccctggctagagactgtctccagctcctgctcaccctcttccccatggaactgacatttcactaagctccagtcccagcctcactgatcatcctgggcctctgccccacacccaccccaagcccaagacagggacatccagcttccgcctttggcctcctctgcagcctggccactggacccctgtgtgaccctgaaaggcgcagcctctctgggcctctgtctccctggcaggttagctgtgctccccgctagcgtgaagccaggtgacactgtgagtcccaggggacacctccctgccctcctcccagggtgacctccccctcagactaagcctccctctgacatcctgcccctgcccaccttcaccttgccctggccacctggagctggggcaccccagggatttgggaacaggcccttggagggaggcaagtgggactaaaatgtgccctggacacagtgaacagggtggtgggagtgagactgcaggatggccatgacaggcagagaaactgaggcccagagaggcaggaacaggctggagatcccacgggtggtcaggtctcctgatcgggtcccacactcatagctctgattttctgagaaatgaagcaatcatt

SEQ ID NO: 56607 - DNA, 2017 bp, Homo sapiens
tgtctccctcatcatgggacttatcttgtctggggctcagtcttcccatctgtacaaaggggaactcaaaggaacctgaaggcacagaggcggctggcctgggatggatgtggagaggacttgctagcagggctggggacagggagctggtcactttcagctctgaggaggtgaggagggcacagtttctgtgggctgggactgtccacagggggcttcctagaaaaggaaaagtcaaacaagggctttgatagttaaacaggggagagggaatccgtttgttcttgtggcaggtggcgcaatataaaattgcacttgtcaggccccctgagcccttgggctcggagagaggcagggccaggccaggccacagagcagagtccaggacagggcgatgaagatggccaggcctctgctcccacccagggctcctctgcagagcctctccccctcctccagggaagagccacagcagaggtcaatgtctccctgaggcctcagtatctctgatttcacaatgagtgatgactgctgacgtccatgccctggcctggcagctcttgagttcaagggtccccattctttccccaggttcatcggcctccagttcttcttcaaaacaggttctgtgatctgcttcgccttagttttggctgtcctgaggcagcaggacaaagaggcaaggaccaaagagagcagatccagccctgccgtagagcagcaattgctagtgtcggggccagggaagaagccagaggattcccgagtgtgagctgtcttggggccccacctggccaagagtagcagccacagcagtacctcctctgagtcctttgcccaagattgggtgtcaagagccctgtgttccattctggctcctccactaaattgctgtgtgacttcaggcaagacattgatcctctctcagcctttgcttgctagtctgaaccaaagagttgtttgggcatttgctgtgttggccatttctggagcaagagggtcttcttcctccttcccccagccagccagctgtcctggggccaggctttcctgggtggaaagaagtatacctttccctggggccctaggatagcaaagtgagccatagtgggccaggctgccctccatgctgggccccagcccaggtctgcactcgcctggatcaccttctttgagccttagccatctcctgtcaggtaggaatgaacttgccagccttcaggctcgttcagctatgaccatctgtgcggtcagggtacactcagctctcctccccaactccagcagcctttaagaagtgtccctttggcgccccctggaggcagagcactgagctggaccctgggtagactcccacagggaggacggagctggcctcaggagtgggacacccagacttggcagggccttcaagaggcctgtgtgggggccccaggaatccttagctgaagcggggagactcactctccatctcaggaaattctagcccttgccctcagggagccacggttgagggtgaggcccaacacctgccttagggccctgggtgggcaagtctgggccctggggtagggagggagactcaggcccacacttgggtattttctaatttcagacaaacacacactcagcgcgcactcactgattcctacacattgccaagatttcacacatgtgaccaggggccaccaaagtccctgtgacctttgtgactaggatcctaatttctctattttctcctgggtgcctgggtctgtgtcacctggggcagtgtggataatgtttagttctgtgacactgttttttgggggtggcacctggttctccgatgcctgggctggtgtcaggcccaggactgtagtgctgggagcagtaaagctcagctctgtgtaatgagtgatgctatggcttgctcgtgtcttatgatccaatccttttctacatcagcccttgttttgttttatggctagtcttatctggcctggttatttccttgcggggaggagagggtttgcta

SEQ ID NO: 56608 - DNA, 996 bp, Homo sapiens
gtcgggagccgagctccgccagcctccgcgggacgtgccgcccgacgcgcgcaacctcaccatcgtaggcgccaacctgacggtgctgcgcgcggccgccttcgccggcggggacggggacggcgaccaggcggcgggcgtgcgcctgccgctcctgagcgcgctgcgcctcacgcacaaccacatcgaggtggtggaggacggcgccttcgacgggctgcccagcctggcggcgctcgacctcagccacaacccgctgcgcgccctgggcggcggcgccttccgcgggctgcccgcgctgcgctcgctgcagctcaaccacgcgctggtgcgcggcggccccgcgctgctggccgcgctggacgctgcgctggcaccgctggccgagcttcgcctgctgggcctagcgggcaacgcgctgagccgtctgccgccagccgccctgcgcctggcgcgcctggagcagctggacgtgcgcctcaacgcgctggccggcctggaccccgacgagctgcgcgcgctggagcgcgatggcggcctccccgggccgcgcctgctgctcgccgacaaccccctgcgctgcggctgtgccgcacgccccctgctggcctggctgcgcaacgccacggagcgcgtgcccgactcgcggcgcctgcgctgcgccgccccgcgggcgctgctagaccggccgctactggacctggacggggcgcggcttcgctgcgcggacagcggcgccgacgctcgcggagaggaggcggaggccgccggcccggagctggaagcctcctacgtgttcttcgggctggtgctggcactcatcggcctcatcttcctcatggtgctctacctaaaccgccgcggcatccagcgctggatgcgcaacctgcgcgaggcgtgccgggaccagatggagggctaccactaccgctacgagcaggacgccgacccgcgccgcgcgcccgcgcccgccgcgcccgcgggctcccgcgccac

SEQ ID NO: 56609 - DNA, 699 bp, Homo sapiens
taggattggaccaagtagacagagaggcgcagcaggaacaaaggccctgaggcgggaatgagccgccaatccccttcccagagagctctggttgtcagaaaatacagtcttcaagcaaggtaaagctgaacatccagtgacctctgccctttaggtcacaaagaataatctaattcctatggctctgggctactttgagatattttgaaatcagcaatgatgtcctatggtcctcaccaaccacactgcccaccccctagagtatctcctcccagcgaaatgccttggctgaacaaatatttatggagctcagcggcatgccaggtctgcgcaggtgctggggacaagcagatccagggtgctcttgaaaagttcttgacctcacaagatgacatcatcacgagtgtgcaaataaccaggacctatgcagggagggagggatgagtgctgagagagagagattacaagaaggtcacaaagcgctgggaatccagtgagggcttcccagaggaagaggtgtatgtgatccaggccttgaaggatgggacagctgttgtatgtggtcaagtcagcaatcaggtactgaaagccagcaataatacaggcttgtaatgaggccttgggaggctcaaaaaaatgaatcaaacagggtccttccctgggggagctcacagctgggttagggaggcagggccggtg

SEQ ID NO: 56610 - DNA, 1165 bp, Homo sapiens
gtgtggccttgcgctccgctgtgttggtgagacatgccagcacaagtgtgtgtgccagtgagggtgatgtgtgtgccagcaagagtgtttgctacagcgagtgcaggtgacagtgtgcgtatcagtgtatgcccacacgtgtgtgccagcacgagggtgtgctagaattggtgtgtgttggattgtgagctgtgcatgccaacaaggctgtcagcaagaatgtgttgaccgaggcgtgtatgacggcgtgccactgcgtgtgatgagcgtgtgctagcggttgccagtgtgtgcgccagcatgcctgtgccacgggttagtgtgcccgtgcgtgtattgtgtgtcaacctgcccccgtgcgtctctgcggctgccggccaatgctgggtgtcagcgagctgtgtgtccgggccaggagctgcggcccacatggggcggcccggccctcgccctttgggtccccccgcccacggccctgccggggagaccacacaggagacctcgggtggaggagagctggtactagatcccgcggtggccgcgaacgcagaaccaggacgcaatcggagcccccgcccgtgtcctcgccgaggtcgcccccacgcgccccccgccgggcggccgccctgcactcaccgggtccctttgtcgcccatggtccgcgacggtcgcagggaggtccgcggcgtcagcgcccaggctggaaaatccccagccagcaggaggagcgcgggccagcccgctcccggctccctgctccgcctcctccgctctcccggccgccgccgccgcccccgcccccggtccccgcccgccgcccgccgcgtcgagcagcgcagcgcccgggccgcggccaggggcgtggaaccgcgcggggtgtgtgcgtgtgtgtatgtgtgtgtgtgtgcgcgtctgcgtgtgcgcgcgccgcccagcgaggcagggcagcgcggcgggacgcgtcagggccccaaggtcggcgtttgtggtgggggagggggtccacccgcgtgcgagtccgtgtgagagtgtgtgtgtgtgtgtgtggtggtggtggtggtggtgtggtgtatgtgagggcgcacggctgtgtgcgggccctattagggagtgtattggtgtggatggaggagtgtgcacgtctttgtgcagttgtgcgtgtgtg

SEQ ID NO: 56611 - DNA, 582 bp, Homo sapiens
ctttagtctcagctgcccaagacctcccagctagtaagttgtcaggccaggatttgaacccagactggtctggtttcagattttaaccccttctcctgcctcctcactcccgtggaaactggaagaccaggagggaaaagccctaatgctgacttagatattcactcactcaaggactgagaggaacgcctagaatcagaacggccaagttccttgcagttaaacagttgactcagacaaatatcaacagacacacccagatagatgaaagcaaaagtcaacaaaccagctaacaaaaacagtccttttgacagatgaggaaaaatcaaataattactcaggtcaacctcttcactcttgttatagatgcttggggaacttaaaccttaactagctaattttttgttgggggaggaaaggcgggtagacatttggaatgttccagacactgtgctgaaaactgggacagcaagatgagaagatacagtccctgccctcaagaaaactgttcctggatgctttattcctgtgagtgatgagctcccttgacagcagggacaatttttcatcctgtctccatcc

SEQ ID NO: 56612 - DNA, 1584 bp, Homo sapiens
aatttccacctctgcacctcacattgcttgttttgaaactatgagaattgaactctaaggtcccctgaagtttagaagtcctgctggatgaagcccctttcctgttcctgcctacattcttctttccctggacgccttacttacgtaaaaactacatttcccatgagcacccacaggcgtgcacgcagcgcagccctccgtcgtcgctcgcgccctttatactcacttccgcccgcgagccacttcctttcctttcagcggagcgcggcggcaagatggcagtgcaaatatccaagaagaggaaggtgagcctctggggactgggttcggagaacgacggcgccgcgcgggtcgagggcttctcggggtgccaccgcgaggcctgcagctccgtggcctgccctggaagcggcctaggcttcctggcgttcctgcgggccgcggatggcggtggattgagtgagaggccccagccaggagggcgctgtgtggccgggttccaagtgaagcgcagagagatgggcaccaggcgccccttctgtcccggagaaggcgtttgtgagcatttgtcggtcaacggaattagtaaacgtggtattttgagggcgtgtgtcatttccctcatgtcttatcccgtggttttgggaagagaaggcagcagtgtattcttgccttaactggtcgtttctgggtacagtccgctggccccaggacctcaacttgaagggttgctgacggttgcttgctccgtctggggaccccgggaggaagctgcctcggatttaacgccttgtcattacatgggatagaactgtgtaaaaatcattagctttaaaaatagacagtttgtcatttcgtatatacacttcgatgtcaaaattaaatccacaacttctcgagagttaggatttgccagctctgttggtaccgtaaagccaaataacatggctgggattctttagacggtgcaggttgtgtctacaagtgagagagcttatatgttaagtctactatctattccttaacagtgacaagtacagtgtctttgctgtgctgaatgaagtgtaaataggccattagagcagtttcttgttttgcatgtggaactgttttaaacccttcgatgaagagatgatgacgagtctgacttggggatgttctctttgcccaggtggcctactctgtgctgcgttctgtggcacagtttaaagagccctggttgaagtaatttcctaaagatgacttagaggcatttgtctgagaagggttgctgcactcctgttggaacaagggtttggaaccattggttggaggtatttagttttggtgagggatgcattgactaataagactagactggctcaggcgaaagtgagcctacaccgatctcctaattttgaactttgctttgtttggattagtttgtcgctgatggcatcttcaaagctgaactgaatgagtttcttactcgggagctggctgaagatggctactctggagttgaggtgcgagttacaccaaccaggacagaaatcattatcttagccaccaggtaaaactcatttgactggccatcacctataa

SEQ ID NO: 56613 - DNA, 1244 bp, Homo sapiens
agtaaatgaggtaatgtatgtgtcagaacccaatacccaaagcgatcgtagtaagaggtggggcctttgggaaggcattaaattgcttagggaatgagggtggaaccctcatgaatgagattagagccttataggagaggttggagggagttgcctggcctccctctcccatgtgaagactcagcaagaaaacattatttaggaagcagagagccctcatcaaacaccagatctgctggccacctgatctggcactttccagccttcagaactgtgagaaataaatttctgttgtctataaatcacccagtctaaggtgttttgtgatagtagcccagacagactgcaatggtataaaagtgcttcatcaagagtaaacacagggagcaaatattagacattccatctccaggcagggcagactgcagctggaacacagacccaacaagattttatttatacaagaaaagggaccattaagttaagggctgtttgcgtggaggtgccatgagggagcagagtgtgcatctgagctccgcctgcctctccgcctcctggctcaggctgtccaaatctgaatcacctgcccaagctctggatgatggtgacacagccgtgggagctggtgcagcgctgcagggatggctggacctccacctgcccactgctggggtcaaaggtgaagaccttatcggtgctttctccgcgatcatcccgcccgccaaggatgtggaccttcccgtcacacacagtgactccacagctttcctgggtggacaaacagaaagacaactatcaggtccagcctggggcttcctctgtccctgcctggccaggccagataatagaaccttgacccacagactgtgaacaggcaatctggactgtagagaggcaggaaactggatggacctgagttccagctctagcttgacccttattcagtgaatggcgttaggcaagtcacttaacctctctggacctcagtttcctcatcggcaaagggagaagaactaaagtgccttcttcacagggttcccttaacagttaatggaagttaagcatataaagcattttacatagagcctggaatgtggtaagcacaccaataacaataatctcgactgccgccatcttagaatctcagactcaagccagaaatctcacctctaaggtcaccaaaggtcagaactggcagagacctccagtccaaccatatctgtgtagtctctggagtttcaggg

SEQ ID NO: 56614 - DNA, 688 bp, Homo sapiens
tttggttagaggtctccccagcctcccatatccctggcatgtccctccctcttacctgggcacactgtgagagcaccgtggacatgcctgcctcccccatgggatggtctgcattaaccccatgtccccagggagcaacacagggcagcaagagcaggaggcactagggacttcttggaccatacttcagagaagtgcccagaagttctgctaacagaggcatgctacttacaccacactcggccgccgggacgatctctgagacgggactctctccaccatccctcaccagcccatcccctcccctccccttcctgccagggataatggcattacttaggtccaatcgatttctccaagctacgtcccagggctgctgataccagccaagttcccaagaaatcccctgccaagagctactgctggctctgggacaagagaacgctctcacctctgagcctgatgtccaaggcccctccccagcccaaagtcctattttctgtcagaattcctggcccctaccctgtacttgcacagcctcctgcttgcacagggaaaagcaagagtccatgactgagatggaataaacacgcactatggagcagaggcaggatgctgggatgggcgtgcacctccggcgtcctgtctcatcctcacatcccgggacgcactggcctgctcccctacc

SEQ ID NO: 56615 - DNA, 1264 bp, Homo sapiens
cgatggggtcggggaccgctcctgccgcgcatccggggctctcacctgcagccttggctctcgcaggccgccgggacagaaggggacccctgtgttatcttcggggcaggcgctgaacccctcacctgaggcgggacgaaggtgacagcctgggctcgcggcaccagcccggcggttcggtccgactgtcctgcccgcctaggacccctcaccgagcgcacgacccggccagggcttcccgggcgctcgcgctgttccaagctgttccaactgaaggttggggtctcgtgaagccagaggctgggggggtccggggtcccgtgcaccggaggcgagggcctggggccacactgcgctagccctggagctggggttccgaccctcactgacggaaaggcgcggagcgaccctgcaaccacggaccggtacggcggcgttaggagcgtcccgtcccggcgcagcgggtcagggccggggctccgcgcgtcccggccgcacgccccgaaccgcggggctgggacgggcagggcagggcaggcgccggcggggaggcgcggcggccggagccccgcggggaagtctttccaggtcccgactcggctctctctgcaaaacggggcgaacctcggcgcggcggccgactcccgagctcccggccgcggctccacttcctcctcttcccctgctccctcgccgctcgctcagcgccgcgccgctgccacctccgctgtcatccccgccacccacccccaccggagccgcagcccgagctcagccgaaacagcgccgcccagcgccccagcgccagcctgcgcggccccgcccggacggggcggagtcagcagagaccccgcccccggccggctgcgggcaggggcggggtgcgcgccctctccccttcccgggcctcgcgcgtggggccgcaggagccaatccgagggtgggagcggagcggcgccctgcggaaagcggattctacctcggagagggcggggcggacaatggagaggtgcggctgcaagaggacaatggcggggctgggggttcggaacgggccgaatcggggagggggttggcctcgggacccggaaggagggagaggcgagagggctggcttgcctgggacgggggcatggggactgctgtgcggggattgcgggggtcacggggaaggagcaggggccagtgtaggaaaagaagccggggcgaggcaaggtggaggatatccggggtcaggggtcccagggacgctggagcgagccct

SEQ ID NO: 56616 - DNA, 2482 bp, Homo sapiens
gggaaagtaacctgcttagggtcacacagcaccttgctcagtggagagccaggttttccttcctgtgcactcctccaagcccagccagaccacctgaagttccccaggcatctctgcctctattactccacgacttgaactttccgggtgccgggcaggtaccgggtctggtctgctccctctccctctggccatcgctgaggttgaggttttttgaatgtacaagtatggagaagggcactgccttcagaagcctgaacgtctcccctgagagggagggggtgcacaggactcaattgtttcagcttgaaaatgggggagagcggggagaaggggagatggctctgcttggggcagagcccctgcggggaaaggggcgcctgaaaggacgtgcgattcggagtgggctagcttatgcagagagcctgggggtgggaggaagctcgcactctgaaggacacgctgatccccgtggggactcccggcgccccgcagcccgggccgccgagggaggcagtaggacccaggggccgggaggcgccggcagagggaggggccgggggccggggaggttttgagggaggtctttggctttttttggcggagctggggcgccctccggaagcgtttccaactttccagaagtttctcgggacgggcaggagggggtggggactgccatatatagatcccgggagcaggggagcgggctaagagtagaatcgtgtcgcggctcgagagcgagagtcacgtcccggcgctagcccagcccgacccaggtgaggggcgggagacgcctgcgtgcgtgcggcccgggggagcgccgagcaatctgggggtgcgcgagggagtaagaggggcgaggggaccctgcgaagcgttgggtgccgagccagagcctacaaattggagtcctcggcactttgggggccgctggagggtttggaatcgagagcccagggctagccagtgatggtgccagctgagggctagggcggagatcggagccgggttgggagtccgtgcactcggaggactgggaaaaagtgcagggacccctaaaaggtggtggtggcagatacgagactaggtgctgtgtaaagggggctgggggcagagagcagagcctctgcggaaagaaacagaggaggaaggagatgggtctggtgcctcttcccgcaagggtagggaggataggccggcctcgcagttccaggtcacttccgttctggggttgaggctcaggggcagcggtgattggtggcccagcctcctcacaggcttgctgagggaatttgagcttccggtggtgggaaaggaggtgaaatcgtctcgactcctggggtccgtgtgctctggtagaagtgggcgacagtggctcaatttctgatcagcagcttgcagcctagatgatggcagccaaaggaaagacttggccagcgaggctccctaccactccgaaaaaagagagtgggggtcagcagggtctgctctgctctggggattaaggggctgactagaaggatttgagtctttccttctgtccactgccacagggttcttggagtaactgcagggtttaaactgcagggtctaacttccagaggctggggttccctgccccccagcttagagacattcctgaggtggctgaagagcaggaaggagaatgaatgcacttccagactggcccagagtctcagcccctcctcttccttgtttcccgctggtccctctgggctgtacggcccggatggaggcctgaggaaaatgagggggctttggttctccggaattccggccggggccacaccctcctgtcttcagatggttcatgtacccatccccccttcccgtcctctcctttgtctcctctgtcaccgggactcccagcagagattttttttttgtactggctgtgtaacaggacaccgcatgcagccctcaggaggggctctgtgcttctgtgaggaaggacccctgtgctgggaaggcagacccctgtttatcccgagggacctggggtgaccccctgccctggccttgtttctcccattttacagtgaggtggtcgatctccaaggtccctgtagattggggactggttgtgccctctgcgccaggggcctcctcaccatctctcctttgccggctcccgccctcttcactcttctgttttctttcagaatgaaaaaggcaggcattgacctccctctgaggcagtttccaggtactttagacctctcaagtgtttgggaccctctggtggggtcccatcatctcctccccttcccttccagaccctgctcagtccagctagctgtgggcacagccctggctaggtgatcttgtattttctttgtgggactgtaactcagctaaccttggcctgagggctggcatttctctgtggcaagatgggctgggctgtgggaggctggcctgcttgcagtaacttgccttcccccattcctgctgctgg

SEQ ID NO: 56617 - DNA, 1442 bp, Homo sapiens
ctccaggaaaatgactaatatcagatttcctgtcaaccgtggcaacgagagaagggggctcccagtctatttaattagatttaccaaaataaagacgtggcatttcttacacctgagtgccatgctgtgatgcatagactgaattacaaattgtgagatgggtgaggtaagagggggtggccatagagatagtgaaaagtgggcaaatttgctatttagcaggaaggccaggcaggtcttactgatagtttggaagctgagggtcggagactggtactgaaaaggatttcccggtttctggctgagaactgggtcaacccgagtgcattcccacccacttcctctagaccatccatccactcagcggcacagactcccgaaagtgtcgctccagtccgagttggctcctgtcccttgtccacatagaccgtctccccgctcccccaatatggcacaaggtgcctaggccgtgtggggcgtcggcaggtatcacgggtggggtccattgtgtgaggactaacatcgcggcctttccccagaccagccaccggggactccagagaggcctcggcccagctcccggaaagggtctcccagccaggccttctagcggcccaaagcgggtaggcagagcgcagataccggggcctctttcgcccaccctcgccagggcactatccttcccaccggcccgatcccgcgtcccgaggtctcgcggggccaggctgcacgggcggcggagcccggagcccggggcggggccggagatgagcctgcaggcggggggctgtgcgagtgcgcggggacgggggctgctgtttccgagccgagagccctggtagcggggctctgtgggcggagacgccctcccgagcctgggcatcttcggagtgggactctcgggtcggagttccgccgccggcccatccagtttcagcgggtcgcctttgcctctgggccgggtggggagcctcccattccagagaccccccgactccctgcccctcgcggcgtaggggcgccctttctgcggcgccgcggggccgtcctctcccctccccgggcggctgcagcaggggcgcgggagcccgcggactgcggggttgcggtcgcccctgctttgtgagttcccgcagctgggaggaagaaggagaggagggaggagggagaggtggggaaggggacgccgcgggagactgggaagtggctgccgcagggaggagctaggcctcgagtgaagcctgcttgtaagaagggccaggagagtcgggtgcgcccccgccctccctgccccaccccaagatggggacccagagcccctcctcccgcactgggccttctttctgggtagtggagggctggactggactgagctgggaaggcctgcagctcagaggcgctgctctgtgcgtcaggaccggcttgcaaatgaagatgttgag

SEQ ID NO: 56618 - DNA, 1070 bp, Homo sapiens
gaccttgatccttgacagatgctgagaccatgggaccttcatccttgacaggtgctgggaccataggagcttgattcttcacaggctcaggaatcctaggaccttgatcctttagagactctggtaccacagagccttgatccttaacttttgctggaaccataggactttgattctttggaggaactgggaccgagggaccttggtccttgactggtgctgagataacagggctttcattctttaaaggctcagggaccgtgtgatcttgatccttgactggtaatgggatcatgggacctagatcctttggaggccctgggaccacagaaccttgcttcttcagaggctcttgcaccataggaccttgacctttcagaaggcctgggaccacagaaccttgatccttgtctggctctgtggctacaggaccttgagtcttacttgaatcactgacgggttgagccaggctcctgcaaaggagagagaggtgatcactgtgagagtagagctcaggcagggacagggcagagtacagattgcctaataagtcttggcctagtggagcctgggccgggcagctcttgctggagagccaggagaatatgatttctgtgttcttagtacagaatgtgggcgggggtgagggaggggggtgaggtgaaggctcaggaatcagtcattcaatgtgcttgccaattgattataacctgcacgtggcacagggggtggcacgctggtgacaatggcagtactgtagctggactcggagtcatccagtaggcatcccagcagcccgtccaccccacattccatccaggtccctactttttcttctaggatcgttgggcccatcctgggagccccatctcagctgcccaccagatgcccccacaggccagggtgctcttttcttgttctcagggccttcaaagttcttttgcctccctgactccctgacccccttgttaagtgctggctgcaagaaggggcaaggggtccatggcataccaggaaaggaagcagtgggaatgcccctctctccctctcctgcaaggggaaaagtattt

SEQ ID NO: 56619 - DNA, 844 bp, Homo sapiens
gggactcatcatgttccccaggctggtctcaaactcttggcctcaagggatccccccaccttgccttcccaaagtgttgggattacaggtgtgagccaccatgcctagccatgatgacttcataaaaagcgtgtggatgcttacattctctgtgctctgtaacggtgcaaatggaattggagttatctctttactactgccttgacataactcacctatgaatcatctgcacctggggcttttggggagtagcttgttgcctacttgccagagagatcatgtcattcccattttaagactcttcagtagcttcccactgctcctagaataaaatctgtactccttcccagggccttcaaggccctgcataaccttgcacaggtctatgaaacacctcctcccctgtagtctcccactgttcactgccctccagtcatacagctgcctttctggtcctgaaacacatcaggcgcttcccagcccagggacctttgaacttgctggttcttctgcctggaatgcacttctttcagctctttacttgactggtgtattctgtccttcaggtgttgcttcatatcagtttttcaaacaagccctgcttacccctcttatctggtatgagatctgttgtctttcatcacactctttccttaatgtatcactgattacgctctataattatcttgtttattttttacttgcttattgtttgatatcccactttccaacccactgttgactgcaaattcctttgggggaatcccccaggattttgcccgtcttacttactcgttttttattccccagaactgtgtttggcacatagcagatagcaaaaaaa

SEQ ID NO: 56620 - DNA, 2337 bp, Homo sapiens
cttactcttcctggcttgcactgtgggttctcctttggcacttggatgaagaccagtctgcaggctgccaagtggtgtgggaaagcctctgggcgatgacgggaaagttctgggctctgcagcctgctcagagaggagagatttccttctgtgcgctcagggaggaggaaactggggctggtagtagggtaagtgagagaaacagggaaagaaaagaagggtggggagaaggtgcagactgagagtggactgtggagtgggcatgctgggtaccaggaaacccggagtcagactcagctgggcaactgactttagccagcccatgcctgacctctccaagcctcgacttcaccatctgcagaacggggacaacaatgctggccttgcagggctattgtgaaggaaatgaagaaatgtgctgacctctgcttggcacagacctggcctggaccctgggctgggctcacactggagggcatgagcatggccccttacccaccccaccactgatttgtggccagagagatcacccttgcccaaacaatagctctgccaaaggtaacattttctaggagggtctggatctgtggcttgggaagggagaatgactaggagtccgtggggtttttcctttcatctgctggcaccagacaaggtaggaactgctgcttccagggctgaggttcagcctgtacacagataccactctcctggttgttaaaatattgacacactctgaacacattgctcagtagccatctctctttctctctctctctctcacacacacacacacacacacgtacttcctcagaaactcccccacaattctgtagtgaaaaaactcccccttggcaaagcaggccctccaggaccctgccctagcatcccttctggttgagctgtgtctctgttctaagggtttttagacattttacacattcctgtataccccctttgcacagatgagccaaacaatcaaggatttgcctccagtaagggctgagaaaccatcagtcagaggggaattccacactaggcctggtcttagccctgatgcacccctgattatggggcggccaggggctggcctcttcctccctccctcctttcaacaacaaacgtcactggtcactgaaggcaaaggaatcagagctcagcaggtttgggaacactgtgtagttcagagtggccacagacaagaggcaggagcgggagggacagggccagctctggggctcctggaggccaggctgagctacttggactgtgcccaaagttatggggaagtcatgaagggcttgaataaggggaggcacctggctggatttatctctgggaaaatggggcagaggatgaacagaaagagagcaggaaagggtctccctttgctctgagatcccaaaagatggaaactagaacagtttatccaaccagttgtccccattgattgagcacttaatgagtacaaacaactctcctggggagaaggaggacaggcaggggatggagtgaattaggcggcctggtgcagtgggagaaagtgagctttggagttaggcctacctaggctcaacgcgtgctcccagtgacactgggctggccgtagtccctctcagggactttgtctcctctttgaatgccccggaagctgctgtcttcctcctgggcccgaggattggacaggacagtgctgctagtgccaggcctatgggcagagttcagtctgagcaatctcacctgccttcctctcagacccctgtccctgacagctccttcttccctccccagccgagatctgcactgtgggcttcatagccctcctgtttacaagattctggctcctcactgtcctgtatgcggcctggtggtatctggaccgagacaagccacggcaggggggccggcacatccaggccatcaggtgctggactatatggaagtacatgaaggactatttccccatctcggtgagtattgaggctggttggggttggggagggagttggctggggtgtggtcagggccagagtgccgacgtctccatgggagaatatggccctgcatgcactgaggagggtactgggctgggaggcaggagctagggcttccgctactatgtgacctagagaagagtccagcttctctccgatcatggtttcgcatctgcagggatgcggggccaatatgtggattgatggatgtccagcatttgaaggagttctgtgggttatatggtgtgaggcatgcctatgtatcttaaaggcacaaacccatcagcagcccaggcttgggagtgaaggtaataaacttacaggttctaaggaccatctagcc

SEQ ID NO: 56621 - DNA, 1472 bp, Homo sapiens
ctggtctcgaactcccgaccttaggtgatctgcccaccttagcctcccaaagtgctgggattacaggtgtgagccactgtgcctggctagcactttgtaggttttcagtaaacaggtagctagtattattttacctcggcagtgggactctgaggaagtgtggtcgtgacctcgagtctggggaggactctgagagcccaagccctgctgctctgacctccacacctacgtaacttctcccaccccgcctgggaaccctacctcttcctgtcccatcagaaacaaggtctccagcttgcaaagggggaggggtagaggaaacaaacccaccaaagttaagcaacttgtctgaattatgggaacgcagggtggttggggttcctgccttgctcccttctgagagtccaggggcccaagaaggactagcaaaggctgagccacagctggaatgcaggagcctctagcactgcagtgagcagggcctccagggcaaagggcaatgggggtgctgggcagacagcgggcagcggctggcagagactgccgtgctcacgaagggtggtagatgtggtaaggcggaacatggtctagcctggggggctcaggatgggggcagtttcccctgcacctcatatgtgtttcctgcagggcccactcctgggtcttgtcagcaaagaaacttagggcttgctgagttctgggagcagtcatggacgtgtcagaggcagagtcctcatccccaccccaggacctctgcactttgagattcacctccctttcctgcctctcctctctccagcctgggcttcctcttctgtgccaggaaggtcagagtttccctgggaaagtgtgctgtggccagcctggggacgtgtgtgtgacatcagggaccaagccaaagaaaacctgaagcaggctctggcctccgggagagcttcagaggttctggctctggtctcacttcccactcttgagctgaatcccaagctcaccgggggggaaaggaaaagcagcctgaaaaggcaaacacacaagcacaggcccagacacttgccgcagggtgagttctgagccacagcctgacattcagcgcggctaaagcagaaggcaggcctgcagaggaggctggggaggccctcaggtcagagggtggaggccattggaggacattccgcaggactgggactgctcacctgaaagttctcccggggtgtcttcagccagcccaatggcctcaaaggacagcatctggccctctttgcacctggagcatttccatttgcaggtctggcagaaatgctgaggcagctctgcgcctaccctatcaacgtccgtccttcctgctccttccccagccaggtggcttttgaggaggatatctcaaccttagtactgttgacactggtgggacacaggcctcgatttgcagaaattctatgtgcatctttttgtttctttgttttggttttgtt

SEQ ID NO: 56622 - DNA, 1174 bp, Homo sapiens
gtgcccgccaccactcccggctgatttgtatttttttagtagagacgggatttcaccatgttggccaggctggtctcgaactcctgaccgcccaccttagcctcccaaagtgctgggattacaggtgtcagacactgcacctggctctgtgcactgttttgttttttgtttttttttccaggatccttcctcaccgcaggccctttgcagcaccatctgccgagggtgacaatgccactgagtggccagcagagggcgagatgatgttcattttgactatgtcctaagctgggcctgtggggtggggctgtggcctgtagacgctctttccatagaccctcccaccctcccacacgcctttactgcccaggccccgcagggatcatggggtgaagagacagtagggatcctcattcctgggctcaagcaatcctcctgcctcagcctcccaagtagcttggactacagacacgcaccaccacaacttttaaaaaaatgtttgtagagatggagtctcactgtgttgccaggctgcttggcctcccaaaatgctgagattagaggtgtgagccaccacacctatcccacaccttttaaatatactgaaaccctgaatgtcatactttaaacggatgcattttatggtgcataaattatatcaactaaaagcaatagcagcccccagagcctagtaacctggctgtgcccttctccaggccccactgcctactgcacacccagcctgccagggcatgcacccaggcaggattttccccagacagccatctatcttcgcttagtcacactcccctcgcctaacagaactgagggagggagacagaccacagcacttcacaaacctcccctcttctttgtttaccccccttgaaccctgtagcaaccctgccagggaggcgttatcagtgtcctgtgggacagaaataattgagccacagaggggacaggggcttggcaatggtcatgtgatgagccagcggcagaaccggggtctcctgactcaaggttctttttcccactagtggaaccctggtgacatgccaggataggattggggtcagggagccttccttctgaggctgtaccagcctcatccattgggctcattccttccttccttcatgctataccctttccagagcatctcctctgttcc

SEQ ID NO: 56623 - DNA, 2907 bp, Homo sapiens
cctacccacaaacaggacctgcatcctgtctcacaaataaaactgaactcttgaaatggtgtccaatgcctcgggataatgcctaaactcctcctcagcctggcattcaaggcctttatcatctgccctctagaccccaccagcctcacctctggaccctctccccttgccacctgtcactcccgcccccttcgctgctctctgaatatactctgctcttgcactggcttatttaggggcgcaccgttcccttccttctggaacactctttcttctcagtctggtcagcgtcactcacttccaaaggtcgcctcctttgtcaaacctcatcctacacttctaccctcaaactctgccctttgccctgaatcagccctcttttgcactgtcttcagggatgaaagggtcatagtcattcataggcgagtgtacttctctgtctcccagtggactgggaacccccttaggcccttatccatggtggcttcagccccattcaacccagctccaccgccagcacaggacctcagcatccccagtgagtgggagttggttgagtaaatgaattctcacatgtgtgcttcctctcaatcccacccacatgaggcctggggcagggataaggggaagaagactcaggctttgcctccgaggtgattaaattagttctgcatcactgcatgacagatcactccaaaatttggctgctttaaacaacaaaccctcatcgactctcggtttccgggggtcaggtgtctgggaatggcttagtggagtggttctggctcagggtttctcatgaggttgcagccaggctggggctggggcgggggctgtggtctctgaaggcctgagtgtggctgcaggacctgcttccaggcctacttgtgtggctgttggcaggaggcttctgttgtttgctatgtgggcctctccacagggctgccaattacttggcttctcccagagtgagtgagccaagagaaagagagaggccacactgccttttatgacctggtctctgagtttcacactatcaattccaccttactttcttggttagatgtgagtcactaagtccagcctatactccatacaagggtgtgaatacccaggggtggagtccctgggcaccagcttggaggctggctgctacagtgatggtggatgagcttcagagtctagactgtatcacactgatgctgtttacttctgcacagggcagcttgccttggaggacagagactgagccagccatataaaggggacccagaggggtgagagcaacagtttgagcaaaagctgcaggtaggaatgatgactgtgaccccccagcctgggctaggatggagtacaaggtggccattagacagacgggtgccaggatgggagataaggggtaggggagaggcttgaggggccagagaggaaaggtctctccttctttcacagcaaccttggaggcttcatgttgaagatatcaacagcacaagatgcaaggtgtatagagccctgatctcagagaaggtctgcccaagagagccacccaagcaggaatatccatgctggacttcgcatgtgcaaaaacatgcccttttactggctcaagccactgagataggagtgtgtttgttatggtaattggcctccccaactaatgtgccaggagctatccacgtaaggactcaattattaatttagcacttcctaacaactctcaggggccctcagagcctgcctcagaggcctcacccttatgtggggaaggcagcctcctcccctccatacatgcacagataaaggcagcagaggatggcaggatgtgtcaggcatggtagagagggtcagaggccctcaagtaatggggacagctggagtctcctctggaaatcagcctgcactttgacctggggagaagttctcagacattatttcccaaggggacaaagggcctgctgagacgcagtccctctgatactgctttatggtgacttggccaggggttggccagcatagcacagccagcagccacgtggcagggacaaggctgcaagtgcaagtcgggtccacttgctgagtctcagctcccaaggggactgtgctttgtgagggttcagaagcaggaaggagggaggagggcatccagatggaagctgctgagtgagcaaacacagaggggagggaaaatgtggggcacaagttggtgacagctgcaggtgtgagtcacggtgcaagggtgagtttcaaagaaaaggaggctagaggtaggtctctttttagaaaacttttattgagtccttgctatgtgccaagtgctggggacagagtggcaaccaagctggattgggtccctggctttcccttgtctactgaatggtggaagccaaatgtccagtcaaggagtcaggaatttctcccaaaggtagggaggagccctggaaagtccttgagctggtgtaggtcaagggcaaggccacaagggcaaaaaatgccttaggttgaacagggcatttgtcttaatgacctcacagaagggcagagtcagcaccctgagccatttactgaggacctactatgtgctaggatctggatgggatgctctacatgtattatgtcaaacacacccacagtgacctctttataatagatgaggttcatttgtcagaaaggctaaaggactttctggaatcctggccccaagacgtggactgcctgcccagacagctatcacatgctcctcacattctgctgggttctggcctcagacccagccgaatggcacaatggaaatggcagaggccggagagccagcctggctgcgtgaccctgtgcaagtcaggtccagttgctgagtctcagtttcttcacttgtaaatggtcttcccacaaatgggtgttcaataaatg

SEQ ID NO: 56624 - DNA, 1000 bp, Homo sapiens
agcactgccctggaactctttgttgtgactaaatgctggcattgtaaggttgttgcgagttaagaaacacaaaactaaccggtgaattgcaaagtgctatacactaattggttagggatgtcatcttagccactttcacccagataagctgagaaggctcctagaagggcagggcttgcctgaagtcacatagctggtaagtggcagatgcagaactggcatcccagttcccacccagtgctctttccactctgccttgggcagtggatacgaggatgtgtccccaggcgcattttcggggaagaactccattcccagctgcaggaagtgtagtctgccccttctgagatcacctccactgcagagagctgcctctgcaagggcatacagcccatgactgagccagccagggtagaaaggccgggccacgtcagcccagatcaatacaactctgatgggacatttcagtttgacttctccctccatccaaatttgctgcgttcccttccttcttgtggtattgactccaaaggttctctaagaaacatcctgtaggctacacaccatctcagaatccacttcctggagaacccaatctgtgacatcatgcgtatttaaaggggtaaatctcagtacgaggctcggagaggttaaaaaatttgtctgcagtcacactgtttttaagtggtggagcgaggatttgaattcagatctgactgcaaaggctgtatttttgtctaataaagtgtgacctgactaccagcttgggaaacaaaagaaaggatcagaatggttggatttaatctgtaaaattaaaaataactcttatttattcaaaatggcacagccattttagaagacagtttggcagattctcataaagttaaacatagacttactacacaactgagcaactgtgctcttaggtatttactctactgattggaaaactagtctatatgaaaacctgtacatgaatgtttatggccactttattcat

SEQ ID NO: 56625 - DNA, 1228 bp, Homo sapiens
aagtgctgggattacaggcgtgagccactgcacccggccttgatcacacttttaaaatgtctatggcctacaccagactgggagcccctcagagcagaggttggtctgattaagcactgatgtccccacttctcagtggcaaggctcctgctagctcctacactttggggagggagcaggagctgggtgtcaggaggcccagtccatttccttccctggactgcagtccctcatctgtatgttggagactgagggcccctggctgatcctctaaggactgggagtgaaattttgggggtagggacagcagctgacctccaagacacccttatcagtcctctataggcaaccccagacggacatgagactgggctgtgcaacaggcgtgatctgggccattccagccaaaggtcaatcctcagtagccagctgcaactggcctggccctgggccctacttgcccatccccctaccgtctcctcccctgagagccaggaataaaagggatcttggctggccacacttctggcgtgggctcaggaacacgtgtgcagacatgtatgtatgtctatggctatgcttctgcaagaacatctatatgtgtgtatgggcttgtgtgaaagcatgtacacacctgtgcatgagtctgtgggtgcatgtctgtgcactagcatgtgtgcttcacaagcatagtcacgcaagtatgctcctgtgcccccatgtgtctgagggtgcaagactctgggtgtgactctgtgcatgtttatcagcaggcgttgagaggagagaggagagtcagcccccttcagccctgccaaacgatgacatctggttctttgggattcccctgaccctgttccctgccctcacactccaatgctctcgtttgaggggccagattctggcatccagtctagagggaccctcacctcttctctcatcaatcctgtgctttgcagggagatctagaatcctgaaataatcaggatgaatctaagggtggtgaaggggacactggaatgccccaccagattcccttttatcattctgtgtacaccattctattggcttttcttgctaaccacctgcctatgcaactctcctggcttgccttgtactaccgaagacacttttccctatgtgcagagagtatggtaaatgtctgggagttacattaccccattctcccctcaggtgaccctcagactaaatggcgaaaggcacctgc

SEQ ID NO: 56626 - DNA, 619 bp, Homo sapiens
ctactgctgaataataattgtcattttaggtgtctgtttcttcccccagaatgcccctaaggagcaagaactgtacccacagcacccagcacaaggatggggggtctcaggaaaggtcggccagatagaagggcagatgagaaatgaatgtactgggagctctctgtgtaatatcccctcccccaccctcaccccaccccccaattcctgcagggaagaggccttgagagagttgagtaagaaataagcaggcagaatgatgcaaggggagctgtctgtacacattgcaacagaactttctaaaacaagcctggggctgctcccaagggtctcagtcctgccctattcctctactgtcatccagacctgtcacacaagatagggccaaaggccattaccaagctctgctaaggcctgaccttagagctgggaggtctgtgctcttgggttctggtttgaaacccggagccatcttcaatcacccccttccttcctttcagccctacatccatgccatcaaatcctagagactctaaagcttcagcatctctcaaaatcaccctcgcttctcttttgccttgccaccccttcagttcaggctctgtcgtcattatctctc

SEQ ID NO: 56627 - DNA, 2360 bp, Homo sapiens
tctcagttcaagcacccgcgcctctcacttcagcctcattttccacagttgcctgggctccagccactccagggcccccagccctgccccaaacatgctggcttttctaacactttatgcctatctttctgctttgccctcacaccttccatctgcaaaattcctattcattaatgggcaaaccattctggaatgctttctatgtgccagacactacctaggctctttttataccttatctcatttacttctcaaagtacctcacaaaaataataattattattcccattttacagatatggaaactgaggctcaagagaggcagggcaagaactggactcctagtctatctgattccaaacctgctgtgcaccaacctctctgggaagtgcaccagcgcccccactcccccagcccagggcagagtcttctctactctgtggttccatagccccctggtttctcgcttgtcccggccgttgtcaccagtgactgtgtgcggctgtctctgctgccccccagcgtgagcatcccaagggcagaacctgggctgatctggctgggtccccagcacccagcagggtataggtgctctgtgaggtttcttaataaagagatggaaagccagaagcagtttgggtggttgagatacccagccctaacctaactaatcctgataccagtgaccaaaagcgggaccttcgcatctttgctgccaaaagacagcccctcctaaagagtaaaggcccgaccccctgcacgccctctgcctgcaccgcacgtgcttggttttccccgcccgggtactggccgccgggccgtaccaatctccgcgggggagcgcccggggtcggactgagggagcgaggggaataaccgggcgcgccccttggaagcagggctcagagctgctctcctctcacgcattccccggatccgcgcggagcaggctgctggccagccccgggcccgcgccaagcagagcctcaggtgcggttcccccacaagcaagtggcgcgggcggcggcttagaacggcccgccccgcccgccgcgtcggcgcctgccccgttgtgaggtgataaagtgttgcgctccgggacgccagcgccgcggctgccgcctctgctggggtctaggctgtttctctcgcgccaccactggccgccggccgcagctccaggtgtcctagccgcccagcctcgacgccgtcccgggacccctgtgctctgcgcgaagccctggccccgggggccggggcatgggccaggggcgcggggtgaagcggcttcccgcggggccgtgactgggcgggcttcagccatgaagaccctcatagccgcctactccggggtcctgcgcggcgagcgtcaggccgaggctgaccggagccagcgctctcacggaggacctgcgctgtcgcgcgaggggtctgggagatggggtgagtgccacggcgcaggggttatggacctgcgagaagattttctggaaagggccctgtggcaggctggtgggtactgatgagtccacgttcattctccactgtggcactcatcaatttttacgacctctgttacatcgctttccacccgccccccagcttgtttccctcatccgtgaggtgggagcggtaccacccaccattcttagttattagggatattcgagaactcctccccagcccccactgcggctggtgacccctggcacttccctcccctctcccttcaccaggtagagcgagctttggcagtgatagactggatgggcaggatggtatgggttttgccgtctcctgagacagccaccagacggggaacatgcccgactggaacaggtgtgtctgccctgtcctctgtcccacatccatcctctcgcccaggctctggagcccacatagcagcaactcttgagcctggcatgcttagaaggcagcggagaggaccctgcatgtcctccaaggtagaactgaggtcctcagtgaatcgcgcagagttgaaatcaacccccgccccgcaccccccgcagcttttcccaagcgaggaatagcaactcttccaacccccacctcccttacctagagctggagaaactgaagtgggaggaagcatgcctaagttttccttagctgatgccttgacccctggattcaagtacaaatccggtagaccctgggaagtcatcacagctgtcctggtctgcgtgtgtgtcttgcatgaagcccctctccctctttctaagtctgtattctgtttgctgagcctctctgacatggatttttctttagtaactaacggtcgcctacaccgcccacctttgttacaaaaataaagcttgctaattatggaatttttgaaa

SEQ ID NO: 56628 - DNA, 867 bp, Homo sapiens
ctgcttgaaactaagtggctagattgttgggggtaactgggaactgagggttgacagtcacctaacctagtcctaagtcagaatgagaacattactctcatgcttccctctccaattccgtgtggcttcccccctcacctacatcacttccccagctgaatagaggccactttggggctgcgtcaccaagggctcatctaggctgagaaaggagggccaagagtaatgttgtattaacaggctcagtgactcaatggtcagtgttgaaatcctgccccacctccaccctcctgccctcaaattcaacagcaagtacttgagttgtaaaaattagtgctggatcgggcccaaccctcatgttacagatgggatcactggagtctccagaaagaagggactttcccagggttatcaaagccaggctagaactcagatccatctcccagtctgtggcctgactccttaagccaagagaagggttgcaaggccgtgaagggctgagtgcagggctctgtgcattgtaggtgctcagtggtttgctgaatgagtgaaggttgtctccatggtgcgggtggcagctcatcccttctcaaactttttgaggaagctccccaagcctgccctagtggattagagcactaagatcccccagagctttggctgccaggtgaatgccagttgccccctacccacactcagtcacacttcagactttccaaactcttcctcctggcctatgaagtaagccccaggtgaacagcctccactgccatcacgacttcctctcctagtatgtcacccaccatgctgcagacgcatggtggtcttcctgttcctgcagcattactcccaattcagtcttacctc

SEQ ID NO: 56629 - DNA, 1848 bp, Homo sapiens
gaggtcaggagttcgagaccagcctggctgacatggtaaaacccctgtctctactaaaaataaaaaaatttagccaggtgtggtggtgtgtgcctgtaatcccagctacttgggaggctgaggcaggatagtcgcttgaacccaggaggaggaggttacagtgagccaaggttgtgctactgcactccagcgtgggtaacagagcgagactccatctcaaaacaaaacaaaaagaacaaacagaaaaagaatatgagtcccttggaaacaggaaccttgtctgtctttctcagtgctgtgacatctagcacagtgcctggcactggtaataggtacttagtaagtatctgttaaacgaaggaatcattagtgggactgccccattcctcttggaggaagccctgcttttagcttcagtgtgattcctcgagccttccttgggcctcctctgtccctgtaaccacctgtgctagggactgggtgctggggttgtagctgttccctgccctggaggtacccacagtctggcaaggagctggctccaaggctgagtggcaagtgggcagagccagtctcaatggtcacccttactgcttcccagggcttattagaagcccgagagctggggttccaggcctgacatttttctgggatgtggctgggggcttcacttcctctctggggatctcactccttctatctggaaaatagggtcagaattctcagattctcaaggatggagggtttgagttaacctgagtgtgagtgtttgtgaacttgtgacattcatgttagtccttgtcatttgtcctgtgttacacattcagcaggcccccaacactgtagagagtggcagaccctgctctagggcatccaggaaggcttcactgaggaagggacttggggtgtggacccttcattttattgattgagcaccttctgtgtgtcagctgcagtccctgcgtttgaggaagtgagaccagggggatgtacacaagatgactgtgcagagtgatctgagcaatgacaggaaagactgccaagaggtgagaccggggagcttgatcaccctgaggtcagggaagtcttcctggaagaggtgacattcagtccggatctggaaagatgaatagacatcagcaagacaggcaagaacattcaggtacaggaaatagcataaatagaggcatgagatttggatgggagaggcagactgactgcagggcctctgagtgaccaactgaggctgaggtcttggtgtactgagagccagagacaagagagacagagaggatgctggatccaggcctgtggtggctcacctgtgtctgcagcaggaggaagacttgagagctcatgggaaaggagcctggtgcagttagtttattggcctccagcactttgagggcctcctggtatggagctgctggctgatttgagggcctcatgggcagggcccaggggtaggagtcaggcctgggctctgtccagctcctgcttggccaccgaactgctccgcagcctcagcaagccactacccttccttaccctcagtctcctcatctatgaaatgagcaaaagtgtcataagaacctgtgcagattatggtgcagatgcagacaggctacaccctgtgaaccttttgggtaaatcaatagaaatgggaaacacaaactccttttcttattagagcagaattagccattctaagccctgcctctgcttcccatgtgaccttgggtataacactgcctcttagggcctcagccttctcatctgcacagtgaggaggactggttgagatgacccccttggcttccttacatccctgctggagaaatgcgattc

SEQ ID NO: 56630 - DNA, 2439 bp, Homo sapiens
aaatagaaggtggtgttccccggtgctgtgtctcaccccagcccctacctgagtgtttggactgaagcatttatagtggtgtttctcagacttaatcacctggggatcttgttaaaatgcagattttgattcagtaaatccagtctggagcccaaagtcctgcatttctaacccgctcccaggtgatgctgatgctgctgttcccagaccacgctttgagtaggaaagtgctagagtacattttgtcttctgtctagccagggcatccagcctgcctcagatggaacaggaactcacctgccacttaaccagcctccggtggccatggctcctgcttcacttcatccagcatggctcaggaggcagagccagctgctggaagatgacttgtccagccccagcccttggatcaagggttcaagcctgtgcttggacttcacttccctcccttatatactcacccagtcctgtcccacttgtaggtgaaggtgaaaggttatgagaccctcaaggataagcatgtgatgaactcatctggccaggtcccactgctgggcaggttgaccaggccctgagcatgaccctccgactgtgtcctgtgtacagagcctttgcactcagagctgctctggggaaaggggaggtcctctaagcagggtcaggaatgctgggtttcagtcctggctctgccgcctactgcctgggtagccctgggctagtcagtgcctgtctctggtccccagtctccctggctgtccaattaggctatactggatgaccccagagggctctcaggctctaagatgggttgctgggcaagtctggaggtgggaaagtcctatgaaggtaggatttttgtaaagggggcgaaggagcaattatgaggcagacctctggaatggctctatggcccagcctctttatttgcttttgtgagttcacatcctgccgcctccaccccagttatgccagtggtgttattagatgctactgaacacccaatttgtgcactgaggatgtggcagtgaaccctgcaagcttgcctggggtcacatagtgagtagaaccaaagtctgaacctaggtttgactcttctgctaaactaagccctttccctctgatgcatcacaccagggaaaggggccatcttgaggcctagcatttccttccttcctcctaaaagtcaaagcagttgttaactttcagctcataagggtagatatctttctaaactctgctgtggctttgttgctttgcagattttgaagaaaagcaaaggcttgagtgtaggcccctaaatccgtctttctccctgctcccagcttgtaggctcagttgaaaggtcatgagaccctcaaggacaagattgtgactaactcatctgtgctctgggtctttcacagagcagatggtatgaaggaatatttaatgggcacacagtaggtgcttggtgaagatgtgttgagcaaagggcatgtagtgggggttcagcaaagaggggtttgaggtggcccacttcttcagctgccggaaggaatggggtatgggtgaggaaccttcacccatgctcttccccagtgctgtctcctgcagtcaccaggcttcctgtccctactgcccatcagctgctggagtccagggtgtcatcctaggggcaccaagccaattaagtgggcacatctcgtcctaacttccaggcttggcacttgattgatagtgaacataattacagccctcagtgtccttcaggctgcctgaagctcactggctactgggccctttggggaagcaaaggctcccaccttactcctttctgggccccacgctttgggcactgagatgaggctgaacatttacatctctctgaaagtggtagtggtgtggggaatcagtggtgttgggggtgggggcaagagggttcagctccttggagaaggggtattagtctgggacatacagaaggcagagcagggattggggatgctcaaagtacacttggagaaaaaaaaccattgcaaattggatgttgaacctctgtccttggcctcacagacagatagcaaaattaaatatttgtactagattcagataagggacaggagtttgactggggtggaggggatgggagagaactggcaattatgagagacttcccaaggcctagcccttggactagcctctttagatacttcatgtggtctccaaaatgaccccgagtgcgataccattcccattgtgtatctatagaaaccagggcacaggggagcatgcagacagcccagagttacaaagccatgaggtggagggctaggatctgaacccaggtctgtctgattctatagctgatgctcttctcatatctagaagggtacctgtgggaggtgaggtttgtactggggaccccatgactggagagaagggtgacagtggactgacatc

SEQ ID NO: 56631 - DNA, 568 bp, Homo sapiens
ttctgtgggtctgaattttttcctctatgcactgctgtggtgggacaagcctatctgagcaccttgcctctcctgggagggagggtataaagagtgacttgataggaatgtgtcccagactgacattagcgagcaggccgggcctgggcatcgtgttgggctgggactttgccacgggaaacaggcagcaagaggacacaagagcaggcatgtcaacagaaccttcattggcggtatccttcccctccttccagaacggacattctctccagccctgggggaggggagtgtgacatgaaaacagatcagagctggtcagatgcctacattcttctgggtcctacagcaagggcattgacttgcactgtgtcccaaggcacctcattcaaccaaatgtcccatcagagccttggggagggaggaaatgatttaaagagccacctggggcccactgggtgacacatcttcatccagcagcccagggaaaagtgcagcgactggcctgctccagatgtgcaggataatttgctgtgacctccacaggggaattgcagctcccttttctagg

SEQ ID NO: 56632 - DNA, 1189 bp, Homo sapiens
tgttgggataacaggcatgagccaccatgcctggccctattatttttctaatcagaataaaaatgatgtttttatgagcagaatacccttactcattgtctctctcagcctcttccacccccatcacattccttgtaacacagggtaggtgtcacaggctttgcctctcatgactcagggtttagggacactgcatcacccaccccttcaagcaccagccccagggcaggaggtgggccctgaggaagccaatcatcgtttagagcatcccagtgtccttagtaccacaggtcaggtcctcagctgctgcagccttacaactaacctctaccccaggctggctggcacagggctgtcgcttgtcctgtcttgtccttcctgccttagaacctgaactgagcccagctgactgtgggaaagtttccatttgggccagctgcagtgtcccttttccaggccaggggagtaggaggtgggctgcctgtctcattctgtgagctgtggaggagcccacagagcacagggccaagtaaaccctacctccaaggagctcacagtttggagagactgacagtgggggcagagcttgcagccaaggccccggttgccaaactcaggaacttggactttactcacatgaagccagacacactctccagtctaagagtgacaagggttggatttgagttttagaataatcactctggctgttgcgaaaaggatgggcccagagggagggaaggcaggaggctggcagagtgcaaagaagagctgctgtgtgcatggctgaagactgagaggaacaagggcaaacattgcccaccccttcccagagacccacagtgcaaatggtgactgcccaacaccagcactgtggccctggggatgagagtctgaggtaaggtgtggagattcattgcagccctcaggcccatggaggtccaggggaaatgacacatccaatccctccctaccctccgggtatgccccggtatccctctcccagccagtttcctctgacccaaggtcatccttgcagctggtgaagacacacaacctgctgaccaccaggaactatatctttggataccacccccatggtatcatgggcctgggtgccttctgcaacttcagcacagaggccacagaagtgagcaagaagttcccaggcatacggccttacctggct

SEQ ID NO: 56633 - DNA, 1266 bp, Homo sapiens
tgctctctgctggaatgtcctttcctccctctctcctgacttggtgaactcttattggcccttcaataccctgtttcaatgtcacctccactgtgaaatctgactctcaactattttctctggctcccactgcctttgggcttccctcagacccagcagtgagtaactggatgatcactcttcgtttgtttttgatatggggtctcagtctgttgcccaagctggagtacagtggcatgatcttgactcactgcagcctcaacctccccaggctcaggtaatcctcccacctcagcctcctcagtagctgggactataggtgaaaacgacatgctgggctaatttttgtatttttgtagagacaaggttttgccatgttgcccaggctggtcccaaattcttgggctcaagcaagaattgtgataatgtgttatggcagcctcagaaaactaatacagcttagaaacagaaatgtgttttctgtgaaattcccccagatcttggcaccacatgagttcaatcagataatatttgggatttcccagtgactcctttctcaacaaacacctgatcaagcgactcctttctcaacaaacacctgaccacacgccccaggctccagccatgaggaaccactcagtgtgtcagaacaggagacagtgtgacatctttgtgatccagctctgagaaaagatccaaggtgtttttcaggcttctgaacaccctggaaagatagtatgcttacattttgtttaaaaaatttaaaatgcaactactatatgccaggtcctgtgtgggcactttacatatgttgatttactttaatccctacagcaatcctattactattttaaagctgagagaggggaagtgacttgccttgggatacatagctcaaaggtggtagagccaagattccaaagtgcctgattcctattgtgtctgactctaaaacactatgttctttctgctatgttcatccaggtggtggaaaaattcagtctaggagtaaaaaaaggaagatcaacatcctgcagaatgactcatgctattcattatagaagcaattgctggagatgctatcattgtggatcacggaagtcttcatggaagaggtggcatttgagctgggccttcactgcaaaaaaaaaaaaaaaaaatttcctgattctctgtcaggcactggggatccagagatgaatcagacaaagtccttttgcttgaagaattcacagtattttgtgtgtgtgtgggaaggagggtggc

SEQ ID NO: 56634 - DNA, 2272 bp, Homo sapiens
tacatgtgttaaaagacaatgtggccaggcctggtggctcatgcctgtaatcccaacactttgggagcccgagactggaggatcgcttgagcctgggagtttgagactagtctgggaaatatggccagaaccccatctttacaaaaaaattttaaaattagctgggcctggtggcatgtgcctgtattcccagctacttaggagggtgaggtgggaggatcacttgagcccaggaggtcgaggctgcaatgagccgtgattttgccactgcactccagcccgggcgaaagaatgaggcactgttaaaaaaaattaatagaataatccagacccacggtagggtcaaaattcctaactcaaggtcccagagaggctcagagaagccttttggaagaagggactcctgccccagctaagactgatggataagtagcaaaggctttctggggacacagcacaaacagcccacctgaagcggtgaatcggcgtcctgggtgcctggcacaccttgtagctcagcttactagctagtggagtgcgaaggggcgtgtacttgtcggttggagctggtcatgaaagagctcgtgggactgcccgacggttctcaggtcccagtgcatcctgcgtggtggctctctgctgaaccataaagcattccttttcaatccctgcacgctcacgccgggaaaagactgcacaaggggcctgccaaggcagacaagcgatcgccacccagctggcttccgagggtccccgccctccaccggaggcctgttaccacggcaaccagtgagggcggaagtggctcagaagaccggttctccctaatcaggtgactctcccgcctcctgcacgtgacaccggagcccagaagcgcgctctacctaatcaagaccccacccctctttccctttactgacaattgacagcgacctcttgcaatggcccttccgcctccaccaggagactctgcccgttggtagtaaaagaaccaattagactgggaaaaaaagaagcaacgccccaggtttcaccccggcttgacagacgcaattgaggccatccttgagtccctccgcccccaagtccagtaatgccagcgatggacagaccttctacccaatagcacgccccttttctgccgttgggtcccgcccccttgagggctaagccaatgagcgctccgggtctcagcggggtggaggggttgcactgcggtaatatggctcttccttagccagcggcggcaacggcggcagcggcggcagcggcggcggctactgtctgggctgagcagtagtgcctctcgggtggcgggtttctaggctgcaggggcttggtaggtggtggcaagggggcggcggcggatgccggaagagtgcccgccccgccgcttggcggcccctggatcgagatgagcgcctccgcgtcggtcgggggccccgtcccccagccacccccgggcccggccgctgctctgcctcccggttctgccgcgcgggccctgcatgtggagctgccgtctcagcaggtaagcccgcgcggctcgcagcactcgggagggacccgggcaggcccgcgtggagagcttgctggctccgggctgaccccgcgagccgggacacccagagcagggacccggagggctcgcgggactgaggaagactgtcaggaggtttgtgcggggaggggtccagtgatggccgaacctccgggagatcccggagtcctaggagaatcccgttacaggagatgggcttgttaagggacaagcagccagccagctcaagtccctggggccccggcccgaggccgcctcccccaacgcagggagccggggattgccccgcgcagaccctctccctcgttccgcccaggaagggacccggggaaccccctgtgtcccacgggccatagtgaaagcacttttcctttctttccccacctggccatccccgcttacggagaaaccagtttgtactcttcgtgcaagagccctggaggagactttagggtgtctaccatttgctttaatctcccctgattattaagtattcggcctctttagagaaatgtattcaagacttgggggtttccttcctaattctccgagtcccaaggaacgcatcttaataattaggaggactttttccttcttcattcccttcagtgagtctctgtggaaggaggatttgatgtatatattcatgtgttcctccatcctttaggaagggctttgaggacttcttggctctgcgttgtaggaagataa

SEQ ID NO: 56635 - DNA, 654 bp, Homo sapiens
gctcaaactgtcatgcctgcaatgaacattggctcagattacagtgtagttcttttactcttaggcacaagcttctttctgtttgtctcatgcatgtgtagtataggattcagtcagagacttaggttgaatttaaacagaatttggggtgcccattctctgccttcctctattctggtatacttgattgcctgaccatttttccctggttcctctggtcagaaaggaagttgactttctgttggagtttgcagccaccctcagggaaaagccacagaaaaggggaatttcattttattggttgtttatgccaagttctgactcacctccaaaatatgcctgccattgatcagtctcaagaaccctcaagtagcaatttttgtattttatccatagtctatatttgttatccatagtctatatcttctatgagaggaccagtttgttgcatacttattcttttacaccagaagcagagctcctgtacattttattattatatatttttgctgtatcctcctggctaaatccgggttctaagcctgttactgctaagtctgtgaaattaatggataggaaatattttctgcggaaatcttttccttttcttagtggttgactaggtgtaggtccagtagaaacaacctgtaaatg

SEQ ID NO: 56636 - DNA, 2866 bp, Homo sapiens
gatcgtacagtttttttcctccgcagagccccgcagctagcgcccagcacaggggcgcctgcgacaaacatgccgtcaaggctgggggtctcagaggggttctcggtgtaacccagtcccgtcctcccacccagcctgtatccaaatcctttgtcttcctggtcctgcaagtttcttgcacttctcagaacgagaaaaatatccgctggatatggaggggggaatcaaaactccagtcaccgtcttcccctctcccaaagtgcgccgccccccgaaggcacccggcattcctgggtggggagggggcgggggctgcaagaggacggaggcgcgcggactcacagcgggggatctgtgtccagcctggtctcccagggagaggaggagccccctaggtcgcacagcggacggggacccaggcctccagccccgcccagctctttcggtgcagccccggctgtcccaaggctctccctccgccgcccaagctcgtcgcgcggggaggcagcgcctggcccgagcctctgggtcctgacggactgttcctgtcccttgtacgagcgcccgggacagccgcgcaggccacggggtcaccttccgcctgagctcgcgggtcagggtgcacgcgcctcctgaagcccccagcccgccagggggcgctaagccggggctcgaggaggggggaatcgcggctgcctcctgcgtcgcgggctggggtcaagtcctcttcctgggcccccgcttctccgtctggggatgggacgacgtgtcgagggagtgccccctgtgtcctggtcgttctataggacacttgccgtgggccgccctgacctgcccggccccttgcttggggccgggcgcgtagtgggccgcgccaggcgtagcacctttggagagcgagcggtcacctcctcgaagttggtccgagctaccctgcctgcagcgggcccgggaggcggccgcctggggctgtgcacagggagaacaccacgagcgcagcgccgcagcccagcgccgccaacagatggtcataggcccggtctgtggaggactctggaaagccggccgctgggaccaggccacgccggcccggcgaggacttgcggggtcccccctaccccgacgccccacgggcaccgtgcaccggggccgattgtccgcgcggcgcgcaaggtcggcacgggcgggtcccgaagcctcccgccacgcagctcacggagctgaccccgccaaccagggacgccgagcgacggcttcaaggttacctgcggggcggggcgaggccgggcctgccacccggctttgaccccagccgtgaggctttcgagagacgtctgcttggctgcgcacgcggcgccgggtcacccgggagacgggttgttttggaagtgggaagggtgggtgggagcactcgagatccctcctgctaaccccctggagccggaccctgcacgcccagggccttgagggacaccgaggcacttcagccccgggggtgggaggcgtggagctcgtgcgcgagctcagccagatgttccgggcggttgcagatgtgcctcggggccggggacaggactttcctcctccctagcccccagcctggagctcaggtcagtaaacaaactcggttctccccctccccccgccgcccctgggacccgttctcaaagccaggcttctgcccccatccccaatttactaggcgctgccgcatttctttgccttttgccaccctttccccccgcccaccacacacaccctctgtcgcgggatccaagtcccccacccccgggggtggctcgggcatgacctcatccgccgaacgactgggaaggagggggtcgcctggggtgcgggggcagaagaggggggccgggccgggaaagttcgaggagggccgcaggaactgcacaacccaccaccgtcccgcgtgcccctaaaccccgcgtccccaggctcccgaggcttcgctccgcaaaggggaactcttcggagtgctgcgggggaaaggtatggaggagcgcttggtttgcttacccgggagtgggtgcccaagggggtcgtggcgggtgcgagaagcgtcgtccccctcggactcgggcgcccccagccctggcgggtccccgctgagcggctgcccgctgcccgcgaccactgctcacctcccggggcgctcgccaggcgcgccctgcgtgcccgggtgccccggcctgcccagggagcggcgagtgcggtttccagcgggcccgtgcgcactccggctgggcgagcggcgaaggcgccctcttcgtgaagcggcgcgagaaggacgccggggatcctggcaagctgcggccggctcaggacccgcgcggagtcaggcgcggactccggctgctctctgctgcgctcagctcccgtggcctgtgctcgccgctcgcccgagctctcctcctcgcctggcgcgatctccggcgcgagcctcccaaactgctttataaggcgggcggccgctttgatccgcccacgtcagcgcgtcgcaaccccaccgggtggccccggccgcgcgcggggggcgggggcggggtccccgcggacgccactgaccggcggcgcccgccgctccagagaacttagtactctgtcgagttacaaagggggactcgctcactacagctggtgtttactaagcgtgcgtgctgcgtgcctgcgacacgcgtggggcccgggtaaggcccatctcgaatcgtcgcagcaaccaggcaaggagcctcaactggcagggggaagtcagacttgggtctcagtctggagccggggcatccttaggtgttggtcgcgcagcgtggttactgtagacgtctgaggtcccgaaacctgccttcgt

SEQ ID NO: 56637 - DNA, 1475 bp, Homo sapiens
ttctttacctggtgattgtctgtcttccccaccatggcagctccatgcaggcaggggttttgactgctttgctttctgctctaccccagctcctagaatactgcctgctatatagaaggtgttttgtaaacactggatgaatgaatgaatgaatggatcgatgggatggctatcattgcatttgattcttaccagcaatgatcaggggaatggctattatgcctgttttttagatggcaagatgaggtccatctgggaactagaggcaggctatggtcttccttgaccttggtcctgtcaggggagcctggagcgagagcaatgtgggcatgaggaagcaggggctaggcttccagtttctgccattgattttagggcccagaaaccagagctagtttcagaatccagcctttacttcttcctgaagtaattcagcagctttcactttccatgccttagccaaaatggaaaaagaaagaaagaaaaaaggcagtgctattttttcaaatggacttagctctttgagctccaacgtggaaagtgctgtccatgatgtcacgggccccgaggcctctgggcagcgttactgacactttataaggcaggctgggcacagggtccacactcctgtttctagagctctgtaagcaccaggggcagatggtgcctccatcgacaagcctgggcccagatctccagagccaggatggagccaggcactgggcaggcagggggcagactgatagcccagtggagcaccttgctctgttgtccaaaggtcttcgacgtccaccactcgcagggtctgaggaagaccacagggcgagtagacacaggtctgtgtctttccgtggggagcagagggtcagagtagtgcggtgccctgcccatggtcacatacacggtccgggagtgatggactttgccttgaacgctgtcctctgattctaaattctatgatctgctaaagaggagaaggcatggctcttgcccaagagaagctgtcagtctgagaatggctgtgaggaagccacttgatcaagtctaagtcttcgttttacagttgaaaacacccaggctcagagaggggcagggactggtccaaggtcacacagccaatccacagcccagacagggctggatgcagtctctagattcctggctgggagtattttctacaatagcctgcacttaaacggttccatttggcggaagctctgctgttctggaagagacgccaggcctttccagaatccggtctaaggctgtcttaaaggatctgctgtcaaggcgtactccttagggagcaggtgttggcaaagggaggagagatattgatcatgtctgggattgcagggggtgtggtttggggaggtgggggagatggggaagagcagtggaagtttctctgaaaaaccaaaagcacacttattttgactttgacttttgcttatctgtataattattctatggtt

SEQ ID NO: 56638 - DNA, 1433 bp, Homo sapiens
tgcagttctgcgcgtcccgccccagctcccaggtccagtgtaaactcgtggtccctgcatctgcagaaaggcacatttcccctctgcagcgcggactgattgcgttctcgctgcgtccagatccagggctcgccggcgacagagccagtctcggggtcccactgtgcggataccggattggtaatccgaggcgagccctaagcgcacacgccattggtgggtcctgtgcggccgggacgggaaggcgcaggctctagggtgcctcctattctacttacaaagcgaaacgaaaactcttacgagcgacggctcgttggtctaggggtatgattctcgcttagggtgcgagaggtcccgggttcaaatcccggacgagccctcattttctttcccttcctttttccgcatctccttccttttcctgcatctccgttctctaaatacagaacttatcgagctggaagaattctttagatagcagccagggtgcaaaaaccgcttgctcgttttcaatcgacgatccgacctcttcgaatgtgccaggtcccatttcgtgttcattacgactgtagaacgccaagttacgcgtgctaaacagttaaaaaaattaagaaaagaggggctcgtccgggatttgaacccgggacctctcggacccaaaccgagaatcatacccctagaccaacgagccatctgctgagcaaggtctcctcgaatttactagaggcgatgacagcggcaagcgtgtgggccagcgcttgcgggaaagagttgggtgggggcgtggcttctgtgcatagaaatccacgcgttctccctggacacgcagggattcaggcctgctaatgtctcccgactttgctcctaagaacgtacggcgcccccatgctacccagaaaccctttcctccctgcccctcaactcctgtccccgcgaaccctcaaccaccggcgggacccgcccccgccttggaatccctgatccatgcttcccccctccagcgcccggacagtggctgcctcaggctcggcatacagcaagtgcttaatcaattcaggccgaatgttggacacagtgcatcgaccccaaaagcgatgtgtcagtccagggccggaggggagggtgcgcaggccgcggacgagggctacacagaaggattagtgggagcgaggcgagggacgcctcaacgctacaggggcggggcagcgactaagaagcgagccttccgcagctaccccaaaatggagacctcttggccgcgcggcggagggagcaccgggcctggagcagtggatgcaaaagtggagcgcgagtgcgctcgagggtctggcgcggagggcaagcacttgtgcctggctgtgcgggtttttcttattttttgcattaacgaacattacccccaaacactcacctaccgattacctttcgtcctt

SEQ ID NO: 56639 - DNA, 1866 bp, Homo sapiens
accatttgaataggaaatacaaaacctagctttaaggttgttgtgggatttaaatgagagaatgcatggaaggcgacttagctcagtacctggaatacggtaagcactgaagtgtttgatgactgggcactcagcaaagtcttgctgaatgggtgaacatccctataccattttatagaacaggaaaactgaggcccaggcctgggaaatgactggctcacaccagtggctaggatcttaagaatgctcagaaatcagagctctggccacatctctcccagtctttgtttcttccaagcaggccctttctgattggattttggggaaagctttggcctctttgcccacttgacaaattccagagagtgtctggatccacccacacagctgtgaatggacaggcgtagggtaggggagaagagacacaaatcttggctctctccagcccgtccctatttctggacattctggaagccacaccctgtccccaagcctctctggaaaccctggcagccttatctgcagagaggaggagaagagggtctggggtcagccaaggaatgtcagaggggggaggaaagcaggtcagagagggatggagaatataccacagggcctcagccacagctcttgagcactcgctgtcctcccagattgcagacagccagcagaaactggcttccagccctgaccctgtcctgaagatgccgggtgaccttgggcaaaccatttctcctttctaggcctcagtttccctatctgtggaatgagaagctgaactagagcaggggtcctcagtccatcagtaggaagcagggtttccagaacaaggcccatgacccctgtgccccatgggccccactcccacctgcaagtgtcggagaatttggctgtggtatttcatgtatcatccctgcaaatcacaggtaccatggccggcaggcggattactcaacaggcttatgacactcctcggtgactaatagattctttttctgtttgtgttttaaagccatagcaataacattggcgcccaataaccccactgaaatcaccattattcagcctgctgtacctacaccataaacagaccagcaaaaaatatctctccttagaaaaggagggcctctgcttctctcgcagggggaccagtttctttcatgatgaggctggtgtgtgttgggagtggggtggatttatgaactggttagaatcataggattaggtcactcctctggtctcttccaggtctgacctacacattgtacctcatcagaggaatgggctaagcagataccatcttccctgtgaaagtggaagtgtggagttaagagccccgtgggcaggcagacagcctggcttttggtgccagctccaccactgggtggctaggtgaccttgggcaagtcctatcctctctctgagctcgtcttatctgaaaaaaaatggggaaactgagatgaccttccactggaggtggggggtagatggaagtaattcagagaagcatgtggcacaagtcagagctcaaaaactgggagctgttgatattagatagatgtcaaacccctgggcagtgggcagcagtccaacagggtggggagggttgggactgacaggaagggggacttgatggagggtcaaaacacccaggacgacaagtcaaggggtggtcagtgtcaaagccatctggtctctccttttctgagcagttttatctgtcagaaccacaaagaacaaaatagcctagcacaacccagtctccccagcatctgccatgccgaattgctcactgctaaattcttcagagaaagagagcagggattatctccagctcctcttccttgtggtggagggggcagagca

SEQ ID NO: 56640 - DNA, 1492 bp, Homo sapiens
gtagacatcatagacaatgacaatgcaatgggccaagtgagatgacagagtggggtgtgttcggccatgtaccttacaggtaagactaccagctttggtcttgagcacctgagtttgatccttacctgggcaggtactcatggtgtgacctcagctgtgtggctttaatctctgggctttggttttctcagctataaaatcagagattaaaaaactctaatatcccaaggctgttgtgccagtaggttgggacaaagattcatggtgggtccacatgtcctggtaggggtctcagagaatcagaattggccagtcactggctccttcctggcagacctatgtagccagctgctctcacctgatggtatacaggctgttctgcggcaaccaggttgggcaaatttctgctgacaggacgattcgtagattgattcagagttcactgaacttccagggctggcccagtgtcctcactgtgtcctggtctggctagaatgaccctgctctgggcgggatgcttggctgggggaaggtgaatgagtcagtagctgctcagaggcccttctggggcccgccactcaccaagccgagcccctgccctgggccagccccaagtatccagtgacactggaggacatcaagatgatcagacattccctgaccccagggagctcccagtctggtggacaaaccatgggcccatctcatccttttagcatgtccatattacccccagtgacttccacattgctagatggctagtggctacacttttgtccccatcgcctgtaacctctcagctgcctctggcccgctgacctctctcctttggggcccctgtggcgaacgccatgctcccgctcagaggaagactcccgaccgtggttccagcactcctcggctgccctacaccgcctcagggaggaggaaatcaccccacttccccatcttcccccagccccagtgtgctccccagccccatggcctacaaaatagcaaacagctgctgtgaccagggctgcccagaccccaggggccaggggggaagcgggccaaggggaacttggagaaagagctcttaataacataccttccccaagctgcttccaaagaaacttctcctcacaaatcattccataaacacttagcaggctctcaggaaagcgtgcacagctctcacccggctattaggaggctcctcacaactaaattgagaccaggcagcagaggcctgtgccaaatccccctttcctgccctcttcccacatggcgtcctccccccaccctgggcccttcagttccaagggccaaggtctcctcccctgctgctccggcctctcctccggctctggccctctctccctgctgagctcagggtgccctgcttccctggaaaccaggccccctccccagcatggctgctgggtttccagagagctctcctgggccactatgtagagctaaatcctaatgagacttctgagggccacac

SEQ ID NO: 56641 - DNA, 1893 bp, Homo sapiens
gttcccttactggactgagagctttctgcaagcagtgacacccttattcacccatgaactcccagcacctaacatttgcgctcggcacatagtaggcattgattttaaatgaatgaaccaacaagacaggcctatgaaacatctcagcctttcaaacacagtccctatgctatcattccctaaatatgtcagtgtgtgggggttatccgaaggaagaggttccaataccaatttccacgccctcacgcgtacaccctctgttatccctacaatacccaagcgagaaaatgagtaacggtgacagccagaaaatgaatcctgaaccgtgcaatgacaagtccgaaggagaaagcagttgcgatgagatgaaagaaggtagcgggactcaaaacagaaacactgtcccgggggtggtggcaaggagagggaaaggccccagtggccacaaccatagagtcctgctctcttttgacagctaaggaaactaacgcccagagaggaaagcgactcccccgaggtcacacagcaagtgagccacggcgagaacccacagcatcccgcgtccgcgcgccgccccagctccctcgcgtttggggtggtgtcctccgcgcagagcccccaccagcgcacgtgctccgaggtccccggacgcccgcccgcccacggctcggggccggctccccatctcggtccaacgctggggtcgacggcagtgcgctgcgcccgcctcctgcgcccctctcagccagcccgggagcccgccaggggccggcggctggcagcgctcaccgcgaaggtgggcccgggccgcccgctctgcgcccgccgcttacctggcagggtcccgcgggaacctgaagaaggccaagtcggactgcgtgctcttccgcgtgcagttgggggcagcgcagaagttcggcatcgtcgcccgcccgccggccggcccagccctcccctccccgcctcctcagggcagtccgcccgcccgtcggggccggggaggggagccaggccggccggccggctcggcagggccgacgcgcgggggaggggcgggcgggctagaagccgcgagggccaggaggggtgccgcggtccgaggccgggctggggacgcggctccacagtgctgtgagcggccgggaggatttaccgccgccgccgccgctggtgcacctcccgcccgcccgagacgctgccgcctccttcccacaatgcaccctgacgcccgggggtgccctctcttccctcagccttcctcccccgcccctcctttccgccttctcagcaggcgggcacgcgcaaggaagcgcgcctgccggggtgtggcgaggcggaggcgggacctggcgcgcgccgccgcagtgcgactgcgcacagtctaatccgcggggagagagaattgcgcatgcgcgcctgtctcccgggacgctagagcaggcggttcctgggctgctccggtaggtttggcgtgcgcgggtttctgcagatctagggcgagcttgcacgttacatcaccgatgcatctcttcttgcttgcttaatttgccaccacttaggcctttcttgcagaattcgccatatactccttaagggccgcggaatcggagcgaccttggtgactggcaaactctcggcagatgtgcgtgcactggtttgatgcagacgtggttgtaggcgatttaatttttcccagctttgcagcgactgttggcttcccagaacggatctccccagcctcgactggaagctgagggacaaaaattcataaaagcaattactctttcccggcgaggcttctagaagagcaagaagagcgatatgattacacctgcagccctataaagattgatctgtccgtctttcccttacagtcgtggcctgttaaacgtt

SEQ ID NO: 56642 - DNA, 657 bp, Homo sapiens
tccccagaggcacccagtgtcaccagtttctcaaggaggcaatatggttacctctagtagcaagagtcatgaaacttcttcagagttataacatccaaagcccattctcctagcaactgtattttccctggcaggagaaactccacctaaccacaatagatcaagcctggctttctgtgggatgtcagtaggagagctggccatctgcaaactttctcaagcttaacaccatcggtcaatgactccgtttggctttcaggttgatctttgtccccgcccccacgctcattctaattcaaagtccacatggaatgttttatgccacagctgagcgtctaagaggaatacatgccttctggggcagatcatcctaacactgattttatgcaattctccccttccatcaccccaccctaccttgcttcatttgccccactagtaatgatcaaaaagagaaagaataaaatgttcaccaaatctgtgacttagaaaaacatgtggagggttctgccatcttctgaattctgatcctcactgagtcctcattgaaatgttatttggggaagaatgtttacctggggcctccttcccagaaactttttttcagatgaatttctagtcaaagactaagacttgcctttggaaatgcctggataa

SEQ ID NO: 56643 - DNA, 2148 bp, Homo sapiens
ggagggagggcctggtgattaatatgttccactttacgattttctgaaggtgtaggttgggtttcaacaacagtgactttcctagacctcggagggtatttttagctaatgggcaaatagtagtaggaaacttaaatgctgttatttaccttctcttcctaacctacagttccactcaagaacatgaagagtctcatacgtttgtatagtggttcacaacttacaacgtttacgtggtgcatcacaagatccctatagggtagtattaacccaatttttcaagaaggaaactatgtctggaaattgtagaatgcacattaaaaactctttctgacgagcgtttctaccggatccgatgttacccaaagtacaaaatttaaagagggaagtcaatcacaagatttcattgaatcttcagtatcaggcaactggcttctattttatggccgcaaataactatatattgggccccttttctcacctgtaaaataggaacgaaaagaccttctccacaaataagatgaaataagaacaaaggctgagggtgaacctaccacgtcgtagggcctcaaataaattccttctccttcttgcccttgacagagatagcacgagatatcactaccattcccacttcacacgtggaggaaatccaacgcgagaacgctcggatttccccttctttacttgcaacaactccgtaacccgcaaatcggctacggacaactgcgatgtccactatgttagttctcgtagcgtggattctctctcctcaagatgccatctggggggctagaggccactaataattgccctcacgatcgaagaaactcgatcctaatcctcgacggcacttcaggaacaaagctgctctcccatcgtccctaacctcactaccgtaaaggtcgcagcagagcccctgctccaaccgctagcgccatcttggccgctacgtgtgacgccacacgtagcagagagcgcagccgattggctgggagacggcagcccaggagaggcgcgcgaagccagagacaggagggtatgcaggagaaaccaagggaactacaatcccggccttccttgcgcgtacgacagcaaacctggagcgaaagaggttggagtttggattcggaccacaactcccagcaccctccgcgatgtctgtccttttctttcataacgcggaggaaaagaaggacaagatgaatggaggccttttggtgtttgttctccgaaaggcgggaaaagcgaactacacctcccgactggccgcgcgcggctgcgcctgcgccctgttacctgtcgccatcttgccccttcagaggcaccgcaaacaaacccaattcctggtgtcccctagtcttggcggaggagccttttagatgagccccgaaaggccgggcaggtgggtgactctcaggcagggtcctgggaagagctggcaggccagccaggctagaggagcgccgggccaagcattcggagcccggcttggggctcccagccccatcctccgttgtttcctaacgggatcgtggggctccccggggtggactcagggggactctggctggcctggtgctgggactctgggggtttagctctgggagactcccggtgagtccaggtcgtctggctgggtatccgctggcttactctctctcggttgtcctctccgctggggagggagtgaggcgcgggtgccggccgggacccctgacaacagctactggcccagaggggcttgggtcgtggacttgacattgggaccggcgccgagaggtccgggtgaggagcctgggctggctgctcttgttgtggtgctgctagggagtgcgtgtttggagagggggcggggcgggcttgtctccttgacacttgagtggggaaggatcctacaagatcctggttccccgagcgggctccggaaactactgcccgggtttccgatgcgttgcggccccgctctggggtcccctggctaggacgcgccgggatgccgtgacgtggtgctcggttcgagcagtcgccggccgcctccaagatcctgtcgggaggcggggactggcttgtggagggagaggattcctttggctctgccccttcttcctcctccccaccccttttctttatgtcatactgccggct

SEQ ID NO: 56644 - DNA, 9200 bp, Homo sapiens
cccgggctcctccaggctcagatccacagggcctggttactccattacttaggatgcatttgtgctggaagaagtcttgggggatggcaagggagaagaaatggcaagtgtgaagcctggaagcatggaagtacccagtatgtcggagaaggctgagcagcgtctcatactgttcaacgcaacggttgtcgccatcctttccccactcattcccatcttcaccatcatcattgttgtcatcaaggccacactttctgagtgctgactacataccaggctctgcgccaagtgttttagacacacttccctttaatccttattttatcctcactattaataaccttcaaaagtaggtactattattatcactgttttacagatacagaaaccgaagttcaagcaggttaagagctctgctcaaggtcacacagctggttaatgatctgtgtgacccaaggacactctctgttcaccactccagcagggagctgggccacactgatctcatccctttccaagcctcccaccccatcactgtctgcctgtctaaggaaactcctttcctaaatgaaaggacatgccactgcgaagatgtggggtgggcccagccagggcagccaagagacctgggaggggtgagggagaacattctgaccacattcgcccttctagatccgaccaacacagggtttgattcagctccagccactgcatgttgctgggagatcttgtcccctcttcacgtctgcaaatagggaatctgaagtcccaaaagggaagggccccatccaaggtcaaggtcacactgaccatcagggggtcaactgaaactacagcttagactctgggctcccagaccagggcctcgcccactgccagcctaactgcagccaaggctaattttaagggataatttgagggtgctgggaagagttcctcctccccacacaagggtgtacctccccaggctgctggtgatacctggaatccctccagagggcacaggtcatgagccctgggttcaggcccaccgtctcctctccatcctccctgggaccctcctgcccgggcttcctcgccttaggaaatgcacaagcagccaggggctggctctgaggaggctgtggaaggaggctgcccccaaacctgggcacgccaggaacagagagacaaacaagaggcagcagagcccagtgagaggctagtagccacattggttttaatcaggctccacgcataccaactgtgtgacctttgggaagatatctaattgctgtgggcctcagttttctcagctataacatggggatgagagttactatctggcagggttgttgtggggattcagtgaggtagatattgctggtatttgatgaggcagcagggctgggcacccagaaggggctatcggtggcagctgggattattattgagtctggagtcagacagagctacaggactttatgcctgtccagtccttgctggacaacactggttcctccatgatcctggagtctggcatgaggcctggccagggtgcccagtacctaaggtctattgaattgtttggagttctgtggcggcagaactgaccccagcggttgggtgatgtaggaagaaaggtacagtgtgagggagaacttcctgctacctgaaggtagaaggaagccgtggagatgtggggagttctctggaagttttcaagcagaagctgggtggatattaggcaatgatgccatcactgagagtcacgtagattcactgaatttatgctcctggggagaaagtctaagttggaaggcctctcacaggccctgaagtccaacccctcaacatatacatggggagacaggcccaaaaagggaacagacttgcctaaggtgagccaatgccagatccgggacgaggagcagggctcctgtctctgcagagaggggactggtgctattataaccattttataaaagggaagactgaggtctggggagaggtagaaacttgctgaggtcaccaagagagtgtgtgagagaccagaatctatgtgtctggcttcagggttcccccatggccacctggctagagtaggaccagaaacctgatcccacccccagcaaggctggaatgaatccttcctgggcccctcctggggccattgagcagtgtctcctggctggaagataccaaagcacgcattagctctgaagtctgtttcgtctgtgaaaacaccaggtcctggaggagaggccttccaggcgctaacgacccacccactgtgcatctgaggaggaacctgggctcagaaaggggagtggtggctgctccaagatcccacggccaccctggccaggccaggcctggaccccaaggctagactctctcaggagagggacagaaacagagagagacagagataccagctcagacaggagaatgtgctcacctggcaaagtcagagcagtagggaggaaacatctgcaaccacttggcaagcacaggcagctcctggcagctttagctctccacagtcaggagcctttgagcactgggagagaaacagcctggatttgctgcgttccgtgagatccctaccgttctctcaggggaccctcccaccaccaacctctaccttcccagtcactgcactcagtgacagcagcaggtgcctctaactccacacagccttcctgccttcctgcctttgcacactcggctctctctgcctggaatgctgcccctcccttgtccccctgactcttccttgccttgtcttctcagctgatgcttctctgaggcttcccagccccccacccaacccccctgcccccagccagcccggcctactccttgaagcagatcagatgccatctgccctggcttccccagccagagtgcctccttccctctgtcgcagtgctggtcacacccacagtcactgtctgtgtctgtgtctgcctctggcactggaggggaagcctctgtcagcagggttgggctctaacctaaggcaacatccccaattgcagcaaagggctgaccacagaggacccacaatttccaccctctctccctccctctgtcccttccttccttcctgccgcaaatactgactgaactcctgctgtgtgccaggcactgctctaggtgcaggagctacagcagtcaacaacacaaagcagtgaacaaagtccctgctccatgactgccactctaggaggggatgaggaagcagacaatagtgacaatacaatcaataatccagagaagtttgggtggcgacaggtgctataaagaaagtaaaaccacgtttactgaactcagaactgcagacagggaaaccaggggtgcagacaggtacagtgggcaggaagcaggggcatggtaagttccagaccctctgggcccctctgttaccttccctctcaagggctgccaggcgctgggggaggcaggcatgtgggaaggaagccttggggcccccctggaagtgccagacgtctctcccacccacagacatacttcctggctctccaggaatttgattcagcaacagcaacttagcagttacttgtgaaagtcacaagaactcccttgagagttccaggggtggagatggcctccgccgcctctcactgagcctcccaacagcctggcgaggtgggcatgattaacctcccatcgaaggaggacccaaggtcacactgttggtccctggcccggctgagatttgagcccaggtcaggtgactgctgggcccacaggcctcccgccaccccctatagcctcccaaagccttggagggcaagcaagtggtccagccatggctgcagcctggacaccaaggacctaagcccagcacaggtgaactgaatgggagtccctcaactcctctgggcctcaggttctctctgagggtagctgtgagcatcagataaaatgcagcatgcatgcactgtggaaaatgccccaactcacctgtcaccccctgcaccccgaggcccctcccctcctgccctctgtgcctggccaagttggtcagtcactcacggcaggtgtgctactcagcacgagcagaggcaaagcagctatggactctgctcacctcacagcctggcacacagaaagctgtgaactctgctcacctccaaggatgggggtggagctgagggcaggattgcccgtctggggaaagaggagggcccgatcgagggtcaggtgccctgggtccatgctgaggcaggatgactcagtaatattgccactcgcctcccctgagacagccagctgctgttcccaggcctggagagaaggcaaagccagcatttgctgagggcctactatgtgcccatgcttcgtagggtgttattgagtctactatgtgacacacagagagttaagtcactggctccatgttgcatgagtgtattagtttgctagggctgccataacaaagtaccagagattgagtggcttaaacaccagacacgtttcctcgcagttccagaggctggaagtcggagatggaggtgtcagcagggctggcttctggaggcctctgtccttggctatagatgaccatctccatgctcacagggcattctccctctatgtgtgcctgcgtccagatttcttctccttatcaggacaatggtcatactggattagagcccatcctgctgacctcatcttcactaaattaccttctccctgagcctctatgtaagtgaagcaattcagagcacaggctgtgaaactagagggcctggattcgagtgtcagctccaccacttactagctctgtgaactgagaaatttgctgaatctctccatgcctcagtttccctctctgtaaaatggggataacagtagtgtcttccacatagaattgtgaggattaaaggagttaagataagaaccctatcttgcccattgtgagcttcagctaagttgttaacttaagttttatttactggggccactcccacacatgccaacagcacaaaaactgtgtgtcacagctctgcctctctctcagtgtgtggcctcgaacaaccaatttccctctctgagcttcagtctgtaaaacgggggtaggagtctcacctcccagggtcactttgagcgtcagacgtgaccacagcataaacactggtaaattctctaagaatgtttcatccctgtaatgacaccagaaatgaaaatgaaatcatgccgacaaagtctcctttttcctttctgctacagggcctgtcctgcagctccaaaacgaggacttagagctggctagggtgggagggaggatctcagctcagccatgaatggttcactgaccctggctgctcaccaggggcttaagcatccctcctttgcaaaatctttctggaatgtctgctctgagagcacaaagctggtaaactttcttcacccctggcaggacacctggctctggtcatgtggtagccttaggcacacacacttacacaactgtgcacagcctggccctgcccttttaccccctcttctctctcctgctctcacctccctcctcctgccccttccaccctctgctttctgtctgtccaaactagaccaccccacttactcccttcatggcctggttttgaggatagacccagctcccaggtctgtcactggagacatctaggatttcagccttttgggggaaggggaggggcattctgagtggtggagacagccaaagctacagcttacaggatggaaagcactgccatgtttggggcctgtcacctagtaggggtgaccattggctgtgcctgggagggggcagatgtgtggtgggcagtgaggctggatgggcagatgggacctcaccttgtggtccacaaggacgtggagaggtggaggctggaaggggctgggtcacaaagcccttttggtcagcattcttcgtggaaccagggctcactcgaagggtacagcatggcacaacacagtatggcacagaggacgtcccagcagaggcaggggacagacaggtgagagtgtggacggtgctcagggactctcaggcccaagagcctgaggtgcaactctgtcttgccactcacaagccatacaaccttagtcaaagcattctccctctctgaacctcagtttccccatctataaaatcagactagtaattgtacccaccttgttgtaagcactcaccaaggtggcggttgtgacattttgcacagttcctggcccatagcaggagctttgtaaacgttaaccccttccccatcaccctccagtctcagccctgagggcagctatgtgaactgattcacccctgctattcaccaaggtttactgaacacctgtctccataattcttgttataagagatcgttataaataaacacttactaagcaactactatgcacccagaatcacatgaaccacttcacataaatgatttcattaaatcctttccactaccttgcaaggtaacaattttcttcattttacagaaaaggaaatagtctttaagggactcgccaggaagtggcaaagccaagatttaaaccctgtgagaggtcacagctggagatacagatttgcagtttttctgcatcaggaaacaactgaatgtgggggaggagggagtggtcccagaaaacttcccattgtaaactgttagtgggatgtgaaatctatttacagagacatgaccaccattgctattcctaatggaatagaatggagtagaaaggaaaataccagtccatattacacacagcaagggtaagtactatctgccaagcttgtatatatatccccagttgtgtgataacatgtgtatcttactatggactaactttttaaaaaaatctgaaaatctcttaatggaacttgtttgcttagggccaggactgattctaatgtgctctgaagtaaccttctgtggggtaacattctgaagttctgtttgtcttgggacagaaggtaataaattgagcacagagccctttgcacacaataacgtaatcacgcaacaacccaagcatgataacaaagttccccggagtttacttgccctcagaacgctcgacctagtcaagaggcttctgggtcacggtgacatcttcccctacagggggtcagaggactttgtcagctgaaatcatcctgcaaatacgttgttattaataagatattcttgctcgggtcagttggtggcaaaaataggactggaatcatgtgtcctgccctgacctccagtcgggggctctgtgcctgccgtggtgctaagacacagggagatgatgagcaagggagaaacggcagggtctgcatgattggcaagggccaacaggccaaagggagggagagagaccaacagaggacagacagagcagggaggggatgtgtccacaggcctgtgtggggacagaggggaaggcaagagagaattgccaggcctcttggaggagaccaacaggctaacagaaggacacaagggcccccaatgcttgccctccctccctgggtcccctccaccgggactccctcagatgagcacctgacaatggagagaccatctgtggctccaatgcatgtggcaccaaggcctgtcacctcagcctacccacaagactccacgtcccgagaattgctccccttctttcagacctatccctccctgggctccttatcccctgtacccagccacgctgaaccacttatagctccacaccctctagtctggtctttgatcatgcttctccttctgcctagaaggcccttaacttcttcactaagcccacactcccagccctctgtgcccagaaggactttctcagccaggccctccctcaggacactttgcctgatggctgtggccggcactgggtctttctctgctccaaatgctctgcacagatttctagtgggcatccaaaactcttcaggactaaggtatgtctgtgtcagtgtgcccaccccaactgtaggctcctggagcccagtgcaagattcaatatgtgtcagaggttcagcaggtaaacatttgttggatggatggatggacagatagagagtaaagacaggaggacacatggatggaaggataggacaggcgagagggaatacacagtgatgtgtgccatgtagagaagtaaacagagctcttgactgggagtctagaagctttcctgctcattagctctgtgaccttggacaagtcactctctctctctgcacctcagtctcccacctgtaaaatgagaaaggtgttgaggttaaatgcctgatatctgatccccaaggccttccagctcccatgctgatttcatggtgcctggagcatcacatcctgtcagaacttgcaagtcagcttagctcccggatgtagggataggggaagaggtttcagggtcagaggaaacctggaagcaaagctgggtaagggcagtgcctctagtgcaaacctggccttctggaaggagaccagctctggcagctgctcaggagacaatttgttcctggcctcctcccaccaccaccaaactgggaaatttggaaggagggcttggcagatttaacctaacagcctactgcctctttacaggccacagtctcctgcccacagagcggaccagagatccacacatggctccaaatgagggagcctccttctctattgtgtcccctcccccaaccaagggccaaagccaccttccatttttttcctctttgtgccttccaagcctcccacatctcacactgtgctctcctgggccctacaaactggctcctgcctcagtttccctgtccagtttcttttgttgttgtttagtttttttttctgtggtaacatgtaacgtaaaatttgctgtcttaactattttaagtgtatagttcagtggtattaaatacattcataatgttatgctaccaccaacactgtccagctccaaaattcttttcatattgtaaaactgaaacactttactcattaagtgtacgtctattagatctggttggtttattccttacttatcttctgtctggttgttctatccattattgagagtggggtattgaaatctccaactattattatagaactgttcattttccccttcaattctgtcagttttttgcttacattttgatggtctgttactaggtgcataaatgctgataatgtcttcttgcgatattgaaacttttg

SEQ ID NO: 56645 - DNA, 8884 bp, Homo sapiens
acagcagacagaagaggagagtctagaggcacagagactctcaactggaggcacagtgatgaggggaggtgggtaaagttcatggagatccaccagctgaagcccctcaaggccacctctccctaaggggaggtcaagggaaatgatgaatgtgaaagtgctcagaaactgctgccagctaccagccagtgtgaagggttgttgattacttttatgttaaatgtgaggcctggagcctccagcccagctggctagaacctgcacacacagtgcagtgggagttagcttccctgagttcccgggcagttgggtattttcatctccagttctcagatgctgaacttgagactcgctaaacaattccacatggaggagaggatggaaatcgttagtctagggcaaggggaggggggcgccattccttcaaaagaatgtccctatgggaggggaggaagcaggaggaatataagctagacaagccagggagtccagaggtcattcccgggcaccctcccctcccaagcctgctgggctttccagtctctaccccagtccctgacggaagacatttagcaaccacacaaaggagcttcctgtgagccagactaatgctttacctaaattaccttgtttattcctcacaatagcctcttctacagttgcagacactgagtctcagagaggttaggtaacttgcctaaagttacccagagctggtaagtggcagggctggaacctgaatcctgaccaagcttggccctcacccgatgctgattgcaggtctctctcccatctaggccaggagcctttagagaggggagggaatgggagggtgggaaatgggaggggcccgactcctctctatgggtcccaggggttgtggagttgaatccctgcagcccttttaagcccaacagtgaggaagacactggataccaaagggcccatggtgccatcccaaagactgataaggagtgtgagctggatgatcacagaaggactcctagttctgaaagctgggattctaatcaggagaggacaatgaatggagaggagagacgggagttctccctgcttccacacatatgagaccaggctcctagccttttctctgcacattcctaactggcagggtccacaggtgtcaacccaagtgcatccccaagaccacacaatggctctgagtgcagaaaggacctgcaagaccagtttgttttctgggcagcagatgattttgctggcctgaggcctggggcagtggtctccactcctacctcaccacctctctagtgtcttccttcttccccaagtagaccggcatgcatgcacacacaggcccaagcaactcctttttttttttttttttttaatgaataagaaaaagtaataaggaaagaagcagcaagcagactgggtgtgttaacaagtctgggccactgcaggaggtacattgcccaatttctgcaccccgaggccctccaaagtctaggagaagctcctgggaggtccagggcccaagaccaaagcctctatcaactctcccacctgtgaactgcccctctcccaaggtaggcattgtcggggtgtgtagactgggagccacccacacacctgactctcccctcctaggaaatgcgtccaccaggtcatttctcctgcaaaccctcattttaaagtgtcttggatgctttcctgccctttttttttttttttaacataaagaggggtgagagcccaagagctacagcagggggaatagactgaaactgctgcctactcacacgccagtttcccttcttagaactctaaccagaagccaatggtttcctcctaaaagaaaaactcaatctgttgactttctctctcctctcctgccagcttttctgcccgagccgggctctctcttctctgtgggttcgtctttcagccagtctttctctgcttcagattcttggtttcttgctcccggtagtccctgaacctctttcactctttaaaaaaaaatggggaggggcggtgaacaagcaaagaggaagccctcacccacccaccaaatctctttcttactagcaactaattccctctctctttccacacacacagtcatacacacacatacacatacacaggcacgtactccggcgacctccagatgttcccgacagtgcggccatctgcttagattgctggggcgcgcagggggagggggcagggatccgggatgcaggaagctgtgagcgaggccaactagagggggcgggagcagcgcacttttgagacgctccctagagtggaacccgggctcggctcaggctccgcgggcggggcgcgcgccgagagaggctggcactttggcgacactccctgagccgccccgcggccggcccgagccgccacccggcgcccggcaggggggagcctggctgcgggcggggaccggggggcgggccgcgccgcgcggagaaaagcgctggccggagggcccgcggccgggccgccggggtgagcgtgccgaggcggctgtggcgcaggcttccaggtgagtgcagttccccgggcggggcgagagtccgcgctgcggttgaagatcccaagtccccgatcctagcctcgcggccccttcggagggcgggctggggacgccgggcgcaggggcggggctgggtcccgccgaggcccctcaactttcgtcggacgcctagggctgggcgggagtggggaacgccgacccaggggagaggtcttgcgggagacaaaggctacgcccaggggccgtgtgggtctttgtgcggacacgtgcatctcacgtttgtgggtctttgtggatttgcggtcggggacgcgccgctgtcggtgcctttgtgtgtccgtggctttgcgcggctgctttgcgcccgtgtccacgtttgcgggcctgcgcttggctgtgggcgtcggtgggcgcatcgcgtgtctccgcgtacgtggtcggtgcctgccgacgtgtctgggctgggtgtccgcagagggtgtgcgcaccgagagcccaacgccgccccacccccccgctcccccgccgtcccctcgggcccacgacttggctccaaacttttctcccggttcctcgggcaacagccccagtcctccccaccgctacccggccgggggcgcagacagccctccccctccccctcctgaggtcccaggacagcaaggggctgcgacgggattggtggtcgggggatcggcagcgcctggggactggctgggcaggggctgggcggagcgtgcggactccccctcagaccccggctgggaggaagaggcgagcggtgggtcccaggctccggccctgggctggggagaggaagggacagggcggctggcgttgccctccccgcgcttcttggaaagagtgtgatccagagttgcgtctgtttggtagggagacaggctccgctttgagacccactctccgtttgcagcccgcccccggggtagggggccaaccctcggacccggtaggggagagggggactgccagtccagatctgggcatgcccgaggcgccggctcacaggacccggagctgggctgggggccgtgggagcctcacatacacaggtttcaactgggacggccactggcccctgtgcggcgctggcaagttgctcagcttcgcggagtcgcggtcactctggcacggacagggcgagaactccctcgcggctcggggcgtgcggtgggaataacccgcgcctctggagccgggcggagagcagcgccagcccacacttggcctggcgaggaggtgactcaagaccttcgattcttctttcatctttgtgcgccctgcccttcggataagtctagacttgcagtgcctggggctgaccggaggtgggggggggggggtgctcagagctgcaggagcctgctgggcttttgagcctaagtcgcaaagataaccgtaaacaccctcctccccactgctcactccagtctttaacctagaactttgtcggatgctgcagacatgatggaagggcacaggccgctaacctgggaaagaaacaactgtgggcattttcctttccctctccggcctcagtttcccttctggaaggggaggtattgatagcctcttctgttctggctgactgcttcagatcccagaacccagaaacactttgatgtttaacctacacctccattctgacctgacctattccgaggcactactttgctccccaggaaggctgcaatgcaaccgccaccgggcttccacctacccttcctccaacaccaggaaaggcaaaagctgataaatgagtcaaaaatggagagggaagggagggggattgaccttttctcctcttactttttaaatgacagtttgtggtggtaaagtccagatcagtcttcttcttaatcataactcctgggtcaacacaggggatgcagttaagagttcatgcttcagttttcagagcaaggctggcctgggcactgaggacacttcctaaagagggttgggtcctccctgaaagccacctggccaaaacaagtcctaagaggggttctgtgggaataacccggagaaggggcctgacaggagattcctcctgctcatggttttgaagtcagtgggtacacaggggaggcaggaagaatctcccacaaaaggatcagcatgtgcaggacctgtgcatgaaaacagcacaggtggtcagcatggtggaccagcagacgcaaggtcttgagggtggtgaattggaagtgaacttgaggctgggaaggcagggaccaaatcaccaaggccttgaatgtcaggccgagaagggggatttgagcctgtaggcaatggagagctcctggaggatttaaacaggcacagcagggtgcggttggtaattctatgaaacccgtctctggcttgtgggtggtgctggaggccgagagaccaatctggagggcgagtgatccagcctcttagagtcaaagggacccagattttactcccaccccattgcttcctacctctgtggcctgggacaagtaacttatttaaaatgtgaggatactaattcttgctccactgatttggtgtattaaataagataatgaattacatgtgcaaataaataaaaagtggtttgtagtgtgtattacattgtgcagacattcattggattgcactgacaatagaaggcagagacagcattgactctggtcctaaacctgatctcaccagcgggcagagccctaagcatcctgcagggttgcaccaattgttatgttccccacaaagcagaagggagctttctgtccatgacatttcattcatctgatttatcaccttcatgtggccaggctcgtgcaggcaaggaggtagacacagattcgtagatggccacagaagtgggccagtaccttgtcgggggcagcccaagggccatgggcgctcacaggatgggtggcctttcctggatgagcggcaggttagactgggaaagcctcacagaggaggtggctttttgaatgaaatgtgtgagagtttgctggtagacaaagaagggtatctttgcatcagagggaacaacgtgtgcaaaaaggcaggtggctctagaagagtcacaggcctctagactagaaagctgtctctgtgggatgggttttaaagagggagctgtagtagggtcccagacttctgttgggaagtgcgttctggtgccagcatggctggcagttggagtcaggccaggagcgaggctgttgcagcaggtctcttgagcctgacctggacagggggaggtgactgcccagcttagggatgagggaaagggaagacagtgaccccaactgcccagggggatctgcgaatttgatgctgagccctcattctgtcacaggcaacacagcagcttttgcctgctttggtctctgagacctttccagctcacccttcccagtctcctgggagtgccttgtcagcatcttgtagccacactgggatcctggatggtatgtggagagaggatccaaggcctctgggatgaattgtggattcttctccatcttcagcccctgccttccctcaggatttgctggtgtcacagcacctttttcttccctggtccctgaaatcactcactggggacaggaaccaacattcagtgaataccaacatgtgccaggccaggtctgggtcttcactttgcctcatgtaatcatcacagtgacccgttaggaccagcactgggattatcaccatattacagacgaggactcagaggggtgagggcacgagcaagcctcagagcagtgaaggccctgttgggttggaacccagactgcctggctacaaaacccttgccctctgccccatagcgcctcctcatgtgtccatgtacgctgcctcaggttgatgggaacttgaaaatcttcaagaagaagacatattgaaaggagaaaatcttactgggagccttgcccatctccctgtagattatcctccttgggtaagttgctaggcttacaggtccctgcgatcatgtcatggaggaggccaggtactggatgtcagaatacctgggtcctgggtccagcccctgtcctctctggctgtgtgactctggacagatcacagaacctctctggacttcttaacacagctgtaaagtagatatgacgccatctaacctgctgatcctgcagggtgactgaacagatggtagttgaggaagcatgggagaggttgagaggtgtcctttggtgaggtagcggtattctagatgcttggtgcatcttcacgtggtgtctgctctgtaccaggctcagtgctcagcttcaagggcataaaaaggaacctaatcgcatccctgcccacagtaggatagacagttaaacatgtaagtacagttcagcatgaccaggtctaagcacatgtgctcatttgtaagctgaggcagagtggatttggagctaagacatctggggttaagtccggggtcctctccttcccagctgagtaacatccatttctgtgtctgcaaaatagggacagtatccccagggtcaaggctctggtgaggcagaagtgagatgctggtggagagcacatggtgggctgctgtgtttgtccagatgtgctgcattggtgggtctgttgcaagagctggccctcagggctccgggagtctggccttgaaattctttctgccttgcgtttccagagctgacaaagtggttggagggcaggacgtttctgaaccatccacctggggatttcctcggcatcagcttgagtgaactcatgactgaggggagcagggtgggaggcagctctgtgttgaggaacagctgatcgagacaaaggccggtctcgggggtgctggggccctgtaccagtggggccctgtgccaacagtgccctgtggaagttgtcgagggcggtggggggagctggaaaactttacagaccagagatgctgtagtgcagcaccagggtcaggcagctggggccaggtaggttcaagctggaacccaacacccagagagctgtccttatcagcagacaccagggaagtgactgaagaatgtcatcacagccagtctcggacctgctgtgctcctggcgccacactgggaacttgggtggggaggaacatgaaggatcacatggtgactgccttcagaaggcttagcaaatcaccgtcattgtctaccacacattgagtatttgtgtagcagatagtgagtggaatgcctgccattctgtcatttaatcctttcaacaaacctgtgttcttagccctgttgaggaccctcggagcgggtcccaagacttacccaaggctggtaggtacagagctaggttcacacctggtctgggtcttgcggttgacccgttcatcctgctcttcctccacacaccctctaggcctggctctgatcccaggtgggggaaagaacacacaggtaaagtaggcagggcaccgccccaagctgcttacacatcaagtaggaaaacagcaggtaactcacggcagagaatttactgaaggaggcctgtgggtagcctgtggggtgagaggccaggagggaggggtggcccgagggcctgagtggacagaacaggctttgttttgctgggagcaggccaggggcaggcgggatggatgcatgcagttctggcagtcacatgaggcatcaggtcccaggtcctgggccctgctctgccattccttgctgtcactgcccctctctgggccccagttgcccatgatccccaaggggccttccagctcccaagccctggaattctccaagtttggagatgtattagcagaggctgagagttgttcaaagtccatcaagggaaggctgttcccactttggctgtcaaggagggttcaaatccagatgaggggctggggacaggtgggaggggagaagaaggtggtgacaacttacaggtgcctcgtgcatgggagaacttgatttctgtaggtaaaaagcagaacccaagaggtttctgataaggagagtgatgtggccaaagctgttttagaggtgtctcatagcagtgtgtgcggtgtcacctggggagacctgcctggagcctgttggggccgtaccatttactctttgtccttgcaggccatcagcaaacttagagtcactgtggacctggccctgtgggcccaacaatgcatgattcatggcccctgcactggaaggccttacggtatatcccccaaatcacagatggatgtggtttctaagcccttgtcctcctgttcttgtgttttataatctggtcaatcagtggatatcttgtatctgcaggtcaagatttggaaaaaaatgttgaatcttgactgaaagatccctttctccctca

SEQ ID NO: 56646 - DNA, 1643 bp, Homo sapiens
cccaccccacgagggccggcctgcctgcgcccaccattcagagcctgaacctggcctggaaccggctccatgccgtgcccaacctccgagacttgcccctgcgctacctgagcctggatgggaaccctctagctgtcattggtccgggtgccttcgcggggctgggaggccttacacacctgtctctggccagcctgcagaggctccctgagctggcgcccagtggcttccgtgagctaccgggcctgcaggtcctggacctgtcgggcaaccccaagcttaactgggcaggagctgaggtgttttcaggcctgagctccctgcaggagctggacctttcgggcaccaacctggtgcccctgcctgaggcgctgctcctccacctcccggcactgcagagcgtcagcgtgggccaggatgtgcggtgccggcgcctggtgcgggagggcacctacccccggaggcctggctccagccccaaggtggccctgcactgcgtagacacccgggattctgctgccaggggccccaccatcttgtgacaaatggtgtggcccagggccacataacagactgctgtcctgggctgcctcaggtcccgagtaacttatgttcaatgtgccaacaccagtggggagcccgcaggcctatgtggcagcgtcaccacaggagttgtgggcctaggagaggctttggacctgggagccacacctaggagcaaagtctcacccctttgtctacgttgcttccccaaaccatgagcagagggacttcgatgccaaaccagactcgggtcccctcctgcttcccttccccacttatcccccaagtgccttccctcatgcctgggccggcctgacccgcaatgggcagagggtgggtgggaccccctgctgcagggcagagttcaggtccactgggctgagtgtccccttgggcccatggcccagtcactcaggggcgagtttcttttctaacatagccctttctttgccatgaggccatgaggcccgcttcatccttttctatttccctagaaccttaatggtagaaggaattgcaaagaatcaagtccacccttctcatgtgacagatggggaaactgaggccttgagaaggaaaaaggctaatctaagttcctgcgggcagtggcatgactggagcacagcctcctgcctcccagcccggacccaatgcactttcttgtctcctctaataagccccaccctccccgcctgggctccccttgctgcccttgcctgttccccattagcacaggagtagcagcagcaggacaggcaagagcctcacaagtgggactctgggcctctgaccagctgtgcggcatgggctaagtcactctgcccttcggagcctctggaagcttagggcacattggttccagcctagccagtttctcaccctgggttggggtcccccagcatccagactggaaacctacccattttcccctgagcatcctctagatgctgccccaaggagttgctgcagttctggagcctcatctggctgggatctccaaggggcctcctggattcagtccccactggccctgagcacgacagcccttcttaccctcccaggaatgccgtgaaaggagacaaggtctgcccgacccatgt

SEQ ID NO: 56647 - DNA, 1137 bp, Homo sapiens
ccccacagtcctcctgtttgttctccacttcccctacatttcctgggacaggagaggattcagatggaggtagggatcacggtactttcacccaatgggtccgggtcttcccaagtccccgcttgtggaaggagtccttgcgggagggccatggaacaaaaaggccttaaagacagggccaaagcgtgcggagggcagcgaagggaaggagggggcttctgcggcaatcagttctggagcaggtcacctccgcccgagctgcagcttcctcctctgcaaaacggggcagggtgaaggcccagtgagagcatgggcgcggatgccatcacgctgggcgggctcgtccttcccgtggggaacctgccctgcaccccgcagccctggcctcctgccagccataaggagagcggaagccccggcgggcctcgccgacccgggagtccgcgcggcccctccctgcccgtgcggaggctcccggcccgcagcgccacctcgtgctcacgcatggccagacaccccagatcccagcggggccaagagccaggaccggggcggctggaggccaaagtgggctgcgctgtttgctttatgcggccagtcccttcccgcccaccagactaccctcgccctgccggactccgccctccaggaaccctggcgcccagggcgagggcttcgaatcttacacaatcaggaaaattcgtgcaaagaatccgttttggaattcacagaaaagggttgaaatcttggggtcatcactaaccaattgtgtgatttttggccaggtcactttacttctctgagcctggaaaatagggatgaaaatatctccctcaaggccgggcacgatggctcctgcctgtaatcccagcactttgggaggctgaggcaggaggatcgcttgagctcaggaattcaagactaagaccagcctgggcaacataatttaaaaatctaaaaattaaccgggcatggtgacgcctgtagtcccagctacttgggaggctgaagtgggaggatagcttgagcctgggaggttggatgacagagttagaccctgtttaaaaaaaaaaaaaaaaaaagcaaagagagaaaaataaaaataaaagaaagacaaaaaagaaagagaaacaaaca

SEQ ID NO: 56648 - DNA, 2108 bp, Homo sapiens
ctagaccctggaaaaaaaaaagaacgaaggaagggagggagggagagagaaaggaagaaaagaaagaaagagcaaaaaaggaagaaggaaagaaggaaagaaggaagggagggagggagggagggagggagggaaaatatctccctccacaggactgtgtgtagaagaaatgaagtaacatttgtagagaaccaagtacggtgcctggcacaaaatggcagcctctaagtgctctttcccgccctcatccaaccatggagttatgaagtagattacagagccatgtagtctgagtctgttttttataactcgcactcagaactgaagaattttgtaaagttctgggactgtagaatcacagaacgacacccggtaatccacagggtcatggagtaggtactcaccgtcagctgtggcccagctcaccaccatgggtcagcagggtcaccagcctctttatgcctttcacagtaatgcagcggccagctatggctatgtgttcctcatgctttgtgtacatgccatcatctcctcacaactgcaccaggtgtttttgtcaccatacagatgaggaaaccagcataggccaggctttatctgtcaggtggcaattctcacattcttccttgtcctaccccaggggccgggccagctgtgtaaatcccatgaatcagagagggtagaggtgcactgataaaccaaaaagcactgggattccatttattttttattttcaaataagttgcagaagttatgcagttctacatagctccgatcagactgtggattctagatcttagagtataaaaagccaaaggtcaaagtcaaagtcctttctctcctggccccttttcacggatggggaatctgaggcccagagacgagtaagttcccatggtccatggccaggattctgtgcttcagaacggcctatgtaatttgtgggacccagtataaaatgaaaatgtggggccccttgttcaaagttattaggatttcaagatgacaagaacagagcattaaaccaagcacagggtctttctatggtttcactgcccatgaagccagccctgctgccatttgatcatctcatttctagaggaggggcaaacacccagacagtgttggtcaggatggcagaagagagtaggtgtggatttgtgtgtaatccaatccctctgtagttcagggagccagttagactcttccaaatgcaggaatgtccctctgtcgttatcacacaaccccctggtttccccaccttgccatggccaaaaggctttcagagggaaaaggcagctaaagaggtggattctaccacccagctgccaccaaaccagctcatgggctgtttctctggactgccaggaatatgggggggcagaggcctgccccttgctcactttatgtgcttacagaatttaaagtccaccagcgctaaagcccactcatacctaatctccaccaagggcactgtctatgacaacagaggtcatcataggctaataggaccttgcccatcaatgttcagtgttccttgttggctaacgttcaccagggtgcaaatgttggttgatatataatgtttatcatatgaatgacagcttccaccaatgaccaatatccacaaagggaaaatgtctgttggaggcagtgtctgctgtatatcagtgcccagtgttcactggtagctaattgcaattatacttgctctgtgcatcaatacccaatgtcagtccatagctcggcttctaacgacagcaaatgtctatccagttaagtcacatgccctgtgtttattcttctctttatttatttaagtactagtggttctgtctacagggattattgtgtttgttgagcttggagggaaattccccctgtgtttattctttagttcccaaacctatttattattttcttttgcatatccattagatagtcaaagtgttctgaactggaggtacaaacacattcatgtttctttttgtctcccttccctccctccctccctccctccctttctttctttctttctatctctctctctctctctttctctctctctctctctctttcttttttcagggtcttattctgtcacccag

SEQ ID NO: 56649 - DNA, 1375 bp, Homo sapiens
gagacacttacacctttatcagaaaatcacggtttatttcctgagaatcacggggattggttgggggtactctgttttggggctccatttgaggcctgtggctcaatggaagacatagaggcgcttcgccgcacaggtttaatcaagcaagggcttgatagaagtattcatcccacccccgccccgattaaatcaaaccacacgcacacaaatagaggctctggcacatcctgacagaatatagcctctgggatgtcaggaacccccaacctacggccattggcgtgtctgcaccggccaggaagcccaggcccccggctccttcctggatcacgcccctgccccgcccaagggtgaagaggggcggggccagccggcgccctccgagtgggccttacaccaggtcgggcctggcccggccccgcggcccagcggcgccggtgggcggggcctccgtcagggcagtgtcagtaacggcgccaggccccgcccctcggggaggcagggccgggcggggcgcgagcgagcgcgcgggctgggccggagccggcctggtcgccagcctaacccggcacagtgagcggagcgcctgggcggcggcggcggcggcgtgatggctccggccgcggaccgagagggctactggggccccacgacctccacgctggactggtgcgaggagaactactccgtgacctggtacatcgccgagttctgtgagtgtggcctgaggaggggagtgggggcgagagggcaccgggctgaggagacgccgtgtgaggaaggcaaagagcgaacctggccgcgaagggaggtgccaggcctggccccgggagctggaatgcggcgccctgggccagcgggaggctgagaggagcgggccgggagtccagtgtgtagagggaggagtaccggggtctgggagggaggaagggggcctgaggattgggggggcagaagagcagtgggaagtggggagcccctgctggacctaagggggaaagcctgaagagccgggttgggaatgggaattcctgcccgagagcggagtggggccaggctgggagagtggaggaccctgccccttggaatgagggcccaggacacctgctctgctgttgccaccaccagaagggtacagttcctagcttcgtctttcccccaatccgtgagaattctaccgtctttcccttcccttttcactggaatattagacctccttgctcacctccagggaacagtttcactagtctgagatctgaaccatcccacccctatcccccaggatgtcttcaagtaccagaggtcatctgctctctgagtatgattattcaactgtcatcttgcaccaggagtcgaaggcatcttgcaccta

SEQ ID NO: 56650 - DNA, 931 bp, Homo sapiens
cttttttctttataaatcacccagtctcaggtattcctttgcagcaacacaacacaaaatatgacagtgtaacatatggatttaattttatctttttccaaatggctcccagttgtcccggcattatctattgcaaagtctatgtttagtgtgtagcaaaggcaacatctcaaattagtggggtaaagatgttttgggtctaatcctagattttctagtctattccaatttatctattcatgtaccagaaccatcccagttttaattacagaagcttttttttaattttttttttaatgtctggcaagtctagttttctctcatggtttttcttttccaatgtcttcttatctgttcttgcaagtttatttttctatgtgaacttttgtatcaacatgtctatcttcataaaataccttgctgtttcttttattgggattacatggagtttaacattaacttagggaggactaacaccattacaatgttgacttttcctgtgcaaacaaagggatatttttctgtttgttttcctttcgtgtctttcaaaaatgttctaaaaatttcatcatggccaggcgtgatggcttacgcctataatcccagcactttgggaggccaaggtgggcagatcacctgagttcaggggtttgagaccagcctggccaacatggtgaaaccccatctctactaaaaataagaaaattagccaggtgtggtgatgcacacctgtaattccatctactaaggaggctgagacacaagaatcacttgaacccaggaggcggaagtgagctgagattgcgctactgcactccagcctggcgacagagtgaaactctgtttaaaaaaaaaaaaaaaaaaaatcctcatataggtttatacataaaggccattatattttacatgttaattttgtatcctgctactt

SEQ ID NO: 56651 - DNA, 1628 bp, Homo sapiens
tgcctataacctctgtctccccacctttaaaaagccttacatgtaaaccattggggagtacgggtcttaagcattagccgacctattctccttgcttggcaccctgcaataaatgcctccctttctgccgctgcaaatcctggtgtcagtgtttggctttgctgcactgggtgggcggacccaagtttgtttcggtaacacaagaggttgacgaaatcattaactgagacttcgaaacaaattggaggcggagaatgaacgggcctgagacgctccaccagcgagtgggccgatgggctcatcagatcagatgggcgtctgtcctgctgcctcagggcggggggtggtggcacccctgagctcctactgtaggcaagaactagtcactcctaaaccttctctatcggattccccaagcggcctggggtgggtagagattatagtccccgttttacagatcaggaaatgcaggctccgtgccatcccagggcattccggtagccagtcacggacagagagtcaaacatgagcccgagcccgggagcccatggcagcacgggattaagtcctcaacacgggccggggtcagttttcccatctgacagaggccctctgctgctcacaggggcctgggctcccacttctccatccgaacacttgggatggatgtgaaggtggagcccggaaagggaggggcgccgcccaccaagtcctggttctggcaggcaccctggcccttgcgggtcctcggtactacacgccggccccaagtcagccgcggccccggcccgccctgtgggggctgaaccccagccccggcccgatccctcacggtgcagccagcccttgggaggctgcccatggggatgcgcaccaaccgcagacagataggctgggaaggagagagaacgagggcccgaccgagccggtagaggcggtgggtgccgctaggggccccaagtccgcgttcaacacaggggctggaatgagaccgctcctctgagcggccgcccaccgcaccagtgcgcatgggcgcacccggccaccgggccgcccaccccgccccacgggagaccacgcctccggctcgcaacgggcaaatgggcggaggccgcgggcggggcggggcggagccgggcccagctggccgaacccggggaatgcgagcgccagcccccgccgcaggccagtcccagctggatctccggccagagcccgaggctgctgcgccgggcggctgcagcctccgctccagcgcccgcgccgtgccctgcatcccgggagcccggctggacccgcggcggctcggccggtaggaggcgggcggagggaggcgtgtgcttctgtgtgtgtgtgtgtgtgtgtttcgggggggtgtgtgcgggtgcagcgcgggccagtgattgctccgggaccacgaatcagtggagggggctgcacctcccgcgggcccggggggaaaggaagtgagcgctggctggggggcggggtcctggagcatccgcctgggccccctcggctcgtccccacccccacccccggcgaggagtctttttttcacctccctctgggtgtctccgagtcgttttcctagtgcggacgcgctggaagcgcctaacacccggggc

SEQ ID NO: 56652 - DNA, 1388 bp, Homo sapiens
tagtttccctcccaggctatgatctcgagtcccttctgactgaaaataccccgtagatgtccttggactgggactcttgagtggcagagaaactgaggccaagagaggaaggtgcgtgtcctagatcacccatgagctgctagcaggggtagttgaagagtcctgcctccctgcaccccaccttcctggcaccagataaagggcccctggtgcccttgacctcagtcccaagagctgtaacagaatctctggccctgtactgactctctggaaggcccaggagcctcctggcctggccacaagagttctgcctcttgggccccctctcccacgccttcctctcttcctttgtcaagtaggtggggagggaggccttggcctcaaagggcctttgtgaggccttggctgtggggaggagggctgggcactcgagctcttcgccctcctcccactccatcccctggctacccccgtcctgactccctcctgccctctggccattgcccagacattttaggtccgtggctccgaaaagaggctggtgaggcctggcgggagcaggctgggcttgctgcggtgagaggaggagacgccaggttggcccgcttggtactctcctgctgcgtgacccaggggagtcagctgccctttctgagcccctttccttgtgggttcaggagccatgccacacctcctcctctcgttgccttcctcgctggctcacttggtgccctgccctttctagacacgcagagctgccctgccctggatgtgggggcaggtgacagagagcgtatggtggctggtgttcagagagctgtgtgagtggggcccaaggggcagcagtgatggggactcagaccaggctggggtggatggtccacggcactgcctggatttcctaaaccatgtgtgtaggcactgcctactggctagccacaagcctgcaggacaggcagcccctgccccactaacgggatgggaggtttgtggagcaggaagtcaagcaggcttggctcagcttgcttggcgggcccagcccagtgggttatcattaacgcccagctgcttgccagtgagagggaactttggcctcaggcagccttgtttcgatggagtcttacctgtgaccgcctgtttacaaatgagaagtcgtgctgcatgcccgtccatcccctccagctccttctctgagttggtccttatagtggctgctctgttcttagagggtctcctcagccagcctcccagcctcgctgcctctcaaatggaatgcagaggctagtttttgagccacagtgaacttggctgcagccttggccctaccttactagaagtgtgaccttgaacaagtcactcctgcttgggcctcagtttcctcatctgta

SEQ ID NO: 56653 - DNA, 1440 bp, Homo sapiens
ctgtttatctttcacctcccccgtgaggtgagctccccacaggcagaactggcccaacgtatatgtccctgctgagcccactagggacctggagtagagaaggctcaggagagttttgggaacagagctcctttccaaattgttggactcagctaccacccagcagccccacggtcggccttgctcccccagacctcccagggccttgtggtgctgggcctgactccagtctccccaggagaggccatctgtctggccgtttgtaggtgggagcctatgtgtcctgccctgggcttgggcccaagtggttcctggtgcagctccacctctcaacagtgaagaacaggcccaggactgcaggcaggaggcctgtcattgaggcctgtgtttatctgtgggccaaaggttcctattgcagggagttggggcacctggcctggctggtctgggaggctgccagggccaggaggctgatctcctacagcagcttgggtcccagggaggccagggcgggtctgggcgctcctggctaattgcactttgcctcctgtgctgctgtggtgctatgggtcccggaaggaggctcggggccctgcggagctcattactgcgccttccgtccctcgtccctgttgactgggctctgtttgttgtcacccctcactttctgggcctgttgccctgcagggcctccttgttttctccatggaagggcagtgggggggctgccgagcctgagctgcacccctgccctccccacctcacacttggggattctgagcctcagacacactgagcatcacatcctcgacacacacgcccccaacacacacgcccccacagcaagccacccttacccctcacaggattcgaagccagcctgacctggatttgattctggccgggtctcctgctagctgttttcgtcctcagtgtaaattgacctttccagtgcccagggtcgtggaggattaaaggggccggaggaaggcaaacccttgccttttgcgctctctgcacttgttactttccctccccagccccctcttagatggcccacctgtttctctgttctgtcagacatctcttggcctcctgccctgctcctacgggatccctgatgggggcattttagcttccccgacttgatggtacattccctgagggcagggcagtggacttcaggtgaccaggttttaggaacttgaaatcaggttgcgacagtttggctgaacatttgccattggtcctggcctggcctaagccaagatctgctgtgagctcacctctctggagcctggagcagccacaggggcagacctgatgcctgctctgagccacagagccgggcctgggcccaggaggagtcaggcagctcctggccaaaaaaaagcatggaagtgaccagagtcccagtcgaatgcctgggtgtctctagga

SEQ ID NO: 56654 - DNA, 3098 bp, Homo sapiens
ggcccagaggaggcggcctcctgcccaggtcacagagggcgtggaggggctggaagcaggtgtgggtgggccaggctcttggcctgtggacctttggccccatgacactggtccctgggatggaccggggagatgggccccacccacctgagaacccaggctcgggttgggctggcttctttcctggagaccaagtcaagccctgccttgggggtctcaccagtggttttgttttggaatgagccctgcttcaaaatccaaccccaccactctcctgggtcacacagcccctttcatgcccgcctcagagtagctgctgccccctggtttccctttcacacacccctcacagcatgcgcagaacccttccccagccccgcacccaacccccacccccggtctctcaggggtctctgcctccctgacaccccctccccaagcttgccttccagccactcctggagttgcccgagacagaggaatccagcctcccaccctcaggacagcagtagaagcctggctctatccccagagtgcaggaatggcaaatgacccattttccctggaaaccacagggaaagaaacctgcctttccctgagctctgtgcccagagaggcagctagtgtggtgagcgacctagccagccccgccctgccagctggatggccttgggcaacctctgagcttgttcctcatctgtgagttggggccagcaatggcacctctctcgaggctgttgtgagggtgaaatgggcgagtgtccaccaagtgctcgagcttcccggagcctgcacacagtcaccctccctccctgagtttgcccatggttactgccccatcaccatagacacacggtctcctctctcagttatccgtgggtgggggtacaggagaacctgtggagagctgaagtgagttgcctgaggcatcctaggccagtgccgatggcagcaggcgcagggcggaggggtgggcaggaacctggcctggctctgtggtccgagagagcggccatgggggagtgtgtcctcctccgtcaccatcgccacctcagagcggcccagcagagaccattagccttcacatgattgctggggagctggaggcccgggggaagggggactcccccaaggctgggggtccctgcccggtctcagccaccccatgaacaggacctgccgtggccactctgtggtgcatcgacaccctggtctccggtggagagcagcagggctctgctctcccaagaaggcagggggtgcccaccactttcctgccctcctgcagtcatggcatctgaaacggggagtttgagagtcttggaatcagaagctgagagctgaggaatctcagatactcaggaccagggacccactagttttgaggactcacaaaggcccgtggcttaccttacccagcttgggttatacaggaaacctccctgtagcccccattccacagccctggcggcgtggctcagaaacgctccgcactggccctctggggtcccaggcagaaatgtgaaaagctccctgcctgtgccccacatctgcacacaccacctccacacacgcacacacttgcaggcagatcctgagcagcttccctccctgggctgccgaccccctccttctccactctgtcgcacagctgggcagagagtcctgtctgccactacccggggaagatttaagagcagccacttgggtctaggtgggagtctccagggacaatccaggagccagggatgctgtggtgcacccatgggtgggacccggaggtttctgggcccattctgccgtgggtggccgttggtggatcacatcccagggggttatcagggaggcggcagatcctgccagtccttgccttgctgccaggtcagcccaagtcagtaaagcctcgtaagcatgcagtaggtgatggggagcttctcctttctcctcttgggaaggaggttgaccaggtcatctcagttccctcccagccctgaggttttcagactgttgtgtgaaggcacacatgtgtacaccaacacagatgacccctcatgtgtgcacagctctctacagtttatgaaagagctccaaggctgtctcctttagttctcataacagccctggaggtagtgtaggtagatgaggagactgagactcagaggtggccccgttgaaagtgaagtcactgccatgcaccgcagtgggtaatgtggtattaagtagtgtgtacaggtcaccagccggtcaaggctgccctgtgaccagtgtgggggattttcctcccaggaagactccagccagctttggagctgggccaggccctgtgctgggtgctggagatctgagaattagtcagacttggcccctgtccccaaggagctcctcccagtgggcagggaaaagagagccatgctggggtgccaggaaaggggctgcctgactgttgggggggtgctcagcagaaggtgcctcaaagctgctgctcagctggcccctaagagacaagggaaggaggcagagggagccacatgtgcgtgggggaggtggcttgaagtggcatgggtgtttggtggttgtggtagatgggacccgaaggagggagcgttggagggatgaggctgagagcgtggactgccgggccaggtggctggtgtccgtggtgatggggaatttctactgtagacagcgagagggtagcgagcacagcctgatggactcctcgcacccatcccttcactttgacacttgccagcctatggctagtcttatttcctctacacacccctgcactttgcccagacagcatctcatttcatctgtaaatatttccggatgcatctctgaaagataagggctcaaaaaaaaaaaaccataataccaacttataaaataatctcttaatatcatcaaatatccagtaattgttctaatttctaatttgtgctataaatatgcataggttttacggtttgtttgaatgagatccaaacagaagtccataattgcaattggttgattgctctttcatcttttattttttcctagtaaattatctatcaaagaaatggggccgtttgtcctgtagggtttcccatggt

SEQ ID NO: 56655 - DNA, 2256 bp, Homo sapiens
ctgccagtcgtgtgccatgggctctcctgtgctcccccggggtctcatttccccatccgtgtagggctgacgccactggccccgcccagcctgggaggatggagaggggggacttgaggagtggccagtactgggtttcggcagcaggtgcaaatcccaggtggggactgtgttccagggactcctggactcctgttaggccagcaggctaaggggcagacggcatcctggggtcttcctgggacagggtcgtcgggtctgaggggacccaggccctagcagaagctgactcctgtcacggtcacttcccagcggtgctcagcccgcctgacggaagcagctgggcagtggggcctgtgaccagcaggcggcgctggcgagctatagcgcccctttgggcccccaccccaccttctgggcagcttccctgcagacaccccagttatgggggctagggacccaaaagagacatccttctgccacccagagctgccctggcgaggtgcactatggggccgccgacagctgcgtggctgccgagggcggaaaggagaaactgtcatgtcccgatagggccgcgcgaggtctccatcctcgacaacgctaataacaaagacgtgtgctcctctttgcttggttccccccactcctttaaatcacagatttcacttcagtttatctgtgtcgctgtcacacgtggggtggctcccagtcagctggtttggcaaagtttctggatgattacggaataacatgtgtccccaacccgcagagcaggttgtgggggcaatgttgcattgaccagcgtcagagaacacacatcagaggcaagggtgggtgtgcaggagggagaaggcgcagaaggcagggctttagctcagcactctccctcctgccatgctctgcctgaccgttccctctctgagtcccaaacagccaggtagaggaggaagaaatggggctgagaccccagcacatcagtgattaagtcaggatcaggtgcggtttcctgctcaggtgctgagacagcaggcggtgtcctgcaaacaacaggaggcacctgaagctagcctggggggcccacgcccaggtgcggtgcattcagcagcacagccagagacagaccccaatgaccccgcctccctgtcggcagccagtgctctgcacagagccctgagcagcctctggacattagtcccagccccagcacggcccgtcccccacgctgatgtcaccgcacccagaccttggaggccccctccggctccgcctcctgggagaaggctctggagtgaggaggggagggcagcagtgctggctggacagctgctctgggcaggagagagagggagagacaagagacacacacagagagacggcgaggaagggaaagacccagagggacgcctagaacgagacttggagccagacagaggaagaggggacgtgtgtttgcagactggctgggcccgtgacccagcttcctgagtcctccgtgcaggtggcagctgtaccaggctggcaggtcactgagagtgggcagctgggccccaggtaaggatgggctgcccactgtcctgggcattgggaggggtttggatgtggaggagtcatggacttgagctacctctagagcctctgccccacagccacttgctcctgggactgggcttcctgccacccttgagggctcagccaccacagccactgaatgaaactgtcccgagcctgggaagatggatgtgtgtcccctggaggagggaagagccaaggagcatgttgtccatcgaatcttctctgagctggggctggggttagtggcatcctggggccaggggaatagacatgctgtggtggcagagagaagagtccgttctctctgtctcctttgctttctctctgacactctttatctccgtttttggataagtcacttccttcctctatgccccaaatatcccatctgtgaaatgggagtatgaagccccaacagccagggttgtagtggggaagaggtaaaatcaggtatagacatagaaatacaaatacagtctatgccccctgttgtcagttggaaaagaaattaacttgaaggtggtctagttctcatttttagaaatgaaatgtctgtctggtcattttaaaatgtggcccttaaatttcacgccctcaccactctcccccatcccttggagccccatgtctctagtgaaagcactggctctgcccccagccctcatggctcatgctggcata

SEQ ID NO: 56656 - DNA, 2000 bp, Homo sapiens
tgagccatgaaccataagtggaaattcactagtcaaaatttcaggtagaagggccagtgtgtgaaggccaggagatggcaagagctggcgtatttcaggaacagtgagtcactgaggatgtccaagtataagggtaggaaagggagtgagcagtgagagaaaagaccgaggcatcagcaggggccagattgtgctgggcctagcggggcgggcccgggcccgggcccaggcccaggtgcggtgcattcagcagcacagccagagacagaccccaatgaccctgcctccccgtcagcagccagtgctctgcacagagccatcctgagggcagtgggtgctcttgagaggtttcaggcagggtgtgctgtgagcaggtcatgcccagcccttgaccttctgctcagtcaggcttgtccttgtcacccacattcctggggcagtccctaagctgagtgccggagattaagtcctagtcctaaatttgctctggctagctgtgtgaccctgggcaagtcttggtccctctctgggcccctttgccgtaggtccctggtggggccagacttgctactttctaggagccctttgggaatctctgaatgacagtggctgagagaagaattcagctgctctgggcagtggtgctggtgacagtggctgaggctcaggtcacacaggctgggcagtggtcagagggagagaagccaaggagggttcccttgagggaggaggagctggggctttgggaggagcccaggtgaccccagccaggctcaaggcttccagggctggcctgcccagaagcatgacatggtctctctccctgcagaactgtgcctggcccagtgggcagcaggagctcctgacttgggaccatggtgattcttcagcaggtcagtgttcccacctctttgggtggcctgtcctccccaggccatatcccctcatccatatgcttacccgtgggacaccctccccagggtgttctcttggaaaattcctgcctaggcttccaaacccagccctccaggctgaggcctagtctgaaacctgttccctctgctgtgccagctggggtttccttctctcactggctcaccccactgggcagaaatgagtttatttacacacatctctggatcccaggcagtggaacagcatgtgcaaaggcccaggtgtgggaaggtccctggggaagaggagaggaggttggcaaggctcccaaagccaggccaggaagggccctgagcccaacttattcttagggccttggggagcagtgactggagggcggggggtgacaaggcttgagctggagccccctgggattttatgggaagaagcagaggtgctggcccgagctgagtcctccagccccccttcctactgagggccacagtggcctctgaccctcagcccttccccgtgatcagtctgaggctctaatgagctcctggcctccagagcaggagccaggaatgtgggccctgagccaggtgggcctggcagcaggccgtagggcttgtggggctgtgcattatgggggcttggccagcagcttctcggtctccagggtcaccagaggccaatggctcagccttgcctggccaccctgaggctgcacggaccagcatgtttgcatatgagtgcgtgcgcgtgtgtgtgtctgtgtgtgtgagtgagaggcaggcttcagggcagcatcaggacagacattcttctatcccaggggctggaggagaccccctttagagccccttggcctgagagcctgttcaaacgcccattagagatgggcaggatctaggagaggaaaagtccattcgctgagtgtttgctgtgtgccagggcctgggcccccatagccctccaggggcgtcctccctcagggggcctctgaggcaggcctctggctgatgggacctcctcaccaccccctcctctcctgcccctctgaacgctgacccacctccagctgtgggtggcctctgttgggagca

SEQ ID NO: 56657 - DNA, 1310 bp, Homo sapiens
ttatgccagatatagaattctttcttgacagtttttttattctttcatcattttaaatatgccatcctactgccctctggccgccgtggtttctgatgagaaatcagccgagactcatactaacgattcgttgtatagaatgagtcacctctctgttgctgctttcaagagtctctgtctttgccacttgtggagaagaggcctattcctccagctcaagggtggtctcagtagtcgttctggaaccaggcaaggtcaggttcttagcaccttgcagggtctcccccaggggacctctctttagccaccagccgccagacttactttacaatctcttccctctctcctctgattctctgagtttgctgttccctcttcctgggatgccctttcccctaatgtctgcctaaaaaaaaaatcttaaaacccagctgtcacccctaacacgactcccttagttaaccatggctggcactcatatacatttggtctaacaggcaccaatctaggtgcattacgcatcttaacctgttaaatcctcacgagcacgtggaagcagtgtcattttgtcacctgacggatgaggaaagaaaggaacatagaggttgaggaacttgcccaaggtaacacagcttgtgagtggctgagctgggattgaaactaagccatctgactccagggtccaaactcttagtggccatgctatcctatgtctccgggactgatctgcctcttatctggtggtaccatccttatctgtgcctgggtctgtccaccacaccaggctgggagctctgaggacatgtcttgttaacagtgtcctctgtactttagtctgaacctgtactcagtgaaggtcggttatatgaactcgtggtagaatgcctggaagctcaccaccagcacttccttgtgtctgaggtctgggtcctgtcccaatgtactgctatagatgggcggggagagataggtgtgcctgttttcggcttgactgggggaaggacctctcctgagagcggtgtccctgagaggtcacaggaagtgagtgggaatcactgatcagtcagcttcgtgctggacagcagagccctgggttcccaaggctgggacagggagtggggtagaactgggcccatcctgggtggctctgagccctgtgtgaggcatcaccgtctttttcgttgccattccccccacccagtcccccgcccccactctctgccgttgttcattcgttggggagcagttggcttccaggatactaggcaatgcagagagccacaaatgcagactggaggccttgaaaagag

SEQ ID NO: 56658 - DNA, 997 bp, Homo sapiens
tttgcatctgtggcattggacccccagggcttccagaccgctccttcacaagcctttcccacccccattccatcccctccctcccaactccaggctgtcatctcttacccctctgtctgcccacagactcctagcaacttgagagcagggaacaggccagtcccatctggttccccagagttcatcaaggggtctgcccagggaaggctcttggcaaagactcgctgagtgatgaatgaaaggttatggtttcagtccccactggaatcccagtgtcttgcctttgtccaagccatttctgttgccagatacacccctccttcccttcctctagggagcaagctgtccctgctcagtccaggccagctctttcccaaaggcatccctggtccctggaattgaccatgttcccttcccccagttgctggcatttcttcaggccaggcctcagctactgccctggttacactttggcccccggtaggtacctgtggaccttgacctgcagggtgctggcctctgttgggactcctcccacgcaggaaacagtgggagcggtgcagctactgggcaagtcattttacctcttgagtccggctcgtcactgttaaatggggtcagtgattctctgttagggatgttagagaagcaaatgtaaatcacaaggcagtagagtgacaatgcccagctctggatgagcatttaccaagcagcagcactctacagacctggcaggagaaagctgtcaacaaagatggatgtcgtgatcacatccatcagtcctcccaaaacccctgggaagaagggattcttactctcattcccatttcacagctgaggacatggaggctcaggagggcaaattgatgtgctcaggggtccggggtcaggccgtggctgagcactgtcaacctgtgtgctgaactgtcatggggagggatgtggggacctgaggctggggtcaagtggcgacagcagacagcctgcccaggagccc

SEQ ID NO: 56659 - DNA, 725 bp, Homo sapiens
aatgtctaccttcatgggcttatgtgacaggcctgtggggcaggcagggcaggcattattctacacattgtacggatgaggaagctgaggcacagaagttatgtgccttgcccaaggtcatatagctaggaagtcacagagctgggactcagcgtgccctcctgatcccaaacccacctgtaccctggctgcctctggacactgctcacccgcgccactactgctgtttcaggtctaactttctgaagctgaagaacgctgccacactgatccagaggcactggcggggtcacaactgtaggaagaactacgggctggtgagcctccccatgggctgctcttgcccaaacaggcctttgaacccagccttgctgccatggcagtgggactggcctgcacccaggcagcacagcctggcctcgttggcctcctgccactgccctggccagccactaccattcctccagaccgaagtctggatctggctcttgtggcttcttccaactggccagcaatgtttgttgctctccttctggagtgtttttgggggttgggagcactctgggattattagagatctcagacagggtgagagtggctgggtcacatggacctctgtgcagcagctgggcttaggacttgttggggctggatgggaagcagactggttggttgcagctcctgatctaggattctcttgggggccccaactcagggagagtcaa

SEQ ID NO: 56660 - DNA, 1402 bp, Homo sapiens
agatgcatgcaacagccttttactaaacccaaaggagactttggatatctattatctataatctattatagataggtagataatagatatctatatattatgtatctctaacctgttatctccctccctctgtccctccccaaggaagactttgtctctaaagcatttagaatcatataaaaaattaaccttaaatctaagacaaaggggatatggattaaattaagcatgtttaataatagttaagtttggaaaagttattttattcccaggtgcttttaattctgaaaatttgtctctaattgtatatttataaatacagtggttaataattttagtttcttctcatgctcagctatttttacattttttaaataatagttttgttatattcttaattatccgttccagaaatatggctatctggatcacaaagccatttacaaggtactgccatccatctggtaatggtaggaggaaataaacgttttgagttctgacttttcaacgtccaccttttatataagaacagaaatgccaagcatacaaaaaagtgtactgaatggtgaaagattagagtacacagcagaggctaaagtctatgttccagggacacagtcaacacttgataaatgtttgttggcacagggagggagggagggagggagggaggaaggggtaggaaaaagaaaggagattcaaaggagataaccacacacagaaattccgagatggaaaggggaagttaagaagtttaattagaatgtgtattttgtgtaagtaaggcaatatgtgccaagagaggtgtggtcaaacacttaccttaacccattagggaacaacttcttgtagtcaacatttattatactgatattgtttttagcaagggtttcaatggatactaaacggcccacatgctgaaaaccaggagccacggacctgacgtattgcctatcatgagctggcaaccaaaaaatctctaaggagaaacaagaagtccctcagtagataatcagctatccaggtacgaacagccccatagagaatggagggagctccattccagcacaggtagtattctacagagagtagagagagagagtctagtccttggtgaaagagtcaacatgggctagtattttctttgttttgttttgtttttgagatggagtctcgctctgtcgcccaggctggagtgcagtggcacaatcttggctcactgtaagctccgccacccgggttcataccattctcctgcctcagcctcccaagtagctgggactacaggcgcccgctaccacacccggctaattttttgtatttttattgtattttgtatttttagtagagatggtgttccaccgtattagccaggatggtctcgatctcctgacctcatgat

SEQ ID NO: 56661 - DNA, 1372 bp, Homo sapiens
ggaataatcacctcttctaaactttctagagtggcttttctagagaaagattttcacctgcagttgggtcttagtgcactagttgagaagggtgtggtgactttgttcctgggtaggtgcagtggtatagtctctgtgcagcttctttggctgcattcagcgtcagcaaaaactgtgggcatctcagtggcttaggggtgtggaaatttgttgtcgcaacagcagaggtgtatgttgttaatgtccttggtccacaaatgcttttggtgttctccaattcttgttttccctacaatgaggagacttcactgaggggatccctcttggtgtcaggtctgacacggcctacaatcaactgccatggtgctggattccaggtgcaaatgtttacattggcagagtcctaggatcagagtctcacaaacctatttgccctctctgtgaacctttcactctctgtggcagagttggacataggttgcccacaccatcagactccaaccccttagcagcttgagtccaggaagttaggctgtagctgtgactccactcttgctaggcagggaacagccctggactgactctaaggaagaaggtatgttctggaggtttgagcctagggcacagggtatggctataatttgggagcttgagccaacagggctcagtggcagcttgggtgccttgggatgaggcaccatgtagtggcaacactagactctaagatggtaggattcagcagtatctcagactctgtgaggccaagtgcagcagccaagtaccccagtatggctgttgtttgggtcctggggggcaagaagcagcaccatgtgactccattccttagggatggcactatctcagcagcttagactctagggagctagtccagctccagggaagcagggtactacaattgtttggcctgtagggtcgggtatctctcctcagacactggtttgtttccctgggatgaagggtactatgttagctcagccatggaacgtgcagttgctcagctcagccaaaacattgattctccaagggttgatgtgccactctactcaggccttgggggcctgactgttctgagcagcccaggcaccatttccctgccacacagggctctgacaaagtactttttccttgagagggcagtgcacagtttcaactcaggaccccagtggcagggcatagccaagtctgaaagaggtagatggagctgttctgccaaagcaccgtatccccaggaaagggcacacagctccatctctagcccaagggtacagggggaggggtaggtgaaacagttctatctgctgcttggctccacagagaaaggtgtaacagttgcttggcctggggatgttag

SEQ ID NO: 56662 - DNA, 797 bp, Homo sapiens
agggtaatatgatatgaaatggaatgaaactgaaactgtctatttagagagatagagtagggttagaagagatgatgctgaagaggtaggtgaggtcaaattattaagttccctgaataactaatttacatattatcctataaacaatggagacacactgatggcttttgggaagaacagtgacaggatcagaaaaattactccaggcagaataatgaataaataagagggcacaaagactggttgccacgacactagttaataggttactaaaagtcaagggaagagatgattacagtctaaatcagagcagaaaggatagagaaataaaaataaactggtaaaaaaaactacagagataaaactaacaaggcttgataatccattggactgatagcaagagcttattcattctgcaaatatttacaagcctcactgtgttccaagcattgtactaagtgatgaggtacaatggtgaccaaaagacatgacctttgactccatggagttgaaagtctagacataaccaagagtcaaataaatacagaatcacaaatcattataaatgccatcgcagaaaataacaaagtgctgtaagaggaaaacagaggggctcttcttcttcttttttttttttttttttttgagacggagtctcgctctttcacccaggccggactgcagtggcgcgatctcagctcactgcaagctccgcctcccgggttcacgccattctcctgcctgagccacccccgcgagcagctgggactacaggcgcccgccaccgcgcctggcta

SEQ ID NO: 56663 - DNA, 2356 bp, Homo sapiens
ccaaggacgttgctcacaacgccacacccactacttctcaagtattcttccaaaacactcccagtaatgtgtactgctgaaataggatagcgaaggctacaacaatcatgtcttttcaaacgtaataatgaacataaaataactataaatctccttccccggttgtttttcacttcccaagttacagaatattccggggtgggggaggggctgcgtaagtcaagtcctaccagcccttatttttcagggagtagaaccctaaaggtgactgtccaagcctggaaggggtcatttattccatgcagaaggaactgggcgccgctttgctgtgcctcctcgtagcgggacagggtgagcgccgcaggactgcgaagttcgggacggactcggtcccggaccggtactcgtgtggcctcccggctccagcctggcctggccccgccccgccccttccctctcccaggtctctcgaatcgcccggcgtctgagacccgcgaccccgccggtacgcgcacagggggcctttgttggcccgacgggagcgggcctcgcggggcgccgcccgcctcaccttacctggcgcctcctcccgcccaggcgcccggccccgcaacgcgaaataaatgggcccagacccccactccacccgtccccacccccgcgccccagccctggcagcccgggacgcgaggggtactgggcggtaggcccgctctcaccttccgcgctcgctcagctcctctcggctcctcctcctcctcccggcggtgggtgccgcctagccgggagtgagggcgcgagtgtgcgcgagctaccgcttcactttctccctcctgccgccgccgccgcgctgcccgtggcggggctcccctcaggacaggggaactgcgagggaagggatgatgggggggcgggagggagcgaggcgacgcgggcggggggggaaggggggactgaggggcgaggtgcgaagggctcagatggcctctgaggcaggaggtggtaactggatgcggagaccaggttcctcgagggggctcacgaaagcgcggggctccgtggaaaagggaatgagagtccaagggggaaggcgtctgtgggggaggactgcagagcctgtgagggaagcgcgatgggcgagcgagggggcgggagcgtgtgggggaagccgtgagggggcgtctactgtgcagccaccaccttcggctccggctgcagccgcgggagggcagcctcccccgcccacagccgcgctattgtacgccgcccggcaggcctgaccgcctagttcactggctcccctactcctcctcctcccgcctcctcctcccctctgccctttccccttctccccctccccctcccccactccccctccccggcgcggcggcggcggctgcggctccggtggagccgtgcccgccccgcctcccgcaggtgagagggggcggggagggcctgaccgacccgtgggagcgaggccaaaccctggcccgcatgagggcgaacgcctgggattacgtcatcggcgcgtgacgccagaggctggggaatcacccgcttgctgcgtgacgtcatcgcgtcgcgtcactgttctcggtccgctgtccgtggcgggttgtttccgtgcagcctttctatcagacaattttgggacgatttctgggagggctactgtagtagtcaggatggagaaagacggctaacttccggcgctgagggtccttttcaggttaacaaagcaccaccgcatctatgagctcgttgtcaagggctgaatttgaaaactatccgatgtcgtgtgatctcacagccagacatgtattatgttttctttctgtgggagagggggcaggggtgggaggaagacaaagaaattataacggagatgtttgaactaatgtgaactgacatacgaaaagaatgggcttcctttcacgttttttcccctaccgtggagggtactttcgacccaaagctttctttctcctgagctcagattgtgtatttcccaatacctcccgagcagcattacctgcatactcttcgtacctcagattcaacatgtgcgaaactgagacagcattagaaaggctaagagtccggaatcaggttgccttgcttgaaatcctagctattcaaatattagtgataggaccttgacatttctaagccgtaatttttctgtaataataagtagtaccttaactaggtcttcctaagcctcagttttaccatggtaatagtaacaagccctttagaatgttggctattattattatttcccccccaaaattgcttcttacgttcctttccgttctcaatgaatgggccacccattcaacaatcccctaag

SEQ ID NO: 56664 - DNA, 2424 bp, Homo sapiens
tagctgggactacatgtaggcgcccacaaccgcgcctggctaattttttttttgtattttcagtagagatggggtttcactgtggtctcgatctcctgacctcatgatccgcccgcctcggcctcccaaagtggattacaggtgtgagccactgtgcccagcaagtaggcattttaaatgacatccatgtgagtctgaggcagtggtctgtggctccttttgaaaaacactgctgtaggggaacagataagcctaagaataagtttactagaacagggatgccctaacagagtttcttaatcttggcactaatagcatttgggaccaaatcaattctttgtcctgggtgctgtcctgtgcactgcaggatgtttcataggatccctggcctctgcttgctagatgccagtagcaatgcccgctcccacctgctgtgacaatcaaaactgtctacagacaatgccaaatgccccaaggggtggtggggtggaggggggtgcaaacttgctgccaccaccttccacagaaaactatttccctggagtgtgcaaggccctgggccagtgtgtgtgggtgtgtgtacgggtggggggaatgttaatattaacaatatgttttaaaatgtattgcaaaactcatgagctcatgtgagctatggtgatttactgatgaagatttagaatgagtatagaagaggtattcaggtatttgttgtcaagtcagtgcgcatgaagattctttgtagtgtccaggtgccgtgtctttctgttctggtttgagaaccacctttttatgttctttattttcaaatgcaccattccttgctggtttcatggctcctactcctgaagaaggtagcaatgctgttattactcacaatgccatgactgcttggaacctgtttgtattgaagcaatatagaccttttggcttctgctgatcctcaaaacctttaactcatgacactgaatcatccaccataagcacgtggctccagtggctctgttataaagattgttatcatgcttcattgatgactaacacaaatgcacgtcttatccagagtctgaatggaaatgataactacttttctggtaatgttaaattatcatttcagatttttttttttttttgagacagagtttcactcttgttgcccaggctggagtgcgatggtgcgatctcggctcactgcaacctctgcctcccaggttcaagcaattctcctgcctcaacctcccgagtagctgggattacaggcatgcaccaccacgcctggctaattttgtatttttagtagagacaaggtttctccatgttggtcaggcttgtctcgaactcctgacctcaggtgatccccccgcctgggcctcccaaagttctgggattacaggcatgagccaccatgcccagcctatcatttcagattttatggcacaaccacatgactcaccttccaactatgtcttctcttgaactcattagggtgttatcattgcatttccttgaatgtaatcttcctcagtatcagtggaacccttccctttcatcagcaggcagaatagatgagtggcccatctgcacaagagtgctctggataggaggtgtcacagtgtacacaggcaagagtcagtggacaggcccacacatgcagcccaagccaaaaggtcagtagtagagaaggagcagaaattccaagatatgtgagggggaagatcaacaaagtgctaaggtatagcagctcagtgtctgcttgtgacagtcaaccgaaatctgcatcggcaccatcctaatggtccaacttcacatgagccagtaaaataatattgtgctagccagcaggagtgatctgccccacaggctgtccttttggaaatgtggcctggccactgggctctgagaccattccataggcacacgttctacagctcctcaggacatctgtttgaccccatgcactaggaagaaggttagagagcacttgaaggggagaaactgagtttagagcaccccacctggagaacactactagccccagcctgtcccagtcaaaagagagaaacttaaaatttcaaggtgggtactccacagcgggatggagggtgacagggccctgtctgcccagggccaagggtggtagtactgcactagagcaatggtgagtaagtcagtagcttcttaaagtgttctttcatgggagggcaaggttcacttggtggagcattgggacttcagtactggattattcctgggatgttaattattaatgttatatatgttagctggtggtaaaacatgtaagataaagctagagaaattatttttttaatttttaatttttatgggtacatagtaagtgtatacatttatggagtgtatgggatattttgatacaggcatacaatgtgtagtaaccacatcagg

SEQ ID NO: 56665 - DNA, 2519 bp, Homo sapiens
ctcccaaagtgctgggattataggcgtgagccaccgcgcccagccgcgcccggtttttgttgttgtttttgtttctaaaaacagcgtctcgctctgtggcccaggcaggggtgcagtggcgcgatctcagctcactgcagcctggaactcctggggtcaagcggtcttcccacctaagcctctccgtgctgggactccggacgcgctccacctcacgcagccgtattcctgctttcaaagcagatggaagaggtgcgccaggacccccagttcttggaaacagacctctccagttacctgttgtttcctcttcacgaagagtgcatgtaacagtaagacacaactgtttcatattatacgtaaagagttcatgccaaaggttatagacagtcacatgctaaaactaggctacactttgaagaatcaccgctcaagttctggaaaaaagaggtgactgttgaacaacactgtgagggtaatcgatgccactgaaatatacacttaaattgattaaagtggcgaattttatctggcatatattaccaccatttttagaaatgttttttggcaggtgaagaaaagcaaggctccaggaggccctgcgcaccggtctacgcccactaactcacccgccccctgcgccgcgtctcccctctcaatttcagtcgcccattgataaaaacgaggtggctatgtgagatggccttcagcggtctttccagctccacggttttacagtgtggagcggggaaagaaaaactctaaggtcctcgctgcaaagcaaccatcagagctccgccgcgccgtgccgctcctctccgccccgtggtccgggtgtcaccgcccgcaggggcgcaagggccgcagcacgcgtgcgcagtgggcaccaagagcgctgcgtcgaccgcgccgcgccggccctccgccgccgcgcccgcctacaaggccctgagggagactgcggagggtgagtgcgcggtgggctcggctgaccgttggccctgcggccggcgccctaggctacctcccttcgcctccccgcgcctccccgcgcctccccgcctccccgcctccccgcctcctcggctctggttccaacaccccagcgccaagccggggaggcggggaggacttcttaagtgtgccgctcgggagcctcccgctcgtcccgccccgaggggcgtgaggaggggaggggctgcggacttcggactcgggcctggagaccgcctcctacccagagccggagcccgcaacccgctcaggcggcgacggagccatgtcgccgctgctggggctccggtccgagctgcaggacacctgcacctcgctgggactgatgctgtcggtggtgctgctcatggggctggcccgcgtagtcgcccggcagcagctgcacaggccggtggcccacgccttcgtcctggagtttctagccaccttccagctctgctgctgcacccacgagctgcaactgctgagcgaacagcaccccgcgcaccccacctggacgctgacgctcgtctacttcttctcgcttgtgcatggcctgactctggtgggcacgtccagcaacccgtgcggcgtgatgatgcagatgatgctggggggcatgtcccccgagacgggtgcggtgaggctattggctcagctggttagtgccctgtgcagcaggtactgcacaagcgccttgtggagcttgggtctgacccagtatcacgtcagcgagaggagcttcgcttgcaagaatcccatccgagtcgacttgctcaaagcggtcatcacagaggccgtctgctcctttctcttccacagcgctctgctgcacttccaggaagtccgaaccaagcttcgtatccacctgctggctgcactcatcacctttttggtctatgcaggtttgtcattctcaccaaatacttggcacttccagagcctctatgacatgaggctgtaagttctttactaaaatacatttgaaaccgtctatcccgctatgatgtaaatgctggtatccccgttattctaaccattttgcagcccgttcttaaccagtagggccgacacgtagagccttcatgcagtgctgctttgaacacccagagaaaggagccacctctgtgctgaaactgagatactgtgagatattgccaagggttcagatatcctacaaagggattgttttaatggtagaaaggaaagataacttattaactgcctctttcttcatgccaaggtggtatagatcgtttcggatactcttactgaaaaatgatcctggctttacaaagttcctttcgatttaaagcacaaggcacatgattggttagtataagagcggagggtagaaattttgtagttccattttagtcctataaatgatttaaagtcatttcttatttccttaataattcattttgagttatgaaatttcttatttccttaataattcattttgagttatacatgaacttttaagtgacctattaagaaaaatgtttaaatgataacttgcttca

SEQ ID NO: 56666 - DNA, 2599 bp, Homo sapiens
taagcatgctgcggtgcacaggacagctcacaacaaagaattatccagtaagacattaaagccaatgccatgtttttagtttttgttaacacagaacccacacctgacatggatttctgtatcagttaactattgctgtgtaacacaccattcaaaacttttttttttttttttttttttgagacaggatctcactctgtcacccaggctggagagcggtggcacaatctcgactcactgcagcctcaacctctgcaggctcagtttattctcctgccttagcctcccaagtagctgggaccacaggcatgtggcaccacaaccagctaatttttgtatttcttatagaaacggggttttgctatgttgcctgagctcattacaaactcctgggctcaagtgatccacccgcttcagccttccaaggtgttaggattacaggcatgagccaccatgcctggccccaaaactgagaataacttatttttcatgattctgtgggttatagatgggcagttcctctgagatctctcatatagctgcattcagctgaccagtggtgaggctggaaagcccaaggtagcctcactcatatgtctggcagttgtcagctgtcatctaagatgcctcagttctcttccgtgtggcctttcatcctccagcaacctagaccagcaaacttacatggtcagggcattcttccaagagagcaaaaagtggaagctgatgggtttattgagatgtgaacctagaattcacacagcatcactcctgttacattcagaattcccatagccctactctgctgcattctatcaacacaagttgcaaagccagctcatttttaagagagggaaagtagacaacgtcttgctgggagaagcagctaccactaagtcacactgatcagaactgctgtgtgaggatgagaagattaggaagtgaagtcgtttgagttttaggatggcataagactgatcagtggtgttcatcttagatctagtggaaaatcttcagtataccatggccttgaatactgaagtaaactaagtgagggtaatgattcagtccatttttatcaatacatgcctaaaagtcacaggtcatttatatcatcataggtcatattacattatattgtaaatgtctgtgtgagtctttatctttctgcccatggtatctagtacacaggaactcaataagtttttgtgtaatcaaactgaaatgactagctgccaaccagacaattctgttcacccttagcagtggcaggtttaacattccaggatttgactgttcaagaatgattccaaaggtctatgatatcatttataattgctgagtcatgaatgtgaatcatgctgtgaggctggtacactagaaaaaactcttagctattgagtgagcttagttcattgctaaatatcttcatctcaacacagcttcattgttctcggcctattcaagtgtgaaatctcagtagtgaaatcttatgaaagggccacttaatttccatgaaaacaggctacaatggtgcatgtcaataataaaacttctgaagatctcaggatctatctctgtggctaagtaaaagaggcagagttgtgtgcctaagcttccacttggaaaaactgctgaaaatgtcactgtctgagggatgctcttaggctggactttgaaaagcgaagacacagctctgtggagtactgctggacaggcatccagcctcctcttccattccgcacttgtgtggccagactatagactcctagccccatgccagagaaataccctgggtgcagagctggaacacaaatcctaaaaagtagccaacagttataatttgtgcttatctctcatgactactcacagtcccttcttaagggctctgttgacaagtaaaaatagaaccaatgataaagctttggtctattggtccattttaccttttcaatacaaagttatgcttgtactcaagaggatcttgggtcattgtatctatttaactgtattttcattttacttttattattattcattcatttaaattgacaaatgttcagggcagccaaatctattttataaaacggtaggaataataatagagcacattaactttcagtgtccattttatagtctataggaaaagcactgggttcaaactttaatgtcctctgtctttttttttatagtaagtggcatattatgatttatgattatagtctaaaatatgccaggtgattctgcaaaggaagatcacagactaagaatacctaaaataaaagtcacatttagtaaccatttatttccagttacaaggaaatggaagataaatcatttgaaatcactctgcttaaaatctgttacaggaggaagtctaacaggagctgtatttaatccagctttggcactttcgctacatttcatgtgttttgatgaagcattccctcagttttttatagtatactggctggctccttctttaggtaagcgtatttttatttaatatgtctgaaagattagggtattttaaaatatgatatgtgtatatcattgtaacatgtcaatttccaaagccacagcaggcacaaaacagaaa

SEQ ID NO: 56667 - DNA, 748 bp, Homo sapiens
gctagctaattttctgataatacttcatccatctggagctgtaccacttagcagaaaaaaagtaaaaaatcctgaagaagtcaaaaaaaaaatgttaatgcaatatagtggttgcctagggctagaaggaaatagggaatgtctgctactgggtaccaggttctttttggggtgaagaaaatattctaaaatggtggtgataattgcacaattctgtaaacagactaaaaactagtgaattgtatgtttaaatggttaaactgtatgctatatgaattatttttaaaagttaatgaagtaagacccctgtatcattctatattctatacaattttaacaagcctggctgtctaatttctaaccaagcaaaaacaaaagtaaaacaggagaacctaggactgccttgggcaggaacaatgacagtgtgacagtctgagatcactcatgttcagtggaaggggaggatgaactttccacctcagttcccctaaatgaaatcaatgtctaaccacatgaccctcagttaccgaaagcattaccaaaaacaaaggcagattattagattgtggtgataactgtacaactctgtaaatatactaaaacttacgtaattgtatacttttttttttttttttagacagagtctcggtctgtcgcccaggctggagtgcagtggcggatctcggctcgctgcaagctccgcctctcgggttcacgccattctcttgcctcagcctccccagtagct

SEQ ID NO: 56668 - DNA, 1811 bp, Homo sapiens
acatatctgaagggcaggaaagattcgatgtgtcattacaggcttcaaaataaagaaaactgcatgtcaaggaaacagggacctctgttctacaaccacaatatttacggtagatctatctgactgtcaaaataccaaagtgctccacgtggccaaataaaagggcaattccttccaggaccccaaaacgggagtctggtccctctgcatatgacccctgtctgtgtcgagttaagggtgttcctctccttactatacctacagaagaaaatctttattgtgtaaccaaactttaaaagtcctccacagtcggctctgaaactacgtatcccagagaggggaacatctcctgcatctgttcatccggaaagacaggcacacttcagacccttaaaaccagaccgtgcgttaagggcaacgcacgcgccagacctccagtaaataggcgagttaaaaaaaaaaaaaaaagaaaataaaagaaagaaagaaagaaaagaagaagaaagaaagagagaaagagacagagaaagagaaagaggaaaaaaagaaaaaaaaaaaaaaaaagcacaatccataaggggaaattccggccggagaaaacagagaatggaagactccggaggagtactagaaaaatcgagccttccacccgctacaggtatccctgaggcgtcgggcacgagaccccgctcccagcaggcctccaggccgccccttgcccggctccttcgcaccgcctgctccagcaaggaggagggcggcgcgcaggaggccagcgctggggaccaggaaccctacctctcagcgatgtaaagggtaccagtgccgaggcccttcccgttcagcacagcctcagtgtctggctgctgccgcaggagcccctccgctggcccaggcggcgggaaacttttgaggaagctcatagcagcagagtgcggcaacacaggccctgagggagttggagcacagcaatgcgtgcaccacaccgcccgccctggaagaggcagtcaccccggaagaacaacttagtctgccccggaatctgaacgccgtcgaccatagagatgagacattctaggaaaagcggcggaggtcggctaagaacgtgtggagtttgaccgcgcaacacccttccccttcttcctcgccatttctgaggctttgggcttcaataactgagggttctgtgggaagtccctcaggattgtcacagtgaaaccaccactgcaaaattataactgagacactgaaagcgatctgacctacccaaatccatgttgtttctaacctccaaactgtccttgttcattgctggatataggctgaactaactttgggaggaacttagtttacagtttgaagtttaaaacaaagatgatgacagccttttcccaaaacaaacttccttcttgcctggggactggactgcctttgtaggactaacaaatcagccacaagattagaaattatggtttagattagaaattacagctgcaagctacaagattctgaccctccctaaactgcacctaagatcggtgcttgagatatgttgcagaccctgcacttgatggatcagctggcaccaccagatggataaactggctatgtgatcttgtgccccctccccaccaacccaggaactgactcagcgcaagaggacagcttcaactccctgtgacttcatctcccacccaaccaatcagcactcttgactcactggccttccccaacctgccaaattatccttaaaaacttggatccctggctgggcgcggtggctcacgcctgtaatcccagcactttgggag

SEQ ID NO: 56669 - DNA, 2538 bp, Homo sapiens
ctggaggcagcaggcgcagcgctgagatgctccagcaaaagaaccagcagcagcagcaggaagtttcaatggggccgggcagagcatgcgccctgcacccgcgcggtggccttatgtggaaggagcaccacttgcgaacaccaataatagaccagcggcaccagagagagaaacatgagcaacaagcaccttcttcaactgtttccccctccgtcagagcccctcctccagcttacatactaaccaccccaccctaccgtgcaaatgggagggagacgacttcttcgcctaagcccggctgccaagatgaagggggaagggattggaaaagtggggagatgctcgcctattattttgggggaggtggggagaggaaggagaactatggaggaggaattaaccctctcctctccacagtggagctgaaccgacttcgcccccctaccgagaatggagaagaaccccctcccgtgggggaggagcagacctccccacttcaaggaaggagttttaggggttaaagcagccctcgaggggaagggaaaagggacaaatctctcaggggagttcccaacagagggagggagagttgagtgtccgctggcccccgcccacccaggtgaagggagataaggaggtgtccggagcagccgagcccagccttccccgagatggtcgggaagactggtgggaggaggggagggagtaagggtggggaggaggagaaaagcgcaaagctggccggaacctgcgctccccttcccccgccgccaagggggagacggggtggggggccgccctccgccgcggagaagcagtccccggggctgccgaccggcacaatgacccctccccgcctccagcccacacctagcccgcaacgcctccacctcagctccccgcccggccgagtggccctagggggcctccgccccgcctccccactgcccaagaccccgggggctgggcggagaagaccagcccggcggagttgcgtcccagggggaagacagagccgcggaggcccgagccgcgaagaaccggggcgcctgtgaagagcggagagtagcagagcgccagggccgcttcccgccgggcgttcgggcccctcgcttaccttctccgttgccgacgtccggcggcggcgcctgcagcacccgctccagctcagggaacggcaactcaggcaggtctagcagcggcccgtagcgctccaagaaggagcagactacggcgaagttggggcacgaacccgggcagcccggaggagccatcaccgccgccgctgccgccgccgtcgccattttgaactggaggatggaggaggaggcgatgggggggcgggggaagttgtggtgccgagggatggcaaggcaaccttacagacgacaggaggcgctctcaagtgggctcctctgcggatcccagcgtctcagggacggctccgcgatcccacaatacatcggcggcccggagcagtcgagaaccgagtcagacgggagacagagcggccctcggcgcctttcactttccgccctctttccgcccccttctctcctccccttcgggcttgccactgcctcgtgtgacagggggaatgaaaacaagggaagcggggcggggaggcgggctggaagcgggaggggcgggacttctcgagaacaatggccaatggacgcagagggggcggggcctcgggcgctgttcaactgcagggcgtattcccggagggcagttggggagcgcagatcccgaagcagcgctgggagcgtaagtgcgggcagagcactgcgccgtttgggaacgcaactttgaggagacagtgcggtgggtgagtttgcgggggaatcctgaaactgggccacgagatggtggagaggttgaggagaattaataaacagaaaaagggaatagggcgggggaaagcacagttgtgggagaaggttgggaaggggaaaggtagaggtgtgcccttaattaggggctgggctgggacctcggtaagatgtctctgtggaagtttgccgacggggtattgctctctgctggggtacaggaatcgcagctttgctggaaaagcaggatctgagggaacggaactctgggggaatcgtcggagtgaggagttggggccctgctgggagaagaggatctgaggagaccaggctctgctagggggccatggtgtgaggggaaggggctctgttcagggaccagaatcggagtgtgggctgggactccattgagaggcggaacatgacaggagacggtggagcagcgaaaagtttgttagaagacagggttccacttcggggcggggcgggggcagtgaacattcccacaaagaacgccagagagaaactaccaataatgtaaaatagaatgtgcagcctgagaagcagcagtacacgttatgcttagaagcctgagctttggattcagccaggcctgagtcctagcggggctacttcatgacactgtggaggtttctttatttctttgaactccttagagtggggtgataatagtacctacatc

SEQ ID NO: 56670 - DNA, 1053 bp, Homo sapiens
cctaataatttttttaaaatcctgtcagacttcacatattaatgacaacagcggctgcaaactaacacgcccactaacttgcaatatcagagattatcaacaagtcagcacttaacacgggcgtatggagcctcttctgttccggcaaagtgcctgggatttggataatctaccctggtccggatcggttctggatctttcccgccagagcttacctgaaccactttcgtgaattcctcataaacccgcttcttaaggtgcgccgccatgcctacccgcgggccctctcagcttccgtacactaggagggaggcgggggtggacggatccggaaaacttgcgtaggcgcggggggtgggtggatgacttgccgagatcccacaaggcagtgggatttggggaaagagcgaccgcttcctgttgctcgactgcctcgccactgtacggactgatttggcggcctacgccggaagaacggaaataagagcttcgcttgtgggaggcggggcctctggcgggaggagctgagactgaaagggtgggcaacccaatgggagctttgggaggctggttggtggcctcggagtggctaagagactagcgcggcgcggcgcgaagggagggagggaggaagtacaggttaaagggcagaggcggggtgctccagagctagaggcaaaacccggagctctgtaaggggtttacgactcgtgaaaaaactcagaggctcggctgactttcccatcatcctttgctgtacacgatgctgtttgtaggtttcctgagcactgcctttgttcaagctgtgcgccacctctcttgttttggggtgcctttccatacttccttattccagttttgcaaaagctgccatcctttaaggcatcaatccctgctctgatagctatagtacagtagaagacttctgagaccaaggataaagcaacaaagctacagactacagctctggttcttgagcaaatggctcaactacaaatgcatttataataactaacctgacaaagatgtgacaatggagtgaaataatgcagg

SEQ ID NO: 56671 - DNA, 2140 bp, Homo sapiens
ctccccgctcactggctccccagcccaagtgcgtaggccccagctggttaccccaagtgaacagcttctccaccatctcacacagcccagacacctggacccaagagagggggtgacctgcatacctaatgggtggtggcagcagaactccccacagcaaacacagcaggggtgtcagagagggatcctggggacaagcaacagaggccaatgtcaccccctgaaacagaaagagaatttcttagaagactatcagtgttcacaaaggacgaggaccaggagttcagagggcccaggccaggagcctgactggagccacactgcagaactggatggctactgctgctgtggtcacggtcaggcccggatgtaccaggggctgccagcaaaagaatcccatctcttgcaagggattccatagcgggagcaagggccaggaattggcgccctgcctaaaactcatgggaatttccccagaagggagaatatggggctaggagggaaggagtagagtctggactttagattacaaaaaaaaaaaaaaaaacacaaaaaaacaggtgtctctgaccacagggttgggctgaactgaatttcaagaggaccttgaactgggacagggttggtgccacccctactacatatatatccactaacaaaacttgaatcatgccatttaaaatatttatttaaccaggccaggtgcggcagttcatgcctgtaatcccagcactttgagaggccgaggcaggcagaccgcttgagcccaggagttcaagaccagcctggaaaatgtggagagatcccatctctacaaaaaatacaaaaaaaataaataaaattagccaggtgtggtggtgtgctcctgtaatcccagctactcaggaggctgaggcgggaggattgcttgagccccagtagttgaggctgcagtgagccatgatctcaccactgtactccagcttgggtgacagagcaagactctgtctcaaaaagaaaaaaaaaaagaaaagatttatttaaacatgtatgagcctggggcaacatggtgaaactttgtctctacaaaagaaaaaaaaatagctaggcatgttgatatgtgtctgtagccccagttaatcaggagactgaggtgggaggatcacttgagcccaggtggttgaggctgcagtgagccagtctgggagacagagtgagaccctgtctcaaaaaaaaaaaaaaagtgtactcattttttccacctggtatcgtgacgatttcccccatatgaagggctcttctgtaccactttttaaaatggcgacagagcattgtgttgtatgaatgtatcataaatctactaagccacattttacttctttcttctctccttccttctgtattttttctctctttctctactataatagtgctgcagtgagcatccttgatagctaaggcactgtgcaaggagtaggcacttttttgagctcttattcagtgtttccaaattactaagaaagctgtgcccaccatccaggcacacagagtgtggctgccctgtttatgtttttgccccatgttcagagtctgacctccaacagacttccggggctgcaggcaagggctgaaaccagagctggccgctggccaggagctgagaaccaagccaaggctgcccccgtttcccgtgtcatgtcttcctggaatctgaagtacgggcattttttctggctgattcaaagtaccctcagaaactcacttcctgctccatgttctttttcctttctcctgtcttctccttctctcttccttgtctcttttctttctttctttcttctttttttcctttctgtttcctctttctccctccacttcttcctgtgtctcttctctctttaactctgctcctctttctctctggctcttttctctttgtgtgtctctctgctgttttcttcctcttttgccttctttctgcaccttttaattttctccgcctggaatccagcctcatttctgtgtcttttctctgtctcttcggtggctgtctgtcctccatccaccactcctgttctgtgagtcatcccttccccagggagagaaggcaaccaacattctccttgctaggccttgattttttattttattttattatttt

SEQ ID NO: 56672 - DNA, 1053 bp, Homo sapiens
ggcctaaacccaggagtgaccaaaggcagtttggaggttaaaggcaagatgagggttggttagatcagatgtcttttgcggccctaattttctcactgttatagttttttcaaaggcagtttcataagcagccctgggggagacagcccctctttataagggtactactgaggagagatgtgagggttttcataacgcccgtcaaagtgctcccaaaagcccagagtactcaggtcctcctcagacgttgctgcccctaccgcttctcccccaccccacccaggaagagtccgaggcagcctgtgtaggggcaggaggagcagaagagctgggtgaggacgcagggaggctgccggtcctctccccagtcagcaggtgtcccagttagaggcagcctcaggaggggagcgtttgccagaataatggcctgcacttagacacaagctggaattacctgacagtaaaccggggaggactccgagaaaagcgagtgatctgccgagatttcccccagaaacagcaaaaaaggagtccacagaatcagttcgcaagggcaggagcaggaaagaaagagatcggctcagtgcttttccctgctaagtcaagcccctttagtaaaccagctacagaacatcgacgctgtctatgtggtgagggtgtcttggaaagatgagaggatttgacaattgtgagccggaaagctcgcgtgttggcgggaggccagggtccccgccactccaggcctgggcctgcccggcagcgccctctgctggccggagccgcgacggcgggggccccgcctgaaccggagccctgagcctggggctgggagtccaaccttcccagagtttgcagttctttggggacaggcatacatgcatggattgagccacccacgataagaggcgcaccttgcaatgagaggagagcctatcctaaaggggaagggggctgatctggcgaaaatgtcagcgcgggggctgaggctggacttaagggggcgaggttaggaagaggtgagcaaagatttggaagttatggtggagtttggga

SEQ ID NO: 56673 - DNA, 958 bp, Homo sapiens
agtgagccgagatcacgccactgcactccagcctgggcgacagagtgagactctgtctcaaaaaaaaaaaaaaaatagccacatgtggtggtgggtaccataattgcagctagtcgggaggctggggcagagaatcacgtgaacccaggaggctgcagtgagccaagatcacaccactgcactgcagcctaggtgacacagcaagactctgtctcaaaaaaaaaaaaaaaaaaaaccacacacacacatgcagaataacacggaaaggcacaaggacgctgcactcaggagtttcccaaagtctgagctagagaggaattaacaaaggtcgccctcttggttatctagatggggtcaatgaggcccagggggcccaggtctgctccacaccactgggcaacagaagcaggaggcagctactcttggggcaccctggcctgcccaccacactggagtcagtgctcccagccctgtccacgcatggatcatgttttccagttctgagttggtgaccctgaggctaagtccaaaatgcaagaattaaggcagagagtaatgcccgtagggacctggacctggatacaagagttacaaaatcggggctggaagagccttcgtgcagaaatctccaaactcctcgtttgacagcgtggatgctagagcccagggagcctgcttgcaggtggcccggaggcagcaccagaacccagttacagtctccagccttgtggtctttgcctgtgcccactgctcaccaatcctggatgttcgaataccagggaagcccccaccttttttaaaaatagagatggggtcttgctgtgttgcccaggctggtctcaaactcctgcttcaagtgatcttcccacgttggcctccaaagtggaaaccccagtttcttgaggagaaaaaattcaacaaatttttccccaaataaagattagagaaaaacaaaaca

SEQ ID NO: 56674 - DNA, 1556 bp, Homo sapiens
gaactttgtatattgccgggcgcggtggctcacacctgtaatcccagcactggccatcatggtgaaagcccatctccactaaaaatacaaaaattatccaggtgtggtggagggcacctgtagccccagctactcgggaggctgaggcaggagactaacttaaacccaggagacggaggttgcaatgagccaagatcatgccactgcactccagcctgagcgacagagtgacaccctgtctcaaaaaaaaaaaaaaaaaaaaaaaaaagctcaaggttaaaaaaaaagaactttgcatatataacttagcttagaataatatgtcttcagttattgtttgcccttatcattattacaacatatgaggatgtcgaggctcagggaggctggtgctctctgtttccctccaccacttgcagtacacagagggttaaggtggaagctttgccctctgcagctggcccagacctggatttggctgcctgttctgccctggagaagcaaggccaactgtcaacacagggtgacttcaggtcatctgtggctatgcatggccagcctgccaaggggacttgacaagagggaagatcactgctttcctctcaggtctgatggaactagggcaggcctactcctgtcatgtccgagctatgagaccttgggcaagtacctctccctttctgagtctcagttttgtctcagttttatcttgggatacttatgtttttctgtctcagggcccctgtggaaactgagttggcacaccactctgctgtgccaacataagcatagttaaggccagtaactctgggtggggtaaatattacaatttaaaggggaggggttatagggaagtagaatatttttttctttttctttttttttcgagacagggtcttgctgtgtcacccaggccagagtgcagtggtgccatcacagttcactgcagccttgacctcccgggctcaagcaatcctcccacctcagccacttgagtagctgagacctcagatatgtgccatcacacccagctgattttttaaaattaattttttgtagagatagggtctcatatgttgcccatgctggtctcaaactactgggttcaaatgatcctcctgcctcagccttccaaagtactgggattacaggcatgagccaccatgccgggctgggaggcggaattttgttcagtctaaagataagctttttcatagctctggctgtagtgggagggagcagaggagtgaatgattgtcagttgggagggtgcagagtgggctcctgccctagggtggaggtgagggtggcttaggtgagacaacacagaggccctgttcagccccacgtcccctccctgtgctccctcctcctctctcctctcctgcaggcgtgggaggtatcatcattcagcagatttcaccagaggcagtggaggaggcaggtacctgagccagaattcagaatgtcttattctccacttgactctgccactaacttgttgtgcaactttgggcctttccccaggccttcattttcttttcttttctttttct

SEQ ID NO: 56675 - DNA, 1420 bp, Homo sapiens
taaataaaacatttacaagggttgtggtgaagattaaatgagatcactcacgaaaaagctcagcagaccctgatgtgcagtaggtgctcaataaatgttagccagcaaaaaacaaacaaaaaaaaactcagctaggaaattgcagtactgggcttctgactccaacctcagtgttccttgccccacatcaagctgtttcacttcaaatcctctccatttcacaatggagtcaccccaggttgaaggagtgaactgtgctttggagggctgccctaagcaggcagcaaagagacagcttggtctccagtgacctgaaagaattatttattgccctgaagtccagtataccagttgccaaagggaaaagcttccttccaactggctcagcaagctgacagaggaagagtcgggttcttgctggggcagtcatgcagagctgggatgacaagtagaaggctggcagatctgtctctgggcagatggatcacctgatacagatgctggggcctgagccctgggattggcccaaaacagggctgtgttgacccaacagctgggcattggcatcctgtcaatctgccgagagcctagaaatagtgcgggggcagtctgctggtctcattgtgtcagaggaagcaaccatgcaggtgctaaccaagcgttaccccaagaactgcctgctgaccgtcatggaccggtatgcagccgaggtgcacaacatggagcaggtggtgatgatccccagccttctgcgggacgtgcagctgagtgggcctgggggccaggcccaggctgaggcccctgatctctacacctacttcaccatgctcaaggccatctgtgtggatgtggaccatgggctgctgccgcgggaggagtggcaggccaaggtggcaggcagcgaagagaatggaaccgcagagacagaggaagtcgaggacgagagtgcctcaggagagctggacctggaagcccagttccacctgcacttctccagcctccatcacatcctcatgcacctcaccgagaaagcccaggaggtgacaaggaaataccaggaaatgacgggacaagtttggtagaccttggacactagggaaggtaatggtggccatgctggtgggtgtgagtctacaaagggacattccaggagaggagagggggcagtggtgcaacccactgggagaggaacagcctgactttcagacagagccactcttgggtcagggtattgggaccacaacctaggagggcctaagactaggcctgtgttactatccttctgacctcaaattggcaattgcaatgaagtgatatggaaacagagggaaaagtggcctgtgagggcatatctcatatgcacatatatgtgtttgtgcatgtgtgcatttattagtatgtgaatgcttgtaaatgtgtg

SEQ ID NO: 56676 - DNA, 1907 bp, Homo sapiens
ttcctccccagacctcatgaatcaggatccgctttttttttttttttgagacagggtctcactttgttgcacaggttggagtgcaatggtgcaatctcggcttactgcaacctctgccttccaggctcaaacgaccctcctgcctcagcctccctcagcctgggaccacaggcgtgcaccaccacgcccggctaacttttgtatttttttgtagggacgggttttcgccctattgcccatactggtatcgaattcctgagctcaggcgatccgcccgccacggcctcccaaggcgctgggattacaggtgtgagccacctcgcgcagcccagaatccgaattttaacaagacacctatgctattcgtatgcacattaagtttgagaagcactggtgtcccatatccattcagaggtcaaaaaaaaaaaaaaccaagctctgctacttaatagccatatgaccttgggcaagctgctgttaatctgttaggctcggtttcctcgttgtgaataatacatccctaaaagtgttttaaggccgaaatgctatcaataatgcccacagtgtgagtagtgcatggcatggagtcatggctcatttgcgcacacagcacaacacgaactgaggagagtagtttcgggtccttcacagactcagttcctgcttcactgcacctcagtttcttcaagtgccaaatgacactctggctctgcttgattctaaagagctaatggggcgcggactccccggaaaggcgagatggggccagctaggcaaaaaggcacggaaaagcagagcacctcaggggggcctacggccgggccagtctgcagccctacgaccccttctcctcccagccgatcccggccgcgcagcactcaccagccgtcgcgatcggcctccgccggattaggttatcaatcaggccggagcagtagcccaagaagccgatgtagaggagccgcgggtcggtcagcttgggcgggggcaggctccgggcctcatccggcagaaaccgtaagggttctgggttccgccgtgcgatcatggtgacgccgtttccacttgaggcctggtctcagaccacgaactacaaggaaaaccacgacgaccactaccccggcctaagcggtcagctttctcctcctcctctgcgcgccggactcacgggcacggcgcagcgcggtgcagcgcccaaacgcttcccggtacgtgttgctgcgggaacccggcacgcgaagttccgggctactaagtttcactttgctcgtccgcccgcgctaattctctggtgggagtgggattcacgggcctggtaacgcggggtcgaggagtaccccaaacgagccaaactgggcgaagactaggagatactgattttcttttctcccaacttccccaaccagaattgcctctccctcccctgccccttctggaaagatttatcttttcatccaatacccacaaatgggcatgatgcgtagttttgataaacgtaattaattgaaattccataaaagctagttttcgttttctgagttttcagtcgttcattcgcatagacactccctccaaagcctaaaattaaggtctggccagcaacaaaagaatttagagaagcccaggactggatcgttttagtctattgttgaaattcagattcggaggcagcaccctaaaatgtttcacctctgggtcttcacgtcgttacacatggctgagtgaggaggtgttccctaaaggtttgagtaatgaggccaggcgccgtcactcacgcctgtaatcccatcactttgggaggctgaagtgagcggatcacttcaggagttcaagaccagcttggccaacatggtgaaatcccatctctacgaaaaatacaaaaaattagctgggcgtggtggcgggtg

SEQ ID NO: 56677 - DNA, 553 bp, Homo sapiens
caatggatgaaagaagtacactgacacaggtgttttgcctgacagcgcagctagggctcagcaccactgacgagagagtgcagcagccaccgagagagtgcagtcccaataagctggccctgctcgcatttatgtagtacatatttaatgacaaagggttgaagcaaacacagtttgtgggtaataaacattgttgaccccccaggtagagagcagtcctgtgctcgaatgatcaaaggttggtttctggagacagaagtaaacaaatttatctagataagtttctttacattcccttgttatctgccctttgctctcaggctccggataagaaaatttgactgccttcagccataattcccttccgaagcttttggaaaacctcccggccttccaagaaggtttgcgtctttccctataactttttcttacaacttttcccaccaccctgacagaactcctacagtgatccacccgcctcagcctcccaaattgctaggattacaggtgtgagccaccacacccagccccgccccgcccttttttttttttg

SEQ ID NO: 56678 - DNA, 1853 bp, Homo sapiens
ggaaggatgaagggaaggcggaagccaatattaataaatactgagtacctactgtatacacaccaccatttcatggttgcttcttggtttccacgctttcagtcttggccctacatccattttttacacagcagtctaactgtggtcttcgaaaccctgtgttatctgtccccagtgcaccccatgctgtgccactcctctccctcaatgctctgcagccacaaggggcactttctgttcctagaatgctctgacttctttcctgccacagggcctttgaacttactctttcctatgcctgaactgctttccacatcacttattctttttcattttttgaatttcaactcaaacatcaccttctaaaggaatagcgcacagccacttagtaaccctctatttcctttatcacaatctgaaaagttcctgtttgtctagctccacccaccaacttcgagggcaaggaccagcaatgtcttgctcaccaccgcatctcccgggagttagaacggtacctggcacctcaggcatctgataatactggctgaatggctgttggaggcagaggttcttaactgcctattaaggatgaggaccctgaggttcagaaacgttaaagtgatttgttccaaatcagacagcgccaggtctgaacctagccagctggggctaagtcaagtaacaactggcgaaacagaaagcttagcaaaggcaggatagcgacaaacacgacctaaagttttctcttcatacccagggatatccacacctttctctcccgccctgaccgaccgcggggcctccccgcccagcccctggccgtgcgagtcccttactatgtggggatgagaaggcatttgagaagagtcaccccgagcgccaaagccgaaaaccaattgccagtacccgtggcaattgtgagcgccgccattgctgcggcaccgcacgcttcccaccaacttgatccacatccgggatcccgcgcatgcggagaaagccctctgaagccgtgcccgctagctgcgcgcatgcggcgagcggcgcagccagtccggggactgcagtcagctatttaaacctcccgcccaccttttctttagacccgcgtctcaccccgggccggaagggctcctgcgcaggcgtttgtagccacttttaagttttatcagctagttcatgcttgcgttgaaagagtggtcgtttgcgctgggtcatcactgtgtagtattggggatacttaggtgagaaaaaaacttaacgctagagacgttcacgcactagtggagaagccaggattgttgccctagagttacagtagataaaagtacctcagagaactgcgggggctcccaacctggacgcttgcaccggagtattaaatccagctagagaatggcatgtgcaaagatacagaggtgagaaacattgtgtttttagaactctgagcgaggctcttggctcacctcctgcttgagcggaacccattctggaagcagggtagaggctagtcctaacgcttagtgtacaaatagcctacggttcatgttaaaataattcggattctgattcagtaggcccaacaaactcgcagattgcgtaatgactgaggcacatgcaatttaattaggcttgtctcattattttactgtatgatcttggacaaactaaactctaaacctcagtttctttttttaaaatttttatttatttatttatttttgaaaataggagataaaaatggtttctggccggacgcggtggctcacgcctgtaatcccaacactgggaggccgaggtgggcgaatcacctgagttcaggagtttgagatcagcctggccaatatggtgaaacc

SEQ ID NO: 56679 - DNA, 1033 bp, Homo sapiens
ttgtacatacatacatgtttgcataatgtgtaagaagagatgtaagataaatttcgagaactggaaatactgcattaaagggtttgcacatttaaaatgtcaatgtatagtgccactttatctttcaaagagattgcattagtttatacccaaccaatagtatacgagagtgctgtttccccatgcccttatcaacactgccaccttggatttaaacctacttgttttcctttaaaataccaaaatgggcatttgaaaaaaagaggcatgatttgttccttggcaagagctatattttgtttgagtttgatctttctgatagcagacctaggccttgtgccctgtcctgtggtcccatctctgaggagctgggcagatgacctgaccacaggactcaatcaggatagcttcaggtcaccaggccaaagggtaggccagacccgggcctgtgcctagcctgatgatggaaatgcaaacaagccaagttctataatagaacacagagccattgccgggaaaccacaaattgctgacttgctcctgcaaacaatcaatattcagaagctgagtccaggaattctaacgatgcatcctgcacaaagggctgagtgggggaggatgtgcttttagaaaaaaacccagcaccagaagccctggtgctgcttcttagagggccatcaagaaggcccttggtcccatcaccacgccctctgacaatcccagaaccctaggctctcggagccagagtagatctgggaaattatcctgccctgagagagtccaggcaaagaatcaagggagttccaaggagcaagtgctcacttcggtgggatagtgcagggcagtggttagtggctacacttgggctcaaatcctgactcagtcaccagctttctgaccttggacacattgcttcacatctctcagcctcagttttctcatctatagaatgaagacaataacacctatctcagaaggtcattatgaagattcaactgaataattatgtttgtaaataatttagcatggcaac

SEQ ID NO: 56680 - DNA, 3481 bp, Homo sapiens
gcttttttttttttttttttttgtatttttagtagagacagggtttctccatgttggtcaggctggtcttgaacttttgacctcaggtgatccgcctgccttggcctcccaaagtgctgggattacaggcgtgagccactgcacctggctggcagtatttctttgaaactgacgatggtgacggtatttagtgggaaattggcccacactacagatcagggctttgtttaccagtacagcactagctgtgaacaagtgcggtgtgatgacgaaagtgctcaccaggtatagggtggcacagcaggggctgggactgactttattgcgtggagctaaggaggcggggcttacacagtattgaaggatgagctgtgaagacagagtggtaaagggaggcccagacaagtgtgggatggcaagacgtatcctgtggttctgtgaaaggaaactgtggatgtgaaggcacttggcaacttaatacaaggtgtcaagcgaaaaggtgtagagtaagcaaatccaacataggatgtataaagtgaactaattagggctggggaagggtatccatgtcataacacattaacctttgctctttagctgataggatccctagggatttcaaatgtggctcaacaaggcctttgcccaactctttggtaaaggggaacccaggctttggagagggacttggcgtaaggaagcaaataggctagaacactctggggctgccagctaaccgggaaatgttgacaaaggctgtgaaatgccctgtgttttggtggtggggcggtgggagtggcagggaagttggcaggaaacgggactaggaaaacaagtggggaggggtcagatagagcaggctgagcgtgcacttcttcatgcgcctcagagccagacagccccgcctcaaagcttgttttgctgtcccttgtgtcgggtggggtcctgggtgccatgggttgcttggtgagcccccgttggtccctgtgccccagactggggcgagtgtgtcactggactgtttccacagctcggttggtgccacactgtcccgaaggttctgaaggagactgaggtcaccaggctgtctgggcagacagagctgccagactctcgtccctccctttgatgggcctgttatcagggttgttttgctcctggagctgatcacaggccacgtttcccagccagccacccccatcagcccagagccccctgggacacaggcagacgtaggcagtcagtttggagagactgcaattcaggaaagggataggctgaaatttcttgggccaagaaattggcccaggactgaccttggctaagcccccactgatgacagacggattttttttaaagattattttctttagacattcttgctctgtcgcccaggctggagtgaagtggtgtgatcttgactcactgcaatctctgcttcctaggttcaagcaattcttgtacctcagcctcccgagtagctgggattacaggcacgcacccctatgcctggcttatttttgtatttttagtagagacagggtttcactatgttcatcaggctggtctcgaactcctgacctaaagtgatccgcctaccctggcctcccaaaatgctgggattacaggtctgagcgactacacctagcctgatgactattttgttgttgttgttgtttgtttttttgagacggagtctcactctgttgccaggctgaagtgcagtggtgcaatctgggctcacggcaacctccgcctcccaggttcaagctattctcctatctcagcctcccaagttgctgggactacaggcatgtgccaccatgcctaatttttgtatttttagtagagacggggtttcaccatgtttgctaggatggtcttgatctcttgacctcgtgatccgcgcacctcggcctcccaaagtcagactgttttaagagtaatttgtaaaaggaagctggaagtttggggtgaatgggtggttacacaaatgctgtgtgatttagggtgcagtttacaaaagagtggctgcgtcctaggctgcaaattctgaggtgtgggcaagtggggaccttggccacccctgcacagggagatctggcccaaaggcagaccagggtcatgaggctaggcccttcttaagagggtggagggcttttggaggtgctgagggcatgaggtcagagtggtgcctgctgctggccttcaagcatgcagggtccctgtttggtggtgggcctcatgaaggagtcacaccaaggtgggtgcttagggttccctcaagcacccattctgtccctctgcatgcaggggaccacacctagggcaggaactgagagctgacgagtgttgtgttcccggcgttgctccttcagctgggatggagcccttggcgggataaaaggctaaactgggtccaggtgagatcaccacaaggtctcacccagggcaatgaagggctcacaagcagcacatccctgctcacagttcgcactcagactcacccgtctgtcgatggtgctgccatcactgctgaacgtttgttctccgtctttctcatgcttttgccaagcagaaggctgagttcacctaacctggacgcaggcaacgagatgcactgcgtgccccccttccccttgtgcagctgtggtgtgaacgcataccctcccttgcttgcccttcctgcctggttgccagctctgctcttgctgttccctgtgcccacggcactctcttgcttattctgtcaagcctgacctaccctcagaggcccaccttggccatccacaaggctccttctgagaactgagccctttccctgagttcccaaagcacgttgtgtgaagctctaaactttctccaggctgaacttagcttactcgtggctgttcacatcctcagggcccacgcagcaaatgctctgtaagggcttgttaaactccactctcctgggactcctagtcccccaccagagtccaccatgactacctcctgcaagagcactgagctcttgggtgccaggcccagctcaggattttcacagacaccaactcgtttaagttgcataaccccgggaggaaggggttgttacctgatgagcaaacaaatcagagaagttcaatgacttgtccaaggttacagaggcttggagctctggattcaaacccaagtcactgtgactcaagaccagtgtttttccccgttacaagcagacacaaaagaataacaatcctttatcatttatactgtattctcacgttacattatttcatttgatcctcacaacagccctgtgaggtaggtagggttatgtattactgttatgcctatttcacagatgaagaaatggaggtggctcagtgaggtgagtgacttgcataaagtcacacagcatgttagtggcttcactgcttctgcaacttctctaaagtcaagctgcttggattagggagcaccgaaaagatggacagttttatgg

SEQ ID NO: 56681 - DNA, 426 bp, Homo sapiens
tccctctcatgtctaaccctgccctccacgcacgccagacgccactgagtcagtctccttcatgctgacacctgccctgcctttgctgtccctagaccacccctgtctaccttctctaccctctctgctgtctacctttcaggcccagcctatgagtcatcacctctgtactactgtccccagatctccactaggttaacagctctcctctcagggcttcctggtgccttgcacaaccccctctggcagcacccagcattccacctgcagcgatctcctttgcacatggccctcttccctggctatctcaaaatgcagatcagtggacatccatatggggaaaaaaagaaccttggtccatctcttatgctgtttatgaaaaataaactcagaacatatcatagacctaaatataaaatctaaaac

SEQ ID NO: 56682 - DNA, 1308 bp, Homo sapiens
actcctgggctcaagcaatctgtctgcctttgcttcccaaagtgctggggttatagacatgacccattgcacctggcagaaaattttgaataactattacattgggtaatactgacttcttgcttattacatataatgtattatggctatgtagtagaacgcccttattaggggatacatgttgaagaatttaggggtcaaacgtcaatcaacatatctgtaacttacttttaaataattgggccaaaaaagtgtgtgtttgtgtaaaagcacaattggcaaattgtgatttggcgtatctaggttaagggttgtactttaagcttttatgtaagcttgaaaattttaaaaatatttgtattttaaaagaggggggaagaacacttcttcatagggccaatagatgtaaagttacagtcattgtgccagaccccaataagtcgccagatttagtaagttacagatttactactactacttagaagtgtgaaaagctcataattttccttcccaagtgtttctgaattttgaagggtgaggatgccaaccagggctaagtggtggaggagttagaatctaagcctgggtgggcagtctggatagagccaccacccacagaaaccacaccactaggcctattttttttttttgagatagagtctcgctctgtcacccagtttggagtgcagtggcgtgatcctggctcactgcgacctctgcctcccaggttcaagtgattctcctgcctcagcctcctgagtagctgggatttcaggtgcgtgccaccatgcccggctaatttttgtatttttagtagagacggggtttcaccacgttggccaggctggtctcaagctcctgacctcaaatgatccacccacctcagcctcccaaagtgctgggattacaggcgtgagccaccgcgcccggccaggtctgcctatcttctgtgctgtgattctgcctggaagaagatggctgttcaggccttgtttttcctgcctcatcatgaacccagaatctctgtaactcggcaggaaagaaactcctgtcatgactcactgtgaatgttgacaaagagaggccactcctgggcctcagaaatgtcaaggatgggcagaaagaactggagacaggccaggctcagtggctcatgcctgtaatcccagcacttggaaggcccaggtgggaggatcgcttgagttcaggagtttgagaccacctggacaacataatgagacctcgtttctatagagaaaaaaaaaaattagctgggcatggtaacacgtgcttgcagtcccagctgca

SEQ ID NO: 56683 - DNA, 2555 bp, Homo sapiens
gatccattttccccacctggattttcaaaactttttaattttgaaatgctctgttcaattttcaatctggaatctaaagggatgtgacaaggccgaggtgattacttgggagtaaatgcaaggagagtttccactgcgtaagggaatggacagcacgtggctgggtaaatttcaaaaaagacaatgctcagagtgagtactgtgttttccagtaagtgggagacttccccaccttaccccaccggagaaaggactctttgccttgaagcccctaggacgactaccctttcttcacctcctcttcctgaccaccccacatcaaagagctgcgtctataattctgtcttgcccagtccatatctctaagaaatccgaaggctgctctattaccatcacaacccatagggaggagagaaaaggtgcttcctagacacagggaccccagaatgagctgcgcaaaaggcaggaggagagaaaggtgggctggaagaaggagaccacggaatctggcacggcaaggtattctttcatctggcgtagacctccaacaaccactaccatcccccagccccttccagaactttccttcaccttctcggctcactctcacgcttcaccttgtgcttttcctccggcaccagcaccccatttcaaaccgctctcttcctatgtctcctccaaacagtaatttataaacaccgtgctttcaaatccatctcatttcatcctcacagtactataggagggctgccttacaggctgtcattcggaagggttggggggactggtcctgccagacaatttgcgaaggtcggggcatcaaaacttttctttcctgcctcccacgccaagctaaacctctgcctccccgagtgcagggagaaaagcaaggtctttgaagtaaggagtcctgagtggttttaggcaagtcccttcgcttttctgagcctcacattcctcacctgtcaaccgctatagtgacgcctctacttttcagggcgtgggaggtcaatgagatcactggtgtgccgcactgaactcggggatggactctttatttccagtcagtaaagggaggtgttctatgcatcacaggcttttgcccacgccgccacagcgcggccggcccagggctctccagagcggggcaagttccctgtcatctgtgtctccgcccttccttccccaatctcacccaggctggcctcatcggcttgttccgcacccactccccagccctacagcccccactccgacctgacaagtgccccacccccacctagagatcccgcctctccttgccccacccaccaaggactcctcccacagtcccgaccctcattatccgggcttttccgactatcaccatccgcccttgctctcccaacagccccgcccctctaagagctctgcccacttcggctcacctcgctccgaaacgcgccccctcccccgcaccacaggcgatgccatccccatttcacagatgggaatggcgaggctgggatagattagtctcatggtaagacaggtgctcagtgggcccacgtaccctcgccggtagtccccgagccccgcgaccccggccgtgccgcacccacctcctgccctcgctctgcagcctctccctccgcgagcggccagcgcagctttgcgaggggggcggagggtaggagcccagcccaggggcgtggcggtccggggtctgtgcgctgccttccgggactggtagttctctctgggctcctcgcagctcggcgcgtcgagagcgaactccatctcccaggaggcattgcagcgagttgctctgcgccccgcctcgtccccgccggtgtccggccggctggccttaaaggggacgcggtcagagtggcagctcgcggggtggcccccgctccggctccgccccatttcacgcacctcgcccctccccatgcttcatcccgcagccccggggccgcgccgcagagtcgggcttcctggatacatagaggcttgtgccaggcggggtgggaagactggattttgcagtggaagcagcatctcttccgtctgggacctggctgagggcgtccccaccctggggggagcagaggaccagccctgacctagccgggcccagcctcgtcctgcccggcctgagcgccccgcccagcagccggctctggcccaccggggtccgggaggtaagggggttgggggcgtgtgactgtctttggggggcggtgtctgcaccctggcctttcgagaaccctggacttgcgagcccagggctgggagtcgggagatctgggtgcatcctgggcctcctgggcctcactgtgtgaccttgggcgagtagctattcctctctgggcattaatcccctcccttcatcaattgtatgtcgaagtgatcctgctccctcccctttcaggtaagagggcattcgcacccagtacctagtacattcgcttgctggcttttcgtggggccctccagctcaagcgtgggctgggcgcgggtgcactggagggagggaggtggcacaaactggggggcccgaggccaccatt

SEQ ID NO: 56684 - DNA, 806 bp, Homo sapiens
ggtacttcttggacccatttctcacattgttagagtaggtagctaggcagacatgagcagggcaggagcctctcctgcccccatctcaccaggaatgtcaggcaaccatcaggtgagagtcaggcggttaaactctctaaaataacaactggttgcagctggtgctggggaaagacggtctcccaatcgatagaaaacacctgaaactggtgatcagcagctttctgataccatctcaggagataggcaagtctcaagcacgcacactatgaggcaaaatggtcgagtttaactggtatttggccttcctctaggaacacttggctggtaaaagaatgcctcaagtgggcatgtgtacagctttagtaaacacactgtgcatgcagcccctcctaagtgctggcaggccactgcacatgcagatagccctctccaagggaagaatcaggagagaagggacacaaccccctggaagcatgccaatatataaaactccagatcaaaggtcaaacagtgcactgaaatctctcaagttgcccgcttggccctcttccaagtgttctttacttccttttgttcctgctctaacactttttaataaactttcacccctcttctaaaacatggctcagtgtctcactctgccttatgccctttggccgaattctttcttctgaggaggcaagaattgaggttgctgcagacccagatagatttgccactgctaacaacatttatgaaagctttgagactggtgtgtttgtgaagtttttcttcccctgcttttttttttttttttttgagac

SEQ ID NO: 56685 - DNA, 1481 bp, Homo sapiens
gcaaacatgcacgagagagaaggagcaatgaacacaaacaatgaggaaggtagggtttgatatgcggttttggaaaggaagaacaggaccttttttttttttttttttttttttttaaatacaacatacagtatgaccaatgaccaaggcctgggcatgggaacagataaaataggttcagagaatatggcacagtcttctcaatatggaaaagagggaggaaaggaagagtttggaggtcctgaaaagccttgaatgccaccctaagaagtttcatctttcctttatttgtaacggggagccattgaagagtatagatcagcagagaaatgttaaccaatgctgtgctctcatctggcaaagtgcgggagacaaaccagaaaaataaaaaataagagacaagaaaacaattaagaagctgttgcgatagtctgcaatggtgagagaagatggcaatctaaattagggtagtaataacggagacaaaagacaatgaaagtcactttacttaacagtggggcttaaagaagtatatggatagggtctactgtcaagaaagttggaaaaaagaatttgtgtctaggatcaagggtatgccactcccatctctgatgaaatagaagtgactgttttccttctgtcagaaaacaaaccatttcacaaccatcaagaccacaaagtgtgggtacatatgacctggaagttgcatcactcctagctgttgaacagacagtacatgtcacatgaacctgtctctatcctttgggttagatctcaaggtcttcaagcatgtagaatgaggctataacttcctcttattgctcttggcgcccagaaaacctaggtgggccacaatttagctgtgcaagagtgttatgctcccttctggtgacaatgaaggcccgtgaaagtttatcacaccaggattctgcaagattctgcctggagtcatgatcatagtgttgttctaagatataaagggccgccaatatgtggaagagcgatttgatttatttttagttactcaacatactcaagttgaacaagtaccagcaggagcagtctacggaaaaccaaattttattttttttagaacgtaagaactttctaaatgagtggtccaaagcaggtctcttggaaactggagaatactcaacactggagattttgaagaaagaggcaaggtgagggatcagcaaactttgttaaggatgttagcaaatattttgggttttacaggtcatattttctctgtcataactactcagttctatagtggcatgacagcaaccatacacaattcataagcaaacaggcatggctgtgttccaataaaactgcttagaaaaagaagtggtggcaggatttgtttgttgactcctggcctaaacaaagggtgggaaggttggggagtgtgacagaagaagggctcaaagagtagatcaaggctgggcgtggtggctcacgtctgtaatcccagc

SEQ ID NO: 56686 - DNA, 940 bp, Homo sapiens
aaattattcaataagttttcactgagccactataacataacaacaaaagcctctgcgtgccaggctgtgggccaggcagtggtgttggtactgcttattatattgcttttaaattgcctccatgcatttgtttattcattaattctttccataaatacataagatacaattagtttaccagagtagcaagacacctagaaagcctgagacaactggacttggagcgaggcggtagttaggtatgaggctgtgggcaagaagaggtgcctacagaagctcaatcccaccaggtcatacagaggccagagccctgaggccctgagatggggtgagagaaacaggtaagaggcagagcagagttctaccgacaattttacctaacaaacaatgccgtccagggctggctgtagtgatagacatcagcttcatgccttgctgcaaattacgaagaataccaaccttcctcccatgtctaggcttgaaaacagccctttttctaggtctgtgtcacagggcagcacattacataagatgccctgaactgagggcacaaccaactgaatgttcctggtgtttactgtaaactctgagccagcatgacctgtggagtttaaaaaaaaaaaaaaaaggtaatttccctacagttcttcaataagaaagtaagaggaaaacaagagggagattctggggtttctccaagctgtgtggtctttaccaccaccaccaccaccaccaccacaacaaaaacaaaatacagttactttgggccaggcactctcctaagcactttacatataagagttcattccatccttacaacatcctgtgagttgttactattattatcccattttattttatttattttttgagacggagtctcgctctgtcgcccaggctggagtgcagtggcacgatctcagctcagtgcaacctccac

SEQ ID NO: 56687 - DNA, 871 bp, Homo sapiens
tccacgtttaattttttttttttttgagacagaatcttgctctgttgcccaggttggagtgcaatggcatgatcttggctcagagcaacctctgccccctgggttgaagcaattctctcacctcagcctccgaagtagctgggattacagtcacctgccaccatgcctgggtaatttttgtattttcagtagagacagggtttcgccatgttggccaggctggtcttgagctcctgacctcaggtgactcacctgccttggcctcccaaagtgctaggattacatgtgtgagccaaaaatgtccaggttttaatagaaaacgactcattatacaaagaatgaggaagctctcaaatggaatgaaaaagacaatcgacagatgccaacactgagataacagagctgttagaattatctttcaaagattttaaagagtcatcataaaaatgcaggtacaaacatgcttggaacaaatggaaaattggaaagcctccaaaaagaaacaaagtctcagtaaaaaaatagaagatgtaaagaaaaaccaaatggaattttagaactgaaaaatataaccaccaaaataaaaaagttcatcagtgagttcaatggcagaatagtgaggacagagaaatagaatcagtgaatgggaaaacaggacagtagaaataacctaatatgaacaacacagagaaaacagactgaaaaaaaatgaccagagtctacagaagctatggaactacaacaaaagatctaacagttttgtcattggattcttggaagaagagaagaaagagggtaggactgagaaagtacttgaaataatgggtgaaaacttctcaaatgtagtaagaaagattcagtaggtttagtg

SEQ ID NO: 56688 - DNA, 2969 bp, Homo sapiens
tatttcttaataattatactttggctacatagacactcctaaaaatgagcttccgaactgagatgaacaattcactgcttcattcctcctataaatccacgtccactttcaaaactcatgtgctaaatccttagatttttttcccccagcaaacatctacctaagagcctgatttcattgacacacacttgtactccgcaacaacaacacttcctttgaaaaacagaatgtcacttcctcagtccagaggccagaagtcccttgattctgatctggggagccaagacaggaaattctggtaggcttctgcctctccccccatggacagccactggtgcagctgacagagggcagggtctattccgagctcccttgatgcactgcagctggaggcaacggctcccttccaggctgtgggagtgatcccggagttcggcaccacagcccgttaaacaagggcatttcatgggaaacggagagggagcagatgagagaccttgaaaccttccagcaaccttacccccacttccaaactcccgcgactaccccaagaccatttcggccaaatctcagtaactggcaccatcttgtactttgacctcaccaggcaaggcatcctctggggagaggggttaaaaaaaaaaaaaaaaaaagccagaactccacggctcagcgccacgctgttccacctcccccaggctgccagttccccacctagagggaaaaggctgttccagcgatctcagtaaacactgtcggttggcaacacctggccgcggagagcctcgatctctcccgaccccagacacccgggagctgcccggtcccaaacccgggccagccacggggaccaaactgcagtgtcacaccggggtcggggggaggcgcctgtgagagacgaacggaataaagggaaagaagggggacaaacaaatgagtcacttaatacaagggctgcacatgccgctgacgctgccggtgatgcagccgcggacggagggaggccggcggccgggaggggcaggcggagaaagggaaggagagggcgtgaggcgctcgccctttgtggggccgtccgcgcggccccacagcctacgcccccctttcccgccctctccccgaccctgcgggctgaagctgctcggggctgccgcggagccccagccccgagagtcaactctctcggtctccagaagccatcaatacaaaacttcgacactgtatttagttcacgagcagaccggcttgggaggcgccgcagccgcacccgcctggcggagcaggagccgcagcctcaacctgccgcccgccccgcccctcggcggcccacctgtgacaggtgtgcaggtgccccacacgcccccggccgctcctcgcccccggccccccgcggctccgggcccgagctccccagcctgccgcccctccgggagtcccccgcccctccgcaggccccggagcgccccccgcccgcccctgggcggccgcgcccgcactcacatagcgcctcaacttcttctcgggaggcgatttcctcagccagccggtgcacaccacgtcgccgccgccgctcatgctgccggcctggagccccccgccgggtcgcgcggacgagggcgcgggctcgggcagctggggcagcggccggcggtgcgcagctcgcgggaggccaggggcggggcgggcggcccggcggggactaggcggcgcggcgcggcgcgagcccggcagcctcgcgcgcgcccgctcccccgccccgagcgcgcgcaatccgcactctccgcccggccgccgggggagcagctgcagcaggaaggccggctcgctcgccacgcccgctcccgccgcgcccccgaggccgccgcgcacgcggacgcggggctagggacccgcgaggatacagaaagccaccgccgccggcgcgccccggagtctcgctttctcctgaggccccaagccgcgggcgcggaggccagggaggcgaccgcgcccctggcgctggcgggtgtgaggggaagggactgcgcgccctcggtcgtcgatcgatttttcaccgagcgtcgacggggaagggatactagggctgctcacatttccgatacattctgcgggtcaggttccggctgaaaggagggaccccttcccagcaagaagctccttaactctggcgtccctcggcgggaggaggagacggacctactacgcgccggagcctttgcttttgtagcttacaggattgtcttcagtattgttcctattttatggacagcctaagggcaagggcttgtacaaagccgagccaattttccaattcaggtgtgtgggggaggaggggtcccggtcatctgctattcaaaatgagggcattgccttaatgggatcgacctgggagcctctcattgcctggaaaccaagtccagctgactccctcctacactgcctctgggaaaacacagtttagtatagaaaattcgcatgatttgtagaatggaagaagcaaaactagtcaatgtatttcataacgaattggaaggcaaggtcaagtgcagaagaacaagaaattggggtccaaattccccaacgttcccgctcattgacacaggctatgagacctctgtttgtaaatataatggtatcccagatgtacgtggaagcacacaaccccagcacttcagcgggaggggggagaaaaaaatcttttgtacgagctcttttctcatcacaaagtgtctctctaagcagcattaaaaggcaggtcctccctaacttctctgataagtggatagtaacctgtttattcaatggggaaccgtgctgtgtggacagatgaattggagaagcagcatcttgcagtgccccacacaacctcagactaaagctgttttgtttatttctgtctctgtgcagctgagttgtttcaagcagttggacatcatttggtccaaaagatcttgattgggttgggggaa

SEQ ID NO: 56689 - DNA, 658 bp, Homo sapiens
tgactttcttcaatatccagtgtgctgctggatgggaagtaaagccagaactggtaggctgggaccacagctcccttaaccttacaatttagggatccttaagtcacgtatgaagggccaccaccagaatgatggccattttaacttctggctttaagtaccttaaatccctgtaagacaaacaacacttaacgtctgccaaatcaatcaggaggcggtgacttccaaccaaaataaaactatcctgacttcattcacatctgagtcatggtgccaagtcccagagattgcagagtcggagaaatctgcatggtttggctgcagctgaggtttgtgatgcaagtcaggcatacgtatgccctatcttcccccagaagagtagtcttacgtatcctttgatagttacatgattcaatacacagactggaagactgtttagcaagagttagtgggggttaggtcatattctgccagaaattccttaaagtcttattttgtttgcttaggaaaagatggtgttatttacaatttcatgtggaaatggaaaagtttgatgtttcttgtttggccaatggcaggagggaccttgaaatatgaatacaacagtcaccaggtatcgactttgggaagggttctctgaacacccccatctttcccc

SEQ ID NO: 56690 - DNA, 661 bp, Homo sapiens
aggcccaacaacaaaaagacaacccaattaaagtcttttaaggcaaaagacttaaatagacatttttccaaagaagagaaataaatggtcaatatgtacataaaagacgtccaacatccttagtcatgttaaataaggcattgttttgggctaagctactgcactaggcatagtgcagtaatggagtcactcacactaaagttccataccatcaaactgaaactgagttatctggcattcctagaaatcaggagagggagatggctgaatttctcaagcaggccacttttaatcagcatgataacaaagttccctcgacctttaatccttccaacaaaatgtaacctgaagtgacctaatgttaaccaatcagttactttctattgttctgtttcactgttcccaccttgcgccttacaaggaaagtaactttaaagtgaccaatacacttcttgttctttgtttatatttccttcagtcattttctgtctataaaacctcaggtcagctcatcagaatacattctattttacagaatgaagcgttagcccattctagaattgttaaatgaagaaatttaaattttaaaaaatttgttgtaattttgtcttttgatagtcattaggaaaatgcaaatcaaagccacaataatatgccactt

SEQ ID NO: 56691 - DNA, 960 bp, Homo sapiens
tatgattaacaagtttacaggtaataccctggaatcatgaaagcaaagttccagcgctttacagttatcggaacagttttgtgaaaagtaatggaaatcagaaaagtgcaaacccgcgacgcctacactttctaacttttccctgctggcggttgtgtctgacccgactgtaaaagaaaagctagatgtggatgtgccatataaaagtccctacaagaaaaaacccactcccttcccattcaccaacctggatcttaatgcgctccccactcgcgttctgagccccgagagcgtcccgcacgctcagtttggctgaaggtttgtgcttggggaagggggcggaggaacagaagcgcacggaccgcagcaggcagcggacccccagcatcccgcgtccgcccaggccctccgcgggagcagcccagaccccacggttcgaaccccgcctgcagcggccctcctttctcagctgctccccttccgcggccgcagctctgctctaaggcactccagagcccctcggctgcgcgctttctccttcaggactcccagctctgtccccacagaacctctccgcttcccacttcccaacggggcggaatggacaggacactaggcaaacgccagaaagaaaccacgtgcagttggcagctggggcgccccactacccgcgacaattgtaaacctacgaacagaacccgggccgcaacacgcgcaaccactcctaccacaccacgccaacgccgcttacgtcatcacgctacggggaagaagggagagcatgcgtacttgtgacccaggcttagggaggcgtgcgggagggggcggggtcaggagccgagacggggcggagctaatgccctaaggttgtagagattatcgctgaaagaacgtgggagcacatctgagggtcttcatttctaaagtttccaggtgaggctgagaaactgagaggcaagg

SEQ ID NO: 56692 - DNA, 764 bp, Homo sapiens
aaacagtgaacaagataaacatggcctaagagagaactctcttatagtttctatttactggctgggtgacctgcaacaactcacttctcttcggtccttggtcagtgtgtgtgtgaaagggcacactttcctacttcaccactttctggaggatgaagagccatgggtaccatcaactcctactaagccctgagggaaagacccatgtgtcatttctttccatatccccagcgtccgcacagagctgtgcctgatgcatggtaggccctcagtaaatatttacagaatgtcggggaaagaacaacaactcaggtagttgggctttttgcctgcacaagcagttgcttctctcacgctacctgggagtacacattggtacacttgcaaagctgtgatggaaattccaatttataccctcttcttacagatatagctaccaagtatatctgtgaatcaagcccaaatgtgagtcattttactgctatttgtgcacaccactgccagtaaaggtcacttgcttacctgagttttgcaagcctggttttccaggaagtttctttgcttcctacaagttcttaaatatatttgcagttactagtgtcctccaacacgttaggcagttttcattttagatgcacagaaatcctgaacaccgaaacctcctggctgcacctccctgaaccaagatcatagtgaggctcctttacaatgctgggcagagccgtatgtaagagaaagagactcggctttggtgtcagagagcc

SEQ ID NO: 56693 - DNA, 629 bp, Homo sapiens
ttgctatcttttgttacaaagaatagagttgcagaaaactctgaatgtgaaaaagcacatagaacattgaattttcttagaagcttaaaagatgagttcttgtgatggttaatttttatgtgtcaacttggctggaccacagagcacagatatttggtcaaacattattctggatgtttctgtgaaggtgtttttgaacaagaataacatttaaattggtggacttcgagcacagcagattgccctccttcatgtaggtggccttcattcactcagttgaaggcctgaataaaacagaagactgaacctcccccaaagaagaggaaaccctgcagcagatggcctttggacttggacggcaacgttggctcttcccaggtcacaagcttgccagcctaccctgcagattttgggctttcataatcatgtgagccaattctttaaaataagcctctttctatatatacagacatcctgttggtagtatttctccggagaaccctaatactgtgcctaaatgctatttgaatggttttacttgactggagtatggaaatattctgtgataatattttaataaaatgggtagaaagagtgggggctggagcggggagcagtagtaggggaag

SEQ ID NO: 56694 - DNA, 1672 bp, Homo sapiens
taagagctgtgtggctttggataagtctcctgtttttgtgatttttaggtttcccatgtataaagtaggggtgaatataacaacatctcagtgatttgaggattacgcagactacttgggttaaaacggaaaacacatttcagcagcatattagtctgcatcccctaaccccaaacacatttgtatccccggggcctgatcctacggatgcactcaataaatggatgctgaagtgaataaagcgaataaggtgccctgggttgtttttttaaagtatgtttattatagaaaagtatacataaaactcatcattttaaccatttaaaagcatgtaattcagtggcatttagtatacatccaatgttgtgcaaccctcgtgactacctggttctagaacattttcttcactccccagagaaacccccatacccattaagcagttattctctttccacatccccaagtctatgacgattttagctaaaatcaatactttaaaacatggctggaggatattgcgttggtgagaaagttggcaggagctggtcaggcaagaattgatttcctgagtgtccactgcgtgctcctctctgtgggaggcacaggtagatgcacggtcacagctccactgggcatgtgcaacactatgaaggaggttgtgttccaggaatgtgaagaagcacagtggagttggaagctgaattaagggagagtggtgagagacggggtcagtggggtcagaaggggttggatcaggaaggggcttggtgcagtaagattgggatttaagtccatgagtcgatgactagaggctcagccctttcctctcctacctagtgtggtttgaggatgcttttaggaggagagagacaaagagacatgcaccccacccccttactgacaggtctgcagtggagggccctggcctggctgctactggagctcaggctgcagaggagcccggcttggaggcaggcagccacggacagttaatgagtgatttattggtgctgctgcagaagcagcttctctgggacctgttcctaattaacaaccactaactggatgacgccttttttttttttttaaattagaaaaagcccccaaagccctttttccttatcttagtgggaagaaagacttcacctttgcctgctggttaattctaaaatacaacaggtatttggcagaaatccccacccactccttcactcctgtgcagacacgcaaaacacaccctcatgtggagtcaaacccacacattcttgctcacgtgttccccagtcacacatttgttcctgtgctaatgtaactgcactgacattgtcacacactcccactcatatggtgtcgagagcatctgcactttgcacttgcagtcactcttacacgtgcattcccacacagccacatctcctgctgttctaggcaaggccacaggtacacacatggtctcaggcaggaatcttccctgtggcatcatgcctccggtgaaggggctgactcacttagaaggggcttaagattgtgtgtcctggcccagcctggtcagctgtgagatgctgtgagccagggagatggggagggagttgcagccaggcctcaggggcccagcatggagagtggcaactgctccattgttcagaacaaaacggtttcttctgttacagtt

SEQ ID NO: 56695 - DNA, 976 bp, Homo sapiens
tcaaacaggagggcagtccaagaggcagggggcagaaaggagttaacatagcaggccgaagcctgcatccttagaaagctctgcttgcaaagctggccttgggctggtgcctgagaacctggctggtaaacagttgcctaggtcctaaatgataggaggggctatctgtgcctagattgtattatgcctagattgtaccaataatgagtgtatgttaaacaccttatttccttccgggagattggaatttggtgcatgctaggcagagggcacctatgtgactagcacctgatcaacacttggggccctgagtcttgagcttccatggtaaacagcactttgtaggtgtcatcacagctcctggctgtaggaacagagcacttcccgcatgactctgctgagagaaaaactcttggaagcttttgcccggcttcctccgaactttgtcccatgaaccttttccctttgctgatttgcttttttttcccttttgctgtaacaaatattgtgagccccactccatgttgtgtcctgtaaatgcttttagtgacttattgaaccttgggcacatccggacccaggctccaaggccaaagggccactgtcagcatttaaagccagggtatgggctcaggtgccctggactggggagatgatgtcatgacttatgaaatgtcaggtattaaagggcattgtgagctattatgcactccctaaatgtgaataataatggccaggctgccagagcagactcttgaagagcttttgaaatctggggaaaaaagtgacacgatcttttttcaaaataaaatccatcttttagcactagctctagtgctggggttataaattattgaaggctgtggatgcaggtagagagaagggcaaatcctttgggcttaagcggtttccctctttttgctaccaggtgaggccgcatgtagagtgagagagagacgcctggaggcacctcact

SEQ ID NO: 56696 - DNA, 1133 bp, Homo sapiens
ataaggataatgctgcctagtgtttaaatagtactttagaacttatacatttctaacacattttaatgtgatttaatctaccattctgtacctttttttgataacttaccaaaattatatttaagtagttgcttaattatatgctctaagctctacagagttgggaactgtgtctctcttgttcggcataaaacccaagcttctgtccttgcaaatgtaggcacttaataaataatggctaattgaacaaatgaacaaatgtttctgagtagctatgatcctgtattaaataaagaactgaagcttagagaggcaaagtgccttgtttccaagtcacacagctagcaaaaagcaggaaccaggactcagataaagcccaattcttttgactctgagtgcagaggtatgtccttaaattttccatgcattccgagggtgagacagacaaggaaatgattaactaccccccagttagaagggaatgtcgttggatgaattccatatgtttgaggaatgccagtccccatgctgagaggattctgatcaaaccaagctccccgctggagcagaaacatgctgcatgggaatcctattgcttgggatcagagatcgctgttagcacaagtcctgcatgaacttgtaccatccagcctcaaatccctacaaggcttccaaatcaaacaaaaaaccatctaacaaacacagaagcgctgaaaagatctgtcctcggccctgggcccagtcgcatgttccttagtgagggatcgagggatgttagctctgagctctgcattctcctgtttcagatgcccccttccctttacaaggtccttcctgcagctcactgtacagaggtgacattctcagaatgtccttaatcactctgcactgggggtgaaggaggggcccctgactctagctgaggaggccctgtttgccttcctagcagtcaccagggtatacaggacaaatgctgtgctcctctacagcctccaggctgcacacgcactacagtgggctcttgtgggctgagcagagcctccctcagcaactgtggctgcctctctaccttccaggagggccccaggctgttctttccgtggggaagctctggcccttggccccgcagctgg

SEQ ID NO: 56697 - DNA, 432 bp, Homo sapiens
tctgagtttcagttttctcatttgtgcaatgggtataataacgacgatttcataaaattaatgtgaggatttgataaaattgagatgtgaaaaatgccagctatgccacaaataccttaaagagattctggcagccaccaaggaccagccctctccccatggaaccatgacttagccaagtgggggagagcaatctaacccttgctccaaaatctctaggtaagctacatttcacaacttcccggaggaggaccgtctgttggcccagacccagctcccaggcgctttcccaacactgcctgctgactttaacctcatttcccatcctggaataattaaaagaattgtaaatgtgttatgtatggattgacttacatacattccttattccttaaaatcattccttattccacaaaaagaactgaggggtct

SEQ ID NO: 56698 - DNA, 2092 bp, Homo sapiens
tgtcaacaattcttaataatagggctacaaaatcagctctgagctgaccccttctgagaggctggcttttaggatggataactatccaatattttctaataggtaaagatattaaaatttgtatttagggctgccttggggcaaaggatgactatcaccgcagactaggtaccagagctggcatttaataatttgaatttgagggaaggtcaagggagttcggattggggcaccctctgggagcagagggagttgaagtgactgtcgtgtccaattacagaaaagcctgaatcaagagtatgcagccaaaactactaccaaattattggtaatgggaggagaaaatttaaacagaactgggatttgggaccaccttctggaagatgttagccaaaaaccgaacagatcctaggcatcaaggggtgtgaatttcgaggtaggctccgttgcccgggctctgagggtcagggttcccggcggttgggcctgggacggcgaagcccccgctcccccttaccttctgttggaagtagagaaccgaatagttcttggctacagccgggagggatgtggggttggttggcaagtgtaggctgccgagggcccttaaggccggccggagggctatggtggcccagggcgccagaaaagacagaagcaggagcaggagggctcggcggcccatggctcaggctggagactgcagtgcgggtgggagggcgaaaaggaggccagcagaagcgcacaggctaagccctgcccagcctgcagctccgcccgccgcaaaacagctcctcccaggggaaacccaaagccagccagctcctcagagacgccgcccaagccaggtcaccacagccactccgcccccatccccgaggacaccgcctccactccactttcctctcgtgccatctgctccttagcactcaccttcattgcggtcacaccccaagtctgcccttatcatgctagggcctcttcctaactcatcgctgtagcccatgctttatctatagcgcccccgaagcccacctgtccttcaggtcacccaatatccctaccattatcatcaccaccaaaccctgccctggccaccgcaattccattgcgacacctcctgccttccgcaaatcctacgtaacggcaataacagctaccatgacaatttattgaaggttcactacaggccagtgtatcacgaggcagggaggcacacgcatcatctcctctaactaaatcgtcacagcaatcttgtgcgtcgtatatgattgttattcccatctacagatgtggaaactgaggctcagagaggtgcgggaacttgcactagatcactcagcagtgagcggagcacgtcgtcgcagaccgctgggtccaggtccaaagactgtgctccttgcacccacctccatctggagcctaaccactccctatgatactccgttcttgggtcaccccaaaactgtgttgctcgcacaacccatccattacacaggtcgccccgggtccacatcgcccctaaatcccgccaggtcccggtcccttctttcaaataacgccccctttcttctccggcacccgaaaacccactccgcgctccacccccctcctgcctcctgccaccgcccccttcctccctccgcccgtgggtagtgctagcccctaggacagcgccgggtctggcttccaaagctccctcaaccctcttcatccagcttccattccctctttcagtcaccccgccagaccccagggcgctgcggctcactccacactttcccgggaaccctacgcccaggaggctcagcgaagctccaaaaccaattttacggactgtactactgatccacctgtcggggagaaagactctacccgcagtttgacgaaaatggtcgtttccagatgcttgtaggatttcctcgctaagctccaccctctgcggcgccttcttctgattggctctgagtaatcagagccaaagcgttacttccggcggaaaaggacgcgggagattcgattggaaggctgccggcgtgctactgagttcggccggtccgagtcactgtgcgtcgcctgggcccgttcctgg

SEQ ID NO: 56699 - DNA, 579 bp, Homo sapiens
gcacttacagttaaaaaaaaaaaacaaaaaccctcttccccaccctcatttcattctcagaagcatgtatgaagttgtaatagccctgacgtatggtttacctactaagataccctcaggagttctcatctagcaagtgagatacaccttatttatcatacatagccagctctgctgtcccagaatctattggaaaatgaatcacacatagctctaagaattcaaataattactctggggtaaatagttctgggtatgagtgtacaaccctggctagagttttcaaagataaatattcaacaatcaccaaagcttctggtagcatttacaatactataaatgagattacaaaaataaacaggagaatgatgccacaaatgcctccttgagcaataatcaggtttgccaggaactggagaccagtgatgacagagcaggcctcctgctcaatttccagaaacatttctctttgagccaaatttggtctttaagaacaagctctggcatctgtaaaacacgctacaggcttgttataaagcccatttatactatatattgagttacgtgactcagaacagc

SEQ ID NO: 56700 - DNA, 3112 bp, Homo sapiens
aatgaaatatcacacagctacaactttggagacctaaggatctgaatttaaaatgaacaaaattggcttagcagcagaagacagccagtaaagaatttcgcccatgtctgactcagctaggaaaaggtttagcattctagagttaagcaaatactctggcatttctccttcttttgacattccaagagggggtgtggttgaccccaggcccattcatttccaagggtgtagatctctcagccaagactggccccatctgttgtggagccagccagctgtttatctcaaagtaacatatctattgccctaattatccctataactcttacaagagcatcatgtaagtcagaatgctttctctcctgttaaatgtcagttcgtttaaaaaaacaacaataacaaaacaaccaaaatcactcttccatgggcacctttcagtaatggcaaatgaaggttaacagcgcttctaactttccctttctctaatgtgttaaaatgaacccctcttccctaatcgatctcttcaaaccgttatttgtgagtagtgactatgcctcaggaaacagcagctcattatggtaccattgtcagtggcaaagagcctatgcaatgtaatttaaaacacacaagcacaaatctgtcggctccacttccaaacaatcttgaatccagcagtcggagaacggaaaacatttaacaaaaacgctgcttccagcagcctgaaagaaccttcgccagacacgtgaaatgtttctgactggcacggagtgcaccattaaaggacactgtcacctcaaatcagcagaaaaggcgagacaaaccacatagacatacacacataaaataaagccctacaaaacttaagcacgttcatcttaaaaattaataactagtgctcgtccaagcgacattcaaatgttctaaagtagtgcgaccacattaattcactgtctccatttctccccacgcatcaccccttcccactcaaacctcagctctcgggccgtgtgtgacaggactgcagtcccccacctctgccttcctcagattttccaagagcactccccaacatccttcccagcccagccccctctctccgcctcaaaaaggttgagaggagttgcgactagggaattggcaggcacccgtcctctggcgggggaaggttgctggagttgttctttgcagtgacccaaatggcacagagcttttccccttagctgtgcctgcaagcctctccccaatcccccccacctccccaccgctcacagcttcccaaaagaaagccttgagaactaagcgggaggaataacttggtagaagcatttgaataaatcacttcaactcacctggtttgggatttttctccccaccccaggcataaacagaaatggatgtgcgaatgagtcacgcacgcaagggaaggtctgcgatgtcctgagtccaagggctggagtcagtccctgccctggtgctgctgctacacttagctcagctggagcgagcggcaatcgcaagcccagcagcagcagggggtggagagaccgtagcacaatgaatgcagtggggcttttgcaatgacatcatccctctgtccaaacgtccccaatagccatgctcgggagcggtgctttctgggaactgtagtcttcttacgtcctgaagggatacccaggcaatccccgaaactacaatgcccaaaatgctccaagtgggacgcgcccagagtgaaggagcaaaggggactcggccgccatgttaggagtactgggacgattccgcggagccgggcagaggttttaggggtgcgcaggagtcaagtggtggttcagtggggacggtgaggtggaggacgatctggtcggatagccgcgggcacgaacctgggaaccagagggtggaggccatgctggggactgatgtagggcgggaccgactggaagcggcatccagaggcccagtgagcctcggtctcagctcctgaaggggttgcatggggccctacgcttccttctccattttttagctaagagattgagagagtcggtttacttttgggcttggagtatcatttagatctgttaacagtacagttgagagagttggtgtcttttgttgaggtgcgaggacccgaggcggcgaccctcgcctttattcggagaagcccacttccacccacagagttggggtagtcctccgaaatgcatttttgttttgccgtttgttttccaaccccctttcactctccccaaagcttcagattcactgatttttcatacaggaatgattaacaaaggcgtccgaagaaatcgttgttggaaggtgaccaaggtggaaagagacgttgctttggccctgcaagtaagaagagagagggaatagcctgaaggagtaacactaaatttaaaatgacacttttttaccaaccagcgaaagcagatgttcaaaggggatattggccaggtgcggtcgctcacgcctttaatcccagcactttgggggcagacgcggggagatagcgtgattctaggagttcaaccccagcctgggcaacatgcggagaccccgtaccgtctctacaaaaacattaaacaaaaaaattagctgggcatggtggtgtacccctgtagttgcagctacactagaggctgaggtgggaggatcgcttgagcccgggatgttgaggctgcagtgagcctcgatcctaccactgtgctccagcctgggcgacagcaagcccgtgtctcagaaaaggcgggaggggtgggatattattgatgataggccttctgacgtctggcaatagattccagagtaacatcggtcatggataaattttttttttaactaagtgactgaaaccaaagttaattgtcttttgagtgattttgcacagtatctcaaaatgaactgtactttttttcttgtgtcactgaaacagtgctgtgtgttctttttcagagtctgtcacactaagatgagaaatgtcctttcttcctgaaggtgtctgatgtgtaaaaatatgatatactttgtgctgtttcctcccttcccttttgcatattattctgaaacaacattaactagttactttgcgtcattgaaggtatgc

SEQ ID NO: 56701 - DNA, 1481 bp, Homo sapiens
gccagaacagctatttggatgcttgcctaatcttcaatactggtttcccttttatacatgactgcaaaactgactctcacctaggtttgtgatgttagaaactccagttgtttactattattattaaagtgggaaacggagttcgttgatcaaatggattaatgttttgagtacttactatacaccaggggctcttaaatttttacataaactttctggatggagagtgatagaatctccattgttcacttgccacaagccacaccatttgtagctaacatttgaatgcttactatgagcaaaggcactgttccaagggcattacatgcacatcattcatatttctcatttaatctttataacaactccttaaaatactggtagtattcttgttccctaatttgtcaataagaaaactgaaatttagagattatacaatttgcccagcactattggaaagctgggactttgaaacctggctgatttgactccaaagtctgcactctattccaacagactgccagtgcctccagaattaattagcattaatattttctgttgtttatgatctaagtatggctgtccatggcagggagttaatgagggaggcattaatggggaaacactggaccacttctgagagatgtggtgccctccctcacaaacaggtttcttgtggtgaaatcaggttggaaggataagagaggctgaagaaggtggaggtggtgtagttgggcctgtttaggaactgattacatctgagcctctggccctttttcctgccagctgactcagagctggcagatgggccaaagtccaggcaggttgatttcatgggctgtatacttcaaaggatctgattcctggtgctactaagcacattgcttttccgaaggcacagtcttgtgggggagggaacaggatggtctccatgaggtgtttgtgaaagccctaggcaatgtttgctctaatccaaatatatacagcttgttttgagtttggcaataaaacacagagccagccctaagcagggctgaaaactgagtatttaaaccttaagtattctgcaatacaacaacagttaagtatatgggtcctagagtcagatagaactgaaatctaatcttgacttcaccactcagctgtagataaattactagacctcagttttcttgttcgtgaaatggggattttagttatagagtacctacttcatatggttgtcgtgaggattaaacaaaaatgtataccacagtacctgagatgtagtaaacactcttgaaacattagtcattattcattttttaaatttttccttcaaatactttcctatccaatagtcattattcattgaaaacttctattttataagacgatctcagcacttaaacaaaataaattgattcatcatgttttcacttaacaggcattcaaaaggcatttattattgtgttgggtagatggatggagaaaatagcaat

SEQ ID NO: 56702 - DNA, 3461 bp, Homo sapiens
ttttttaagagcaatttcttctggggagcaacaaattatctctcaaatgcctagtagcctacggaaggcaatggaaaagcaattttaggtaattgacacttttttttttttgagacagactctcgctgtcaccagcctggagtacagtggcgtgatctcggctcactgcaacctccacctcccgggttcaagcggttctcctgcctctgcctcccgagtagctgggactactataggcgcacgccaccacgcccagctaatttttgtatttttagtagagacggggtttcaccatgttggccagggtggtctcgatctcttgatctcgtgatccgcccgcctcggcctcccaaagtgctgggattacaggcgtgagccaccgcgcccagcccgtaattgacacattttaaaagcttatatttaggtcaatatcgctactcaatgaaaaaattacgtttggtttgtgttatgtcgcagctccacggtgaactatttgaaagctttgtgtgttttacgagcatcatttccaacctgggaagacagccccacaagtttaaaacaaaagtgcatgcgcgtgtgtgttttcctacgtgccccaaatagtgtatgctaaggaggttctgaaatgcagattcacagtggagatattacggtccagctgggtgtggctgttgtgaaaaactcttcctagagctcatagtgggctccttaaagagctcctccaaacccccaaggaaaaagcctttcacacttaatctctaaataaaaggcattttcctggggattcaagtcaggcaagctcgcctaggtatttttgtgggtgtgggaagcggcgtgctggaagaaactctccagcagtgctttccgaagttccgggtaaattgggcacctccctcccacttcccagttcccagaggggcagctggacccgccctggctctccagagcacctgagacgctaagggagagggggtgcggcggcagaaagcctccgctccctccaacccccgctccctccaacccccaccgtcggtagcagctacggggcaggcgggaggaaagatgattgacaggcccgctcagtggctgggaagctagagggagggacgaagaggggacggctgagtcttcttctcaaagtggttgggttgggccgcgggaactgccttcccaggcctattggcttccctgaatgggttgttatggtaacaaatgaccgaacagtcccttatgaatcggccaatgagaagggccgtcttttccagtgcgcctccgagcagtagatgttgcgaaagtccgggtagaggccggagaagaaggcggtgccagggcgtcctgcggaagggccgggggcggggctcgtgacgttgccgggacagccaatcacgcctggttttatcagtggccccgcccttttaccgcacatttcccctcccctagttcatttcgcacgacgcagcggttgggaacacagacattttcggagctggagccgccactgccgccgccattttgtgtctgtggagaaagaagcttctgtggcggctggaagtggacggagatcacccgcgagacggcggcgtttcatacccgaggttccccctgtgtcgtcccccatcccccctccgcggtcagcatgtggtgaagccggagccgcgagagagccggggagaggaagaggagtcggaagggaggcggggtatccagagcggcttcagcttcagctgcagcggacctcggaggggggccgcggcgcaatgtcagagcagacgccggccgaggccggtgctgcgggggcccgggaggacgcctgtcgggattatcagtcatcgctcgaagacctgaccttcaatagcaagccgcacatcaatatgctgaccattctagccgaggagaacctgcccttcgccaaggagatcgtctctctcatcgaggcccaaaccgccaaggtttttatacaccccgcagcctcctattacttctaatactccctgattttagtgtcagcctcatcccaggtctcgcttccatcccaagggggacagtgttccttctctccaacccccccacccccctccaactcaggctcggtctttggcccaggcttcgagcatgggcctctgggggggagggagtggggaggataaagggtggagtcccacttccgctttccaactccctttttaggccaccgcattgtatatcccgacacacacacgctttgaatagagccctttggggtgggggagacttaaaggcagtttgtggtttggggaagtaagagttaacataagccattttaattccctgggaagtgggagagtgggtctcccattttccccaagcaccctttttggtaattgtgttctgtgggttggaaggaggtgaagggggacctgggagcgagctgttggtgggtgggaatagggatttggccccgagtggagcagccgcctgttaggagcccaacatggcgcctgaaaagcacatgatgcgaaagggaagagaggagaatccattccctgccagccaggcagctgctcactcccgtcagccccattttggggtgggggcggctagataaaacttttattctcctattggagggtctaatttgtcccaaaataggggcaagtggggttgagggtggggtttgggtggggggaggagatcttatccaacctgtaggtggagaactggcccagagggtaacaagtacttgcagtttctctgaaaagttcagtccctcctcctcttccttttctctttttctcccttccctgatagcgaaggagtgtttttctttaccccttgacagaagtggtcctctgccaccttatatttccctgtagtcctcctcttctgtggattcatatgggagcgatatgtcatttaagtaaagttactgttcaacttagttacaatgagttttaatagcgtcccagtgctacattttatttttcaagcttgtactcacggtttagttttttctagttgttagtgattgcaattatcaggatgagcctccttttagcagagtgaacccctttttaaaggccactttaacaacaaccaccaatatattgtttagagacggtttctgtctagtgtaaaacttgagtggtctgactctaataaatggttttgaaatgtgtgactggtattataaaatttgtgaataaaacatataaaatatgtatttgtcttttttatttacctttgtaaggtgtagaatctgtttccaagacttatttttatctacgtggttgtgtgttttaaacaaaagtctttaagtgacttgggttcattcttctttaggttccatccactcttttgggtaaacctcttcacaagatacacggtttcaggtggtcctttcataatttaaagaggacgaaaaggaagggttttttttctttttccttttaaggacctcaacaagtttatcatgctcagtctga

SEQ ID NO: 56703 - DNA, 2287 bp, Homo sapiens
caaggatgtaagacatgtggtgtaacaaatgtaaaagaataattaactgcctttgttcttgcttctgcaagtaggcttcctgtagcaccaaactcccgccacaaattgcttaaaaggtgattgatccctttgttccgggctcagactttctggaccccagtccgactgagccagtgatcaccttaataataaagggttgtcctgaattctgtttggcctctcccgtctctatttgtcccgcaacactagcagtatatcctcaggcaattaacttttttttcccttgtttctctctctgtaaaaaggaagaggaatacttattttggcaggttataataagaattgagtcaaactcatttatgttggcataaaaaaatgaacaagaaaatataaagcacttagtacaatgccaggcagatcataggaactcagtagatggcaattgtaatattacaaaaggtgatggaagtcaaagacaatttactgtacctcaagagagtagcggtaggatcagaagaatttcccaaatgtgttcacagaccaaaactgggggaaaagcagggtagtttcctggtaagacgaacagcacatgacaaggcagagatattaaaaagtaaggtacgcttccaggacgagttcattattcctgaagggagaaggcaataagggtggaaaaactgggccgagaggggaatccaggttggtgatgcccctggagggcaggtaattcttactaatttctgtattttctgctgctggcacaaaacgtgacccatacgtttgcaacaaatggtgaaataattcattcctgttgttaagcaatagggttgtagaaatatttgagcagtaaacatgctacagtgaaaggattctcggatttggagtcaggagacctgaagcactcttttgactaatgacctgtgtttttttactggttttacaacttacctgctgcctggccttaccaaagtactgatatattgagtctcttgacccataaaacaggggtaacaactaacaagcgattattaaagagttggcgctagtaaagtacgcaataaaaacagcggctgcagctgctaaattctcctttaggtctttttccatacttgcgaaatgacagggcaacaaatttccttccaaccaccactgagaaagtataccacgtttgcccaaggacaaaaaggccccgcccggcccgcgccacacaggtcacctacgcagaatgcagtcctggggggttccacttgtgtcgctcagcgatggagggcgcgatcgatgacaggccactccagagacggacctagataggttcgcatgaggccgagccgaatttcaccaaaaaccagtttacaccacctcccgatttgtccacacgaaaagccatggaatagctgagggaaaggaaaccggaagtagcgtgggccgtgaggaacgggaaatgacctcagcacgtcggaagtgtactcgtttccaaggcgacggccctgctgcctctccagccaagtggctggagtcgggaggctggaaagagactccgagaaagtaccagcggaaggcggccgccgctacggcgattcgcagggagtagcagacgaagacggtggccgccgcactagccaccacgtgtggaggataaacggtctacacggccattccggcgccgagtctagggaaagagttagcgacgacggggaaagaaaatgtgaagagagcgaccgccgctccagggtcgctgcaggaagcctaagtgcagacgccggcttctcccgcagtgacttgagaagggtcagtgaaaacctcggccactgccgcagcgtctctagggagagagttaggggagatagtggccacagtcacagctgctcttgggagagagttaggggagacagcaccttctgcagcagcgacgtgaattttagtgaagttggaggccaccaaactaccgactccaggggaacagccagagaagaccgaggcctccgcctcagtggtccttgggagggagtcagtgacattcgggacccgcgaactagtgacttcggggatagagtcagtgacgatcgcagtcgccgcttcagtggctcctgggagggagggagtgtcgaaggcggccacagcgttggtagttcttgggaggaagtaagtggagaccgcggctacgcagccagcgactcctctggtgtgagcggcagtgaagacgccagctaccgcttcagtggcttttgggagagagaaagtgaagacgaaggtttccgctgcagcttctgggagagagcaagagagg

SEQ ID NO: 56704 - DNA, 431 bp, Homo sapiens
caccctgtggcagaggttccctggttgtcctccaaaatccattctcccttcttctgtagtgggaaggatttatgtggtctgtggccgcgcaggataagaactaacttcccagcttgcctttgcagccaagagaccaagttgtgttcagaaggatgtgagcaaaaatgttacgtaaaaccttagggtcatggctataatgccacctcttgctcttttcttcttctggaatgtggatgtggtggtgagtcagccactggaccttgtgaatgagggcaacaccaggatggcagagcagtaaaataaggagcaagggccctgacaccatggagctgacatattagccctagaatgcttacattggactgtaagagagaaataaacctaatcttatttaagccactgctattctggatcttgttacagcagctaaa

SEQ ID NO: 56705 - DNA, 2648 bp, Homo sapiens
cctatcttgcaccaagctcctctttgctggaaaaggtcaaattttacttttgaaaaaacaaccaagcaaacatgtaaagtgttgtcccattaaatttaagctgcaagttttatattaatttactgctaattttacagctgaaacacttcagtgtatagccagttacttttctgtcaggaattcaaaagaacaggcattaacagcatatattcttacatgctggtctactaacgtgctacactagttgcactagaataactaaggtccttccattggtcagaggtcaaggttttcaaatcccttgattattgacattattaggcaagtttaaactacttgtataaaataaacattcaatatttgtttagtgaggaaggacacaaatcctactagttgtaagaagagatttaaggtttctccaagaacactcagattcaagtgggataacttttatgttaaaacattaacatgtacttatggtcatttatttcccagtatgatatacacttcaaagttcattctctaagaacatttaattttgttttcatttggatatgtaaaagtcaacaaagatggcagctggatgacttcctggagttcaaaagtgctacctcctttttgtaaaatccatcataatgtgtatgtatgctaaacactcaaatacctaacaaaagagaccttgtgaatgaccctggcagctaaacagcaatctcacagatggaggatcaacaactgcagttttgactgcagctgttactggtgtggattaaaatgaaacaatgagcaaaatagcacaagtaacaatatggagtataaataacagcgtagaagtgtttgggtaccgaatggctcagcgtacctggcactgaagattcaagaaggtgaacagagataagaggtgcctattcgcctattttgtggacaaccttaaaacggtttaaaaactgggagggaagttaaaaaactgggggtgaaaaacaacgacgacaacaaaaacctagccctagaaacatttctctgaataaagttagatgtcttcaggacaccctgttaacaggggtgccaacaggttggaaacttgtgggttccagtattcacttattttcccaaagtctacaatgtgactgaaatgtactgagaattccagtgagaataaggcagacgtggcctgaaatttatgatgctgtctaccaaaaacctgggctcgaggccagcacctaaaaaaacaaaatcaaaatttgatcaggccacaaaagaaaacaggacaccctcaaacacagattaccttacgttggctcctgacgagattactagcctcttgtcaccaaaaaacggaaacaacggctgagaaagaagccgggcgcgaagcccaggccttcaaaggttcgctttaagaacagaaaggcagtgctttcctcagtcctcgccccttggggcgagctgggcaagtcggggcagcaggcagcggcgtcgcccagcacaaggcgtgaatccgggaggagggcgtggcaccttctcttcccgttcgctcgagcaggcgcgaccccacgggcatcgtctccctagagagcactcaggcatctatgacacgacgccttgcctcacctctccgcagggccggcgagaaatgcccgcggggccttgaaacccaacgatctcctctgccttgggagagaaagagccgccaagcctggcgactattcatgtcctcagagttttccggtgggagggaggcggaagacggggtaaatctcgcacaggctttcgggcaaggtagttctggcaccacaggaatgctgggaattgtagttttcgctctgtcacaagctcacctcccagcgcaggcgccaccgtggtcccacgaaactgggtctcttcacagacagacccacagttcgcgagcatggctcagcgctgccccgcttctcccagcgccccttcccgacctttgaacgccttcaccgccctaggaaagcgagatcttgtcagagaaccttccggcgcctgtttcctggcagtggggcatagtccaacagctggctcccccaagatagccagcggccattacgcgcttgggtcgggggagatggagtcgcatttagccgcacagcagcctggaacctgaagttttcggccgctgagcgttctgggtgattgcgtagtgcgagggccaacgaaaccttctgggaagtgtagtccagcaagccgctcacttttcgtgaggcgtcacatcctgctgcttcaccctctggtgcacgggaggaccaactatttcagtcggtatgtcctttctttagggaagccgaattcctccgtttctaggagaaattccttgaattttcaccatttatccttctcagacctcagttactcaagactgctccgcatagtaaaatgctgaaagcaacaatgcacagtagttgtattaaaatgcactaatactcatgaatattctctgtaagttgtaaaatggcacacagttgtgcggtgttagtggcttactctctcaagattctaaacaattacggctaggtttctatctatatgtattcaaagctttgtgagagtcaactaagtaacaaacaccatttctaaggcccgaagcacattgaaagaacaaaacttgattcccgccaacaactgcttta

SEQ ID NO: 56706 - DNA, 851 bp, Homo sapiens
aattatctcattgaatcctccccataacactatgacatatacacatacaggcaaacacacacacacaaacacaacacaaatacctttttctatataaatctacaatacaaatgagaaaactgaggcttagagagataacataattttgcccagccggcaagtggcagaactgggattcaaactcagctgtctcggactccaaagaccaaacttcactactgttttgttttcggtttggattcttccagggcttagcagttgctgagtacacagtagttaattgcctaagcaatgttggctgacggaagaattggttaatagctgttgtctgcagtagaggaacagatgctgtgacctattacaggcaggaagggagagctcaatgactgtttcataatatagtttgttcaaatgtagtcacgtgatgttacggggtgaggccagtgtggttatatgctcccaggcatttgttaagtaaggaaagtgcacaaggcagggacaagagtccaatcctggtgtcagacgggccaggcacactgcttctctattagacacattttctttttgagagtccttgctaataagtttgattcaaatcactggccatctgaccttggactagttatttaacttttttaggattcattttcttcatctgcatcatgaatttaataataatgcctacttcacattatcatcaccacttgtaatgaggctcagtggtaacttgttcaaggtcacaaatctagaaaacaggaaagtcctaactggaacccaaatctctccacctacagagcatattttccttcctctatcacaagttactttcagaaatgcagtagctacgtgcc

SEQ ID NO: 56707 - DNA, 1520 bp, Homo sapiens
cccagccctgaggagtcttcttaaacttacaaaatgaagctgcttctctatggatgtagacatttcctggtttcaacattgcaccatagctatgcattatgtcaacattgggaaaaggcagggtggaaggtgcacaggagctctctgtacatttctttgaaacttcctttataccttttaaaagttaaaaagcagcagcagtggcagcttctcaaggccaaagatggggagctctatttcatttgcatttctactcagggctataatgaattgaactcaatgtgttgctaaagattattatgaaattaaaatccaattaggatggtctcgtgggtctggtaaaagcttggattagagaccaggcacaacacggggttgggggagatggactgctcaatagaagtagggctgagtggggagtttaaagcactggcctctaagtataggaaccactgtacaaattttaaaatatactcaggatagttaatatttgatcaaaatccactgtgaagtgaggaatttttcctgctgggcattctattttccagttctatgatcaagcccagtgactggtaaatacaatatgccccactagcccccagcttctcccagctcctgttccctcctggtgctcaaagggagaaaggctaagaaattccaagccctggtcaggaaagtgatcttgaaatcacacacaatgaatagtgccatcactaatgactcagcttgtaaagaaccagtgaagtgaggaaattctttctatgcacagaatgtctagatatttaggcaaaattgaaggggatgaggcaggaataaccaggacaaactcagtaagaacttcaaccctggttttctcaagattcagtttatgtgctgatcattttctctcatatctaattcccttacttcccctgctctgttttacatcgaaagtgctgacttcatgcaaattacatgcaatttgcatgtaatttggaatttgctccctgggaaaatcacttctgactaggttcagccaatgggaggcactaacaggagattggagggtaggaggaagggaggcataagggaatttctttcccctctctgtttcaggtggcatttcaagaatgtctgtttttcctccatgatttctatagatattccttaattttcaagtctccattagcataggtatgaaggtttctcaatgtgctcttgctttggcttcctttagtcagaatagaaagagaaagttttttaactttattcaaacatattaggggtttgctagagaatacattatttgcccctagttatcctgatgttataaaaggaggcagacctggacaagtgtaaattagcacagacattctaacaatcaccagaaaaatgcacccataagtagtgccaatgcaagaagttttgactgtaatgcccgtgtgcagtaggctgaatgatggcccccaagtatatctatatcctaatcccgagaacttgtgaatgttacttgctatgctgaaagggactttgaaggtgtg

SEQ ID NO: 56708 - DNA, 2471 bp, Homo sapiens
acctctctccctcctcccatcttggtctccctccttctgtccctcatctcatctctccccatatgtacacttcttcttctgactccccccataataataatatccacaaccctatatcaagcacctgcttagtgttggagattatactaagttttgtgaacaacaaccctgcagactgatattactctacaacaaagatgtgtttttaagattccagtcatcatgttctttgcatgatgccctttgcttgctctgcttgtagtaacagaaaattcaaacaccaaatataccagttctcctgctttgcccgaggttagtgggagacaaccttgtgctgtgggggatgtgctggctctggggaaaaagcatttgcatttaaattccacctataactctgaattagtgcaatgatcttgggtgagttattcaacctctcttgtgcttaaattcaggatctattagatgagaatataattattattcagataactattcataataactatttatatagttgttatggagacaaactctgcataggatgcccatgtaaaaagcatctactattcctatcatttttcagataaaaaataaattgaaataacaaaggaaatatctacaacaatatattattagtgggtaaacaaattaacgtgtgtggagcacctactatgtgccagataatatatattttgtctcatttaatcctcatgctgctacagcaagttagattttataatattaatttttttttggttagaaacagcaacagaaagaaagtactttgccacttatgactctaatagtagagccagatttgtatgactccaaagctcatgtccacctgctgtgacccacggcttggaataaggacaagggctactgcagtgctcaagacagcttttaccctggactccaaagggcactgcaaggctccctcaatgctggattcaagtaaatccgctacaccttacacttccgactcaagacagaaatcaagacatagtgacctcctattgggggcagatatgaaggtgactgacaaagcatcaggacagagcgaatgaatcattcatgtaaatgacaacattaacacatgccctgacatgttcatctctcatcctcatgcctactgtgaagaggcaatgtttgtatctctataggacatttgtattttaatatacttggagtgcatttaatatacacatgtattgaaaaatgtcttcaaagatggtctaccttaaataccaatttttttggtaaggaaacagcagcagaaagaaagtactttgccacttatgactctactaggacagccagatttgtttgactccaaagttcatgtctacccactgtagcccacagcttggaataatgacaagggcatctgcagtgctcaaaacagctttcaccccagactcaaagatggcctgaattatctatggaaagaatacatgctctgaggcaggtccaaatgtctttcaaagtcaatacagattgaaaatggctctatctgcaaaaagcaagcactgtattgaaacctcactatttggccccaaagacacgacccccagctcttctctctctaatctcagaattatttaccttgtcagaaatctcatggagaggaggcggagtgttatattctcttgggccaatatatagaactttaaaaaagggaacaaatacttctaaggaacctgctataattctggctctatggaatgcatcaatacattaactcaatgaatctccaacaattaaatgtgatccacatgagaatatttgtctcttctatttatccctgtactctcagaactgttcctggcacataggaggtgcctgttctggctcttgctactggtcctctgcactgttccttaactctgccaccaccatgcttcccactgtattacaagatcaggaagcccgagaactatatgctcagaaccttttgtcagtagaattgcagtttagattctctcaaccacagtaacttctgttaagttccaggatgttaaaggcaagtagcagactggcacaggatcacaggattttgtggctctcagcactgctacagtatcttacagtttcctcagactccacagtccactgttggtctctagcttcagggctggaacaaactgtggctcaggaaacggcttcctgaggttacctgatttggttgtagctgcctccattcctaactagcagtcttcaaacaatttctaagcacattattaccctgaattacattgctttctgcttaaaataataaaggtgctatctattttcctgactaatttaatgttcaataaatatatgttaaataattgagtaaacaacccattcagtgggcattattatccctgccttacagttgtggaattgaggctcctagagacaaaataatttaagattatacagcaaagtattaaatgtcagatctgagagtagagccctggactgtc

SEQ ID NO: 56709 - DNA, 471 bp, Homo sapiens
ggacagggtagggtggggaacaggtcaatggaacaaaagtacaattcactcattcacaatacttttcattctccctcttcgagtctctcaaatacacacttggcccctgcgtatgaggctctgctgtctctggctgagctgaaagtgatgaaaaggacgtgtgatggaatgctggaaacctcattactggctctttgcctacagaaactcagccagcttatcttctttcccaacgaacttcaaacttacactggctcagctggttctaggtgcctgtaacaagctgctctgcccagtggagatcagaagccgatagaagatactctgcatatgctttgctgtcctggagaatatgttcccttttttctcattctcattgtagcagattctccaagggtctcggccactcctgggttgtaacgtggataccgaaaagtgcaagttacaataattttttcctggacggtatcc

SEQ ID NO: 56710 - DNA, 1153 bp, Homo sapiens
acaacaggaagagcacagacactgggataacctgtcgtggtagggaagggaaagaagtctagtatgactgggtcccagagaacaagtgagccagcttgataggtaagcctggagaggcctaggggccacatcacataatgctgagtatacaaggaagtttctgtaatttggtgttcaacaaatcaacttacttaatttgaagttgagagatagtcagcattgccctgctagggaaacatcctgaggctattccacattattatagtagaaagataattttgtgctttctttgtcagctgtataagatacctgctgaaagagtatcttgcctgatcttgccagggacttaccccctttgcaaactcagtgttggcttgggatcaggatatctcagcaaattccccttaactttcactttttttttcccctaacatatcttctcttaaacaggtagttcacttctgtacaaaaggattaacagtgtcagtactggttaaaaaagtgttttttaatggggtgtggtgaaatgaccaggatatagacacctacagtttcaaacatcttcttctacttaacaatggtatgaacttggacaattttttacctttataaatcacaatttccttatctacaaaaaggtagaatgtgacttatctcatggggtgttgacaggagcaaatgtagtaattaacgctaagtatctactatcaagactgacacagttctacaaatggtagctgtcattattgcccatgaaggtgaagtaggtgatttacatggcaggcttgggagaaagaaatgagtctgttggggaagaagaaggccaggtttgtttgaaggcagaggaagctaggccaccttgcactgctaaattgtgccatgttctgactggggctgggcccagagaaagctctaattcctgtgtgttgattgaaactgaggttgaagacactgatctgtctcttcctggtgctcatgaaaattcttcctacctagcctgagcttcatggacaaataaaggctaaccaaagcactttcttttaaaagtttcaagttacttaaggtctctagatttggagcagaaagagatgctaataatgaaacttgctaaatacagcaatttttctgcagtccatacaaattttattagtta

SEQ ID NO: 56711 - DNA, 1272 bp, Homo sapiens
caagatggacaattcataggaacaaagagcagtggtattggaatgacagaagaggataatcagagactaattaacaacaatatatagttcatataacatgtttctatttgcagatgtggacggcataaccaaagcttgaaactggtacaaggacattcatgtagttagtaggacatgagagacatttagggtttagtcttgtaaatacaacagaaataaattttctgactccaaatcctatgtatttttctagtagcgagaagaagctgagggcaggtggaatgggttcatataaatatactccagaataaaaaaggtaaatgtaatattataaagtattatagtaacataaatatgctagtaacaatcatttgtaatactaataaatgtaaccaattttcatggagcactaactgtacccaaggactgtgttaaactcttaacatggactgtctcatttattctcacagcccctttgacaaatgtaaagcctgatacttggttaggtgacacacctaaggttccacataactagatcctgactataaaaccatagcctcagcagtcaccaacccccttattgaactgtgcattcaaagaatgcaattcaaaatcagatacacattccttcttgccttgtgcacacaaagagaactagataaagaagatgacaactcagcaaaggccaaaatgtcactgataagctgtgtaaagggacaatcacatgggatagggtgtatagatgctatgaccactctgctcagtagaggcactacactgctgaaggttagttagacagataactagcttcccagcatttcccctcacttggacgcctctgtggtatcatttgctacaaaaggaggtcttctcgggtaatgggatgacgtccatctgtgacttgacgtcaagtgagtcattggactgtcgtcatagggcaggcacctcagtgtagatcaagttcaccctgtgggaaccctgcaagtttgctggtgagttttatatttattctgaagtaacacacttggcacctcaggctgactaatatctatgtgtgaccaaggtaactacccagctagccagctttcacagttgtaagaaaagttacaggcagaaaaacataattgaacactaagatgagggtcactgtgcaagtatcatgtctagactccagtctaagtgtgtgggtgtttccattgcctgtctttttattagggtttacaggaagccttgctaatcaaagcatgctccatgggccaaagcaggagtact

SEQ ID NO: 56712 - DNA, 780 bp, Homo sapiens
gaaactcagggaaagagtgacataaggaatatatttccagaagataaattattccagtttggttcattaagcttttattgtagattttaatatgcaatggaaaatatgcttttaaaatgagggatgaataaattccaaaaagtactttagaaaactctcttcacactactgcactgtggcaattgcaccatctgtaattctgcacctgcttcgtcaactgctggctgcatttcaggagacctgacttcactgttttctgactgaggcatacagtatttgccagagtacttgcgaatgtgcaaggatgaaaagagcattggctaggaacacagatgtcttttcagcagagaattaggtggatgattcatctctagagtatcaaaagtgtgaagtaagtgaagttgccagagtgggtctgaaaacatactattgggtcaatgttgtgcaagtgggacatatttttctactaagggtcacatacataaaacaacttgattccaaagcaactgttttgttcttaacaaaacagaaacagttggttgctgtttatgttaagaatagaaactacaaatgtaactaaagtaaaactttaaaatgtcagtttaatattatgtgaagattaagaaagagagaaaaggagtagttctaaaggggaaacaattgaggaagaggagaagagagtaaaatgtaggcaaatgcagaggaaatggggagaaaagataaagaaaaagaggaaaagaaggaatggtggggagacacttaattgagggctatcaagcc

SEQ ID NO: 56713 - DNA, 506 bp, Homo sapiens
ctggagattaatgaattactgccacatcctaaaagtggccactagagaaaagaggagtagctgaaggttttgtaggggcttagtcacatagtccagtagtaatagttgggaaatgagtagagaggggataacaaaaataaaaacaaacagttcaattagtctagatggagaaaaacagcccacaggctaattgactatagctgtcacgacagttgattacagtgtctgtctgtaaaaacacagggggaaaaaagtacagaaaaactcatggcctgtttggctgccttttgttggtgaaatatcctacaaatagatgatgcaatgcaagccagcccctctctggtaagaaacagagtgaacccagtgacgtggcagtgtggtaggaggcactgtctgctgacacagaaaaaaaggtggccttgcagactgtggtttgaaatgccttaggagccaggtgctaggttacattattgtgttcaaagacagatcctttgggttatatcttt

SEQ ID NO: 56714 - DNA, 1126 bp, Homo sapiens
cacatctcaaaaaaaataaatacataagtaaaaataaaaagcatgaacctcagaaattgtaaaatagttactactaccattatcattttacaggtttatgttattcagctaaccatgagagagctgggatttgaattcaggcagaataatctgagctgacattcttaactatgaagctatgattgttaaaaattatcctttccagttacttaactatgtggcccaaaataaggtaaccgtgccccctggaggatgttagagtctagctttccatatactactactaatctttaaacaaccaccagaacgtactacccattttactgataagaaaactgaacgcgtaaaataaaatggtttcccaaggttgcacagtttatgattggtgaaagcagaattcaacattcaagtctgtctggttctttcacacacataagcctggctccctggattagaactaggctctcccgaagcacgctctctggtttctgtttgaacaggacttgcatacattaaatgtctgatctgaaatcaatgtggatccaggtattgctggaaccaatttaagtctaaagcaaatatttcacattccttaatcaatctctctctccgtgtgtgtgtgtgtgtgtgagagagagagagagagagagagagagagagagagagagagagagaatatcaagagtctagcagttcacatgagataatcctgctgaagaggccagtggtaaatcaaactcagagtgtgattctgaggttgcatttagttgaaggaggataaaaattcactgattgttgttctcacagaacacagatagcaacagacatgaaaacagagccactgtagaaaatgcctgcaagcagtggctactaacaaacggcagggaaaggctgttttaggaaggaaagggaggagaatctgctgccctcttttcattttactggccacacctcccccacatggtctgtcaagagaaatgggtctgagaaaagcagcatgattctcaccacagctctttagcaagtttccaggggttttcagcatagcaggcagctgcttcccaaattcagctctgttccctcctcctggttgagctgcttggtgtataaactccgcctggccagc

SEQ ID NO: 56715 - DNA, 3122 bp, Homo sapiens
ttcaagaccagcctggccaaattggtaaaaccctatctctgctaaaaaaacaaaaattagccgggcatggtggcgggcacctgtaatcccagctactcaggaggctgaggcagagaattgcttgaacccaggaggcggagattgcagtcagccaagatcgtgccactgaactccagcctgggtgacagagcgagactccgtctcttaaaaaaaaaaaaaaaaaagacagccatgtgaagacagagatacaccaggagaatgccataagaagatggaggccagtgttggagtggtgcagctgcaaaccaaggaacactcgaggttgctggtaaaactccagaagctaggaagaggcaaggagagtcccctacaggtttcagagggaccagggcctgctaacactttgattttggactctagcctccagaactgagagacaatacatttctgttgttttaaacactcagtttgagtagcttgttatctgagacctaggaagctaatacgttctggtaggggctacgtgagccaatgcacaaactgacatgaacatcacctgcctagaggggcaaaaggagtcactgaggctgactcaatccctatgacctgtcacttcagaaaatggatttgaaataaaagtataatcataccagtgcagttttgggagctgttaccaggtgcctgggcagaaagccttatattcaaatggcaaagctttccataaacctcattaatagaatttcagaagttttcatgtagttaagatatgtatgtaagaattactgtggaaaaaaaagacaaaggactaccatgaatgcatcattaattactattactgaaattcattttcaaagataatatgtaaggaaatacaaacatcttactaacctttagctgtagttgaactctaaaaattctttcctttaaaagaaacattcaactgttctcttctctgggggtatcacaggtgttgtcctgtataaatgtcctgtataaatgttttaccagctacaagttctgtttttttgctaattctaggggaggctttacataacaattagttcagccctgatgagttttctaattccttcttttctttatcaggaaaaaagaggaagagcattgcttcccatccttgctttctcaattgagaaatttcattgatcttactgacctactttccctttctacccagactcctgcccttagagcagaggttagccaaactcttcttgaacatggcattcttaaagttattcattaactatttcctttagtcacagcaaaatctgaaagccaactttggacactgataagaatgggaagtgatttttagaagaatcatcaaaatttttcctctaaacaaatatgtgtagcctcatcttctgacaaaccctcaaaaatactctaaattccaatcacataaaatccccttgattttctccgaattcctagcttttctttaagtggactctttccctcaccttggtctttccatgtatagtcctttctgccagcagttggcttcctctcttttatatacctaggaaactttccctcattcctcatgaatagttgaacaacatttggtctcctcagctctccctaacactagttcctctaggattctattgcaccaaattcatattgtgattatcctaattatcacactctatctttttatccatttaacaagtatctgttgagggtctactatactcctggagggctccactgtggctaggattattaccataaagcagatggtttctgctcccaagaagttcacaacatagaggcttattagaagagtaaactagaaattataagccagaacactaaagttataatcttgtacaataaaaatttatttgcatacttgcttttctcacttgactctgagattcttgagtattttatttactttgtgagttagtgtctgatatctaaaaagtacctaataacacccattgaaaatgaaaactttcagtaaactaggaataggggaactcctcaacttattaaataatatctacaaaatccctacagctaatatcatgcctaatggtaaaaaaaacttgaagctttcccactaagatcagaaacaaggcaagaatgttccctttcaccaccgcctttcgtcatcatactgcaagttctagttaatacaatcagacaagaaaaggaaattaaaagcatacatattaggaaggaagaaataaaactgtctttgttcacagataacataatactctttgtataaaatccaagataactgccaaaatctcctggaactaataagcaattagagcaaggttgtagaataaaggattagtacaaaaaagccaattaatttcctatatgctaatgatgaaaaagcgaaaactgaaattacaaatataatgccatttatattagcacccctgaaaatgacatacttagttataaagctaacaaaatatgtacaagacctatatgaaaaaaactacaaaactctgatgcaagaaatcaaagaactaaataaatggagagatagtccatgtaaatggagacctagaaatactcaatattgtcaacatgttagttctttccaacttaatttgtagatttagtgcaatcccaatcaaaatcctagcaagttattttgtgaactttatatggagaggcaaaagaccccaaatagcaagcaaatattgaaagaaaaaacaaatttggaggataacactacctagcttcaaaattttctataaagctatagtaatcaagacagtatggtattggtgaaagaggagacaaacatggtgctagaacaactggacatccacatgcaaaacagaaaaaaataggtagacacagacattataccctgaacaaaaataaactcaaaattcatcacaaaccaaaatgcaaaacacaaaactataaactccttggagatactgtaggagaaaatctagatgaccttgggttttgagatgactgtttggatacaacaccaaaggcatgattcatgaaagaaagaactgataagctggacttttttattttattaaaatagaacatatgtttttaacatatgtaaacatatggacagtttttattttattaaaataaaaacagtc

SEQ ID NO: 56716 - DNA, 2610 bp, Homo sapiens
cctgtgcttaggagaaaaaaattcccaactcttgatatcagcccatgtaagcatgcaacttctttagtttaaagagggtgttcatttacccttcaggtttggtaatcacctgataaaaattactgaaattccacccgaacagtgctagtagcttccctcaaatcagctgcttgttcttttgttctgtaattacaaagatataatcacactgaattactataattttcaacattctgtcaccctattagtctgagttcttcaggggcaaggcttgggcctttttcttcttgattttctcaaatatctcaccagagtgcttggcacatactagacattcagtaaatgcttagttgaacaaatgcataagaagttaatcaatcaaatcaatgactgaatgaataaatggtgcttgtcccctgcaaaatcctctttgagcagtctaattctctatgtaataagcaggagcctttaccaaatgtgatccattggtcaataaaggttgctgactgacatcttaaaagcatacttcggtggaataaacatttaccagcactgaaagtcagcagagagattaaataaaggataaacatcgctggctgtttccctggcaataaaggggcatctggtctgtggcataggatacagacgtgctctttctttaaactctcttataattggtcagaagaaggaagtaaacagaaatcctgatggaatttaagagtctctgagggattgaaatatatgcagaaaaaaaaaccagatttcatttggatatataaagatagatgtctcaagatgagtaatataatgaaggctgacaaatgatacctgaggcaatcctctttgtttttggttcttgttagccatgccaccttccaggtcacagccaggcaaggtaccaacagaatgaaaatcattatttataagcagttcaatccaaggtcaaatttattgtcccgcaaatattcatcagataagactaaggctgtttctactcatgtgatggatgagccaccagaaaacccctctgaccacgacttttgtctagacttattttcatgaaagataaagacaagacggaaaaggacttttgtcagtcagactaaaagacgtgattggaatgtatgtgacatttctgttaaggcaggatggtctagtagtgcaggagacagccatctaggttgcagtcaagaatccttcccttcccagacacatgaccttggggaagtcactggtcctctgtcatatctgtagacaggataaatgactcttacccaaccaccttacaaagctgctattaggatcaaatggaataatgtccctgagatgcctttgtaaattatattgcactatgcaaacataagcctggtatcttcatggtgaacagcgaaaaaaaaaagacaagaataaaagagaaaaaaaagaaaatgaatggcaaattaagactaagagaaaggaggaggagaaagtttctgtagagaagggaggggaaagggagaaaatacagaaaataaaaggggccaagggaggaaccggtagaggagaaggaaagatgcagcagtggcaatgaacgatctcataattctggcacacaggtagataaataggcaaacaaacacataaacataaaaccgaaggaacagcagaactggtcagccatgggatttagaaaatcatgtctatgtcaagaccacagagctctgataagcaagtggaagaccccatcaggcagcctcttaggaggagacagtgagtcaaccatgagtcagcctccttattataaatttctaaatggaaagcactactgagttcatgttgttctcatctgtgctctgctcagtcatacactcagacagatttgtaatcattgtgcagccattgataatgaccttttctttgcctagtcaaggtctattggtcattcagataagagccttccatgacctccctgaccaccccgacaaagtcagatgccctattataggtactcagagcatcacagtcccccctttttttttcacagagcttgacacagtaacagatttatatttatttgtgtgattattcaattaatgtctcattttctcccccagactgaggacagagtcaatgtctgctttgctcatcattatattcctaattgaatttattggttggcatcatcataaacagaatcaagttaaaaaaggacagtattcaaagagaggtaatggtgcaaatgtcaagaagaggttggtgctggggctacagttagaaagtttgggacagataaaatctttttgatagtttaagcaactaaatcttgtcatggaataatggttctggttttcattttcataacagacttatgactgggtgcttttttgctcctcgttggttaattcagcatattaactagctctttagtgacatctcagtcaatgtcatgggtgagcatattattattagcattaataactgtgagtactgattaagaggggcaattttctagttggatattctgcagcacgctgttttggatatatttaattatataacaacgaggagaaagtttattcacaattacattgagaccatttttaaacccatttattaaaactttaaaaggtt

SEQ ID NO: 56717 - DNA, 667 bp, Homo sapiens
tcttgattctgagtcctacaatttgttgccatggtgatttttgcatagaattttctcataggtagtttccttcacaaaggaatgcttttgaagctgtgcttattctctgttttcttattgctacccaataatttgatggttactaaagtaaatacaaagattgctcccaaaacacaaacagacatactaaaactaacagaaaatattcacatcatctcagatagagatattatctcacttttaacttttttttaaaaagctaatcaattaaatttagattgctttatcacggagttatttgaacgtcacagaataggaattctggagtaaaaccaatctggtttcacttcccaactctgttatctcaaggtatttgaccctcatgaagcctcctgactctacctgcctgggttgttgtgcagagtaaataagagcttttaaaacagggtgagttccttgttttctgttgtcctttacattacaaaatgttaactgtgcttttaaaacaattattgaattcttaatgaaagaatatcttcccgctagtatcaaaaaatagtgagggacaacaatgaatgctgtaaatttaagaaattatctattgagacaatgcattaatataaaatcaaggggtatttctttccatgtaaaccctttcacagattgc

SEQ ID NO: 56718 - DNA, 531 bp, Homo sapiens
tcatttatcttcactccagggtgcataagagtttccactgtatgagttaaacattggtaggaattccctttacacatattgtaattcaaaaatgaagaattataaggtgccaagtgaagttaagaccacgaggtatcatcagagttagtgtaaaatccagtttaagtattcaacttactctgattcagcactagctgtgtttatggtactaggagagggatgaggaatttaaacaatgactaaaatagtttttctgtaaatcagtaagctttatatagagaaacaaatctccatcagtgacctctggacagcgacagtagaaagaagtatgactgactcagcataaccgcaacaggcccaatagtctcacctctctctacaggaatttcgcaagagcctgctttttagggatgcgaagttatttccaacagttatctggttctcctcatctcagtagaccaagctcacttgtaaccccatctcccatacactgtatactttaactgggttattgcctaggtataccaagtt

SEQ ID NO: 56719 - DNA, 553 bp, Homo sapiens
cagggtttcagcatgtcggccaggctagtctcaaactcctgacctcagttgatccacccgcctcggcctcccaaagtgctgggattacaggcgtgagcccacctcttgcttataaagcaaagcaacaagcagttaagagtagggattctgctgattgtggcagttgagaaatgaatttagattggctaggtttgacaccagagcaaatattgacagctttgcctctattgctaaattcctattgcttcataggagtagttgagacaaaataaagctgtttcctggtaagtaaggattttaaaatttggaactgcattcccaatagatgaaaacattaacaatatagttttaacaatgtccatgggaaaaaccacaaaaagaagaaagcatgtttgttgaaagataaatgtactaaaatcagcaaattcttccaaaatatcataccattattaatcactgccaggatggttcaaaggaacacacatatttctcctttctttcccatcagaggcaattatggaaaatggtccaatcaaaagtgaatcatagccta

SEQ ID NO: 56720 - DNA, 2409 bp, Homo sapiens
aaatggatccctgtcctgaatatattgaagcttctgtgacaagttatctctcatccaaatctgcatgtatcaggggagtaagtaaggaaactatgttcccaagctgacaggcagaaaacaagggagggaagaaagaaacacaggtaacagcatgttagaaattaaataagacttctaactctacagccaagctatctggattgactcttgactctgcctcttactgtgagtccttgaaccagttacttgacctctttatgactcattttttcccaagtgtaaaaatagagaaattaatagtacctacctcataggattgttatgaggattaaatgagttaaaatttgttaagtgcctacagcagtgttaggcatacactgttacagaagtttggtaagtaaagaaaggtaggaagagtaagagaatagtggatgtaggtacctttaagacattgctttgtttgcttctacagagccctttactttccagtgttggggtctcttggctccttccagtaagcctaaccttgtttccggtctggtcccaaactattcttgttcagaaagatttaagaagccctagttcagtagttcaggtgattcagcattaagtcaagcttgctgttattcttgtcctgaccctgtgtcccagttttagttcctcattcttataatcaagtcccaaccttgtactccagttctgacattctgctcccctgtggctgagtcccggattgcagaacctgctcaggaccgccagaacctgctcaggaccgccagttcttttgaggtatttgaggtaacatctctcaaaaggcagcctatggactagacacactttgtttggcagacacagtgtttgcacttttgaaaattagttgcctgtatttagaaattgcaaacatgtacaaatttccatcttattttgtaaaatgatctggcaccagtggattccaagtggcagttgctctctttaaatggccatgtgctttctattccccacaggccccactctgactgctccatttgtttctgtgatttgcttggtcattgaagggatttgaggctgtgggctaaaactgagaagagccagtacttaccaagcacttactttgtgctaggtactgttctaagtgctttctgtgttttactcatttaatcaaaggccaggaatctgtttgttgttgtccattacccttgtagcccttcttctcagcttcataccccctgtctagcatgcatctgtggctatcccatcttgtttgatcactatcctccactcatcagctagcgcccactcacaaagccttgttggacctccataatgtcaaccactcacccacattgtggcctatagctggtctccaatcttccctgcccagccagactctatcttcaagaacttttgccatcatagtggttgtgttacaggtacagaatcctaggcttcattggtttgcttgatcctattatctcatgctcatgctttcataaaaccataactttcattatatatagataggctctaccctcacgaaacttttggccacttcttattagaagcccaataaaatccataaaaatatttattgattacttactttaggttccagactatcacagaaattgacttgaatattccttttataagaaacccaaagaagtttgctagtgtctatgagcaattcagtctcttttcagtgagccacttagcaaactaacactatttaaacagcgttgtttatttttgtttcataatgggcccttgtgttttacaaaacatgaatgaaagagggaaatatttgatgactaagacaagatttagaaattattaaaagaaaatttacaaaactacatgtcattccataagattatttagtttgggtgaaactaaatgtgaattgaatttaaattcagccaattaagttctaccacagttttaaaagaaggtagtaatgaaaaagttacttacataaggaattgtgtccaaagtatctgtgttgacaattataggagcaggactggcctgaaaaaagaaatagaaaaaaaattaaataatgaatagtgtattctgagacagattatttctgttaacttatttaacaaagagctcaacaggcatttcttgaggacctctacaggcaccgtgtcaagtgttagtagggtaaataaaatgactaagagtttctgtaccttcccccaactcaaatatttgttacatttaccacataaagaaattaagtaagcattcatataatttacattcattttctcttacattctacaaaacaatgcaggaggtgaggatttctgctatgtgtaaggcaaggatttctaataaattgggtaagagttaaaacttgtatcttttctttcttttttttttttttttgtgagacaagaatctcgc

SEQ ID NO: 56721 - DNA, 938 bp, Homo sapiens
atcgacaggatttatagatacattatatgtaaggggtgagaaagataaaggagtcaaggatcattcaaagatttttaactctagtattcattaatatttattctaagtgttattattcttattattatctctaacgcttgtgatgaacttgaacaaataaaaaaacttcactaagtggtttggagttggtttatttcccagattacatcccttgtgtgcagcattcactgtcagccacaaggtggcaagctaagcatccttaaatctaaagctcaactctggtctgggtgaacttgactattcttagaaagtttataaagcaagaacttattccccagtagtgaattcttatgggtatagcacacatgcttctttcctaaaaattgtggcatctttgcaatgtatgtctccttgtataaggaaacaagcagaaacctttttttcttaaataaaactctaaaccaatcagggctctgctagcatccttttggctccctttaatcacagcacacattctagactcctaatcctgccatccaagaccctctacaaactgccttaaatcttcgcttctaacttcaccttcctttactttctttatacttcaaatacctaccgctccccagctccctatacacacaccactttttattcctctgcctaaacattccagctctcagggcatagtccacctacgccaaattccgttcagatgtgtataactcatagttcacatttccatgacttggtgaaggctattgattccttatcttctttatttttttgcatctattcaattgaaatgcaaatttgagtctcagcttcaagagtactcttccaaagacttcagggtctcctccagcagttagctatgattctcctaagcccctcaaaacattttttataccatcattagagctgtcacattttattataac

SEQ ID NO: 56722 - DNA, 576 bp, Homo sapiens
aaaatacaaaaattagccaggcatggtggagggcacctgtaatcccagctactcaggaggctgaggcaggagaatcacttgaacccaggatgcagaggttgcagtgagccaaaaaaaaaaaaaaaagaataataatagctacaatactttattaaggtatatacaatataaaaagatgcaaattggcccgggtcttccaggagtcgggttgcttgggaatgcagcccaaagcgggtggtaaactccatttaaggctaaataccggcacgagaccgatagtcaacaagtaccgtaagggaaagttgaaaagaactttgaagagagagtacaagagggcgtgaaaccgttaagaggtaaatgggtcaggtccgcgcagtccgcccggaggattcaacccggtggcggatctttcccgccccccgttcctcccgacccctccacccgccctccctctcccaccgcccctcctcctcctccctaggcattaccattcaggacataggcatgggcaaagacttcatgtctaaaacaccaaaagcaatggcaacaaaagccaaaattgacaaatgggatcta

SEQ ID NO: 56723 - DNA, 3139 bp, Homo sapiens
cttccttttactttagtaaaataatattactgaattatgtaccactgaaactatattacaataaatatttcccccaaactgaagcaaaactttactctcaaatggaatataatttaaattacaagtaccagaaccaacaaaagggagaaatattatatagcaaccttatggcccacctgtcttcttgactggcattcttgggtctttccactgccacaggagtcaatatctcttttcaggtctcagtttgatccagctggattgaggccaagagccaggtaactgttgcaaaccacttcagtgttcagttttgaaatccaggctgagtcttctatgtcagacaaagaaaataatgatgtattttttccacaactaaactttttacaccgcccacagagtttacagcaacgtaattttttagtttttcaagtttttcaattttcagaaaatatttagactgtttttacaaactgggaaaattattgtaaacatgaagaacgttactgaaattcctcttcaggcagcaacatttttggaagttcaatgactaactcaattaaggcacaaaccaaatttagacaggtctcattactttatacatggtcaaattcaaagatgatgataaagatactcaaatctgtagagaaaaatgtaaccccacctccccaaaaatacttttaaaaatctctttgactccagtctctaaaaagataggtgagtttgaacagttttctgtggcagaacacacattgaaaggcccccttatatttactgatcagaagttccggatctcaccccctcagtaactcagaatccagcttgctgtccctttcatttttttcttctgtgctctccaagcccccaggcttgatccttaatgcccctctgattctgatcctcccatgtattaaccgagaggattgaaaaaaaaggaaagcaatcccttggcatggagacattaaagtgacagtgctactcaatgggcacttgatgcaggatgagttggcgaagcagatttcttcacactggagtcattcacatcatgccatctcttcgcattcaagcagctccctatccggcgaggaaaaacactgagacttcgagagaagccaaaccttcccccaaaggtgttttcagagacgccgtagtagtattagacatgtaagcataagctatgtaaacggtccgcgatttcctaaatgagaaagtgcagctgcttggctttcacatccaccttttctctcaatctctcttcaaactacccaccttccttttgcagaaaagacaagacatttctttgccaccgctggccacccctgcccaagccccgttcttttagggaagagcactgaaatgtcctgcaccctccacgcgatgaagtgtttcctcaggcaggagcaacagcagcactagaaattatataactctcgaatttggcttctgtaagacatggagactggagggtcgggggttgccggtctgggagatactgctgggcatttaacgtgcacaaaacagcgccaggccttgcagtgccccccaccccgagacacggctgacaagtgggtcttctcgcgggggtagtgggcaaatttctctccggtctctttccaagcggggctaaaggatgcaaattgaggggactacagactggggagaggagtcagacggctgagaggagaggaggctagtcggggctgctctgacggcgctgggcggctggtccggggtttggaggaggaggtgcccgagaaacagagctttaacaccacacaggccagggcaaaggggcgagttccctcaaggactgaaaggggcaggcagctagttcccagctgccctgaggagaggcaggagcgcagtaacattacaacattcgggccgccccatctttcccgcaggacgcgaagagatcagggagctaagctgataaatagtcagggaaggaaatactcggctggcgaggggggcaggcccacaggcgcctggacctcctctaagcgaataagtggccgtaatttctagacgccgcgcccaatcacagtcaggatggagggcgcggcttttgactgagtgggggcgggcccgggctgcaatcgagaggcgttgagccgtaaatcagcaccacttcccgcccagggcgttctgggtccccgcccaccggcaagtcacatgagccaccaaaatggtggtgttcgggtatgaggctgggactaagccaagggattcaggtgtggtgccggtgggaactgaggaagcgcccaaggtaggcggaaatccgaagtggtatggggggtgatttctgcaccttcaaagtgttggcagactcttctaagatgatacctttaaaggagatttgaaaagttaaaacagctcccaagtccatgcaaggagcagtcgattaagtctccagttgctgtggaaagaggcggagagaacgtagatgacctaaattctagtcctcattatctgcagtttgttttctcttgtctccaggcctttgcacaggctttttcttcaacttggagtatttccctgcttctatccgtcccaactcccctgccaaactgttctctttcggttattgatttaaatgtcacttcttccgggaagccttcccacgcttcctctggctagattgtttgctttttcttaggttgttgggtttttcgtttatgtcactctctcattctgtgtttaaattgccagcttttttgttctgaactcccactgcgttgtggattcctgaggatgggatgactgtatcttgattacccggaggtctggcatataccacgtgctccctaaattatgagcgaatgttgaataaaattctaaaggtgaaatttattattaggtgaaaaatttattattaggtaaaataatacacatgaaagcactacaaaaccgttagatgatttgcaaactataaacctacataaatgcactcttactggtataagcgtggtgactagttgagtggccttaagggggaaggggtgtaatgaaagcactggagtctttgacagtgccttgcaaagcttaagcactcaaatatttcctgtgttctttccagtatttcagtatttgctgtcctgtaatcataatcctgggtgtctgttttccctatagagacttt

SEQ ID NO: 56724 - DNA, 1679 bp, Homo sapiens
tgagcaaaggttgcagggagccccagcatggctgaggaagacctggtgaggcatccactggctgctgggaggagagcattagaggtaccttctgaacagcactgtccaatagaaatataatgcaagccacatatataattctaaattttctagtatttatacttaaaaagcaagaagaaataagatgactttcacccaacactgcttccaaataagcagtactctggagaacacgagaaatcctcagaaaaataagctgcagctctgaggtgctgattatggtagggcaatcaatacagatcaaaacatggcacagggagcttaagttcctagggagagtagaaaatcgatagagccaagaaatagctcacctttgacttatttttaacctgagtagctatcatatgccaagagctgtgcagttttcatttaccccatgccaagaacgtaagtaggctctactgaccaggaagttaagtaatatgcccgaggtacgttttcaatggaagaggctgactgagggtcacccaacttatatctcgaaatttcacaatttctacaagttctgtcctgggaggcaagagtaggtgaaacgagcacactctacgccaggcaaacaaacctcaacgcttagcctcccggcacctcctagggccggaagcttctcagcccaaagccgctgctggctgcaacctccgtcccgcagtccaattagcagccgcgacccggcgcccgcccacgccgcgtcacgagtcagccaaagatggctgcgcccaggtaatttgagcaaaggccacagtgaactccggcgtggctgaggaaggaggaggcacccacaggctgctgggaggagagcataaggtactggtattccgggggagggggtgaagtaaatgtcccggtgtcaggagaagcacgacgcggtgacacgctagctaccagcagcgctgcgcgtaaatgagagcaagtagaagtgtagttagctcttcctgctgtcttttcactttgcactctagaaggaaagaccttatatttaaattaactcagtagaaaggagaaatgcctgagattgaatttaatcccaggtttactgtcaatttacaaggtgaccacggccaaatttgattttcagaggtcccactttacttctctttcagataggccccacactgcctatctctcagagctcttccaagaatgacatgagataggtaacacaaaaatctttcgaaatatttgtagtttttacaggcggcgttgtctttgatagatatttgttattaatatcggagacaaaatgcccacaggggctgcccagtcagcacttatactgaattgagtgacttaattgccctcagtacaatatatacatactaaatttgattatatatttcaccaccccatacacaaaatcattcagagctcctgtacagcagagattgtgtcttatcatcttatcgtagccaaggccctcaaaaatttgactaccagaaacctagacataaatttctaaggctgctttgtacttattaggttagctttaagtctagagatatggaatgtcaaggtaatcaacatttccaaatgacctcttatcgatataaaacaggtagcaataaatatttaaacgagtgcctgtaatgttgtaggaaatgagaaaatctggtttcataaaagca

SEQ ID NO: 56725 - DNA, 3060 bp, Homo sapiens
aattccaatttgcaccttgtacaactcggaacttccattcaacttcacctgtttcactgtctccaaactgtctctctataagcaggtttcagtgtacagttggaaccgatgtcatccaaggccatgtccacactggggacagaagagctaggtacacgcaagtctgaataaggggacacattaatagctatttcaaccagaagaggcatcttaaatacattcttgaccagcacaagtctgtttccagggtggacagggcccaaattagatttccctcccaccttccaaaacagaaaaaaaaaaaaaaatcacacacacacaaactgagatgttgcccattaaagtagacaaagcagcagagcatgagcgttacgggaagagatggatccttaccaggttgtgaggcgggaacgactgttctgtaacccctacaacggagcctggcaggaaggaaatcacctaaaaaagaaactgtcagagagatttaatagtcacatgttatcattaggagttggttactgtgtcacattcatgcttttagctaaacactttaagattcaatattactttttttctctcctctgaaatgtgtccggtgaagatgtcccactaaggtaagtttgacatggtgtaagggagttgaaaggggtaaacgcggataaagagcagattacttgaccctacattttaagagaagacgacgccttccgggcgcacgccgagcagaactccaccgacaccttatccttgtccacatggagacagactcctcccgccgagtcgtcctcttccagcaggtcctgcttctgctttcccaccggcagagcgtagtcgtggtcaccggcgggcgagtctctgaagagcgaggtggtcagccgcagtcccacgccgctcagccggctcagcaagcgagccagtccagtctcgttggctaagactgcccgtaggtagcgactctcctcctgcagtgcctgtacgcgtttgcccagctcccgattctcggcccgcagctcctggttctcggctgccagaccccggactcgactctccagccccatcacgtactccttcttcttcagtcgattaaggcgggcagcggccgccgccgccttccggggactctttgtcgccgcctggttgttgtcgttaccgctgccgccaccgccgcctcctcctggggactttctccgcctcttttcggcgctgccactgtcactgctgctgctgcagcctccgataccgtttaacagcctttgcagcaggtcagagaagcgctgcatttcagcagccgcggcctcatcgtcatcgtcccctctccacaggccgccgctatccgagcctccgccagacgaggagagaggccccggcgagctaagcccggggtccaggtgccagtccggttgcctggggtccaggagatccgccagttccagcccagacagaaagtccatatcctccgtctcttcccccgggaggctggcgatcgcctcctcctccatctcctcgggggagggcgcgcgcacggccacgccgccgcggctccccctcccggcttccaactctccttcgtcgccaaactgctgcttgcggccgggagatccggccgccgccgtctcctcctcccccgctgcagcccgggtcaggtcagagggcagcgaacaagttgcagccggctccgggctctcactgcgggttggggagttgctgcccgaggctgccagcagcttggtcaggctatgcctcatgagggccagcggcgggccgcggtaggccccggccgctaagagtgggcctcacgggccccaaggatcccaggccccagggcgggtagcccccggcactggccgaaacgaaatgcagggaaaggtccgagtcgcctcccgcctcacttggctagtcgaccccccgcgccaaggcgcggggagggacgggagaacgaagcggtgaggccctgcgatgactcgaccgcgccacccagacaacggcgtagccggaagtcagtggttttcgccccagtcccgcccaccgcgtttcgcgcgccaccaggccgtagtgtcgcgagatttcagggtgctttagagtgggaataattccagctttctagtgatgtcataataacagcggcaaaaataacaagtctctagatttatccaccctaattcaataccacccaatacccagactcaacagttcaacacaacattttgctatatttgctttatctttacataaatgcttgtaaattttttttttgctgaatcatcctaaagttgcagatgagacaccacacccctgcgtacttcagtgtgcatctctaaaaataaggacttttttttcataatcataatactattaccaagtcttcagaaaattaacaatcgtttactaatactatttaatacctgggccatactagatgtcctcagttggataatggatatgctagttaccctaacctgatcactacattccatatgtatagaaatatcactatgtacccaatgaatatgacagttattatttgtcaattaaaaaaaattaaaaccaaagcaaaatgaatgtagaatacaacattgcttacaaaaattgtcttcagttgttcttgccatttttgtaagtagatgttttcacttgagccaaaatccaatcagtactgacttactgcatttgggtaacaaacaaacaaaaactctgacaaatagagccaggaaaggctatgaagagagggtactcatgcttgtatgcctgaaaacaaagactgtaaaaaccacaacgttgcacaaagaccatcacgaccttatacaaaacctctgcaaggatgtctgcccagaaactgcctgtccaacctttaactgacgtcacccttgttattgacctttgtagctaagataattagttcaaaacaatgtgtaaccatcctcatttttttttcctttaaaactctttgtcttccttcgtcttcctgaatacacacatagtttactatggcatgcgttttcccactgaaatgctccattctcaaaacatgtcttttattttagagaccttttctgtttgtta

SEQ ID NO: 56726 - DNA, 428 bp, Homo sapiens
caggtagcttctcattcctatttgctctggggtttctctgctaaaatgtccacatgttgattaaatagcaaactgagacaagccctacattttacagcctggccgccaaaaccaacgcccccacgttcatgtagatgaatgtggagatcgactcaggtcatcaacttagccaaggctggagccagagaaatgtacctggccaggcaatgcccttaggtggcatcaggtgagtcatctggccaaagtcatactctagaaagggaagattgtgcatataattgaaaatgagagggagaaagtggcaacaaaacaccacagcacaaggtatctgagggaaggaaagttccggccttgtattttgtccctagcatttagccaccactgtggtaagatattgctcccgaatgggaaatttgtgtccatctgtg

SEQ ID NO: 56727 - DNA, 1155 bp, Homo sapiens
ctgtctcagtaaatttgccttttgtagacatttcatttacatagaataagaaagtggtcttctggcagtgggtgttcttagctagtgtgctgtataaagggtaaaatagtatgtcctcaaaaccatatgaagcgtgtagggagtaattcacaaccttattattcccttatttaaaaatggagcacagtaccttgggtttgctaatattggtacatattcctgaaaatgtcattttattttcctttccataaacacagttcttaaaatatggaagttagaatgtatactgcctcattctccagatgtgaggtagtgttactccacatattctctggtggtgtggtaatagtagtttcatagactacttcctggtgtggaggtgggcatctcacctgagtcatagaagacttcagagattaggcaagctgataacttgagccaaagagatgaggtcattctttttgccagtcactgcaatcttgcaaagggcagagcctgagacaagctccttggaccagaaactggaaccaagtgagtgacccttaggcaaaagaaagattgaaactgtggtcagtggaactcattctggaacctgaccctgtcctgcctgttcccagcctcctctacacttgccagagtgaacttctgtcatcatcacagagcctgtaatcttctgtatggctcagaggacccgccatgatttgtccctacttgcttctccagcctcctgtctcacttctctcctatccctgggagcctattatccaaccatggtaatctcttctgctccattagaaactcatcattttcgtttttacctctagggctttgtgtttgcaatgccctctgtcccaggccctcccactcaatgttccagtcttcctgcacattgtcaagttcctgctcattgtcaagttttaatttagatctcaattcctctggaaaattttccctgactctcaagactggattaggttttccacagcaccttgcttttaccccttttctggaaagtatccaactgttttataattgcagaataacttgattgctcatcacttcccctaaaatgagaactccttcaggcagagatagaatctgtccaacatctgacctcatgagttacaacaagctacaactgcccaatgaagttgc

SEQ ID NO: 56728 - DNA, 1020 bp, Homo sapiens
tctctcggaggaaagaacagcaaaaagcgaagagtgggaaatgctggacttaaattcctttctttaggtttacgaacaaaaaaggaaagcgagaagaaaaacagaatcaaggacttatacagcaggaagttgccctgtaagcatttagtccagggacctgccattcttattaagagctaaaaccaaagaattagtgcacgaaagtagaaagaagacaagccgccattgtggaaggagcgcagcgggacagaggcgcgcagaagcctcaccagacaaccaggccccgtccccgtcccccgaactgtgcggaaagcgccaccgagtccaggcgtctcattttacagcggaagacacaaactctgagatccaaatgacctgctcacggtcacagcacgaagcccgtgggccctgtgtctacagtcaccaacttccaggcttgcgactaaagggagccaacgagcgcgtgagcgtttgagaccagctggctgagggacgccgaaaatcccgcgcggaggaaggcgggagagcgctaccgctgctaccaaggcggcggcgcgggcgctcggccgggacccttccctgcgtcgccaccagatggcgcgctcggcccgccgttcgcggctaagctagggcgggtggggagggagtagggaggaggacgtcggttgccttggaaatgcagggcgcagcagccgctgcagtggagccggtaggcctggccggcgggctgaaaggaagtgcgagctgtccgcccagggccgggtatccgcccctgcaggctgtggaggggatgtcaggagactggctggcctcttttcttggcccccgactccttccagtctgacactgaagactttataagcttccccccgaccaccctccacgggctccactctccacgggcctgggcttgcgccgcttcgagatcagcctgggggtcgcgccctcctggtcttgtccacgaagcgccgttcttgggccgttaggagctgctgggaagggctctgataggcccactcc

SEQ ID NO: 56729 - DNA, 681 bp, Homo sapiens
taggtcattctgttcttatgatctgagtaagtgctaaaagcctttaagatacttttaaagaatctttaaatagaaatgttttcagatttccagcacaacaaatgagtcttaaagtaactgcagattcagatatcctcacagattcttagcataaggttttgtcagcatttccttcctcaagtcctgtgtcaactcgctgacctcttgccttcttgggttactgccatctttttgtataaaaatatgctagcccttgcaacattttcctcctaagaagaatgaaaattaaccacgtgggattcccctctctatgactactctgaatgaggccagcgagtcacttttacctcaaagtcctcagacaccaaatcagagggatggtgtaccctgacctcccttgaggttctagcacaagtgtgtaattaaccttagagctttaatgttcttcgttacatctcatttttacatcagtcattttcgcctagccacttaaaaagtgtctttttttacttttatgctatttatatggaaatgtcaacgtgagatatagctggacctaaaatctggtgagaatgtacatattttcaacatgtcttgtaacatttactcagcactagcagcttggatctgcttagttttcatttttttaagcttttgatgttttttgtatttgttttcatt

SEQ ID NO: 56730 - DNA, 477 bp, Homo sapiens
cccatttccatgtggtctgagtgagacttatcattttctctaattactctaaactgcacacattttcacaaattcagtgttgtgtttagttctcacaaatctaattcctagtatacacagtaggccacctcttgtctggtttagtataatcctcattggcataatcatcttctttgtggctacaatgaactaaagttgacagactatgaggaaagcgacacattattcaactcaagttcacaagttgcgaaagttctgggcattgcccatttccaaatgactcaaactgcaagccttaatttataagcaagtttaaagaagccaagaatgtcagagaacaaactaaatcaactcactagattttaggtgaacaggtcttatatgatgttacatgagaagaacacaaagcaattttccagtcatcttttgccctagagatgtaattactatcaattctaagtaatagcagaaggggta

SEQ ID NO: 56731 - DNA, 5003 bp, Homo sapiens
ataatcacttcctaatgtggaaagatcttggcgagaaactgacagaaaccacctccacactctaagggcttatacgaaaaacaacagtcctaagcatattttttgttaaatgctgccattttaaaatgaaatcattttcattagattcatataaataagcatcagttgctaggggcattaaaaggtgcacataaactaagctttcactataaagaaaaattcctaaaagacaaaaaattacttgaaatgacaggtttctgtattaaagcctaaagttcatgatgtcaacaccatgaactgtccgtagaagactttttaattttctcaaagcatgttagtgtgtgcaaggaaggtatttgtttagtaaaccactcactggtcagactttacctaagataaaggtattttattagtgagaactgattacaggacattttaatcaacaatgtagggaaaatagtatccctgtattttaaaacctcattgaaaagaaacagaagcacattaacgacacatatatttttaaatcaaatactaccaggtatattcaagttccaaaaacgtgggagcttgtaaacacagaagtggtagagaaaaagaacgacaaatgcaagattatcctccaaacctaatcccagttaccatctatctgcagtagtggctataacaagagaaatagctaataacatttatgaaacaacatgcaaatagcactcttctaaccctacctattttctcctctttttgacaatgctttaaaagaaccactgctacatttgaaataagacacaaacctttacaaaaaaaacttttaaaagccttatcgattcttattttgaatgaggaaagaggaaaatagttcacacagtcacaactagtttcttcatactcccatacaaaaaaaaaaaacaaaaaaaaaccaaaagcaactaacaaaagaattaacacagtgtcaggacaaactgtaagatttggtagggcaaaccaagtagtatttgaagagccgtaaatagcagaaacgtctactacacgtatcagataatcaaaaaatcacatatggctttacgatgcattttaaaaagttttctgttcataagagtgtcaccatttaaacatattctccattctctaagacaagcaaggactgagagtttaaaagcagcctgcatgcatatctgaaagaatcaagcactaatgcttttttatttaaaacttttttccacagtggaggaacaatcacaaagaataataggcttctgtgtagcaaaaacttgttctaacagcattcatgagcacagtaacttggaagaatctacatttcgtacattttttttaaagtgcaaactttacggccaaagtccaaatgagaaatcaaaacaggcttccagacagtgaattatctttcagggcatgctcactcttgcttcaaacagtaaaacaaagtaactttcatgtatgatgaaagtcagtcagactaatgtgtccagtcatttaaaaagggaacttacttatcgtgactattgccctatttttccctgaaaagtttcaggtctaagctccattggcttgagtgatccaatgagctttgtaccctggggtaaaagagcgcaaagaaaaaggagggtattacaggtgacttccaggttagaaaaaagttacgaggagttagctctactaattgtatctacgttagcgaatggacgaatactatgtcgtgtaagagaagctaaagctagttcctcaaaaggtaactggcataattaaaacatccaaactcaagcatcatcaaacatcattttgccaatttttttaagggatgtatgttatttgtaagtaaatttattaatccatttggaattccaacagtctacgcttaacactcaagcttctgaattcaagccgccagaattaacagttccaggaactgataagagtatcagcaaaatgcctttttccatatccccatgtgaaaagctggggggcagagctgacagtcacaaactcaccccagtcaaaagtatggacaacacaacgattaaattccaccagaggcaaataaaaatcccaactttccagaaagctttccctacaccaaattgaatccttttactttcactcccacaaagaaggtaatctgaaataaaagtcgggtaactgggtatggtatttaaaatgagtcgaagaaactacactgaagctactatagaggcgatgaaaaggtaacccaaaagcaggagggaaggtggaacagaaagccaggaagggatgggcgaagcagctagtggagcaaaggaagtgggggatcccttccagggaggcagcccggagggataacaaggatctggatgcaaggaaccaggcgtttactgaaacccgaaggaggctgatgaagaaacaatggggcttggagacgctcagacgagggcgacgaggcggcaccggacgggtgggaaggaagagcagaaggctgcagtggagacgggtagggggtgagaagccaggtggggaagcaagttggttgggtatgatggggtgtggtagcgcaccgggcagggagacgagggtcccctaggaatagggaggggagtggcttgtcagattttgagacggggagcggaggccgtgaaggcaggtgtgatggaagcaaaagaacacagctcaacgggcacaggaccggccgtgccagagaagacgcagggagggaagaggcagtagaagggtgaaagacaagagagagagagaaggacgcgcgcgggtcgcgcgggcgccggggagcgggggccgcggtcggcttcactcacagtccaggtgctttttcttgggccccatgatctcgtgggtcgtggccttgcatactgtcttggatacggcagagccggtgacactgtgctgggcggcagtgattcggtccgtcaggctctggccggacatctctgcagctcctccaccaccccacccgctcagcagccggcggggactgggacccccaagagccggagggtccccaccccccaccgcaccccctacccccaccggctccttccccgcctgccggcctggggcgcggttcggggccgcgcgctgccaccagtccagagagaaccggctcgtgtcacccgcggagtcggacaagatgtcgggcactcccttgcccccgcctcagttcagcccaccccttcccgggtcagctggagccgggcagggtaagaggaacaggcagctgcaggaaaatggcggcgccaggctcctcctcggagctttccgggctgccccgggtcacgtgactcggacaccgcccctcctcccttctcccgcccctttccccttccctttcctcttcgacgcccgccctccctcgctcagcgagggaagagctgggcggcgcccgcgcgttacgtgatggaactcgccaggcgggcgcaacaggaggcccgcccgaggggagtgcacagccggcgcatcacgtgactctccctgccaacaggtcgcctgaggctcggcccgcggggtcacagacgccgggcggggcggggcgggagaggaatggcgagggcggtgtgctggcgggggtggggcggggcggcaggcttctccccttatccccccacctcaagtgtgtcctcgtgtctgtggttgaaaccaacagcttgacaaaggaggtgcagctgccttcacagcttcccctgaagtggggggtattaggcctctggctccccgagctttcccagcagagtcaagaatgtatttcaagacgcctcccaaagccgccctcctggcttaaaggagaaggttccaaacggcctattttctgaaccttccagcaggcctctctctaccatggaactattgaagctctccttatttacttaccccagaaaggttttttcccccctttccttgagaggcttggaaatgtcacctggttttgtttatctctactccgaaaacccgacacgttgctgccattctaaatttagatactagctggccggtattcattctctagggtgtggaataggacaggaaacacatagcttcactggaatttgaaaagggaagtagtaggatgatgtcaacagcgattagcttgaccctacatggctgactgctgtggtgattaaaggtccagaccatagaaggaagtgagaggggcggtaaatggagaagtcccattcaaacagtccagacatcactgcctgccatctcccctggtttagtctttcttacctttggcctcttttctcttattgggtgagccagatttccatggaaagacgttgacactgccctgtggacattttaaaagaagtattacatcctgaaatactattcaatgagacccagaccatacattaacaaagccttttatatgttattagagcctctacattcaacccagggttagggataagttgaaaaatatgtgagtgctaagttaccatgatagtcacatgtaatcttgctagtttcaaatgaaatgctaacattctcagaaagtctgtgtacaccatctgccagccaaatccaaaatactgtgcttcaatctggtgactctcaaaggatgcaaagctgatagatatttaacattttatgtatcatatcaggaattttgtggtctcccattttccccacgccccctcacccctcttttttccccactatggctggtgaaattctgcagcaacatgctcttgccaagaacacacaagtttttaatcccagcaggcttcatctttgtcaagccagcctccaatttcacaaaactataatgaattccttcagtgtactgcaatccatctgtggtttggtgcccagtttgctgccccacgtccactgggcagtggaattaccaaattctcaagacatgttatcagccatcattgctactggtctatgggttccactgtataagttactgattggcctgagcctctgcattggtaaaccccaatctgaggtcaacactaacatggtctagctatcaacagctgaatattttatcc

SEQ ID NO: 56732 - DNA, 705 bp, Homo sapiens
tggaatggtgacttttttttttttttttgaggcggagtctcactctgttgcccaggctggagtgcagtggcatgacctcggctcactgcaacctccttctcccgggttcaagagattcctcctgcctcagcctcccaagtagctgggattacaggcatgtgccaccacacctggctaatttttgtatttttagtagagacaaggtttgaccatgttggccaggctggtcttggactcctgacctcgtgatccacccacctcggcctcccagagtgctgggattacaggtgtgagccactacgcctggcgagtgttgacttttaagctgcttacatgcgagaataaaaactgaaagtcctggacatactgatttagagttgttcctgagatacccaaatggaactctccagtatgccaaagggtattgatgtggctttcagtaagctggagatcagacccaaacactgtgagtgtgtaagaagttggtgaaatcatggaatgtatgaagttaacctgggagtgaactaaagacagtcctgggtaattccgacattaaaggggcagcatacaattttgaatgagcactgaagatacatagtcactttctgataaaattaagttttccctggtaccttgttatagctcatataaatttatcaaagttcattaccttttactcttttacacccacacctcccacacctc

SEQ ID NO: 56733 - DNA, 1521 bp, Homo sapiens
gcttgagccactacgcccagcccaaaatgttgagactacagatgtgacccaccgcgcccagctacttctgacatttctttccctccaaatctctttgaaaattagaacccagtctaggagatctttcaatgacctctctcaaaagcaaatcacaaccttctgagcctctatctgtaaatgagaagttgaaatagattaataggcccagattttattttgaagcagaacattttttaataaacttattctgaagatcagcaggtgaaatggacagaaacgggtttgctcttggttgagacagttgaagctggaatgaggataactcggagtcctacctaattagtcttctttcccccactgtattcctagctctcttttaggcagccactgaggctcctcacaacaaacctcagatccttcccactcgaaccttctacagtgttgatggtatgattctagcccttacgtatctatcattcttcaagcaaattctctctattataaagcggtaaaagatagctgtaaaatgttatagatgacagatgtcttggcctctccaatgacttaaatactaggtagtccaccattccatcatctgaatcattctgaactcttgttagtcacccaacaaatttgttgaaatgtagccaagtcaataaaaccagataggtaccaaatttcttgagctagaagatgactttaaaaagtaatgtaaaatatcgccaaagctctcagggagtaggaactctgcatgaaactataaaatatcgaataagcaattctccaagttgttctccactaaatatacagcaatactgcaggctctttgaatctcttttaaataggaatgattcagagattaagaagccatttataataaagcaaacaattcaatgccatttctcaatggcccaaacaagagagtttgttttgggaagttggttccagaatacacagatcatataattgcacagtgtcagagctggaaatgctgttagggagtaaccagtctattttacatatgacaaatgtgaagttcagaacgactgtgagtgagctgtccaagattagggatgcattcaagcttcattaaataagtattaactgagtgctatgtgccaggtgatagggataggaaggcaaataaaacacgatctttgtccatgtagtggaagaagacaaataagtgaataattgcagttaaattgttgcataagtgggactccaactctgtgtccaatttcataatcaaaggtctatcccactaccttatactgactcacaactaaacagctcgagaaattagtagtggggagccatggtcagtatatccagagatatgtttatgtcaactaagccttggtctttggggtgcacaggtacttatccacctttcttgaggacctgtgaataatagggaagactctattcttatatgaaaggaaattcttacaaagattttttgccaatacttataaggacttcttagagcattgaggaaaccatgaatggtaaaggctt

SEQ ID NO: 56734 - DNA, 3033 bp, Homo sapiens
acctgagttctgctttcaaggcagtgaggaactgtggggaactgtctggaactgttgatgctgcaggtgaagctagaacatgagaatgctataggctggtttgtagcacaatgaaaatggaagaataagaggtaaggccagttgcccggagactccaaataagaaacatggttatgaggaagtggtttagaattagggctttgaaaaataatagctgtcattgattgagtgcctactatgtgtgaggccattctccataatccttacggaaactcctaagctaggtattatctctccattttacaaatgagtaagctgaagttcaggaggttaaatgactgccaaaccatacagttatgtaaaaagtggagcaatgatttaaactagatttttcaaatcctaaagctgacatgctttccactgtaccacaatgtcttcctttgtactggtgcactccatttatttctgtgattcctgacaccaattttagggcctgggacagcatcctaatggaatcatgcctagctggatagcaaatgcctctgctgccagtagaggggcaacttaagagaaaggtccaagccaaattggatccaagagtttctgactaagcaggtttcaaacctcctgctcacacctcttcctcctcactttctttcccaacatcctcccacggctcacctctacctctgtccactggagacaccatcctccaggtgctaataagaaagctactctgaccatggaaaaagggaaagaggcagctcagcaaaatcactgctgagagcctgggcaggcttaggcaatgtgatctgaagagctgaagtgtgcagcccacagagagaaagaattggataaaatacaaaactaaagaagaggataaacctaagaggaaaatcttcctgacagagatgaattagttacgggactaactccgcaaaggaagagattgggctccgttccctgaggctccctgagcagaaaccatgttacagagaacaagtaggggggttgtggttagcagggacatcaatgactaataggtgctttccacctctgagttttatgaagatgagtggagtctttttgaatagagaaagaaatgaaaataataattaacatggagagatggggctgactaaagcatggcaaagataaacaggaatgaggctgttggccctcgtagtgagtgtggaaaatcatttcttccaattgggagaggcagaggtgatcagttcagaggtttaaattcagagtccaggctctgtcacttactgattatctgagcaaattagttagcctttctaagctacaaaataggaaaaatacactatttttcagattatttctcactgcagattaggagtaatgccattgaaaaggttcttatgaagattaaatgagacaactcatgtaaacaacagtatctacttagcatgaagtaagcactcaaatgacagtaattattattggaatatggcttcgtgtggagggggaaatagagctgggcaattattatcaaggtcaccatatggggataatttttccctttggacttaatgatggcatctccttggtttaattatttgctgtgttggtagctcacatcctctctactgacttggctttcagctcacgggaagatgaagcccaaatacaatagataccaaggcaagcttgccaaagagcagctcaacccatactggtactctgagtcattctaaggataaagccgcctctccatggagaaggatattgtacacaggagataatactaatgacaccgtccatttacttagtctcttacagtttacaaagcactcttacctgggaagggttactatcttcattttatagatgaggaaacagagacttagagaggtgaagcaacttgattaaggttgcatagataattggttgtgaggattcactcccagctcctctgacatcatgtctgggggctcttttataccacaagatgctgcagggaacatgaacaggtaccagattaggaggctagttgctttcaatcataaaaacagtgaatttaggaacaggaagaagctttcagatgacctaatactgtggttttagattgtgtccaggggtctagtaggcggtggagggagccaagcaggaggcgggatcagcttttatcaattaaattcatcagattttaatttgatgaaattaaaaagaaaaagaaagttggaaaaacctaatctagttcaactaactgtctcatttccccaagaaggatattgaggcccagaagggttaagtaacttatccaaatcagagctaagactagcatagcactcagtcctcagtcacctgcatatttgataagcatgtcataaatgtcctcattctccaaatattttcctttgattacctcaagcaagtcacttacatgtaataatcaaatcattgaagagaaattagctctggtgtgagtctcttctgatgacaccatgtgaccttggaatagtcgattgatctctggaccctcagcttttctataggtaaaatggggatcataatttctgtctagactctcagtggggctgttgtgatgaatgtaaaagaaaagaccatatggaagttcatagagttcttcctgggaaggagactcagcaagttcaatgtcttattctttatcaatacctaccaagaatgtcactgcttctaagatgatatctgcaatttaccattctcatttatttgtcattctttactcaaaaaggcaatgaggtttgtaaccatgtcagtactactggtttgtgaaaaagtctcagaaagttcttatcacgttggctttctgataagactttttgatttctactacttacatgtggaaagtaaatcattttaggttaaacacctttccttctagacaagtgacagaggcagatgtcactcagggtgttgtagcaagcctggggagctcatagccagatgagatcacaggacttgtgtgcagggtacagagtttggaactctcccacctaactggcagtttctcctccttcg

SEQ ID NO: 56735 - DNA, 4149 bp, Homo sapiens
tattatcccatttcacacatggggaatcaaaagttcagagattagtcaggtgcggtggctcatgcctataatcccaacactttgggaggccaaggtgggtggatcacctgaggtcaggagtttaagacccgtctggccaacatggtgaaaccctgtctctaataagaatacaaaaattagctgggcatggtggcacgcgcctgtagtcccagctattcgggaggctgaggcaggagaattgcttgaaccagggaggcgaaggatgcagtgagccatgatcgtgccactgcactccagcctgggtgacagagcaagactctgtctctctctctctctagcaagactctgtctctgtctctctctctctctctcacacacacacacacacacacacacacacacacactcttcagagattaacttttccagaaccacatgactagtaagtagctgtggggttcaaatgtaggtctccaaaggtctgtgccctttctttcacacacactgagaggcatctgagagggacttaggaagtcttgagagtaaaactagatggtcagtgaatgcccattggatggcaatttcaagcaaatggacaaaatagtaatgggataatattgaatcctaaatcaccagcagtaactgtgagaaaggtagaattacaaactccctgctaaatagctttaggtcataaatgaatgttatcctttggagggcacaaaatgaagtggttaattccttgaacaccaatgtgactaataagcaagccatggcatccgtcatctcgtccgcacagctgtctgggtaggctaatctctggctcaaggccctggctcctgtctgcccagtggcatgctgcactctgatctcctggctccacagtgagcttgacatttctgctgagtctgactcacttgctcccagcctcaattgttctgtgccaatgcagacttcttttacagttggcctacttagaaacacaggatgttagtgttggaagggagatcctttagaagtcacctagtacaatccccacacattacaaatgagaaaacaggccccagatgaggcttggtgatgacgtgcctaaattccggtcagtttagttataaggcatgataagacctcagccacatggcccatagggaggaagctgggaatgagcaggactggagctggcaatgctgcatcagctgtaggactcctagggctggggtggagcacagggagtggatccagctccttggaagaatgagttgggttagggaagcaaagcgtcaggaacccagccaggcagtgtggagttcagggtagcacttttgaaatgtgtggctggggagaagaatgaggctgaaggtcagttgtgaagactggaccaacatgcccaggagggtgagggggtgtgaagaaaagtcacaacttgaggctatcagggtgtgcagagttcaccagagatgtgataaggtccagagcagtggcagcacaccccacccccatgctgagttgtggctggtgcacttctgccctcttttttttttttttgaaatggagtctagctctgtcgcccagactggagagcagtggcatgatcttggctcaccacaacctctgcctccttggttcaagcgattctcctgcctcagcctcccaggtagttaggactatagacgtatgccaccacacccggctaatttttgtattttcgatacggacagggtttcaccatgttggccaggctggtctcgaactcctgacctcaagtgatttgcctgccttggcctcccaaagtgctgggattacaagcgtgtgtcactgcacccagccacttcttgccctctttaggaaggttccagcctgaagctggagggagctggtgatttcatatcatagccaaagagctggggaagacagcactaaagaacaccatctattctgcctcccaaatgtctctaaggtgtcctttacctccatttctactgtcaccaccctgagccctggttgtcacccacctgaattattgcaacagcagtttagttaaccacttatcctctgcctgtactatttctaaagcactcttctcattgccacccaagcagtgtttctatgacgtgaagatgtcacttgctttctataaatgttggatggcttgcactgcctagcaggctttctctcctgggcttccatgtgagaaccaagccctccagaaaattatctgagtgactatttcaggtctttccaggatggtacatagttaataccattctaggtgtacaggggagagaaatttatttgtatgatagatgtcttaagtcatcagggcttaatttttctggtggaatcctgattgggaagggctggatagaacaaagcccagatatatgaacctggcacattagatcctacatgacttcagcccagtgttccttctagccttatctcctattctccccactgtgcattctgtgctccggtcacaccgaactcttgccattccttcatctagctattctgttcatctgttaatgttcctccttcaacctggtctccttcttggactttaaaatcttagacatccatcattcaagaccaagctcagatgtcacctcctctctgcagtggtgctttctacagccttcaaaggcacatcaaattgttccttccccaatgtgccaataatatttttgtatgtgtgtaccacttcattattcataattggaggtttacaaatctgtgtgacttaaaaattttgagtttctgcacagcagggaacatctcctccaccccctgacctgaatagatgtttgtttaactgaatggcctgaagcccactagataatcaatgataatgctaattctggaacacatgacttaactcttattccatcattatttgggtttctatatatgactacaactagatcgaacatgaagtatgtcactgtcagatatgcagctgtgcatggtgatagtgtgggctgggagaagactttctgaataattactgacacaatgagggagtgagacctggcagatctaagtgggaatggggaatggagccagaaagatgttagataaggtataggggtagacttcatcaagaggtatgcagaggaccaattttataatttctacaggaaataagaaaaggaaaaaagaagaaataattagtggtggggttaagtgaaggaaatatgtcaagaactaatgtctgaaatgactcatcaaatctgaaatctgataaagggaacttacatttgcgtagtgtagaatatcgtcacatagatgatctcatttaattctcagaacaaccctgaggtggagggtggggtgcgtggagggcaggtagggagtgttgcactgttgttacagtcctctctttacagaggagatgaccaaagctcagagagcagaaattacatgccaaacatccagtgtccctaagtgatgcaactggaaccagagacaagtcagcctgtctcctggtccaaagccacattcaccttttttttcagaatggggaggcagctcctctgatctaaaagctgaaagtcttcataaaatcaaatagaatggctaggcacagtggctcatgcctgtaatcccagcactttgggaggccaaggcaggtggatcacctgaggtcaggagttcaagaccagcctggcaaacaatggccaacatggtgaaaccccatctctactaaaaatacaaaaattagccaggcatggtgggaggcacctgtaatcccagctacttagaaggctgaggcaggagaatcgcttgaacccgggaagcagaggttgcagtgagccaagatcgtgccactgcactgcagcctgggtggcagagggagatgccgtctcaaagaaacaaacaaacaaaaacaaaacaaaaaaaaattaaatagactgacatgtagaggtttttctgagcactgactcagagagattctccataaattcaattttttctaggctgctttaaaatgaggatagaacaccatttagtcagctgactttcagggagtcagctgatacagagtaattctccacttgagctgggagaagtctgacttggctagagaatctggggcaggaaagaagagcagagagcagtttattttttacctccctgtggctctagggggta

SEQ ID NO: 56736 - DNA, 2298 bp, Homo sapiens
ataattccacaaggctcaccaatgttatctggcacctgctagagaatagatatagtaacagaggcaaatattttggtgaagtttaacagttgtgttgccttctagaatttcattgtatctgatgtgcaaaaacaagcaaaacattgtcggttaagtatcacaatctcataatggagatgagcactgattcttaggccttggcgtagttcagggcctatcctttagcagctaaaaagagcactttggctgtaactcattggagtctagtctcataatgttaggatatttctatttaagtcttaaccactattggtagcaactggaaggataatcattcattacaataaatagtcaacagaataaatatccgacaagaatttacgaagcgtctagagtataattcggtagcgctttgaaatccaccctgggattcggaaaccgggtagaaaactacctggttcagcaaacgagaattcaaacagaggaggggcttggaggaggcgggtttcgacgaacccagcgcaagagtacgccacggcgcctgcgcatcccctgacgggtactttccattcgccagatgggggaagccagggggaagcaggttactgtttttgcatttctatcttcaaggaagaattaggttatgaatagttccgtgaatagtcaggaagcgctgtcctccaagttcaagattaaggaaacgtggcatgcacagctaaagcaagaggtgacgtcttgtatcttcccccgtttcctgggacattggtggtgtagcccattccacagactttcgctccctagcagcgggtcggagatcgaaggaacgggccaattgcggctgaaacgtctttggaaggaggaagggggtgagggagcatccctttgagtttcgcctcttctcgaggcggtggtgggaagggagacatacttaatactgccctcttaatccaacggaccttacatcgtgtagactgccgggagggcggcgggaaaagggcaagacgggagttggggaagggaaggagccaggaagccgcgcgggagggcgcgcgcgcgcgcccctttttcagcagtgtggcggggtcgcacgcacgcccgcctcggcggctgggcgcgatttgcgacagtggggggggcggtggaggtggcggcggcagcggcaactttgcggcaagctcgggccgggcttgcttgacggcggtgtggcggaggccccgccccaggcggcaggaacctggagggaggcggaggaatatgtccgagagggaagtgtcgactgcgccggcgggaacagacatgcctgcggccaagaagcagaagctgagcagtgacgagaacagcaatccagacctctctggagacgagaatgtaagtgcagcttctggcagttacgagactgcggagtgaaagttttaaattcttttaaaacggggggcgcggggacgagcgggctgctgtggggggagggagaggtgtcactcaggaaaacgcgggcgtgcgggagaaaattgaaattgcctacggggattttgatgtggggccgagagcaagcaggaactaggcaaaggagagtggttctagtgattgcgtgggtctgagaagtctgccctgaaatcagtttgcatgtgatggggagtgttttggcctttggggggatttaaggggagagtgcgggtctgagattctagtagtttaaaaggcacgttagagacttttctaagaaagttggaaggacggggcagagttagggaccctgttaaaggagcgtaagggttgtcactctaagacccttgtggaattttcaggatggaaagtgatcttcgatttgcggagtttgggagactttattaaagggggttttgtgtccgcctccgtcctgtccgcggagaccgggtgcgcctgaaggtcgccttttctgtaggaggagccgaattgagaggatcgatttttgatttgggggtggggagtgactacctttgaggaagtaagagtgggtgatttcttctttgaacgtttttacttaagataaaggtgaggggggtggcgacctggaagattttgggcaacagtggtataggcagatgtatttaagtgtgggttcctggcttcgccaagtgcgcgatgttttgcaatcagatttttttaagctctgaaatgggtattcgtaatcattcggtaccaacatttaacccaactgagttttaattgactcgccagtaagagccgaattgacataaataagttttcagtttcatgttttaggttgataaccagtaaggtcaacgaagtatcttgaca

SEQ ID NO: 56737 - DNA, 1045 bp, Homo sapiens
ctgtttttgtcaataatttttgttttgaaacacagttacacccacacccattcttttgcttatgcttttatttacttacttattaagttacctgccctcttgaagcttatatggtctagctgtggacagttgtgttaattatatcttcaggtgtaagtaacaataaaacaaactaaaattggcttaagtaataaaggaatacaagatcttgcatagccagaagtacaaaggctgcagggatgcttggctcagcagttcttgtgttacaagggcatgacaggacaaagaccttatggccctagaatgtttgctatctgaccttttacagataatgtttgcttaaccctgacctaagagagcatcctctgatcatagaagcatattctcagccctctctaacaggtgctggaagctgggataggacagacactgagtttccgaaaattgaaaagtcccttctgagctttcttgcattgctgtgttccttggctccaagaggggttcgggggaagatgaagggcaatgcagcaaaggaggggctgaggagcaaaaaaaaaaaaaacaaaaaaaaaacaaaaaaaaccaaaaacttcccagagcccagaatacctggttatgggcaccccctgctggagagttggcaaaattctgtgacattggtcaatttagtcaccaaatgtgtagaggttgactgtatgccagattgtggaaagcaaaggtaaagttctcttgaagaactgactcacagtcaagagtagtcaggctccctaattagatctttatgctgtctagtcaagtgtcagttgcagtcgtacttaacaaatgatgattgatataatatgcttatagtcactcagtaaataactattacatgtttgctaggggataggtgctggactacacactggagacagagtagtaaacaaaatagacacattccttgccctcttggagcttatattctagtggatgttgtgttaattataacatcagttgtaagtaacaacaaagctaactaaaactggcttaagcaataaggaatata

SEQ ID NO: 56738 - DNA, 1420 bp, Homo sapiens
tattgtaaaagtgcaccgttaatctctcagatgtcacagaaacgttagaagcatctcttcccaggattgtacatggaaatgaaggatccacagattttgtggctataaaacacccggactaccgatcccagtgtgcaaagcctccaggcttaccttcccggaaactggcgcggtgccctctgggacttgttctgggacttgtagtcttgtactggcgctggcccgcctttcttccttagtggggaaaaccgggtgtaagccccggaagtacttgttgcctgagcagtgggctgcttaggaagagaaggtcagagttcgcgggggcagaggcattcttgccgctggcccagtcactatgtagtggaggggcagacaccctcccgcaaattctggaaggttcttagtctcgactagggcagtagccccaggactcctagtcgccggcttcaggtcactgccggctgaacggagctgccgtcgccatgtttggctgcttggtggcggggaggctggtgaggatgggaccgggtgatatcaggaaggggtcaggataccgagggcgaagccctacggcagggagggtgcgcaggcgctagggatgcggggaagcccacttattatattttgggtgggtatgtgaggatggagcgtgggaagctgggtgctctcctttgcccagctctattcagattctttcgaatagtagtcacagtataagttggcatttattaagtgtgcattttgtaccaagtactgggctaagtgcaatgcacgcctttggtcactcagccttatgtgtggcgcttatttggcactttgaacttaatcctcataactcgtgagatggtctttatctttgacattttgcagttacagaactaagttcaatcgccagtataaataccttctttattaacttgaggtagaggtgaatttgggattgaatttggtctatagcaaactgtttttcaaagattaaggtgctcagggaatgtatatcttttgggtccctttggaagaacccgagtaaaaataagcttaatttaattggaagttggctgaaacttaacgtgtgagccgtatctgagataaccagagaaggatgcgagtagtgtgtttccttatgggtcaaaatagataacttaccttgccaaattgttagagtaaatgagaacagcacctggaattctttaggaataatctggaaggtgaatcttgtttgtttccttagaaaccacacagacatcaattttcaggcctgattcctttcccctagaagtatttttccttcttttttctcctggctttttaaaatgttgcagtccctttgctgaattgtctttttttcccatcaagttttgataatgtattgtattctgtacatatacagttctaagaagccagaaagataagttggaga

SEQ ID NO: 56739 - DNA, 5299 bp, Homo sapiens
aaatcccctttgtccttaattttctccaaagtccacttattatgtggcactccctattttctctgcctccctccaagtaactccatacttcttactctccgcccataaaactctctttcatttcagttctacggagtcagaatttgtatttaaaaagatctccagatgatttgtatgccattccagtttgagatgcactgaactagatggcctctctaggtgaggtactagtttcctgccattggctagcgggagttttctgctcatcggagtctgtttcaggacagccttttgcctccctgaaaggaggggttgcgcaaagcatttgccaccagatggcgccaaaggtattccatcagagatgatcccgcagacactacactctggatgggtctttttctttttgggtgtcaaccgtcttctggggttatttgcaggttgaataactgggcttcctcacagaaattcggtgctggatggggattggagatcatggcatttaacagttgtacagatgaggaaattgacagagaaaggtggcttggccctgtcagtcacccaaagcaaggaaacctgggggtttccttcccaggtttgcttccatcccttcatgatctctgctgctcagacagcccttcctgactatagttgaaggcagcaggagaggtgttatggggtttctctggggaaggacggagcagggtggtagcagaggcagagggaagtgaacttaggcagtagatgtcaacattcagctgtacctctggaaggggaggggagctcagaacaatgggaaatctgatgggaaagagtcacacattacaataaaaggatgcaaggtcagctgccatttattgatcactcttactgtggccttggctctgtgctgtgtgcttaccagcacaggatttgctcaattaatcttcccaacaactccatgaagtagggactactgtgctcctattttttgcccttaaaagtggagagtgacgctcaagggaaatggaactaatcaggacagaacttctgaatcctttcaccaccaagtcttcagaccctctgcctccaatgtccaagtacttgcttttccccctgttaccatcgatgcctccctgcttctagctaaagcaccacttgtctaatggatcccatcatttttgcctacttgtcccattattcccactcctatttcctgcatattcaattttgccctctctactggatcattctcatcagcatacaaatacactgtaaaacttccatctttaaaaggccctcccttggtcctatatgtcccaccctatttcttactctcctttataggcaaactcttctagagagctgaatatattaactgcatctagttccttcctccttggtccccatgaaacccagtccaatcaaatgactgacccacctcttgtcagggtccccaagtacctccaggtggccaaattcagtaatcagttctcagccttcttctttcttgacctctcagcagcatttggtactgttgcccatttttttcctttgggaagctatttctgcacttggtacaggccagaactcaagaggaaaaacagtggttcttaagctccaaattacaaaatttggcaaataaagttatctccatcattaacctgcatttttggggtgctcttgggctatgcactaggggtttaaaactggaaaggaagctacttagctgtttcgaggtaaccactctgagaagcccatgggtccagggatgtgctggaacatgacttgtgcccataaatgccatgggcagctgaaagtgtggcaggttgttcctattcatggtaaaagaaaaagaagtttttttttccagagggagatttccataattacatttcctgcaaactgagtacttgaggttgtagcttcaggaaatagcacaaaaggacatgctgaaaatgtagtttctgcttttaatagtcagatttgacaaagttaaaggagttgccatgctgaacaatagattattggaggaaagaatttactgctttatcaggtaagggaaaacttctgacccaggcagcaagaaggacagaaagagttaggctctgtcagggtctggccacggtggctttggaggcctggatccctattgggacagaacaacctctgctatgaggccacacctgcttccacgatccataagaattacctttctacagtagatactgccattcatttattcattagtatgtgctgagtgtttgttctgggccttctctgggctaggccttgaataaataaagacaaataaaagtcttgttctcaaataaaactctcaaggagttgctagcataagtgttccaaaaattcagattcccctttattggacaccaagcaaaggctttctacattacttcagtgcaattttgtgtcataagggaattttctggagctcctggactctctagagggcacttctctggccaatggagaagatagggttaggcctgttttgccacaatttggaaagaaccagaaggaatgatgatcatcttcttggcttctctggaggttcggctgttgcaacagctaaaaggggagatctcggaggagccagatacatgagatccacatgaacttcaggactaggaacagccctggaagtgaagaacagcctcagaatacaggacttagtgaaaaggaaggctttgggaacagaggagagaaaaggttaaagagaccaggggaagtttcatggcagggggagagatcaaggaaaggcctagaactgctactcagtgtgtgtagtggtggtggtgggtgagagagagggcagttgacccccgacagctggaaataatccctggcatcttgtaaacaagacaaacgagctgcacggtcttcagagatgagccagccattcctgcctgtctgcctcttccctattgtggcatctgaagcctgtgcaaagtcccccacaccttccctctccaacaaggtcattatcttccagggatgtattttgcatttcttggctgagaaccctacccctggctcactttgaagccttctgtaaagtgggtgaccaccgtccagtgtcactcccagatcctggggaagagtgggatcatttagagtctgtggcttggccctggatgcattatcctgggggaagtgaaatgagcctttatggacaaacagaaagtagtgaagaacaggaagagaattctaggcagagggaccagcacattcaaaatcatggagttggcagaaaactcacagaagagtgactaatacaatgggctggaataatagggaatatgtgggaaaggggagaaaagtgagatggggccctgcttctcttctccccagagttccccagtcctgtgctcacatgtggccctctcctcacctccatcaaaatctctgccttaagtctcctctttccttcttccctcccgtatctgtgtgtcacgagcctattaggcatcagagattatagtaataggtaccatgaactgagtactgctacatgcctgtccctacctatacatcacttcaatccttacaacaattcagtgccataaacgggtgttggaaatacttagcaaggaattggcataggctgcaaccaaccataacagatgctggccttataaaaaaaccctgaccattctggtggtactagctgatgagcagttgtggctgttaaaactgttaagtccattttacagataaggaaaggaaggtaccgagaatttcagccacttgtccaaagccacaaagcaggaaaatggggattcagacctaggcttgtcttggtgaaatgtctgattgttaagcattggactcacagggggtgctaatagcctgacataacacacaggagcctttatgggcgtctggcctggagatttagcaggattggtggacaatgcaggtccagggaaggctggccaggtggaggaagctgcagagctgatgagccagtggggctttcctggctccagccatgctgtgtggtcagcttgcaggtggaggccagggacccacggaaactgggtcagcagcaccctggacctggccccttgtgtggctctccttccttcccctgtccccagtgtgaccattcccactgcctttccccttctaggcctttctttcctccctaagagcagagatgcttctctggtcccagctgaaacaacaaaagtcacctgagcctctgccttttccaaaattcctgagaggctgccagcaatgagtcagtgcattggcagctctgatcaccaaggaccagcctgggcctgggccaaggctttatgtgggtctgagctggggtgggaggcagagatgatgagaagccctggggagctctcttcccttcaagtgctcgggcttcagaggcccagccccttggggtcagtgattctgagcacatggtacagtgggactggttgggagacagtcaaataatgtgccctaggctcctgctctgcaccaggcatggccctgccctctgggagatcagtagagtggggctcccgaggattgaattctatctatccactgaggatgtgaggctaggctggtgttcagagtaggtagcatgaccctagtctcattttcatgtgggttgctcgattccagccccctccatgtgtggttcccaagaagattctgagaatctgtctccagctcccacgtgtggtgtgatttggtttctgtttacaactatgattctgcatcgcttcctcctccttcccacactccctctcaccccttcactcccaaccctctgtggttctgtgcatggagatgctcctctcccattatgagcatggcttgtagtcttaagtggcattgctccttactttgtatttggagataaagggggaccattgcagcatgggctgtatctgccatgttggctcattagtcctggaattccttaccagtcttctcattgtctgcttaacaatgagaacacacatcacaggcttctggcctggacccatccctaaccagcttgtgactgtgggcctcatcttcaggtctgcattctgtaggagttagaggaaggaatgggaacgatggggagggcaggatgacagcagcaggatgccagggagcagtgacacccacactgtttcagcagggtctggaatttcatccttaacgagaagataccctccaccacttcacacgtgcaggagcaacaggcagcctgatgccatggagagagtggagaattccaaatcagacataatggggttccagttccagctttgtgtcttttgtctggctgtgtggccgtgag

SEQ ID NO: 56740 - DNA, 2576 bp, Homo sapiens
ctgaaaactagaagtttctacaaagagcactaatagagaaattgtgatttccaatatggtgtgtatctcagggattacgtgtgtgtgtgtgattatggtgaggggaaagagagagagagaatgaatgaatgaatgcacagagacaacaaaatggagagactaaaaaaaaaattttcctagagctaaaaagtagatgactttttaaaaaggtttatttattatttcccttctttaacactctcatctaagcagcttaagaatccctgtatttagggtttgggaactagggaagaagcgggtgatttcctttcctggcctgcctaaaggccaaagctgctgctgacatcaagtttctgtccagcccaggccaattatcagacagagttagggctccaggtgcaaactcagaacacagtcaactcccatccttgctactgtaagtaacagaaatgaaaaatgtgaatggaaaccatcagggaaaactcgtgacagcaggaggtggtgcccgggtacaatgcacccatccactgcatgacagggaaagagcgggaagagtggggcaatcagtccttgccatcagtctttgtctcagctttgagaaggacactcccagctgtctgttgctgtggttcacagactaaatggagattccttctgtcctggcaggttctcctcagtggccaagctccacggcaggaactgagccatagtaagtttatttcaggccaaaaaatcttaacatacatccccattagtgggtaggggtaggaaggtggagctttttattagcaggatgtttggacagagatgaggatgttgaaagcaggagtcaacatttcccaaggttctttcttaaaatacattgtgtttgactttggaactcctgactcacccccaggctgggcattctgtcttggagctactgtattcccaagagtgcttggggagaccagctcattccccacctacagtatccacagaaacatctgctatagcttattagaaagtcaaaacaaccaaccatcaatccatcatgttttctgtttaatgacacattcctgttggctgacgcatgcccctccccaaggatcccgccccccgctcccggactgcctgtgtgtgtgtgtctgtaaaactgtgaactgattttgaggatagtttgaacagcttcttacatcctagtttatttaaccttctcacacgaatagcaatacttttctgtggggaatcacagaatgattactgactcattagataagcagtgagccctggaaacaggaagcaaaaagtgggctttcaaagccaatttcattcccttctcttttcatccacaggtgacacagcattgtagaaagagtctgtacttggagtcagtagtcctgggttcagcttgtagtcctgacaggtactgtgtgacctgagatagctaacttggcctctctgagtctcagttttctcttgcataaaatgggaataataatacctatccggttggctacagaggatttttttaagaggttagaatagaatactggggtgggaaggcagcttaaagaacatctgatgcttgaattccttcctataatatcaccacaaataagccatgcaacctatccttgaactctttctgtgacagggaactcattcccacagacagtccagtgcaatgtgagacagccctgatttattttgagctgaaaagtgcttcctttagcattccaccaattggttcttttccatgtagatacatacaaacaagtccaattctcttctgaaagaagagcttttagaatctggaggtactagcacgtccctgacatagacagagcagtctctgagtcttctctctaccaggctcagcttttggttctcttcactatcgtagttattgcactccaaaggcactttaggtaatttttaaccctcaatgtagcttctctagcactggatgtggtattcaggatttctgaaatggagataatgaattgtgacattcacctcccttgtcctagatgctatgcctctattaatgcagctgacccttgaatttgctttatttagtggccatatcccaatagcagcccttcctccataatcttagctgcaaacatctaactttctgatcaccacctcctttctttccagcttattccacgtactatccaactcaacagtttctaaacctcaccaggacttactatccattgatcaccctttcactgtcccttgtccctcccctttaccacgtcctcccattctctccccttttacccagcctagagctcatgatacaattataatcattcccttgaatagactctcaactccttgctctttcccgttttctcttgcctggcaaaatccccaaccctgattacaccctgctctcttcgtcttcctgcccttggacccagacagttgaacctggcttgaggaagcaagaaacaggttaactagcttaagttaaattcataaacagtaaccccaagggggcccagagagctgcccagtgatcatgatccagcttcccagtctggacattctcccactctcctagataactaggtcccacttcc

SEQ ID NO: 56741 - DNA, 1516 bp, Homo sapiens
tgaagacccattctttccctggaagagtttatgatctggtacccaaagggctacgggatcttctcacttccattctttctcttttagtggaaataagtgtagagattcttaaaaacattcctctgcttctggaaaagggtctctggagagtgcaagagatccatgaaaatcatgatattctcccttagattggtctactgcctctgtggagagtgctcaaagactgcatctcatgtgaccttccccatagcctgggcaggtaggcggatctgagattgttatctctgcttcaccggtgagcaaacagaagctcaagacctttattttctccatatatttgttaagtgtcggccacatgcctggcactggctggatgtttccacatcagttatcttaaaagattagatgactttgcaaggtcatctttctagtgaatgtgacagggcagggttcctggttcagggctccttctaccaccccaactggctggggtaaagtgcctgtgatcttggcaaagtcctgccctgctttggcgccaccctctctgcagcctgcatctgacctcctcttggtagatctccctgttagagactatgccctcatgctgcctctgggtgtccaaactctgggcatttctctatcatctctcctaattagagcttccttattatggttcccattctgtcagaatccttctctgtgctgaaggggcagtgagtgacatgaagttaaacagaggaaatctgctactccaggctgttatccccacaaccctaggatggtgacagggctctgtagtggcactctcccagcctggacatgccccagggcactctactgcatgcccagctcctctgaatgagtgtctcacctccatctactgtccacccgcaatcctaccatggttatagttgagttattccaacagtttcacaaccagactccttgcctctcatcttccttccttccattctctcctgccaaccaatgtcagattcattgtgtcaaaagcccattttcattatgccattcccaggctcaaagacctttagttactttgaactgtccatagaatagagtccaaaatacttaactctttaattatctgaatccaacagaccttctgaaacttatctcctgctatacatctgtacacaattgccttctctggctgtgctggccttctcattcttcccaggcacactctgaatttgcctaccacctctccatctcaacctctctattcctttttcctggagggttcttctccccattcgtcagcagcataaatcctgcccattataatctactgaaatttctccttcccctgaattgccatatctaccacacacccttcctgtctgcttgcctgcctttcacaagcgtgtattaaggacccactgcctgccaagacccgcacaaggtgttatttaaacctttgatggtgaaagcagctgggttgttatttaactttgttttaaaatgcacattttatctcacaaaacagcctttgtgg

SEQ ID NO: 56742 - DNA, 5354 bp, Homo sapiens
ttcccttaatgtcctcaagattttattatagattcatgctagacatgctgtggaaacttgcttctctgggcctgggaccaaaacctgcagggcctgcaggacatatacctggagtctaagcagataagcaggagggagaagcacaaggcaaaatgatacccagacacagatgtaaaaaatgagctaggactagggccttggctatggctcgagcctggctcctgagggccaaggttctgtccccaacctgctctgtttttaagtaatatcattccctggagagaaccaggagtgggtaggacataaagggaggtagacagaaagaagctatatttggtgtccagtggagaagggtggaggggctcagggaatgggcagggaaaaagagagagaggccatggttctctctttggcagcacagacacagtgtactgtcactgtttctggatcagtctttctaactagactttgagctcctcaaatatgggcccatataccttctctgtatctgaacttccagggagctcttccagagtagatgtgttggagtaccatggcctcccaggcaaggcagggtgatgtgagcattggccttggaagttccttgtactatgcttggtcagcaccaacccctccccagctcaggtgccaaaaatgcccttaccacccagccagtggatgttctgcatttttgccacacccattttgtttccagaagtaacaatgatcttagataccagaacccctcaaactcctccatagacatctctatagcaggaggagatctggggatttagccagaggctaatacatttctacaaagttgcatgttttatgtataaaaattaacatcactaggcacggtggctcacgcctgtaatcccagaattttgggaggcgtcgatggacagatcacttgggcccagaaattcaggaccagtcagggcaacatggcaaaaccctatctctgcaaaaaaatacaaaaaattacccaggcatagtggcccatgcctgtcgtcccagctacgggggaggctgaggtgggaggatcacctgagcccaggagattgaggttgcaataatctgtgactgcactccaacctggacgacagagtgagactctgtctcaaaaaaaaaaaaaaatatggcaacttttgcattctataacgtatattgtttggtatacagaaatgttttcttcttaaatttttgagtaaaatggatgctcctggaagaagtggcaggtttattttgtcattctacatttatgcccctcatccccacccccacactgctgtgtactcccagggtacacatacccaagtgtgaagatattgtccatcataggcttttactcttggtacagaatgtcctcactccacagcctagtctctccactacctaactgtccacagcctacccctaaattcaaggcccagctccactgtcacttcccccaggaagtcatccctgaatctcctcaggctaaaaatcgtcattgcctctagaagaacaccctcagttcttttcgtgtactttatttatctctggacaagttccaccttgttagtcttttgtgcctttggcttattttccatataacatgtcagctactcgagaagagggtctatgcctgatttctctctgcgtctaccatggaaactggcaccatatatttagcaaggactcaacacatgctgaacatatcttcagactaataatcacaataatgaagggcaatgtcacatggatgcctggttaatgcaaacctctgctctgtggtgtatttgtacttggctataacaggtctgtggcttaggaatgggaggtagtatgctgccttcagtgtcataatggctcattttatagatggaaatgactctggtttaggctgaaatgattcacccaacaatgattaaatagcaatgaaaacgggatcataccttaatattgtcttctggccaagaattcagcattgttgcaagatgacctttgtcatgaatggtgatgaacagtccactaaaagaaataaaacacgtacacacagagaaaccaggcagtcagattaggaactgagcaaagtccatagtactaggtattgcattaattaaatttgcccatagacctgggcaagaaagattcctgcccgaggccccagcagtttagagggtcatcctctggctttcttccaattgcttctctccacagggcaaggagtccatggggccatggggtgtgcccacatggagcctgtgctccccagagtctgtgcccttttttccttcctctagaccagtacccaagatgccagaattccctgaccaaatgaccccaaggctgattccagggactgtttgggcctcttttccaggtccctcctcccaagtacagaccacactgcagtagctggatccctaggcctgagtccgtgactgaaacttggacatgggggttgggatgttcagacacatgtgcatgaggttcttgcagtgggggatggagctggggatgggaagagaggttagtgacagtcttgagctactccatcatcacacacacacacacacacacacacacacacgcatgtgcgaaggcaatggggtttggtcaagagcagacagatattggaggggaatcaagctttgaaagcaggaattataccttttgggatttgcaagtttgcagctttttgcctgaaggcagtccaatctgcaggcaacttggggcaacaggaggccaaagtcttaatagcttgaggtatcagataatagagttggggctagaagagaagccaggaaatgaagagggggtgggttctggaagggaataagccgcggaaaggataaactccccaatctacccaaattattggctgaccactaaactatgcacacacagggggattggcaaaaaaaaaaaaaaaaaaagtacagctggaatctgaaagaaccaagcagagatttaagttgttgctgattaggagagacagagttgagaatttgagtccagccaaatcaactccctcctagaacaaacattactcatctgagaaataaaagagaatccagagtccatagaatctagggtacattgaagtccattgtaatattctgcttactttatatatgtaagaaattttccataataaaaaaattaaaacaaaataaaacaccaaaaaaatcactgaaccccaaactgttcttgacctccacatttcttgccaggactgttctttcactctcctcccttccattgccaaacttcctaaaagcattgcctacactaactgcttccatttgttcatcttccattcatttctcaacccactgcagtatgtcttgtctcaacatcgtcctaccaaaactgctcttgcaaaggctaccaatgaccttcacattcctaagtgcaatgaacactcatcagtccccatttcctttgtcttcttggtagcatctgacacttttcatcactcccctacccaaaatttggcttttgtgactccattttctttgagttttcctcctacttctctgtggctccttctcagtctcttatgttgggtaagtcatcccgccattatgcattaaagttcctcaaaaatctgtactatgccactttttttcttactcttattctttctatttgtgatcttataaatacccaaggcttttggccaatgactctcaaatatctatagaccagcgtttctcacctttggcactattgacattttgggttggataattctttgctgtgaggggtgtggttgtcctgcacattgtagcatgtttggcaacatccttggcctctactttccagataccaatagcacctctcactacattgtgacaaccaagaatatctccagacgttggcaaatgtcccctggaggaaaaaaattatccctgattttagagccactgcactagaccttttatttaactgcctacctgatatttccctgtgcatacctcaaaggtacttcaaacttagcatgtaccaaaccaaatttatcatctaatcttccaccattatgactcaaagacaagaaaaaacaaagactcaagacaaaactgattctctttcctactccctttctcagtgaatatttccccgacataactaatttaacaattccaaccccttgaaatcatccttgatggtctcctcccttcttttatacaacccgttgccaagttcttcatttgtactttctaaataactcctggttcaaacacttctttcatcagtaacactacctcctttatccacgcttccaatatctgttgcctgaagtgctgcaataatcttgtaacatccactcttgcctctctcctattttctatatgctagtgagagtgatgttcttgaaatcaatgactcattgttttacttcttgtgctaaaaatagaataaagaccaaagtcctcaacacgcctacagaatcttgtctgggtcttgccaacttccttacttcatcttgttccactcctcttctcactccacactcttcagccacactggtctttttccattcctttatgtgccatgttcttcctactccagtgctactttgaaaccgcctttgcaaagattatgacagtgagagaaatctagcatggctgacttcattttgcttctagtctcacaggctggctgtcctcactcattattgggcagggccaggctaaccatgggaggaatttagtttctaatttaactttgaagcaagtgtgataatagtctctccatgaaactgatcccttccttgttcagttttgggggctgaaactgcctttgtaagactaaggaaaggccgcaagattaggattatggaaagggcctgacctctgctgaaatgtaggcatagtttctataatcccttactgctcaacagccatgtggctcgaggtcacaagatttttgacttccctagttgctcctgtagataacatcactattgtaggacctaagattggtcttttgagatgtttttcagatttttgcattctggcaaccagctgaccccaccaagacccatgactcatgactcaaatggtcctgtggcccctacctggaggtggactcagtgcgcaagaaccattttccacactcttatcatttcatccccaatcagcagtgcccattccctagcctcctgcccaccaaattatccataaaatccctagcctctgagttctcaggaggctaagccactccctcctctcagctgccttgtgttaattaaacccttcctttactgcaataccatggtcttcgtgaattgcttttgtctgtacagtgggcaagaagaacccattgggcaattacaagttcacataccattccttctg

SEQ ID NO: 56743 - DNA, 3472 bp, Homo sapiens
aaggccaattaaaaaaatggtaaaaaataacacaaattaaaaatgtagtgtaatgactatttttttcttttttttttttttacattaggttctaggatatatgtgcagaatgtattgttacataggtatacatgtgccatggtggtttgctgcacctgtcaacctgtcatctaggttttaagccccacatgcattaggtatttgtcctaatgctatcccttcccttaccccgccccctccttgacccgccgacaggccccagtgtatgttattcccctccctgtgtctgtgtgttttcactgttcaactcccacatgtgagcgagaacatgtggagtttggttttctgtttctgtgttagtttgctgagaatgatggcttccagcttcatccatatccctgcaaaggacacaatctcattcttttttatggctgcatagtattccatggtgtatatgtgccacattttctttatccagtctatcactgatgggcatttgggttggttccaagtcttgtaacaactatttacgtagaatttacattgtattagatatagtaagtaatctagagatgatttaaagtatattgtaggatatgtatgttatatgcaaatactataccattttatatcagggatttgagcatccatggattttggtatccggggggaagggggtctgggaggttgattatatatcacccacagtcttttgcccttcatgactttttggtagtcttcaattcactctttgccaaactctatggagggagacttaaaggtgttaaaccagcaaacctcagtcctactgttggctccttgaagacctgatctttggactgaggcaagtcatgtcattattgccttagttgccatatgtaaaaagtaagaaagaagaaaaaaagaagccaacatttatttagctcccattgggaacattttataaatgctatgccatttacttactgccacaagtctgggaggtatatgttgttgtcctcatttacacctgagattaacgaagctcaataaaatgaggtaatatcactgaggtaagttggcaaagtagtaagggaaagcaggtaagaaaccattgtgccttcttgcctttcttgttggagtttcaggtgatgattgtaaaacactaagccctatagaagacaggcttctattaacacagagaaaaactgaaataggtttctaattgtttgtactcttttttttcttcctggaatttgcaaatctcagatattgctctatcctcttttttgattatgagattttatttttggcagaaaataattgttccagttgagttccaagagttgaaagagtttctccatctgttcttcttgaataagaagaatgctgataaggtgtgcaaatagctgaagaagtatacatgcaattttcactaaaaatcgtgagtacatggaaaagctgatgaagaaggccttgaacctccatcacatcattagctgactgaacattttataatcaggagggggaaaaaaggcggaatagaaggaaatttcagctgaaattgacacctctgtccaaatagaatatcacttcagaatctaaaaattctaattccacaagtcacagatgtttccaattagaacagagaaagttaatgtagtttcagctgttacttagaatattaaaatgtgccaagaaactcagagagagttggtacaaagaagtttctttttctactaaaatatttactccttcagaaataataatcagaggctttaggcccctttccctgaaaagtcacacttaacactcttcactttcttttatggctgtgaacatggcacagacccacacatgcctccactttataaaacaaacaccttcctgacgtctagaaggcctctagtgaatctgggtctctgggcagtaagttgtttggaatgtgtctctgttctaatacaaacatttgatatccaaagcaaataatcatcaaacctgcgattctgaaattactgtccccctgactcagaggcgcagccaatgagtcatttatttacatgtaactacaagataaggagagaaaaacatcctatctgcttgtttttccaaagcaggtttgagaagtagtcacacatttttttccactgaatcataaatctgcagcctcagtttaagaaataggctaggagctcagaaccctgtgaagatacaccaagataatagtcccctaaaccaagaaaaagctgaaattgtaaaagctcgaatccattttatgctagcatttatgaggcagttctatgggcaggcatctgagtcctatcctgaagtaatttgtaagtggaagaccccacccactttaatttaccagataaacatttctggagctatcattgcatattagttatgaaagctggaatttaataagagagaacagaatgcagttttcaaagtgcacagaagttcactgggaaaacatatgcttaaacttcagggaccatgatccctggaagcaaatgtaagagacagctaagtgcctggaattatatgtctgaaaggattactcatcagatgcaattaagcagggggaaggggagaagcacacatttgatctaatgtgttgttttgactaagttccgcctccaaactacaaatccctcgaaaggaaggaatctcagaacattcaagatcaggaaagttaaaggccaaaaaagtatttgctttgaaatgattgagaaaagatgtgtgtgtctctggtcagggataagttccagtgagacccactccaacttgcaaaacattgatattattgggaagcttcagagcagacagtcagacagacttagacccaaattctaggtcatctggttagtagtgaccttgacaaatgactacagttgagcctcagttttctcatctgtaaaataggggcaatgaaatgtttccaatagagcagtgacaattaaagataatatatgaaaagtagtgagcacaatgcctgatacatttctattcaaatacctaattctttgaagaaaagtttctaacagaaacttttgatgttgacagaaaacagtcaaaccacaacagcaagagaggaagaaaggaacagaggatccacaaaataaccaggaaaccattaaaaaaatggcagtagtgagtccttacttatcaataattactttgaatgtaaatgaattaattctcctatcaaaaggctaacgtggctgaatggtttaaaaaaaaaaaaaaagacccactatattttgcctacaaaagattcagttcacctttaagaacacacagaggccgggtgcagtggctcacgcctgtagtcccagcactctgggaggccaaggtgggtggatcacctgaggtcaggagttcaagaccagcctgaccaacatggtgaaccccatctctactaaaatacaaaaattagccgtgtgtggtggcaggtgcatataatctcagttaccgagggagaccgagg

SEQ ID NO: 56744 - DNA, 2066 bp, Homo sapiens
ctgggtgtgtgtgcacatgcatgtgcatgtgggggttgccggtgggctggtggaggtggttgaagacaagaaggttccaatgcaagaaaatgaagcataccagacatattgagcgggaagtaggaaactccaaggaggtaaatgtgaaccttaaccatatcctcttatgggtatggggtgagagggaagaagagatgaaaaagtaatacccctcctttaagcttatgaggaagtttacaattgataaagcatgttcacatgcgtttagcccttctgaccctcataatgatgccacaaggtggatagttcctgtgatccgagcttggagctgtggagtagctccaaggccacatggtatttagataagggggctgaaccactacctctgactccagcccaagtgctctgtccaacatgatatagtatgtttcccaagtgtgagagtgtgtgtgtgcacccatgtgtgtgcccctcctgggtgcagacttatctggcaagggagtttaagtgaaggccagaatgatgtgtcatgtttaccagggccaaccagaagctggactatgaattcaggaacaacacaggaaattggctcttggtcagctgtgatgtcttagataagtcagctttcgttttcatctcagtgaaataataagcacctcaaggagttgttatagggctcaacaataatgcacacaaaatagctagaccagggcccaccatgggaagtacatgcattcaataaatggtaactcttaatatcctgtatgtatgttattggccagtgtgcagaagaccacctatttgcagataagaaagacagcagcttggctcagggccaagggctgctggctttgtccaaatacatcttcaggtactttccacagagcttccgactacataaaaccaagtcccacttcccagcctcacctttctaactcatcacagcccgatctctgattcctcacacatacttgctaatgatttgctagttaagtgcaagtacagatgatttcaggtctgaatcaaacaacagagtgtggcggtacttcagaggactggggtggcctcagcaggtttacagtgtgtattcttgggtggggtgactgagtagatgacaactcctggggtcctgggtcaaacagatcacagctgctgagctcctactagggccaggccctttacatttggaatctcattgaatcctcccaagcagccatgtgaataagtgttatttccatttcacacatgaggaggctgaggaggtgctaaattaattgtcaaaagtcatcaggagctgagattcaaggccaagcctgcctggcttcaaagtccgtgctgcttctactacctacaacccagccctctgacaaagacgctcctttgaccaaaactttagttgggctcctgagtcccctctgactagatcagacattgggcttccctccctgtccttgtagaatccagtgtgagcaagaatcctgctaagtcggtttggccaaaatcctccacctgcctttggtaacttgccacccttgttatctcaggaccctggtccgccttcagcaataatcccatcctgtcaatttaaccagaaaccccttattcttgatgtttcctcctagtaattatccaagcaccgccccccatgctgttcctgggttataaatccccatttgtccttactggagtcagagttgagtccaatctctccctcactgcaagactcctctgccatagttcaaaatctatcgtagtcctctgccctccagctcctgaataaagtctgccttaccatctttaacaagtgtcataatgttttctttcagacctccatcacccatacgggttggaccctacaccaaagctgggaaatgttaggtctaaaggcgggtgcagcacattgcttggagcccaggaggatgaggcatgtgaagacagggctggtcaacagggatgtggcctgggagagggagagtattcactgacactggaccccatatggcttcctccccatgcccttcctctgggttgagttctgtctcggcctccacccagcctcacctctg

SEQ ID NO: 56745 - DNA, 2146 bp, Homo sapiens
tgctttataaaaataaaattcattacacaagtgtctatatgccttgcccaatatctttgccaatgataaataatatcttgcatatttttactgcttcgttgtttctaaaatgctctcatatggcttacgtcatttgatcctagacaggctggttttattatccccatttataggaggaaatatctaggcttagatgggtcaatgacatgtcaagggtgtgtggctagtaaatgccatacaacaacatttgagaataatggctatttcaattgttttgctattgaaagattagtttttgcgaagttgttggataagaaccagcgtggaagagattccatttcttttcaagagaaatttcatatctgctcctgaaatacttggtgactttaggattttgtccatcccgaccgaacaagggaacagaggtggatagttggaaagattatgaatcactctcttggcaaaattccctgtgttattctgaatgtttcatgaccctctcttcccaagagactattatttaaaatttaaataatactgttcttggcaccctaatggccctctgagtcagctggactgcaacaaagtaatagcagaggaaggttacaggcaggggagcagcagagaacaagggaagtagcctctttcctccagcaacacaacagcactttgatggactcagcttgggaggactgggtcaaaagatgaactgtgaccagaaggaagaaaacaaacagacacactttgggagggtctcagaataggcactgtacatgcattcctggtgcgtgcgaataagtgggcggggtgccagaactggacacgagacaaccaaggacaagctcatctgacagggcaagtgtccaacagatggctgttaacctgttccagccctaatatgaaccaaatcctcattctcctgggcttcagtctcaactctgccaccttatcaggtgaaccaggaaggaagtcattttgtcctgaagaaagtggaccattgtggtgcacaggagatcacagcgatcagtcaccctctctgtcttgacaccaagaagcaggagttccaaaatccagaggccattttggactgaatttgtaacaactgtttacacttcactgctttgttagggtctacaaagcagttttatttgctatgatagtagttctgaaactttgctactcattagaaccactgccctatgtggtaggctgtcaaagtgtcattcccattttgcagataggaaagttgaggctgagagagttcaatgatttgcctaaaatcatggctctagcaagttctagaaatgagacttgaattttgagttctatttcaccttgttggctcattaattcattcatattaaatgaattattcatttaacaagtatgttttgagtaccagctctgtactaggcattagatatacattaagagactaaatatatatagcccctgccttcactgagtttcagtctaatgatcttttcatttgaaccggtattctttataccctttcatatttcagaattaatttcaaattatgtaggctggtttcgtgcccagcagactcaatgctcagcagaatagcacaagtggtacatttactagagctcaggtgtgcaggtccaaacttgcccatgagaggcagtgggccacagagaagggagatcaggccttggagttggtgttcctggcttcaaataatgtctctgctccaactggccatgtgatcacagggaactttctaaagttctctctctgttctcagtgtcctcagtgggggactgaagatcataatagccaagctccctgagtgtcatgtgtctagctactggctggaacatctgaggctctcactaaacacagctgtgaccaggccattaccagatgctgagtactgtggagaacaaccgattcatgaacctggtgtttctgagaggcacagcagcctaggaatgtccttagaatttcctgccctgtttattcctcctcctttaatctctatcctcaatccattctattcattttccttaataattacagtttgggtaccacttatttggaatttaaggataggtggttgataaattttaactggtgatagtgacctaatgcagatctaaaattaatagagaaactcaaaggt

SEQ ID NO: 56746 - DNA, 3526 bp, Homo sapiens
caaaaggcaaggaggagcaagtcgcattttatgtggatggcaacaggcaaacagagtttctgtggggaaactccccttttttaaaatcatcagatctcgtgagacttatttgctttcatgagaacagcatgggaaagacctgctcctgtgactcaattacctcccaccgagtctctcccacaacacgtgggaattcaagatgagatttgggtggggacacagccaaaccatatcagacatctagagtccagaactgtgagaaaataaatttctattgtttaagccacctagtctgcagtgttttgttatgggagcctgagcaaactaatacacttcctatgaagaaaatctcacgtgaagtccaagcctgtctggtctaagagaaaaaagtcaccacctgagaactgggaccacattctttgttctaattgttccagctagtccagcttctccactaacctacttaatcattacagacatgggcactgtgacaatgatggccaggtgtgttgggaattcaatcacttgaacaagaatgtccctgggttataacatccaggctgctgcttttttttctaaagcaccagacaattgcttcacaaagttcccaataactcagctctcaccacttgctcaaagccagtttcttaggccttgagggggggaaataggctatttaaactcaaatgactattgagctttgttgacaaaataccacttggaagaataatgtaaatggaatccatcttcaaggaagcaaatgtcaaggagcacttcacaaaacccatgttcctctagccacagtgacttcattactacatctgaggggagagaagtgtgagtttaattaggtaaacatagagacagtgtttgggaatctcattgtaaccagtgagaaggcaaggttttcatagacaattgctggatgcaactaggtcagtctccagatctgaaattaaaccctttatctaagggttactacttaagccagcaacaaaggagcattttacccaattcccactcagatttagagatgtcaagttttccttgtttctgactagcaacaacagaagaaattaaaacagctcagtctggaatatcccaggaacccccaaacttagcaagatttggggaatataccacctagtcactccttcagaaaggggcacagtgatgggggagagcacagaacgcaggcatcaaacacacctgcatttgagtcctggctccatgggttactaagtgtgtgactgtgagccagttatttaaccttccataggcctcagctcccttatctattaacctggtgaaatgcagacccctctgcatggggttacaaggtttcagcatgactgggtatgaaaagagaacaaagaagcttcctggagatgactgtggccttggctcactgccaggaaaatgactcatttctgtatgccagggttatagttcactgttaccctgacaaatgaatgtggaagacccatgatttcctccaccctccttcactcacatagtaaaagttagctactgcctgcaacataccaggcaccgtacaacacgaaactgtaggctccccctccaggaagtgacaatgtcattcctaacctgttggaattttaacacctgtcataaaaggatctcatgatgctttgaatactttctcgaaaggtgtcacatgctgcaagaatagtaaggacagcaacagctatcatttcctacttgggttgcatgtttaatatttcgtaaaacaatactttcacatatatcatatgagccccacaaaggctccagaacttcagcatacaaccagtaagttgcagaactggatcacaagcccgacctccatctccctaagttcaataggaattttctgatacattttctcccaagtttgaaagtaatattacgcacagaaaagttggaaaaaaataaccacaccttattttcatcacccagagatagccactgtatcattttgttctattttcttcctatcttttttctatgcttaaaaaaattttatttaaacaaacttgagatcatactatgtataaaattttttagtcttttttccccactaaaaatgttatgattagcattttcccacatactaaaacttcagcctaaaatgttattaaaaaacagaaaaacacagcaagctttatctagtaattcctgttttatataattgtttccaaacttccacaattatgaattatgctgtaatgagcacaaaactttttgtttctgatttttcttcagattgaactataagtgtacttaagagactgatgactcattctttcattcaacaaatatttaataagcaccgactaggtactggataccattataaactgacgatacagtaataaggaaacaaagtaaaaaaacagacaagatatccctgccttcatgaaacttacattctagagatatcaacagttttaagtatctgtacgcatactgtcaaatcacttttagaaaggtcgaactattttataactccagtacataagtagctgtcttactacattttcaccaatgctgagtattatgatttaaaattgttgctaatttataacacttaataaaaatattgcattccttagagatttttctcctttgctctctacctccatatattcacctcatcataaaatacaagtacattgaagagacatttaagttatcatccaaagttggtctcctagctgggcataatgactcacagctataatcccagcactttgggaggccaaggtgggtgaagcacttgagcccaggtgtttgagaccaacctgggcaacataaaaacaccccatctctacaaaataataataaaaaaatcagccaggtgtggtgatgcatgcttatagcccagctacttgggaggctgagatgggaagatcacttgagcccgagaggtcaacgctgcagtgagctgtgattgcaccactgacacagcaagaccctttctcaaaaaacaatacaaaaaaacacaaaaaaacaaaaaaacgaaacaaagtctgctctccaaatgtgaaatttcaaaagatttttcctgcctgcagtgagaaaataatcccagtcccaaagcagggatggcaagagtggaaatgcctctgatactttgcaaggtagcccttgaaggtagcaaaaaataatgatgacaaatcagtgccttgttagggcctgatatgtctggggactgagtcagcaatgagtttctccagtgaaatgctaggcttctgtgggggatgagctaggacaagccaggtggggactctgcaggggtggtaaggtcagattcaaatgaggctctttcatgaaagctcctggtcaactatagagcattcacaatagaagggagttttgctcttttttaatagaggcctttagaggatgttgaggactttgacaagggctaataataagaaaaaggggataagcatatgtatggaaatataaaaataagtaaataaaatataaataaagaaataaaataggtaaaaatatgtgt

SEQ ID NO: 56747 - DNA, 2367 bp, Homo sapiens
attagtggtctgcctgcagcgaagctgttttcagggcccttttagtgctctcacattccaccaggtatcccccttggccccatgagcttgacagtcttccaaaatatttctgacaaccccagtgagtgatgttcaccagatgctgatcaggactcatgttcttacatgggcataatgggaaaatccttcattgcatactgggaagtgaccaatagtccatggtgcttataactctcccagtacagaaaagtggaggaatttcagtggagggatgtggtgtctttggttggttgattggtattgatttagatgttatttgtcttgaaaatctggctgtgggttaactaatgcttacccttcctgttttaatcattcctacttctttttctaatccatgtgtcaccaggagaaacaaatgtaaatatgtgaggttgctgttttcagcaaattcattcaggattcaatgccaaactaggcttttcctgaaaaccaacaacaagcaccaacaggaggagatagagttacatttcttgtaaaccaacagcctgattttcattgacacattgtgggttttgttattgttgttgttgtcactgttgttgatctggatagaggtacaggcttattttcatagctgagtttatgactaagtgcagcactgcttcctgaaacaattccatcaacttaacacattcacagccatgaagaaatctaccaatctgttctctcctctgagtgatctttctaacttgcaaatgtgatggtgctacttcttatttgggatatcctggctgtaactgggatatttcagacatactggcggggctgaactttaactcctctcatccttcaatgttctcaggcatgcaaaattttccctaacccctttctccctcccttttcccaccatactcattggtggtcatttcttcctctctgattcatagccccatatacatacaatgagttgagaggcatagtttttttttttttttttttttaaacttcaggggaaaatatccaaatagagcctggtgaatatcatcagaaaaaaggcaaactaggagagtaagtccttcctgtaaagtcttgcagaatcttagagtgggaggggacttaagagggaaggtacttcccactcccttctgcaatctctttgatagatggtttttgttgttttttttcagcttccaatagatcacatctagagatagggaagtcggtgttttttttaaaagaaatatatatatatatatattatatacacatattttacattgagcaaaagttgatctcgcagtgaactctcttatacgtccttggtcggactctggagccatgcagaatacgcctactccccgttcgacatgatagaccttcagatattgggggggcacttatctgccttttgaccttcagaaacagaatggggccctggaatcattctttctggcatgttgggacacagatcatgccatgtctcccctgggtgccagaagtacctatgaggtatttcccacatgcttggcaccaggctactgtttggggagaaagtaaatacattttatttcagaattgattaatttaaacataagcagcatactccttaatataaggttacaatgcaaaagaaaccaaaaaacaaagccagaaaaatccagaaggtaattcttagagagacagggaaggttccaaacatttttaaatggatctagcagattaaagttcagctgcagctcattatttatgaaatgttattcctgtttcttgcagagggagaaagaagcagccaagaaatactgccgtgtacctcttgagtccacgcacgcttgcttaatttagaaaaaattactaggaggggccactatggggagctggagaccactctgtaatgaagcccatttctactaaaacaaagtatgcatgagatggaagcaatctgggcaatgttgaatcgattcggggaaatgatcccaggatttttctctgaggatgcactctcaatagtggatagtgatgttttcaggtgtaatttaaatgccgttttgctcagtcagagcaatggactcaaattccctctcagctccctctagaggttaaagtgtgcagctgctggcagaacttgtgggcttggaaacctgcccatgtccagagggcagtcaagatgaatacaaggagttatcggttctttctgttaattagagcaaaatctgttggttgaaaaaattaaaaataaagtaaaactttactattctctaaatacagtaaggctgagatgaaatacattgtgaatatgcattcatatagaagaggtagtaactggtatatcagataattaactggtatataagataattcactggtaag

SEQ ID NO: 56748 - DNA, 2781 bp, Homo sapiens
atgatttcaagttcagtgattcattttattgtcacaataaccaaatgagatagaaatggtgggtctatcataatatctattttaggctggagaaagttgggcctcagataagttaaatgagatatgtgagttaatttgaggaggtagggggagacaggactaaatctgtccttgcttctatttctctcacccaatcctctgaaccaaagatactaaactctattcccaaaaacaaatacaaaagagctagcggtgggttgaactcgaccaaagcattggagatctggattccagtggcagagccagaactaactagctggtgaccttgggcaagtttcctttgtcttgttttttgtaaaagaagaggtttaaactaggatctctaatgctcctgcaagctcgaaaatttctataagtctagacttttccatccttgctctcaaattaatctttttctcagaataataatcataaccttatttattctcccactgggtaccaggcactgttctaacgtacccccattttctacccgcattttctctttagatctcacgacattcctaagacaattatatctcttttacagataaggaaacctaggctcatgtaggttaaatgaactgcccaagaccaataaaattagtaagcatcaaggggagagctgaccgcaggtcagactgaccgcgaggatctaaacctggtctgtgttgttactgcagaagaaattaggctccctgcattactggtcgcctctctccacgcataaaagggagaggagggacaagaaagccaaaccaagtcacaacaagcccctgcaaggcaaaaacagaaaaaccgctggaagggcgcccgggaggatcctttctgggtccagggggcggggcgcaattttccggcagccacgggatcgcaacgcgggccgtcctgccctctggcccattaccttgttgagatgagggttcctggtgacatcgtatccgcgcttcttcaggggcacagggcgcgccgggccaggcttggagtggcagccttgggcgggcgcggtgggtgtccagcgcgggagggcgccgcaggcccggcccggccagggagccagccgcgtgcctgtccccagcgcggcacccatggtccttggcagacctggcacgggagagaaagcaaggtcagggcctccttccagccagccaggacccacgcgcgctgcggggcaccgggcctgatccggggacgcgccctctgggagagggcaggtgctcccaaagggttaaatgttccagcccccgccactcctcggctgccacctgctcggctccgcgcggggcgccaggcctagccaagagccaggcaaagcgaaaccaagccctggaagcagatccggtgcgggtgacagccggcgccacccctgcccccatccctgtgaaaaagaggcgactgcgcggcgaggggtccccgtacccctaatcccgcgtggtggcttgcctcggtcctctccttccctggcccacctgcgctgctcggggagctgaggtctacgcggtcccgctgcggagcaggcggggtgaggagctgcggtctgtgagtcctctcccgccaatgggtggaccgcgctggcggccgcgagctcgcggagctggtgagttcctcaaagagcggtcccacaacctttgttctcagtgcctggcttcccctgaggacgcgcgtggggcgcctcagcactgcgtgcacgtggttttccccagtgacaagaagcagctcagaatgcccgcctgagactctccatcttggcaagactaaatgcacagagggggatttgcgtttgggggtcagcatatcctcgcactctcccaacattcggggaagggcgtgccttcaggatttggagtagaaatcctcaggcattcggtgctcagtgttgccttgtgctgtccaatataatagccattcgccacgtgtggctatataaacgtaaataaattagtctatatagaataaaatttaacatccagttctgcagtcacgctagccacatttccagttcaagagccacttgtatgcagatacagaacatttctgtttttgcggatacttctattaagcatcattgacataggagccacagttactaagaggacttctgaggaccccatggagtttgccatgggttattggggccagacagggatcttggggtccatctagccccaaacttaattttatactttctccacacagtagtcaggagattccttttaaagcaaacactttgttgtgtgtggaataaaatccaaactttcagggcctacaagatttcccataaactggctcttgccagcctcttcagacttatcctactctactctttccttctcactgatctctggccatacttgatccttcctgtgtcttcaccccacttggttccctcccactgcagggcctttgcacttgctattgcctctccttggaaggctcatactccagccttgcaaaccactacttcattcccacctctcagttctccactaagttgtcaactcgaaggcctttcctctatcccattcaatgtcagcctgcactaggaactatagagtgaaggggtttttctctttagagaacttaacacagtcagtagcgcgcttgtttttctgattgtttactgactatctcctgtctagaatgtaagcttcatgaagagaggctctttgcctgtgaacctgtgtgtcctcactgcctagctcactgcctggtatgtagttgcacaataaatagttgttaggt

SEQ ID NO: 56749 - DNA, 1374 bp, Homo sapiens
ctggctcatcaggaactctttgctgcattaacagccctactctcattatcatcatcctcatgttgagcaagctaggctacaggggactatataccctggaagatctccaattattctgcaaatcacatatctggttttagatcactgacatgcagttacttcaggactgtgtgagacaccatagggtgttcaccaaacctgatgctcttcctcctggacacagagatttgctacatttcccagacacccttgaaattagtgtggccatgagaccagattctacctaatagaatatgagcagaaatgatctgagctacttgcaagcctggtccataaaaacacccagttgctatcctctgtgctcttcccccaggtcaacaatcttggaagccacacattgaagctggaggagctccaaggtagaaggaccctgagttcctgaattactatttagagcccacctttaagtagaaacactcatgtacgggagcaagaggtacatttcaattttgttaagctattaaaattttggagtttatatgttacagcagctggcattaccataacagggatcatctctcccatttacgattaattagcacacatcccaaagcaggagagcttcattaatggatacatcttattaaaaaagaaagttcttcagtgctaacaggtcatgtttagaatttttccttttaagtcttgactctatgccaggcctgtcagggaaataggatgactctgcttgattaacatcctgagaatttggagttatgaaagagaccagtgtttccagtacttaattgatgaatcacatttctagctattagcctggccacaaaaaaaaaaattattcctcagttcctagcagaccctgtcaccatagaggagaaactcccccattccaggacccctactagttgttttagggtgagttttcttcaaaggaattcagatcataaatagttaagcagagatagctaaatgtgatcagtgtcgaacaaatcctcagatggggatagtggaggaattctgtggctaatccatttaattatgtaaaccaacactttagatagtttaagccacataatggattattattgttgccattgttgttattaatgtatattttacacattaaggacccatgagctcaaatggagtaggctgtcaacctagcaagaaacacccctttcttctctgtctactgtctccttaatctggagttagaatatacctgactgattccctgcacagcaccaactcatgggaaaatgcatatctctctgctttactccatcctgatgtctttgatctgggcaggaaaccccaaacaaaattggcgagaaactgtgggtcttacacattggaata

SEQ ID NO: 56750 - DNA, 791 bp, Homo sapiens
cagccaactctcctataacaaaagacagattagcaagggaaaaatgtaacaaatttatttaatcaacattttatgtgacaggggaaccttcagaaatgaagatgcaaagacccagggaaaactgtattttatgtttggttaacaccatgtagaaatgtgattcgacaaaaagtgcaagcaaatggcaataaactgaaggggaaatccagcaaggcctgtttgttcagattcttctcagcctctctgtgtagcatttcttcctcccggtgtaggacagaacacctgtcacatgagggttttcagggaagaagacagaaggtcagagagtaacatttccaggttttatggctttctttggggaagaggaattcttgtttctatgagctgatttgaaggagaaataggtgaataagaaaggagggcaggaaaaggtcagagagaacttcttgcctctgaggccctcccattttccttcagttcaaagtactcagcatgccaaagctctgtgctttggggaatcatggtctgaccccaacaggattgtgtcacacattgagaataattcatcatagtcggttaataaacagctgtgaccttgggtaagttatttgacccatattatttcccccaatttctcatttgtttgtaaaaaagagacatcttataggataacctgactaaacctaacataatacatagtgaggcattttgatgttagttttctcccttctggaagtatcacagaaagaattgaacatgattaaaattcacaggagaatcactaaagggaa

SEQ ID NO: 56751 - DNA, 3255 bp, Homo sapiens
cctccaccatccatccgtccaatcatccaccaatccatccatccatccatccatctgtccatccatccatccatccatccatccatccatccatccatccatctgtccatccatccaaccatccatatatctaactatctatctatctgtctgtctgtctatctatctatctatctatctatccatcctcttatccattccaaggtacatcctagtcccctgccatccacacacaaaatttccttctctcccatttctctgtgttcccttagcccttataaatattttgctactcaaaatgctcttaatattgaacatatgtatcaggtatcttactattaatattaatatgtgctttacttatattatttcttgtaactttacaaaactttgagataagtactagcctaaatctctctcatttgacagatgaggaaatggtcatatagatattaagcagttagctcaaggtcacactggtgattaataacaactaggatttgaacctggatttcatgccatcctctctaaatctagagcccttaatttaggaaaggaaaaaaagttattaccatgtagaataactacgtttttatattttactctcctccaagccatgagctcatttaatttaactcaatcctattcatttctatagatcctttttaaacacctctcagggtcagattctctcctgaagactccctataaagcagaacctctttcttaggcttccatgtagccccagctctcatcagtgcttggaacctgtattcaactgtcattcatcagtcaaagacactgatgactaagcacatacaatgccaaccaaaattcctagacgaagaagaatgtcaaataggagtgaagatagcaagtaaattagcaaatgactatttcccacaaacattccttccctgccagtcatgggaggtctcttccttcttagtaaggattaatcctgttttctttggtgggagagagaaacatgcttcttatatatcatttttttcccctctaagttcaacacagtgttggattccaaattggccatctaaacacctgcaagcaccaacagcacagtctgtccttaaggtaaatcactgcctttaagccagaacttgagctgattaacacaactgcatgtggggacatgcctgacaccccaagacaaagcagcttactctgcacagaaggaagaccttggagacttctctggtggctctgaaggcttgggcaggtccacagctctcacaggccatgaaaggaatggtgttttttctgaggactaacaaccctcccagagaaaatacttgcatcccaaggtccctgtgacactcaagaaacacattcttcttggccacttgcatggatccaaactttgatacccaaaagggttggataaatttgatgctaaagaatacctgaatgggctgcatcctgtgaaacatgctaacaaaacaaatcccagtgtcttcacagcacagatacacaagaagattccaaatgtttccctccctccactgatgaagctctggtcagaagtagatttaccaggaagccaataaaatgcgagctccagggacactcacttatatgggccccttctaagttctgcctctgttttcaatttgtaactttgtattcattttctttacaagtttccctcctccccctcatccctgcccccagttgtaaaatcaacaggctccacagaacttggatctgtcccagctctaggcagaatttttccgcatagaaatcaatattggacttagaggattgtggctccatctctccagatgatcccagagttaatgatttaaatccatctcttgcctcctgtatctttatcctctttggtgtctctgacactgatttcaggaaccatctaccagtgctcccaagagtgaaaatgcgtcccaggcagtagggctctttcccacactgaaaggtcagaatgaatttcttgtcatttcctcagtaaagggactttcctaaacctctctttgtcatcacctggtaccctaaagttatcccagacatattagaaaagaaccatggtggtagaaaaggattctgtacatacttttaactctgcctggacttctctccatttatataaagttcctactattcatcccttaagaaccagcttctgtaccttggagggtgtagggactggaaagtgggatacctttcttcacccatgataaggaccacagccattactccataacaaaagagaggttaaaaagagaaaagcataacaaatgtatttaatcacagttttatgtgtcatgggagccttcagaaatgaagactcaaagacccagagaaaactgtgcatttttatgcttaggtttgatgaagaatggacaaccatgtagaaatgtgattgggcaaaaggatatgatctaacagaagtagactaagagggaggagggaaactcagcaagagctgtccagatttttcttggcctctctgggtagcattcgtttctctgtggcatggggcaggacccctctggattgatggtctttaagggagaagggacagagtgctctttccatcttttatagcttgctttgcagaagaggagttctagtttccatgacccatcttgaggaagaggaaatctgatttcaatgatttgctttggaagagaaagaagagtgggaggcaggagggcaggcaaagctcagaaagacgcttctgaggccttccaatctcctttagttccaagaactcagcatgccaaagtgccatactttagggtactgttttccaagccttaacaagggaaagaagtacattttgtttatctgtgtattgttagtatctgccatttttataggcactcagtcaatcttgaccaataaataaacaaatgaattaatcagtgaaatgtgagatgaaacattaggaaaggagaatgaactggatgtgagcagagacaaaaaagtaaaaagctaggacatgtaaacaagattttgagttgtgtaaacaaaattagagcaaccattaaacagatacaattccctcttttgatttataaaaaatcacacagattgctcatgaaaatttgttaggaaatgtacttggaacccttaagggaggcagccacactgagtcatctctcttaatttgtagcttttcgtctgctcagagggtttcagtgtagaaaggaaactttgcagatagggaaaagtcagtattgacctagagataggcttatgtattttcttgtgcct

SEQ ID NO: 56752 - DNA, 1662 bp, Homo sapiens
attatatggccaaaactaactttaagagggcagggaaatttaattatccctaagaagagaaataggtattagtgaacaatactccctcccatatgtttatattaaaacatttcttttctgaagattcccattttatcttcccttccattatgggttgaattgtgttccctcaaattttatatgttaaagtcctaacctccagcacctcagaatgtgaccttatttggaaatgggtctttacagaggtaatcaagttaatgtgaggtcatcagggtaggctctaatccagtatgactagggtccttataaaaatggaacatttagaaacagagacacacatagagggaagacagtgtgacacgttctaaacagaagatgaccatctgtaagccaacaagagtggcttggaacagattcttccctcaccaccctcagaaggaaccaaccctgccaacatcttgatttctagaggacttctcgcccctagaactgtgagaaaaatgtgtgttgttgagccacccatctgaggtactttcttacagcagccctagcaaactaacacaccttccaagggagactcacagggtaccctatacctacttctttgttggaggctgtcctctgggagtccaaagtggttttctgatgaggatgcaaaggcataagaatgatacaatggactttggggacttagggggaaaaaggtgggaagtgggtgagggataaaagactacaaattaggttcagtatatcctgcttgggtgatgggtaaaccaaaatctcacaaatcaccactaaagaacttactcatgtaaccaaataccacttatattccacaaacctatggaaacaaacaaacaaaaatttaaagtggttttatggtagtttctttgctcaagaatagggagaaaatatatctttggtctttggtggaccatcctgctactaaagatgagtccagcaggaaagttaagtctctgactcgggtaacatggctatggtagagctaggactagcacaggaaacctttgacctctgacaatgaacaagccctttcaagagcaccagcgagtcaccacaactctaactgctttacaggtgttttttctcttaatcctcatatcaaccctatgcagtagatactattatttcacattctttccactttaagtcaagctaactgagaccaagagctgctaagtagcccactaaaagtcccagagctagaaagttggaaagaaagaattcaaagcaggtcatatgtgaagactacaccagtatgactccctcctctggaatcccatgtgcaccttactcagattctggttctgtctttcaccactctcttgtgggtaggtgtcctggtgactttcctgaccataatgttgcttagtcatctgaattccctgtgtcaggtacagtgcctgatacagagtggtcacccaaccagtgtgttgaatgaatgaagaatgaatgaattgtgtcttcactgcagggagagtgattttggtggatagtcagatggaatcaggttgaagggcacctaaagcttaatccctgctcgtgagtctttatgtgcctttgggcaaatatcttactttctacatgaagtttttctccttggcatgagtgaatctttcatatcttcccagatgcattatg

SEQ ID NO: 56753 - DNA, 6811 bp, Homo sapiens
ttatgttataaaagccagcagtgtcaccatagacaacttccttcctttgttggagcagttttcaaaaacacagatcacagcattattcagtacagtaaaccacaccctccacccctttattgttattgacaacagcagggcagagtgtgtaagtcatatccaagtggaaaacattggctccaatgcatcctattgtgaaatcctcatgcattgtgttgcagcactgacaacaaaggaaaaattaagaaacataaagagggagaagaaaaaagattccaaatggaataagacaaaagagagagaggttcaaaaagcagtaggccaagatatgctgtgaatgcccaagactctggttctgttaaatcaatactagtccatgacagcaaacatttattgagtatttgccgtatacaaggcatgggttgattctatacatatttatttggtcttctcaacaaccttgaaaccacctttgcaaacttacaacagtaagagaaatctaaaatagttgtctccatcttgcttctgacctccaacttgtccttggtcattcctgggcataggccaagataaccttgggtagaatttagtttatggttaactgaaaagcaaggatgataatagtccctccctaaaatgaactctttccttgctcggggactgaaaactccctttgtggggtttttattttattttattttattttcgaaaactatctttgtaaactagaataggattctgggaagggcccgaattctgctaaagtgttggcatagtttctataatcccttaccgctcaggagtcatgtggccagaggttataaaatttgtggcttccctaattgcttctatagatagtgtcactattgtagaacctaaaattgattttttgagatatctttcagactgacccctcctggactctgactcatgactcagctaatcctgtggctctacccagaggcaaactcactgcatgaggaccattttccacacctctactctttcaaccccaaccaataagcagcacccatttcccagccccctacccaccaacttgtgcataaaacccctaagctctgagccttcaaggagactgaattgagtgagaattccagttctcctgtatgggctggccttgtgtcgattaaactctttctctactgcaatgccccaacctcagtgaacagattttgactgtgcagagggcaggaagaacccaacaggcaattacaaccttgtgaagttggtattattttacagatgagtaggaacttaaggctcagagaagtaaggagcattgaccaaagtcacagatcctataaatggcagagctggaatctgtgtctccatggtctaaacttcctccattccctactgacacgctgtgccctggagaccctaaccctacagccacagttgattggacatctgacataaacagctaatccatggggagaactgggatgtctgtgaccagaaccaaatatgagatcggggccaattttgttcctctcttacgattttagagtctggaaaaatcatagccagttagctatgaagccaaaggttaatgagatggactcaatacaggggcagccattctgagccatgggcaaactacagtgaggagcactgcaggcaggagaaaagggaagacaaggcaccaagagacagagggtgagagggatcggagacagagacacagagccaaagagaatggagcctagagctagccaccttggctcctgacagagtcttgattttaggcccaaggggtcctggctgcactatggcacctatccttggcttcctgtgaggtctccatattcttacaatgattctttccacctaagctcatgtgaatgggcctctgtagcaacccccaaaattctgatttcaacagcctgatgcaagagccaccttaccatctgactgcaggcccccatcttcatttacaataacagccatacccaccatgtgtcccaggacagttgacaagccagagtttccataggtctagttcctcatctctgttgctttgattaacctgccactgccaccatccctgaatagagaatatgtcttcagcctccaggccactccctaccagtcccacctttcctcctatggcctatctccaggtctcttgccttcatgggtgcaacaaccaccttctcaggtcaccagactgcagctcaagggataccaaggagcaggtgttcagccctgaacattgccttccattctcattcctagaggtccccaaaaaatgacccccctcctccaatacccagatgtgggtttttaggaattaatctggacatataataaagaaaaacagagacagtctaataaagagatgtagacatgagcagaccctggcttcttgtctagattctcatcctgactggctgtgttaacctcaggcaagttggccgatatctctgagtcttggatttcttacctacagtgacagggagggtggataacatgagaatgaggctccttcccactctgacattctaagatccaaatttaaataccaatcagttcgattggcatttagagaagaggatcctagattctttctgaaacgtgtgctttatcatcacacctgttcaggcagcaagtatcagcaaagcacctatagcagtgcagactggatatggaaaaggaactaaattatcacagaagataacagcacactaactgaaggttcagaaaaaaagggaggggggcttcatgtctaagagaagaaggaaggtgtgggcaactgtatgaacagcagaggtgcaagggcatgtgcattgctgaaacagcagatttctaagcatgtatcacagcaggctgggcttgcaggctttatttaggtaaaactcccattgagcttcagctcccagtgcccagtctgactcagagcttcagaattttgtcctgcagtgcgatgagtcatggtgatgaaatttcaagagaaaaggacatttttaaaattagctgtaagatagcaactggctgtgcttttgctctgtaagtgccttttccaggttatttgaattcctcctttttcaaggcaactggaatggttgggaatggaggccctggaataggcctctcgtttgcctgcccttggccactcagattcccaaaactccagggcctctcagtgcttgctcttttcaaggaagcaagccaaggactggggcactgaccctcaggcctggtctgcccttcactcttccgcctgatatcttgtggttctaagagaatggagtcctcacaggcccccaaggctaaggttgggctgggctgggttgaccaccccagctagaagttccaccattgaacaaagatggagtgtgagagtctcttcttacccaacctaattcctctgactgcacaagcccactttgtgccttttgaccgcgcctcctctcagggcaggaaatcaaagctgacactggctttgcagttggaatatttccatcaggaatgagatgtaaatgaacaatttctccactgtttcctgtacaacagagggttctgttgagattggacaggcgtggctcagttcccttcttttatttaccctgatggagagcgtgttctcaatgtttccatccctcctcagggatgtgctgtctaatgagtataattgggattcccctcaacaaatccaaatattcaaagagctacccaggtctttagggaatgtgaatggaactacaagcaggaactatgagcccagcccagctggtgagattcaagaagcttcaaaaggcctaaatatatctcccttttgccaagttcttcctatcaatatgcatatattcatttagtctttcatttaacaagaattgattgcataccaaccatatggcatcactgagctggatatagagaatattaacataaataaaatacagctgctgccacaaagaacacatctttcagtatggaaatagtggtaagcaatcagttataatgcaagatggagtgctatcatagaagtgtatacaaaatatgagatgcagaaagaaggaatggaaaggtagggatgtgatcaggctctaagagaaaagtaaagatgtgtattagtaattaggtcaacaaaccaagaaaaacagacaaaaccttttctggtttgtataaccagtatgttgaacaagcatgactcatggcataataatacactgttgacttctcctgtcctggacctctcctgccccactctctctctctctgctgtttcagatccaacacagttaaagccatgggcaggagaagaggtaaagcaatagtacagatttgacttgagtctggtctttggccaagggaagcatcccctgggtgagccagagcagcactcttctcataggggccatgccatgggttgctcccaagtccctttgtgggacctctgtcctgcagtcaccttgaccctgacagatgtgtcgccattcctggagccacttgaggcattgaggagcagcacatttccaatcttcctgcgaaaatcccttcacttctctcacaggcactttcagagaagatctaagatggcccacagaacggttctctttctggtgtgtcccacatctagtgcataggaaatgaccttgaacaactctgggaatgcattccaaacccacccagcacacctcctggttcctgaacctagacagcaagttactcctctctcatcctctgcccacagcgggcaggagccaggacccagtcatggtctgctctcccagacattactcaggactagttctctatggtccctcgtgcaagaaatatcttttcacgttctcctgcagcacctccatgcctccctctaagggagagggctgtaacagctctctccaaaggaatctcttctctaattctctctccaagctggtccctctgaccctttcctctactcttgacctggctgagggccaagactgaaggtacatgagcccttttcttgaaaatccacatcttggggatatgttgtcatgctcatttttttaatcttgatattgatcatatttggtatgtcaggtgaactaatggcaagaagtagcccattccaaacatcttatgtcccatcgctgaaacaacccatactgggaatggtgtctcccaggatgctcacctgagctgtgttctgtttgtaagtaggcagaggatggagacctcttgaagacctaattgttcccaagatatagtctatgctccccatcacataaacttctgagctccttggtcaaatccgaaatgaatttttcataccagagtttacccagaggactgtgggggtggggttgtgacctggatggaggaccggaagctgtcccagtttactcagtgtagctcggaaaggacaggtttgaagtgaatccatgtttcttcacacagataattttttcctcttcagagtactggtccactctgacagcccgttgccacagagcaccacccacagagcagaggatccacactcagtattacatagcatcagcagaaacagaggctgacccccttggtgaggccacttcagtttccttgttcttgggccacccatgagcacctctgacagtttaaaagatactcttacaagccaaaggagagaagtatagcccaggattcccaggattccctgggagcccaacagtcaaactctgagccctgcgtaggctgtgaaaactgagtcacaggttggtgactcactggcttgagaccacaccatgagtcaggcaaaaaaggctggggacaaacttttataatctaatttctccagactgcctctagagaaccacccttgaaaaagagcaggctctggggtaaatggctgggaagacttgttgagacaccaaaccgcgcatcagagaataaagacataccttggcttgttgcatgtctcacctcactgacagcttgcggttgtgtgcaatagattctaatgttgttttgtaatttctaaccccacttactggtaacaaattcatcaatcacttcagatctgctggctgcccttagtgactcagtgtcattcattatcccctagcaactgcttatgcttcagtgtttatgaaaccctggtgcagaaaggctgtctggggacaggggaggtgacatagagcagtgattaaggtcacaggcttggttattacacaaacctggatttaaattccggtgtcacatttgataggatcttaggcaagtcacttgcttcattttttccattattaaaacagaaataacagtgcacttgaagagttgcatggaggaataaatgaaatcctgttcataaatagcctggaatataggatatgctttataattgattaaatattatattattcattaaggatttatttccattaatgactgctcttcctcacaattttgctaattgtttacaatgttaaataatcatttattggggtacaaaaaaattaagtttttgccaatatacaaaaaaatcaaacagcagcagagatctaaactaccatcagcacacatagcccttaagagaaggactggccgggtgcggtggctcacgcctgtaatcccagcactttgggaggccgaggtgggtggatcacgaggtcaggagattgagaccatcctggctaatatggtgaaaccccatctctactaaaatacaaaaaaattaaccgggcgtggtggtgggtgcctgtagtcccagctacttgggaggctgaggcaggagaatggtgtgaacctgggaggcggagcttgcagtgagctgagaccgcgccactgctctccagcctgggcgacagagcaagactcc

SEQ ID NO: 56754 - DNA, 3423 bp, Homo sapiens
accgcttggagtgattcagggaagtaggcccactggacaaggaggtggctccaccagctggtgccccgatgaagaactgaggccagtgggctccccagccaccgccgctcagaagctgccaagcacccccggtgctttgggccccacgcacagcactgagtgctgtaaggaaatgcaaagcattggtggccctgccatgggaatacaggtttctgttctttggaggcaccggagaaactaggagttcggtcagcaccttaaggcgctaaaagtgtacgtgggggtggggcgcacacaggttctgaaccaattcttcaaatttgcccagggctccccatacaccaggtgtggcccgcgtccctagttctaggctgttgggggaggggtcgccttttgtaggggacctggtctttttgcgagctggcagcgtgctcccagcagcgaaggccgtagtctcgctcaggaggccgcgcgccagacccggggatgcgcggtgttcaaagggtgacggcgcgcgggtcccgggcaggagagcccgccagagccggtgctgcctggcgccgagaggcccggactggcgactgctgccgcgccaccggggcccacctgcgcagggacgctcggcctcaggccctctgggctgctccaccctgctccggccgcaggcgagcggcgaggggaggggggcacggtttatgtgcagtggggcgggcggcgtccgcgcggcttccccgaggccggaggcggggcgggcgggcctcgggtggcgcggggggcggacccgccagctgcctgcgctgctcgccagcttgctcgcactcggctgtgcggcggggcaggcatgggagccgcgcgctctctcccggcgcccacacctgtctgagcggcgcagcgagccgcggcccgggcgggctgctcggcgcgggtgagtgcgggcaccgactggggcatccgcccgggcgcgggagaggcgaggcgccgggaggagcgggacaaagggccgggtatgcgcggggtagggtaactgcgggctgccggaggcaccgcaggacttcgccagggcagtcctcggggttccaggacacgggctgggggcctgaaggagctctggggagacggcgggggctgcaggtcatttggattcatgcagtgtcacccatgaaacggatggggaaagaagatcctgctgtcttgggtgcaggatgttggttgggaagcagagagagccggctctcggcaagctgtccttcggcgggggcgatggctacacccccatgcacccccccaacacaccaccaccactacttcttttccttgagttttgcatataccggattccatcaagttctgaatattaagttttaaccctgggcatgtgattgtgaacacacctaagcaagcaagagaagtgcaaaagtgcagcaaatacaggctgggaaatagaatcttttctccggagtggttgtccgtgtgcgttccgggggtgctaaccctagacactacagtctgaactaacaacagttgttgtaagcaaatagttcttctgcctgtaggcattcatcacgagttaacttttaaataaaagttttaaagttttaaaaggagcgggagaagacttgttcagatgaaggaacaccaccactcctctccagaatacaaattaggtttgctttccagcacctcaggagaaagcagctgataaaaatcctgtttgttttactgcccactgggtgacaccagtaagaattaagcagctcagtgtaggtattggaatagggcttgcttctctcagctcctgaaactaaatttgagggctccctgtgcactccttaggaacaggtaggccagtgccagaatcctcatcacatggtcatgtgagaaagaattgaatttatagatgaggtcagctgtggtcaaaagccctatgtcaaagtagtatcaggatatttattgcatgttgtttcaagatcctacttgtgcatgcgagtatttgtgacaggtttataaccgtgcctaccatgaagtctgtcaggagtggattggaggtgaagtggggagaaggaacttagaaaatgcccccagaagccactatgtttatttgtgaaagtgtttgcaccccatctgcgtacgaaaaggttgtttcacttgcagttttcctagttaaataaagtcaagcggtaacttgtcctttcctgtgcctgaactgggaaggaagcctttttccaaggtgcctaatatggatctcatttttgtaacactgacgacttattcagctggatggttaacatggatgcattttctggttgtagcataagtgtccattaatgcatctgagaacatttttgtccccagtctgcaatggttaatagtctcaggttctcccagtaactcttctcatagatcccttaggatttcatccaccaggcattattcatgcctaactcccacagactccagggaatttgtttctcatgttctcaatattagcaggtttttttgcactctgttcttgttctgccaggtttgtcccaggctcaatttagtttacctgaaatccgatagagaagaggctaaacttcatttgaccacaagattgtgtttagggttgcttggacttgtaagtgccttgtagtttcctgtacaagactgtaattcttaaacgattatgtgattaggtctgttttgccttaatagggtctgtgattcaggaaaacgagaacaagcccgactgcagagtattcacagagcttggttcattcttaagcatttgctttaggatttagcatgatttcaccgttccatatcactgaccactgattccatggaagaccctttgtcatctctccaaatggtgtccaaaacctgtatctttgcaaactttcctgccgtttctttctgtcattactgtttatagcggctgcaggaattcacaatttgtacaatagagaatacatgacctaaggattaggttttccctcccagcacttgtttgctataggagttaaatcattctctcaaacagtggccctcttgaggagacctgtgttgttgcagttttcaagactaaggtgccgtgcaggagacagtagtcactgcatccagtctccaaagagattgttgtttgcatatctgttaattatgcaaagtcccaccaccaagggcctatgaagtggcagcatcctcaaaaagtataaatattttcagacagtggctcatattgagtgatggagggtggactgtgtaacctatttatgaatcagatacccaaagctggaaaaggaatagtttctgtattactaagcatggtgaaaaaatattttcttaccttcattttccattcttccctgccagttaggtgaaatgatgcacggaaacacttggttggaaaccttaaaagataatttatgtataccaggaatcttt

SEQ ID NO: 56755 - DNA, 1629 bp, Homo sapiens
cccttgttttctcatataatgcctataagcaatctggtgttctactaaatacattctggggatctctgtaacagccttttggttgaggtggtaatgtagaaagaatgatgagtccgagtggggtcaggtgtctgtgcctttagggtttaaccagaccctataaccaggatttggaaatcttcacagcgtgaaattagaagtaataaatttgaaaattatctgtcgctgagaatcagaagtttgtggcagaactggggacacatgttttacatagactttactccaaattttgaattttgaaaaggagatagtgtttttaaaaggtgggaaaatagccttaaaggggtaaagaaataggagcagagttgtatgtgtaatctttctttttactgtttttggaccaaaaagggattgaaataccaaggtcatgctcccaattccctgttctttgtgtagctcagtctacctgcttggggagatgggaagtacctggtgatgcctggatcatgtattcaaggaatcactctttctctaacaaaccccacaggaggtctttaatgcagaacttgttaagaatgactaagcctgccctggaatgatgactctaggctgctgtctgctaactgaagggtaaatggcagccatccagtgagtccagaggaattctgacagtgatccccaacactcactgagggcttccttcttactttgcctgggttctgctgctgttcatgtctgcactttttctttgttcttgtcatgaaccagctcaggtatgccttgaagttgcctctgaccattgatttctatggatgtttgataaggcagccatttcatttatcattcagaatgggattcttttgagaatgctatgactaatgaagctggggcagcaggtgtaagccaggtatgtcttggccaacaagcatgtttggtcacttaattattaacctttcaaagctctgtatagcgtgcagactggcagccatccttgctaatctaggaacaaaggtggggctgcagctccctgcgtttctcctctctgggcttccattgtgattcctgtgataccttctttgcctggctcagcattctgagggcctccaataggggaagggcatttaaaaatccttttgatggggtggggtcatcgtacatacatggcagacatgaggccatttctgggcgatcaacaacacatctgtttttagtctggggttccccccggaggaggaaataaaccagcttccagaacaagagtaaacaggggttggccgggcatggtggctcatgtctgtaatcctagcactttgggaggctgaggcaggtggatcacttgaggtgaggagctccagaccagccctgctaacatgctgaaaccccgtcactactaaaaatacaaaaattggccgggcatggtggcgcatgcctgtaatcccagctgctagggaagctaaggcaggagaatcgcttgaaactaggagtcggagattgcaatgagccaaaattatgccactgcactccagcctaggcaacagagtgagactctgtctcaaaaaaaaaaaaaaaaagaaaaagaaaaagaaaaaagaaagggtaaacaggattgagagctgagatagcagcctg

SEQ ID NO: 56756 - DNA, 3148 bp, Homo sapiens
aaagattataattcctcagactacctgcaaatatcatgagtcttacagaatcacaatacatttttattgaaatatccatggtaaatatacatcttacaggaaattccattgcgtttacactatttatttaatagaaataatctctgggattatttgcatttatttctgaaggaggatgtttttccttcctgagaataagttcaggaaatgggtgaaatgttcaggaagttagctaaatgctgatgtaaatccaaaaggaaggtctgttgttgtttctttctttttttttttttaaaggggtgggtgggggggacacacaaaaatgctaggaagtggttctctcattcacttatggaaaaatgttatactgaatttctgatttaaaaggaagaggattagaaaaaaatgtgggcccatgatatggttttctgtagatctggttaggcaattcacagtagttagcaaagaaaactgtgtcaagaaacaaaatctacatgggagacatgacttggattcagtttgtcctaaattaaacctttactatgaaatttgaatcggctactctaagaaataagtcgtgttagaaaactctgagtcccgaagagctggtggggccccttagcactacataaacaactaaatgctaccctctcctcccaaggaccctgtcccctccactaacagtgtcatgctgaccctcggactgcaagggggagtctgaatgcagtgaaactcaagatctccagggctacttggtcagtgttgcaagctgccgtggcctctggcgttatttatctttagtttgcaacgtaggggtgtgctgtatcgggtgtgcagagcaaacagaaactccttgcctctgaaacactggcattttagaaagcaaagattcggctcattgaccagagctacagaggacacaatttgttgtggcttctctgaaaatcaccccctcctttccatctctctgctaccaccttcattcaggccttcatggtttctcatccaaaccggtcttcctgtctcctgcttgccttcttcccagcccacagtccacacggcagacagagcaagctatgtaaaaacaccaacagggacatgaaccttccttgctttcaaacttttgccgactcccctgtgctgagcgcaggagagaatacggcctccaaggcctttcataacttggcctcagcccaccttccctcccactccaagaatctcaggctccagttacactgagccactcactgccctacacctcctgcaggcaactctctgccaagtttattcacacatttatccttttcactctggatacatgaggaggactgaccatgtactgtacttcttttaacttctatagagcaatctctttgtatttatacaattatgacaacagtagtaagagaagaaggttcagaggatacaaggtaacacacctacataaacgacctactgggtacaaatattgtaaatcaacataggcctagaaaaggtggtcagatgctgaattttgactaaatacctccgatggcacataatgagtaagtttcaatttttatattttacattctgaattctgggggtggttttgatgggcagaccaagttttaaatgagttatggtctttgggatcctcacttctctctttttcttcttccctccaccttccctacatatttacatcagcagatgtgtcctttgaggggtcaaatggtgagacgacagcagtttaggaactgtttgcccattacactgggtactcagaaactgttctattcaagctaaaccacaagacctatggacttaggaagaaattacatagtaagtgtgataggactagtagcattgatcctttgtgggaaggagggtagagggaggcacgtagtgtgctgcagcgaacttctagagggaaaggttatgtcttatttatctgtgtcccctacggtgccttcccaggacagtggctggcacacgatggaccctcatttcagctattcaacaaatatttactaagcagtagaggatttgtttttccacatttagagttttaagcttgttaatagcagctgaattctttctctgttttgtcatctgcacttttggactccaagttggacttcgtatttcctagtttttaaaaatcactccctttcccttccctagcccattccagtgttctatatacagtagactttcagcaaatatttaaaagagacaacttacaataggcaacacagtggggtagtcgatcattccctaacctatctttgaggctggagaattttcttgggggctagtgccctagtatcttcccagaaagtcctgccaacctgatggctcttgttgtcacctttggtttccttcctatggtggccatgtttgtcatcaaagcccttcagtttctccatctaacaaggttaaaaccctcccttcctcccctccttccttactccatttcttctttcctccctgccttccttccttatacatatattttgaaacttgtgccctgtgccaggcagtgtgccaagctctgacggtacataaatagacaactttaggtgctcaaagtcatgctcagggagctcagtttagtaagaaatggatgcatgcacagatcattgcaatcagtgcaaggaaggctcccagagttgaatgcacagaggcttaaacctacctatcaataaaaggaaagggaagcaggaagtggcaagcaggaggatcggggatgtcttcccaggaaagatgacccaaggctttaaaaaggacagacataacctagttgaagaaagatggaaaggacattccaggcaaaaggaaacaacgcatatgcaaaggcaaaggggtgagaggaacatgatgaaaccaggacaggattttctgtgacttatctattccatctcattgctttatattccacccatttacctcatatcaagtggaatgatgcaaccccaggcatttcaggaaatttacataaccaatcatttaatctcttaaagagaaaggcattgataatgcaggctttccatgagattaagcacgttcttgagtgaaaatagaattgggtgcttataggaaaccaggtggaaagctgatgaaaatcaggcagtggatggaaaatgcaatacatttgattttctat

SEQ ID NO: 56757 - DNA, 2555 bp, Homo sapiens
gtgcagtagtgtttcatttaataacaccccaaaaatagtggggagaaggaagttcggtgaaggatggtctccttatcactccctccaagtcttagctgcagctggctccctcccactcgcccaccgagcagtggcggccagaatccttggcagagataaccctcagctccactggggttaggggtctgggccagacatgggtgggcaagagagaaaaacggaagggcggggtgtaagagtgggttctttcccaggccagatgacttacacaacgttttggcttccagtccctgagaaagtgggggtggggatggaaatcacttttccaggagagctgtctccttcgggctaggatgatcaacttggcatgggctctgcaaagttagtttggagcgtccctccccaaggggtcccgccaggggtgggggtgggggcgcccacctgcagctggctggagcagccgtactggatgagcggtgtgaaagttgtcagctgcagctcggcgtccgtctgcagctcgtgcccaaccaggttgggcatcttggtcacgttgtagccgaggttctggcacatggagatgcggatggggtcgcagcgccgctcttcctcgtccccgaagccccgcgccggccccaggagcagcagcaactgcaggagcaaccccagactgagaccgacgcccccgggcgcccccgggacgctcggccctgcgccccgccaggccatggccagcatcgggggtagcagcggcagcggctggggctgctctggcagacacccccagtttgcacgggggcgccggctgcccgcgctgctcccagctcccgggacgggagtgtgatgcggcgacgagggggcagcggccggctctccagcagctgcgcgcgactgtgtgggattttagacgtcccgggccgaggccgagggacaggctgcgagggtcatggctgcaggcggcgagcccacaagccggcgccggccgcgtccgttcggcgtctccgcgaggccagccagcagccagcgctgcgcagctctcaccgccggagccctgcgcggcgctggaggctcgcggcgcggcggcggggcgggacggacagcgggcctctccaatggccgggcgcggtgggcagctaggggcgaggcggcggggcggggccgctctcccgcaggaggagtcaggcccccgccctccggccccctcctccggccgcccctccctccctccctcccctagcgccccgccccgcccgcctcccggctcttgctttcctcccacccggatctaggcgcgcaggggccaagcagggacgcagcccagtggctccagccacgccgtcctgcccccttctgcaggtgagaagtgcgccctgttccatctgccccctttccttcctgtctcctttcagctgtaacctaggccggtggccacctccccgtcaggcagagaaacgtacacaaagaattggggatttggatttacaccgattgtggctttcagtcccggttgtgtgaccttgagcaaattgctcaacccctcggcgtcagtctcctctgtaaagtcacttgggaggattagagataaagtgtagaaggcttagcatggtgcctggtactgcgtgagtccacagctattttcactccggaccagcggcgatcggggcccggcctctccccgcccccagactcgcccgacctgcgcagggagccgcccacctccagccgccagcggggaggcgccccagagctgcggagctgcagacccgccgacggtctcgcgctctgatttcctcaccgtatgaaatgaaattccacagggggattcgaaaggaaatgagaccgggactctccgtgcttctcggcccgccgcccttcctgtctcggggacacggtttctaaataaggttgggagggtgagagggcgggaggggagaggcttgacctgtgcactggggacgaggaaggcgcacaaccaccgtgactcctctctcccggcctcccgggcaccccctccccaccaggctgcacccctttttttctttgcttctgcttcggctcctagggatctggggatcatgtgacccaggtttgaacccaactttcctgtctcattaccagccccccgcggctttgtgctggtccaccctctctctgctttccagtcggccagtaaactcccagcaggtggattcctccaccgtttacttgttgcttgactgtgttgaagctatggtgcctctctgagcctcaaagtggccggctgtaaagtggggaagttcatatccacctcacacagttgttctaagagttcagtgagataatacctgtaaatcatttagcagtgtctgacacataataaatgctgaagaacttggtgattggggtgtgtgtgtgtgtgtgtgtgtgtgtgtgtgtgtgtgtatgtgtttccaaaacagctaggggagatcaattatgggacagcctcctgctttccagcctggtgctaaagacagctccagcagccccggaatgaggatctgggtaaaaggcttttcaccctcttcctgagatctttt

SEQ ID NO: 56758 - DNA, 468 bp, Homo sapiens
tccctcttctgggcagtggggagtggcggtcctggagttcttgcccagctgcccagcagagagtggacgagcagctgaggcacactgacgaacagcctgggttaatccaggctgcagcttgcaactcccttgcaggacccatccaggatttccttcagaagtatcacatcacagcagctggctggcttgactttgccaactgcttgacccctagctgcacaggaaacttcagcaggtagaacttggccagcctcaggagtagacacaccctgacctccttaggatagaacagaaaggcttgcacaaacagggcttgcacaatagaggatgagaaagcggccagggaaaataatcctccacatccattaaccctcaccttgacacatcagccctttgagttgtggattgaagacaaagaactaccatattaatagctgttacttattggacaactcctgtatctcattc

SEQ ID NO: 56759 - DNA, 2146 bp, Homo sapiens
tattttcttcaaacaactacacctatctgatattatcttgttcagttttctttgttattttctgtcttctccctctagaatactagcttcgtgaaaataaaaatcttgtctctcttgtttctgtttgtttccttagcacagtgcctggtaaatagtaatgactcagtaaatatttgtagatgaatgaatgaagactagaagattcgaatggaattcttctaaaggtagttcgtttctgctttaagagactatggaatttagaaatccaaagaaactggcaggtttgttacatgtgaggagattgacagaggggttatatgactcaagcaacacaggacccttgtcttgctaattgttggccaagttccctagccaggtctgagttctaacacacgactgccgcctctactgtgtgtgctgtttggttgataagcacctatcaaagatgctgtagacaggattgctccgtggcctaaggtttggacaggatgacctattgcccttccccacacacggtcggggtatgaacatagctgagacttttcaagccttcgcaggtatcacagagcttggaaagcccagcacttgggggtagttagttgcaactagcaggcagccctagctgtttattacctgggactctcgggaaggcaagctcccggtgctggggaggacgtttgtcccaggcattcctctggcaaccctcttcctccaccagctcccaacaaagacatttaatccctttcttccactaccctccgctctacttggcttgcagttggaagctgaagtacaatttgacccaagccaccccctactgcgcacctgccatagcgcttgcgccccggagccgggcacggcgtcgcgggggtggggaggcggctcgtccccgagctgcgctccctcgcgtacagcctcggctctgggtgcgaagatcctctctgcctccgctcacccagccgcgccgccgcgcgggaacgcgccccagcggatgccctcttgagggagcgcgcacgcgccgcctctccccgcctccccggtgcgcgtcccgcccccttgagctgcgatacgccgagcgctcaacatccgaggactttggcccagagtaaccccgctctcgtgacctttcccctccattccgcacctccgagtgctggccgggcgagaggctggcggctgggctctcgcgcccctccctgcagggctcaggctctccccctcctgtcttctccgcgctgttcctcgtcatggcggccctcagcaagtccatccctcataactgctatgagatcggccacacttggcacccttcctgccgggtctccttcctgcagatcaccgggggcgccctggaggagtccctgaagatctatgctcctctgtacttggtgagacccgtcacccgtcccgcagggcgagtttagtctggaagatgggccgggggctgcagttggtgctcccgaggggctctgggggacttgccttgtgtcgggctctcttttggaggggtcggagtgttttggggggtcggtagggggaagggggaggtcgcaagggaaggatataccaattcctgcaagggagaaggaggaggggaattagagattgagctgtcatctgaatgcctgttgctaggaagaggatggctcccaacttttagaattaagtttaggacacttaaaaacgttaattcaaagaccagccttattttcctctggcctgccttgtgatggagaggtatttgtaggtcagcgaggctatgagaaggacctgcaatctttcctcatctagtttcccctgttttattttgcttttttttttttttttttttaatgaagaaggcatatttggccctaagtccctgtggcctcagatcttgactcagttttgagatgacaggattgtgatttgggggttttgcaagtgtttttgcaagttcacagaacagactcctgggttgagattgtgtgtggtgatttaaagggtgatgccagtctttcagtcagtgaacttggttaggacatctgactttgtgtcacctaggaccttctgttacacaactttacatacagggcaattaatagggaatatttggcagtatgtatatgtaacactgaggactattaaagatgctcttaaatgttct

SEQ ID NO: 56760 - DNA, 958 bp, Homo sapiens
agtgttagcctataaattagattatttagttcattaacatttgaggcatttattatttattggtatggctaggttgagtgagccattttattatttgttttctgcttttcatttgtctgttcctccttacttcctttgtattgtttgattttttttgttttgtttttagaattccactgtaattttttttttcgttattttcttttagtgcttgctctatagactacaatatacatctttgaagtttcttaatgttaccattttactacctctcaaaatgtggcaacctgtctaggtccatcttaggactgcttactattggatttgttttttgtttgttggtttgttttttctctttctttgaacgctaacattagttcaaatacagtaaaaccaaagtaaaagagtgttactgatattaagagcaataacttcttagggcataacgagaggtttcctggatgtaaggtgataacgtggatttgggttgctagtttattttctgttttattttcacttttgatagctgagggttttttttttttttaagctttctgtttttcttttcctgtagatgagcttttgcactagtgtttcattcttagacattggttgttcaaagaaaatttttaggtattacagattatgacctattctaaatattagctgaagtagttttattgttttaacgacttaataagaaatttaagtctagctttaacttctttataactgttatcacatggttgctgaagaaaaattgatccttcccttgatctcattgttacattattgaactctttgtgtatgtgttgatttagttcttttgtttattaggtgatgcagttaacaatactgggagatagctctgtagttctttctgttgagagttgtgtatgtctatgcatacaatcacaattcctggttggatttaattaaaaactttaatttttgtttt

SEQ ID NO: 56761 - DNA, 1037 bp, Homo sapiens
ttaatgaatatatcatgctaaacccaaactcaatatatcttgctaaactcaactctactagcaagctggattccaaaacctagtgctgttcatcacaaggtgaagtgtgacagagaaatcagaatgtaaaatgatagtaatcttaactatctatggttaaaataccttacttttgccaatgttaccaaagtgactatgtgaacagattttgtagggctcttttcgaggtttgcaagaagcctgtggttatgggggggtctttatgtttctctggcttccttttaccaccactgtctgcttcctcattctccacttcagccacactgccctctctggtgttgagtgagcatgacaagcatgctttctcttcaggactttgatacttgctgttcgctctgttttgagctcttatcgctagatatctgcatggcttgctgtttcatttcactgagactgctgaaatgtcactgttgtgaggccttccacatctatctcacatagtaacagtcacccttcatgtaacttatacccctgcagtcccaaacctctgtatctttttttcatggagttgatcaacatctaacatgtatcttttttgcttattattttattgtctgtcttcccaccttggaatttaagcttcatgaatgtagagtttttgtgtgttttatacattgctgtattaagcctagaacagtacctaaaatgtactttgtgccataatttgttaaatgaatcatagatgaatgtgtttattaacccatctatgctggaggttgcaaattttttttttttttgtgaaaaatcagaccttggcgatgaccttgagcagtaggaaaataataactcctgtaagcttagcgttccaataatggaacactaggcataaatgggttaaagagaaggatttataggagacataccagattaaacctagatgtttattttaaagcttgttttaaatattttaggttggtgcaaaagtaatggtggttttgctgtaatattatttacaagtaaaaccttgctttatttga

SEQ ID NO: 56762 - DNA, 878 bp, Homo sapiens
tctgagactgatgcctagtagaatgccaggaactggtggcttgtaaaatctaatcaaataaacaaatattcattgatagcgtcctaaaggcaaatgtgatgcgtggcactggaatcagatctagtgttccttcttttttctttgttcccctgaataattattatgaggtagattagtagatactgggttttaattgtaaactaaaccaaaatggtttcagctttcaaaaagttttatagtctagtggctgagtcataacctgctacttaggaccttgccagtgttgtcttctgtaaacagaccagcagcaagctcatgcattgcttttgtgagaaataaattagataatgtctgtaaggcagctagcacaatgtctgccacatgtctgccacaaaataagcctattagaattagcctgttctaaatcttaacttatttttattttattacatatgttgtattattttctatattggggtgagtaaatggagatcttatgtttatttataacagtgtgtgaactggtagttgataataaaagacagagttttgatattttgatccacagctatactaatagcagtgttattggcacttctgagtgattatttccttcctgtgtgagtcatgatatttgggttggcatttgttgccagtgcgctctgctgtctagtgccagtatctcagtaatatacaaaacatgtttaatcacaaacttgatgtgtactactcaaccaaattctgctgatcatgtttttgtttctttgcataaagtaaatataacaagggaagtgcaataatagaaaaaactgacttgtacaaacaaacatgagaatactgttagccaaacagggtaaagttataacatggtgaaaact

SEQ ID NO: 56763 - DNA, 806 bp, Homo sapiens
cttggtaatttctaatccgtgtgcctagcatagtgtatggcacaaagtaagtgcccaatacatggtggagagtcttgttctttttgatggagatgctactcttactattgtaattaatgcgattatgatgacagagggatcagcctgaacaaaggcttagggcagagggcaggatggctggaaagatgcgtggtgttgatatagtattgacgtcattactgtcatgcagtggtggctatcgtgatccccgccgcacaggcggttccttgggacctctgggggccagtcatgccagatctggccactaggtggcacccgtgttccacgagcgctagtcggagagcaacccgcgggcttgggctcaggctcagtgcaggatctggcttgctgacgcttgcctggccagattggtgttcagccctgccccacgttggcaccctagaacgttggcaccctaggctggcaggatccctcgactggccacaaacccagcttctgcaggctcgaccccagtcaggtcccacaaacattgatttgtaattactgtttcctgcagattgggcgatgcccctctcctaggcagcccatctggccattagtcgggttggcaggaagtgctgagaaggtctaagtcccagatcagacggggcacaagtgaatcatcagctctctcagtcatagagtcagcccttcagtggtgtataccaagagtgccagatctgaaaaaatgttttctctaggcagcctcctactgtcctgcctccctgcacccagcctagccctcggaaatgtcacacatctacctg

SEQ ID NO: 56764 - DNA, 754 bp, Homo sapiens
gaaagacagtctcagagttcagagatacactaatactctctcaacagagtcatgagttataataattgcatgtacaaggtgtgcaagataagagtcctcaagctcaactgtgggtgtgatcaggcaaggcttccaagaagagagatgttgaaagttaaagaggagcttgccaattaaagaaggaaaggaaatgtggcatgagggagcacagtccatctggaaatgtggatgcttgctgaggtatgcctgtaaggagatccctaggagctgaccctgaggagtagctgggtcccagtggacccttctgatgagggtgcatgggcccattcagctggcgtgagaggcaagcaatgaaagtactgggagcaaaagttgaaaagatgggtcagggctaggccatggtggccataaatgctggactaaggagtttggactttattccatcggaaatgaggctatctatggaagaattttggcagagacaggacacaatcactctctgactcagaatttatttctgcctaccttgacctccttcctcccacacccacaaccaaactttccacagccaatattaataacattctgctcagagtcagagttattcttgttgtccctttacgtttcccttcctgtctcttgcacgttctactcctcccgtcgcctgtggcatatagtatactatatcaggtaccaaagctcctaataagttttggcagaagcaaatacttgataatgattttctgggaggaaa

SEQ ID NO: 56765 - DNA, 1088 bp, Homo sapiens
atgagcactgaggttatggtcccacttgtccccattatctatcttaaaactgcccattgcttcatgccttgttttaccaggattgtgggaggataggtgctgcaacacggcagagattggccagagcctcccctgggtcagtgagcatttcatggtagctcatttggccagagcctcccctgggtcagtgagcgtttcatggtagctcattccaggtccttatctctttgtaggttgtgaaagaacaatatcaaagaaataatcctgtgttctatttttaacaggtaggggatagctgaataagtaaatagctcttggaattgaatgtatgttccaatggggaattgtatactattgtgatttcaaaaataaaaacaggagatggtgtttctgtcacctgggctggcagtggaaggggaagtaaattagaagacagaaacctgagttctttcaggcttatgcctcacttgattaaaacacttggccaagtcaggtcacctctctggaatttagattactcattgaaaagtgatggaatttatttaggttcataaaactctgagtgcctggaaagacatggggattcactgatgtgttttaagaagggaaatgacatggatctttcaagcaactgtgtgagctgttccaatggagtgtttttttttttttttttttttatgctgagacaagtaatacacttgatcaattcctctggaattgttaattgcagggtttttttttttttgtcttttacttacatttttatgttcctattttgttttaaaaaaatcttctttggcttaattaaaaaatccactttagtatttttatctgcctcatagtcaaactcaccaggtattctaccagtctgtttttctgtttttgtttttatttttcctggaaaccttctttctggaattgtctttctgatacagtctggactggtggctctccaggacccactgcacagctgtcatcttgggacttccctttatccctttcctgtgttagctctcctgttttctagaccctattttaaaaaattcttgatgtatttcctcactttggtggagaataacatgtggtgg

SEQ ID NO: 56766 - DNA, 3513 bp, Homo sapiens
acatggctatactcatctgcaagggacactgaagtgtactatttagctgagagttcaaatacccagctaaaaagtatatattcacgtaagaaggagaaaaagttattaggtggcaaccagcagtctctgccacagagatgttaaggagattgctcaagaaagcatgaatattaagtaataatgctaggatttgaatgtaggcagtgtcatttcagacaaactcccttgctctgaaacttcctctccagcctatgagttaagtcaaataggcatgatgatacaggcttgcacgcatctcaggcaagtacctaacaagcatttacagcagtttctcaatctttcttaacccactctcttctaataaatattacattgttactcccgtctcctcccttccctcattagtttcacaaacactagattctgatatgtcattccacagagtgccctttccatttcctcctatatataatcccatctgccatgcccttccctttgtaaatgcgtgctgtaatttaaccttgagattttgacatatatcctatttcttttttcacccttgataattactgatttaggaaatttaatatttactgaatgtctaagtatgtagtggctctgttgtttaattctttacataatattgctctaaataccatagtgttattttgaagtagacatcttattttttatattatagatgaattaagactctgagacatatgataacttaaacttattgacaagcatttgaaatctagtgtgtcagagataaggctacatgtttactgtctatttcatttttctctagtacatttcccagtttctcataaaagtagagtcttctgactatgttctggtcagcacaatgtgggcaaattacatatacaccttatcggattggctttaaaccatgcctctaatcttatatattctgtctctctcccgtttgtttacagaaacaaagggctccaaggtagtggagccacacaagacaaggcgtctaaatagttgagtttctatttatagaacagtagctttatagagtcacctgactagcaccagatcacgctttaagtgagaaggaatcctttattatactaagccattgaaactttggagttgttcctgcagttatcatggcttactctaattaatacactgtgccagttttcaattcattgcttctctgctccaaagccaccctcttttccttagttttaaattccaaagggaaaccttgcaaacatttctcctttgccagtaggcacaatgtaaagccttgtcagtagagggtgctagtgagatcctgcaggagggaggggattctcttaccagagtcagtgctttttttctggcttctatggtgtgctgccagaagacaagtgtccttccttaccagcagccagctttcttgccagaaggtgtcgtcagtgagggtggaagacctagcggtccacaacccccagtgagtttcagtgatttcccagagagtggtttcctgatcatctgccctggcatgaggcacctaactgaacttttcccctatctggtgggctttggcaacactttctccaacaaagtctgaatctcaacttgaagcaaggggtgggaagttggggaggatctgccaagttttttccctctttggatgcgctccctcagccatagaagtggcggcttttcccggcatttgctattcctggattctttagcgttctctttaaccaatccttcttaattgatctccttttactagttattttcttacgttaaatgtcccttattcaatttactgcatgtctgtcccttactgaaacttaactgatgtttacacaaaataaatacataatcttgaaaattggtgccatctaaactatggtcatatgaaaatatggtcagatagaggcagattgaaatgtgtcatttgagtcatggtaaaacaaaatcttttgagccagccagtcttgagtttgactactggctcagtcactttctagctatgtgaaccttgaaatagttgctaaagatctctgagctttataatttcttcatctctcaaatcaggttaatgattatcttgtggtgttgctgtgactaagcagcatgtgtacagtagttggcacaaagtgggcactaaataaacagtattttaaataccaattcatgatgatttttcagtgcctgtgattgagcactatttcatttacttgtcatattcaaatgattgtgtctctccataaactcactgtaattctttttgtggttagggccaaacaaagcatttatgaaccttgcttatcctttgtcctctcaatatttgtttcctttgccaaagagaatagctcaatatcactcttctcaaaattaatcagtatttaaatcatttatcaaatcccttctcatgctgcttctgggagactccatggccccatattattttgcactttcacaaaatttttattttccatccttctttgattactctcaatattctctcttctctagaaatttccagaccttactttacagatttttaataatatttacctcctgattcttgtatggaaacacactctgattaaagcattttcatattaatttataatgtaaataacatcacatgtatataaattaatatacaccttcctctattacaccttcctctatagtaatttaacaacattatttattccaaaaaagtattcatgtgctttatttttattctataagccacttgtcattatctttttatttctgggctgctgactgtttcacttggattagcatcttttcctccatcggccatgtctttatatactttttactagcagaatacttgaagtaaagctgccaatacctatacaaatctatggctatattagtcaggaatgtttgagttatagaaaaatcaatgcaatctgttctgaacaaatgaacaacaacaaaaccaaagaggaatttattgcctcttgtaactaggaagttaaaggttaaatcaggacttatacacagttaaactaagagattcagatgggatcttcatttctccctgcctttctttttcttaactgcttgattctatgtataggttatgtgttcacccagctgtcacatggggtgagaaaatcatggccatttcctacaagccccttttctaaagaattggaaaaaaggcacagccaaagaccctgcatagttcagcttggatcacaagcacacctctagacctgtcacttgagccacgaagaatgaagtactctgattagcccattgtggccagaagagcagatgcactgacaagaaatcctgccagaatcacatgatacatgtagatcttttatttctaacaatgttttcttatctataaaatgtgtaatcatacctcccaatagaggtagtaatgatgattaaatgacattatgttttgaaaagatataatacctgatctgaacaatgaattatagcttctaacatttattataatgataaaataaaatgcagaatgtcatg

SEQ ID NO: 56767 - DNA, 1688 bp, Homo sapiens
acctccttgcaatgcatgaaacaatgcagagtggtactagccgttttctagtactcatcaacacccgctcaaaccaaaatcgctgggcagaaagtccctttcccaccatctaacaaaaagagaaaacttcatgctatatcctcgagagtctctgagctcatctatcttcactagtaaaatagtaataaaaaataaaaataaattttaaaaataacgctaccagatcggactggagaaccaaacgattgcagttcccaagtctctctcaaagcaaacaaaattaagcgggaggaataaaaaagttcttgatcaaagtgttgagtccccaagataaccaagaaagtgtggagttagaagttctcagcagatgaactttaacttcgcgagcctggcggggaagaaggtccccaagggtccccgaatccagtcaagatgctctggccacccacaagcgtctgcctggggggaagcggtagttggcgtggcgctgcgttaggggctcaagggcagaaaggacgacccggaggactgccgagccggcggcttacccataaccgagcagttgacatcgcgctgggaaccgctggagcccacctggaagacccaggtgcccagcaggtcaagataggtgcagttggcaggtgtgtcgcagcgcacggcgccgtcgccggagagaagcagcaggagggcggcgagcagcaaggagggcccagcacccatgctgcagggagctgagaaaagaggtgaagaattaccaggaagccgagcgctgcgggctagcggtgagtccaccacgaggcgcgcgccttgaaatagctacgccggcccggaaacccgtgggcggggtcactgagcagcaggggattgggggttgggcgccaggcgcgtgcgcgtctctgaaacggggacttgggagcgcgcgctgcccctcacttggctgcaactggacccagaactagggaagaggccagggacagattttttttttttatttttattttttttgccgagggacgtttcaaaattttgcacggccagggtgacaaaaagaggatttaagagccacaagcggtccgcacatgacccagacttcgttcctgtgcggtaacgtagggagagaaggaaagggtgtggggggaataagggagtgggtcaggtgaaagagcgcgacagagggagagatctagcaagtggagttctgttttacttgctattcttcccctttagtcttttttctcaggtccacttgcctcataaccaacttcttgttttttcctctgaaaaacttcgctagctaacatcaactattccagctgtttgagaacttatcttccttccgttttccaactcttcctacttttttatgtgcttgattttgttttgtttcctggtaaatgctgtttgcctgtttgcattcagcagaattcagtttttgtgcaaacctgcagttttgatgtattagcgttgtgggggttttccctctggcacgcacacacatggcgctctcagagatgatattgctcaaccccttttatgttacagaggaaaagcaagaggcccagagagaggaagcggcttgcccagggtgagaagggtgaggaaggaagctagccaatgggagaaggctggtcttatgaaccgttctagtgtgtcagtctgatcgccaaaaattattaggtggcactatt

SEQ ID NO: 56768 - DNA, 526 bp, Homo sapiens
aatagtacttttaattactaaatgattccaaaattaatactattggactctgacttctgaccataatgttttaacagaaatcagatataccatcctatgtgaaacaattaaaaaactggacaagatatacaaaacaatagttttcaagaaatacaatattgaacaatgtaggagagtaatccctgagaaatgagaaacaaacaagatgaaccctacaattgccctagcccatagccacaagggaatttccaggccattgcaacaggagtctgaggacacaaaggcttctaacatctacaagatagaggactagagaagaggactctgacaatccacagagggccttttttgggtatttagcaaataatttatcagtacctgaatgtgagttagccattacagcctgcaaaacatacagtctgaaagtattgaatcgaacagtactcaggatacacagaagacctggaatagtgcctgtacccataaatctaagtaggaagtcttataattcacagacacagtagaa

SEQ ID NO: 56769 - DNA, 1208 bp, Homo sapiens
ggctataacaatctcttgagatgtcatattaaatgtaaatacatcttgaaagtttcttggcatatcattagagcaagattctactgtaggaagcaagaggtttatttgtaatggagtattttttttaaacagcaccgtcttctctggctaaataagcaatttgtacaaatgacaaatgtgtttattttgcttgagaaatgaggacatctgaacgccagttatttacaaacctctatgtaaataacttcaaatgcaagacctatgtaagtaatttaatcaatgtgctaagggcagtgccattcacctctcctgtaattgcatcaccctcacctactgacctcatctggcactactccacatcagcaatgttacattttcctcccttaatcttccagcacacttcatctttctggatgtctagtcacacatccttacatgcatactcatatttcacagagatttctagacctcatatttcatggagatttctagatcttttagtttttagttttctacaaatatgttatgctcttcttgctatgtaaactttgctttaggacaaatgaagagtcagctagttcccctgcttacgccattttcatttcaccctaacactctttgaacagctgactgtgcttattttgtaccagaacataaaactactcacttggttggttgtttgaatcctgctgcttcttccagacctgctattttgatctcagatgattccaggattctaaatgagaaactttaaaaaatcctatctgctaaaatatggattaaggtttcttcagcttatttatttcattaggtgcttattttgtaccaggtattctttatagtgacataggatagagcagtaaacaaaatccctttcctcatggagcttaccttctagcatagactagagagacaataaaccaaataaataagaaattttgtagcaaatgtgctacatgttataaggcaatacatattattgacaaaaataaagtgggtggggggtaaagactatcaatggtagggtatgtttcatgtttaaatgtgatggtcagagatgtttcagtgagaaggtaacatctgagtgaagattttacgtgacaaatctattgatgttgatatctgggggaaggttgtttcaggcaaagagaacagtaagtgcaaaagccctgaggtggaagtgagactaggaacagcaagaagaccac

SEQ ID NO: 56770 - DNA, 1930 bp, Homo sapiens
cagaaaatataaactaaatgctagttcaatctgaaaacgtgttgtcacttctcacgatacgcaaggaatcatctcacttctttgtcaatcaaaatttcaattcactgatcatttcccgtccttcacctaatagtcattttcgctttggatccttaactcgacatctaggtgctgtagatgacattcactcattttatacgggagtaggcatggtagtaaaacgtggaggccacaagaagaacaagcaacaaatgccgctagtaataaaaagataactaacgtaccaccaggatgaacctatcaaaacagcgtgaagatacagagtaatgtcccttaccaagaacacttgtaagaggtttgtaacagcggatcgactgaacacaaacttctacaaggcagagcttacatgctaggacaacccgctgctcatcccggccacctctccctctcgcgcaggcaatcacagccatcactacttcgggaactacaaagcaagctcaccagtacctcgttaatttttgcttccccagagactggagggccagaggagaaacgtgttcgttctaaattccaggcgacttaaaaggagtgcggggacgacgggggaaacacgtggatccatgggagcgtctctctccgcagtggcagaggacagtcaggcgccggggccgggcgctcgccaagggaacgcggcgcaacagaggggcggccggcgggctgcgcgggcagccaagggaggcccaggaggggcatggacctggggccgcgcgaggacggctgcaggagatccgcggacaccctccggcccaaagggcctcccctgctgatgaggtggaggggagggagggctggcggcgcgttcctcttaccgtcggaattggtctcaggatcgaagcgctgaccgcagccccggttgtagcacagcaaggccattttcttttcccaccgtcacaggcaaggcccaaacaccgggaacggcaagaggatgcgtttgccactcccgtgtcgctagcaccggtctgacgactgaggcggctaccggcttccggaaacgatccgttgcgtttcaggaaccttcgcgaattttccggtcgcgcaggcgcagaggagaagggacgaggcggaggtagcggcgggaggctggcactagcccgggccacgataggtcggactacagctggtagcaactgggggtcggaagtggagcccagacaacagcggaggagaaatttccggggcagaaaatgaaggtgtccgagagactgacaattctcttctgacttcctcagtgctaactggctttgggtatctcctgcagcaaagtggccgccccgccctctcatcccctgcgacccagcacccttcttccttgccttgaggctgcgccttagacagcccggtgggtatctgtttaccccttagcactaagggataagtgcacagtaagtgcagaatcatacagtgtttccaaatcctcagggtagacgtgtgagcttagtaaatgagaggaatagcggacgaacctctccgtgtgtttgtgtctcgagtgccctcatctcaggagcaattttaataacttaacagttgcggtcacattactttgaaaatacaaaaaacgtagaaatcagagtagcaaagaaaattatggatctgatgctgtgccagaattgatcacagttgctctaaagccctggggtaatagttaatatttcatgtgagcctccacttaaacgatttatcaatactcagtacaccactcttggaacagctagtaaaacttcaggtgcattataaaaagtacagtaatgcattggcttcaacttgcatatttcccaaacatgggcgtttgcaagaaaagcaaacactttttgataacatatactgaaggatcttaaaataagatcagcagcttataagtgaacctaaaaat

SEQ ID NO: 56771 - DNA, 512 bp, Homo sapiens
ggtttcgtggaagacaatttttccagactcaggccagggtggaattgttttggaatgattcaagtgcattacatttattgcatactttatttatattattattacatcataatatataatgaaataattacatatatcaccataatgtggaatcagtaggagccctaagcttgttttcctgcaaatagattgttttatctgggggtgatgggagacagtgacagatcatcaagcattagaatcccaggaatgtgcaacctagatccattgcatgtgcatttcacaatagggttcaaactcctatgtgaatctaatgccaccattgatctaacaggaggtggagctcaggaggtaatgccagagatgaggaatagctgtaaatacagatgaagctttgccttctcaactgctgctcacctcctgctgtgcgtcccggttcctaacaggccatggatgggtaccagtccatgacccaggggttggagacccctggtttagttaatggtagtgta

SEQ ID NO: 56772 - DNA, 666 bp, Homo sapiens
tcccaaaagaggcaaaagcagaagataacaaaggaagagaggaagtaacttgcgtaatgctgagagaggcaaaaacacttccaaataaggaagaggaataggctatgacctaatgcttggaccacttcagtcatgccagggcaaatatctaggctaaaatatgggagttaagaacacagagtatattgatttctttattacagctagcaaatatttaagaatattaacacaggtgtttgagtaaattttgcttctaagagaggttattatctattctcagttggactgggaggaaagtccctttgaagaggaacctctacttatttcattttctacagtcaccctaccaaaatggaaaaaaaagtgtggcaaaaatatttaggctacttaataccttaatatacactatgacaggaatgctcaacctttattttctgtatatattttgcatacaattaaccttctcttttttttttggcatttgtccttgattcctaatgactgaaattcacctgttttttttgttgttgttgttttttgttttttgacacagagtctctctctgtcacccaggctggagtgcagtggtgtgatctctgctcactgccagctccacctcccgggttcaagccattctcctgcctcagctgggactacaggtgccca

SEQ ID NO: 56773 - DNA, 1102 bp, Homo sapiens
taaaaatctgtcattttagctaacagactagcagttagaatatttactatatatatactgttgtacgtgagtgttttaatacattctcttcatttttttcataggctaaaaccactagcatgctggaagtaggggtattagttacctaattagtcatcattcagttcccaacagttacaaaattgcaagggaaaaccaaagtcatcatgacatgaaaaagtttactaaatagttgactacttgtataattaagttttcataaatataccttcatacttgaaataacactaatgttgagctgatagaaaggtttttatttggtttttaggcaatgatatctcagtgaagtctcgtcaaagtaaaaagaatacttctgtggtcagtgttagtttcctgcaatgaattaccaggaaatagaaagatttggggatgaaaagtcaggcagaggttattgaaggtgagtcatggtagccatgactgaaagtaaagcttaaagttcaaacatgaagcatttaggtagcatgcagagaagttggactttttgtgatagagactgtgacgctattgaaggacttaagcaaaattctatacacagagttggactacagaatgatttatctgccacagcatggaggcttgacggcaaaaggaacagatttaaggcagggaaacttgttaaatgaatatcgcaaaaggccacggcagaagtaattaatatactaaacaaatatttactgagcttctatctgcccaacacacttcaaggtgatcagaacacaaagtaaacaaaagagaacacaatccctgatctcatggaacttacattggagcagtaggagacagactataaacaaaacaataataattaaactgtacaatgcagtgggaggtgttaagtgatttggaaaaaataaacagtgagagaggatcaggaacatgggcacagttacaattttcaataaggcagtcacagtgggcctcatcgtgaaggtgacatctgagggaaatcttgagtgagtaagtgacatgaatatctgggaaaaacgtgttccaggcagagaaaagagctaggaaaagaccttatgttacacctgtgtccagc

SEQ ID NO: 56774 - DNA, 948 bp, Homo sapiens
aggtgccctttctatacctgtagaaaaggaacgtccttatttccaaaaatagacacccatcaagaggaatctgaacatacaggccttgctaagttttccccaatttattgctcttagcttatacccttttttcctgtcacattttcctgcaactttccacttttcatcaaatctagtataaaaacgcttggacttaattgtttcttttagtcttcatttccttatgaagactccagtgtcatgtaaaaattatattaaataaatttgtatgttttccttttattcacccatcttttgttaaactaatttatacagtctcagtcagggaacctaggaatgtaaaagacaagatatttttccttttctacaggggttaggagaggacaaagtaactgtccctaaaaagtacagcatgtgaattatgtaacctagtcaaacacagagaagtcagagaaccacaaaagtcaatgtgccaggattgaggaaaactgtaaacagaagaatatcgatcattaagaggcacaggttccagccctagatttgccactaaacagctgtaggagagctttgagttactagcttgtcctctcaagatctcacttcccatctcccaaaaacatatatgagcaaacccatgaacctctaaattgggcaagtttttctgaatcatatctgcttcatatgtatatttatctagcaacaatacctgcactagacgcactagttagatgcttaactgcaagcaataaaaattaacacttaatgatttgagttgaaaaaaagaaaaagaaatttaagtgaatgctttgggcacctgacagagtaagtcaccaacaggccgagaagacctaaataagaaaatgggcaaaaaacagaaagaaagaaaagactatgacagatgaaccacagctcaaataatgccacagaacctgctgctactactgaccc

SEQ ID NO: 56775 - DNA, 555 bp, Homo sapiens
tttattcacagagggttcttaaggataaacttacaaaagaagagagagataggaaagtggaaagatcagataaagaagtggtcccagtcaagtacattcttggccccatataaaagggtaaggctctcaaaagcataagccattccacagagttgccaggcttaagcatcaataggtcatgagccacaatggtggtagaggaatgagtaacttcttagggaaggcagccaggaaaaggggtcagggcagctgcaagccactggtgactaacacagcagctaggtgcagggcatgcaggcctataaaggaatgtgggcaggtgtcacagcacctagcaaagtagatgagcacagtggcaggggtcgcaggacacagagtagagccagttttagaacttaagtcaattctgaagtctactatctgtcacagattagctgtgtgacctatgccacttattatccctaatcctgtttccttagctgtaaaatgggcataataatacctgcttcataggaatatgacaaggatcaagagaaatgacacctaaaatatatt

SEQ ID NO: 56776 - DNA, 596 bp, Homo sapiens
tagacaaaattgaaagataatcaaacttgccaaacaaaatgtaacattaactctaatattaactctgggcaaacttcgggttgctaagagaatgcggtgacctgcttctgggtcttgactatgctacaggtaatagatacccccatgtaagtttctctgaataactaagaagcaactgcgtttgtactttatcttttccttatcatgggaaatatctgatctcttcagcaaatttttggtaacaggcctcaattagagccaggaagtcctgggaattcccctgacagcttgtccacagaaaccatctggcccaacagggaaaatcaaaataagtcctctctgccttcatcatgagcccagattagcaaagaagaaaaaatttccttctcaggaagacttaccattaaatttagtcactgactttcagacaccttcactgcataaatagactaagacagattgttcccagagcttctgaaaaagaaagtcagataaactgtaacaaatttgaaaaggagccaaaataattaatagaaactgtttcattgctgtcttgtttctcttcctaattaatatttatgtgcacacattccaga

SEQ ID NO: 56777 - DNA, 1151 bp, Homo sapiens
ttttagagcactgagataatatgcaaaaagacaatcacagtttttaaaactaactctgggattaaagggaaagtgtgtaaaacatgtaaacaactcttttgttaaagatttataggagcactgggacctaaccaagaaattcccaacctcctcaggtccttgctcatgcccagatgtctgaggtcatgggttagctcttgatctcaacccctttctcttccccctgcccttaacctaaaaatagcctaacatttatgttgacttaacattgtactttaggatgatagtctaccatcatcttggtttgctggctttccaaatagactcgcttttcctcccaacaactcttgtctctccagagctttattctcaagtggcaagcaaccaaacctgggttaggttacactatgatctatttatataattgaataatagttagaaattgaaaataagtaaatttctgacacataaagcacgatagataaaatccacagacactattttgacccaaagaaagtaaacacaaattctaaaaagtctatggtgatagaaataaaacctgtgtttttgtgaggtgaagggagtatttcaactgcaagggcacaaagagaatattcaaaaatatttataggagtaatattttatggttttatagagcagttctcaaaaagttcaggaaaatgcatattataaaaaattatgcatgaattttaataatttttgcaccaaaataaactcataataacttattataacatgtctgaacagattctatctagaggcactaagaagaataagacaccagtttgaaaacagcccctattgagcaacatgaattctgctaaacttgaagcaagaatgaacagcaaatatattgtgaaacttggatggaagattggtgaaatcattgatgatttacaaaaggtttattgggacaaagtccccccaaagtcagcactttacaaatggataattcattttaagaagggataaaatgatatgaaagacaaagcccacactggcaaaccatccacatcagtttgcaagaacaaaaattaatcttattcttgccctaattggagaagactgatgattaacagcagaaacaatagtgaccaccataaacatctgaattgcttcaacttacacaa

SEQ ID NO: 56778 - DNA, 625 bp, Homo sapiens
tttggcttggtgtcccaccttccaggcccactagggtggcagcatcactgccacagccctttgaaggcagtctcattccttcagcttggtgaggtgccaccctgctgctttctgctacagcatcacccacacagttttccgcagtggcgcttctctctgaaactgaacaggaaacagccttgccctgtggacctgtgaggggggtgtcaactctgatgacctttgaattgtctttggggtcattttttcctttccttgaagaatagcacacattcacagccaaatagctctgtggtacattcccataaaatccaggtccaatggccttccttcattcggtctgactttctctgtccactttagttcaaactggcagtggccctgctggcacaattccatctgcattcctgggttctgctgagatgattgattaacattgtagttaatccctgtatggagtaattgtccagctacacctttggtgttctctctagaataagcttcatcattttttataatatggattggctgagaattttgaaaatctttaagttcagattccttttggcttaacaattctttctcaatacatcccactcctctaacattttactattagcaatca

SEQ ID NO: 56779 - DNA, 4267 bp, Homo sapiens
ggagggactccaggggctgacaacagatcaacaatggtcattgggccatttgcacctgcaacatcacaacatcacagcccgatggtctttcttcctcagggatctgatcatccaggagattctagatcatgcttctgccaaatgtgccacttagcacatcaagaatggaaggatatttttcagaaccttcaagttcctcctcagtcaacctttggacattttcttttgttatgttgtcaaattttctcagttgacagaactctcactttgagatactgtaagtcagtaatttcaccacattccaaactcctctggatccattatgtaagaagtctccattagatgccttcagtatattcaactccaagttttcatgatccatgctgtattcccctgaaaaaagcagctcaatcactcaccattagcaagtgttcatctaaaacttaatctgactgtctttattattaggaactaactccataggcagtttagggttttctaaagtttttctttctctttaagaattgagtccattcttcccttcctttttttttttttttttttttttttttaggttcttgtgaaagcagctacctgcttctctgaagactggaattttactgtctgccaaagctgttgtccattcttttgatgggttttgaaggacattttctttgtagatacttgaggttggacttgctttgttgagtcttctaaggactgagtcttacctgtaatgtcagtcaccagccaaacatgcgaacatttaaatttatcttttttccatacttttaataagagtttaggacaaagtaaacagtataagatctttatccttggtcattacatttgctggacctcatagttaattctcagtctaacttccagtacaattgatttaaggtctgcaaattcactttcaatttagctaaacctctcaaaaacttaatgtttttcctccagaagggcagaaactctaatggatagttatttgaatctccttgctttgtaataaaacgtctaaagcacacaaccccccactatgactaaaaaggtcagcatgttccaccacattctttggatttgggcctgggctaagcttccctggaaaggctgttactgcctggcactgagccttcaagaatggtgtcatacagagcatcatggccattaatggaccctctatggctccatggccactgctgagtcattttaggttactaggatcttgtgcctacaatagacaacaaagtgctatggtgagtatttttcacataaccttcctagtgcctggcaaccagggcagacctcagtggaggtgagggaggggacaaggaaaacagtgcctcccaaccttctgcacttcttgacctacgaaacactgatcatggcacacaatctctactatgtaagccaaagggatgatctgtggttctggccaccctcagctcttcctggctgccccaagaactaaggagtaaaagtttttctacatgtataaccattcagggtcactggttgggaagctccctggtggataatttgcaagcccccgacactggccactgcgcttctttctcctcaataaacttttcattctgtggccttggagacctaaaccagcccacaatgattggaaaagactccacctctcagtgctcttttttgtttgtgtctggattaacttgagtttgtgtgaggaagtatgtgaggaaaaattattaggagttcctccatgctgaacctccagctgaaatgaggttccggctcattttactaatttcacctttaaaagatgaagaagaaatacacagaattttcacgtctattgctgtttgcagttgaagagtagaaagttcagagagggtaagtgacttgcctaaaaatacgtgggtatagtaggaacagaatcctacactcaggttcaacatctgtgcctctgctcatcaaataaccaaattgtctgctgtaatctcctgttagccatgtgataaagaaaaaggagcaatgaatgctttatgttgatcacctggctgcttcctgccagacttatcccagaatttaacaagaagagcagattctaaactaaatccaagcaccacgccataagattaacctagaaaatagagggtccaaacgtagtgaaaactgcattgattataatttagagtccctgcattgatatcccagctccattatatacttattttaactcccacaaacctcttgctttgcttatctgtaaaatgggactattgtgaggagcaccgggcctacaattggtcttaaatggaatttagcttcattccattattcacttttatacaaatggaatctgcacaagatggaattttatgtgctaataatacatttttacagtcattctcattcttgttcacatgttagaatcaccaggggagatttttaaaaatactgatatctgcatctccaataccagaggtccagacgtgattgatgtcaagtgttgcctgagtattgggattcttttaaagctctccaggtcattctaatgcacagccaatcttgagactgtggtctgttaaaaactattatcaaatgatcatttgtagatactaagcattgtcacattgtaaagcattaatccacacaactacacagcaaatactattattctacctatgaagaaattgaggctcaaagagagaaaaattttttctaaggttatacagctagaaaatagtggtggagagatttggatttgggtctctctgtctttgaagtccacgctaatagctaccagccaatgctgtgaaggcagagctcccacaggtcatttccatgacactgtgtggcacctttttattcttctcagtcaacccactgtttctctgaatttttaccatcacattcatactatagggtcaaaagtcatcccactttgcttttaaaaggagctaagccagacagcagagattaaaatcccagccctgctaagagttagaggtggaaaaattttcagctattcactagcagggaacccaacagaagcagattttctcctagtattcagcacgttcctcagactctacttgctgatcacctttgaccgccacctcattcctcgttcaaccacattgccaaatagatcgatggaaaattaccacttggattcactcaatatcattccaactgtacttggcaggagggagggcagggggaagggaattggtggtaaatgacattaaatgacagacagaagccttgtcagagaggctcagaaccaggaagtaattgattaatacccaactctggcaagaagctaagagtagaagacacattgcctgacagcgtgcaataggtcctcattacttgcatcacctcccattaagcatctgagtctctcatgggctcactcttcctgttcattttctaacacagagtacagtcagggaaattgtgttatggattcagccacattcaagaaaactttgaggttttctctcagcaagttatctcttaatttctaactgtgcctttagacaccattgtaagactaaattaaaaacttgctaagagacaaaaggctacatctgaaacctgagagttgtcaggctggaggttaaaccctgagttactgaggcttccttctcactaacatttgtatccatcaacaagagagagaaaaaggactccaattcatcagagtactgaatccattgaaaggctgacattctttaacaacttttattggtgaagccagcattagttaaagaaataatcttcacctttgtcattagaaaagggtgagctgcatcacagctgactacatgctagtcctgtgcgcttgggcaagccacttaaatttccaaacttcagcttccttatagaaattgaacataaaattacttcttcacagggttgttgggagaactaatgttttagaaggtccttgtaaagcccttgacatcagaaagattagctggctgtcccctgttgctggtgagaatcattacctgtagttaaattaaaaatccctgctgctagtcaccctggagcaggcaacacagagatgtccaattgagaagcagccttgacataaatcaatactgactatttaaagcacctaccccagtggcctgactttcactttggggctctacttgaaagcatgctctgttttctcatacatatgccatgtctctctggatccaaagtcacaggggctcttcattgatcttcagtttcagcaactccaaaggatgactcgttgagtttcttactagga

SEQ ID NO: 56780 - DNA, 1023 bp, Homo sapiens
tattaactaaattttatagaaattgctcaggactttcacttaaaagttttcgatgcaggcatgggtatgtaatttagcactcccagctcagatagctcatgtagctatttggtctggtttaggtatgattccatattgaaggctcagcattgcatctgctatgacaggttagatattcagcaccagcagagtcagatcaaccttggtgagaaagatcccataatgttgagtctgtggatattctctatccgtgccaccctgactactctgtcattgacccattgtgcaattctggagtagctgaggacagaaactgtctggcattacctggatgagtcatcctatccatcaggctttttaatgctgcttttgtgatacatgccttctgtattagctgtctattgctgtataaaaacttatcccaaaacttagtgattttaaaagagtacacatttattatcccattgtttctgtaggttaggtgtctgagcactcctatctgggtcttctgcttcaagtatctcataaagatgcaacaagatgtctgccagggttggaatcacatctgaaggctcaactggagaagtatctgcttccaagctcaggtagttgttggcaggactcagttccttgcaggttgttagaatgagtgtctcagttccttgctggctattgggtccttacaggcccttgacatatgggcctccccattatggtggtttgcttcatcaaagccagcaagaaagagagaaacaagacaaaagtaactatctcatgtaacatagtctagaaatgacattgcattacttttgtcataatatatcaactagagatagtagctaggccagcccataatcaaagtgtagggatcacagaggacatggataacaggggacagggatcactgagggccttgttagagtctgatgccaaaatctctctgatgggcattgtcatgagacataaagagtcacacattttgtgctcactcctatagctccatccacatgtctgttccctaga

SEQ ID NO: 56781 - DNA, 611 bp, Homo sapiens
ttaagccactcccgtatgtaactttctgttctagtctctaaggtgaatatagatgtaggaaaaggaagagaagagtcatttattgggtgctcctatatccaggctctctgctattgcctttactgatattaccacaatttagcaagacacgacatcccataagcctggaaaccaactttaaaaagagagtgcagtgttttgtcttgtctttcaccactatttgattttttatttcaatactaagataagcaacatcagtgaagaggcctgtgagtctgtccacacaggtgtttactcagacacctttcttcaaacaattgcattaagtgaactgcaagttgaggagcagccaaaatcaattgcagtagcagagtccatgtgggttgttatctgcacaaatattaaaacaccttccatgaatttagaattacttctaatccaataaagagtggtgtctggaattcatcagctgctggtccagaagctatcactgtggaagcaccagcgctgacacagacctggctgtggataatttgagtttaggaaatcggtttatctgagctgcggggttgttgctgccactgtagccatttctttctttcttttttttt

SEQ ID NO: 56782 - DNA, 1276 bp, Homo sapiens
tatgggcaggagctgaggaagtgtcttcaggaccaaaatgctatttattccgtgtttgacacgtacaaatcctctttgataaaatgtcattagggaggcatattgagctgtgtggcctcagttgataggtacttttcagcttttatcactgtctgtgtcagaaaattaagtgtaatctagggtgttttcattccttttattaattctagcgggtatatgttatattagggaatttagtagaacattttgcctttgagaaacacacgtccctttccactctaacagcctcagccttctcagtctggagtgtctgtggctgaaaaagcctttttgcccatcctcgagtagcaagctctctgctcagggatggcagaaattgcagagactaattccttgttccattttgtagagagagtgtttcttctgtttgttgggatggtgaatatttgccagaagttttatggaaatgccattagaaaatctaggcttggttcttgggtgccttttcctgatttcacctgatgatcttcattctctgtgattcatgctccataattctcagttaactctggcatatcacccatggagttacattctgtgagcaaatggcccattagcatgtgtctgtgtgctgctctgggctgatataaatcttctgaaagaactttggactttgccactgctccagtctggtgtggaagggcattgagaggctgcctgcctgacactgccttgcctgtcacgcgggtgtagctttctcaattcccatcctgccgacttttgcaccaactcgcttattgaaaatgcttactcaaaaagaagcctatttggcattcatgactttatcatgttctttattattcaagacagaaaaaaatgggggcaaagacaagttcttatttatttgtatgtgcctacatttcttaaagatggaaatggtgttgagattgctaattttgggcacattctttcttgttcttaaagaatttctaagtaaatgctgaaaccttttcccagaaatctaattaggtaattagttctgattagttaactttaagcataagaagagaatgatggatatgtattgactccggacaaggggaaggagaccacagaagctggaggtctccttaggaacctggaaagagcacagagtttggcggagggtccttgggccaagagtggcagcttgggaacagtagcttttagaagggagcagctccagggtttggaagtatgaaaagaaaaaaaaaaaagtggtggtgggaaatgatcc

SEQ ID NO: 56783 - DNA, 2521 bp, Homo sapiens
taaggctgtgtcctttgcaggatgacatgtattaacacttatttattaggctctggggagttggttttcagattgaatgaagtagcgctttgtcttgtaggtgcacaaattactgaaaattgaggtttttcttccttcagtgtacattaccagcattataggcttttagagtattaaaggaatttaagttatctgccctaagtccttcaaaaaaaaaaaaaaaacctaatcagttcagagaaggaaaaggagaaagaaaacaaacactggtcccaactctgtgctaatagctttcagtaccttatctcatttaatcttagccctgacagatagctattatccccatttcacatgtggggtaactgatactcagagaggttgaggaccttgcccagggaaacacagcaagaggcagagataggttttgaatttaagcctttgtactgccaatgcccataccttttccactaccccacattaaagccactcagctccttagtgatgaagagaatggacctagctgccttaacttccctaaacagagatcttttccatagattatatgacgtactttggaaaaatctgaacatgtttgacaattgtaacagaaattggtatagatttccttttttttttttaatttttaaaagataaaaataattttccttgagtctgtaatttcaaaattaacccccaaccttccccattctttgtaaaagtttggttccttgcgtagatagaagctaattgagctttgagacacatcactaacttaattttaatctctggttgctcttctatatttacttcttttccattcagatgataattatgcaactgtggttaccctgattaatgttttacatatttccccaggcattcatggagattgactaaaatataagttaccattggcttcagaaaacttctgattggcatttagaaacatgtacaaaacataccccttggtaagcagtgttccaactaacaattttcctccttttaaggaaaggggaagaaaaaagaaacattttcaagggagatttttgttgcagtaaagggagactatggtttgaagctattatttttttccatttcagccttttactttgtatgggaaaaaatttaaaatggatgtattcaggtgtttttaacatgatgagctggaatggaatgcagaatcagctccttttccctcttcatctcaaaggaaaaatatcacatatctcaaattgccttgggtcacaacactatttattgaattattcaatagtttgaactggtagaattagaagattcattagactgaaggtcaaaagttaagttaaaaacatttcctcatagttatgatatgactcgcaatgttgacagattccagaaatgccatagaagctgagagatgcatagtcttaatgagctagaaacattctttcgcctggccatttagatccctgaccactcagaagtgccctgaattcaaatcatttaggtctgtgttcacaccagcaagcaagtatgtagtgggtcaggtagacactggttcctttcacaaagtatttagatgaaagtgaaaattatcctattgatttagttttattcttctagttttatctacatctcatgaaaaagtgaagctgggacatatactttgaacaagcagaacttttttgcttttcaactgatctttatgctatctgttggaagagccttgtagtttgaagttataatatggaaactgtattaagaggatttctcattagaagttatggcaaaagaaagggtaataataaaaccgtgcatgtctagagtgccaagctttcctgggcaatacaatatttacctaccttctttctaatttatttttatgtcatgagtacttagttttgagtatcaccatattcgaaatgggaggaaataattttcagaataaagtcccaagaactccattatcttgacagcaatgtagccactgtaccccacttccccttcccattcagcagcccatccagaaagttgagctttgagaagttttctattctacatcctctagggccaccccaaaattcattttcttgctgtctgttgaagctcacttctttttaaatgcgttaagttattagtgtggacacttcagaaataattgatggtgaggcatctgaggaatcagatgtctgcttactgttttggctgtggttcctgtcctctccattaaggctctctttccaggtgattgatgacatcttgttgatctgaactttaagatgctaagctgccagagagggtgatgtctctcagcagcgtttggtacatatgactacttccatcttcttaaaatactttatattctggacttcaattatattaccttgccctggttttcctcccacttcactggcctttctttctcagtctcctttattgatcctcctaccaccctctaaatattgagaatgtttcagagcttgaacttgggtctccttcctttttgtcaacattgttctctcccactagtgatatcatc

SEQ ID NO: 56784 - DNA, 2538 bp, Homo sapiens
tatatagcatcacatagggggttagggcttcagagtatgaatttgtaggggacacatacattcagttcataacagtcccagtgatgatgatgatgattagaacaggtggtaggaaggtatcactatagacatactaactgtatatccacaataccagaaaaaatgatttaagaaactatattaaatattaggtagcaagaaagctacatgtaccatctcaagtttaaactataacttttgtatacataggctctaattatggccagtgtaaattataaaattggtctccgtggctatagtagattaaaaagtctatattaggaaatttcacccctgactttgccacatactgtatgttattatgtattccttataatttagttggaatatatttctgccttttaagcacaaaatgataaaagaggggaactagcctttactgagtgcctactctgtactaatactttactactaataacaatgagttcatcgagtacttacaatgtgccagacactgtacagagggttttatagacagatcttatttaattcttccaacagcaccatgagctggggctgataattaccaactcatgaactgaggttcagagaagacatagaatgtggagcctattttcaaacttagctttgtgtaactgcagtataccttgctctcacacatctaaagataagttggaatttccctgcatgtacccaactacactgaaatttggtgttgagctaaaatctgtaagtcaataaagtattaaacaggtttcaaaatccttgcaaccctggacttattgactaatggtgctggtcattgattaaccttcctgttttctttatagccccattgtttatatggctctccagtgatgaacttagctttgagactcaggtaaatgtggataggtaggtcataggaaaagtatgagctgaatcattcaccactgctatacagatgactacatcaagccatactgaggtttttttcttttttttttaaaatcaggaagttgcattttggtttacctgatacagtgaaaagttggaacaatttggtattagtggcctagattttcccacaggtaacttgctacagtgtttctaccttgggtgttatttagaaaagatacgtatctgcatttgctccattgtattctgaattatatatatattaaaaaaacttttattggtcagtcatggtagcctatgcctgtaattctagcactttgggaggccaaggcaagtgtatctcttgagctcaggagtcccagactagcttggtcagtatggtggaattcctaaaaaaaaaaaaaaaatacagaaaattatctgggtgtggtggtgcacgcctgtagtcacagtgactcaggaagctgaggcaggaaggaggatcacttgaacccaggaggtcaagtctgcagtgagtggtgaccacaccactgcactctagcctgggtgacagagtgacacgctgtcttaaaaaaataataattaaaaataaaaataaaaacttttgtcatcaatgatactaatgccacttacattttgacattgctttgtgacttaaaaacctctttcctataaacattaactcctttgagttgaagagtagctaagtgagtttataaggtcacataggctttaaaggatataagctgtatcttgaacccacatctcctcaatcctaatccattgccctttcctttcaattctttcatgtttctgatgttttttcatagttttaaaattatagtagcaatgtctttcctcctttattatttcattctgttcccttctcttagaaaacacaactgggttttttctctgtattacaggaaaaaaggtttgggcttgttgagattttttttaagaagactagagtgtccatacaatcttaaccatctttctttctctcctctcagcacttgtagattttagaatctaagcccaaggagctgatgaggagtgaccatctggatttgtttccaggtggtgctaacactgaagagaagtttggcaattgtatgttcaataagagaaggtgtcaccttggtgccactgaatttttactactgttgaatgatccatcaattttttgcttccaagtgctaaaaaaaatatggtttgagttgccagcagaatgaaaagctgtttagccctgtagccattactgagtctcaggtctagactctgttgtctttatttaacctgtgggcatagaatggcctagacttgcttggatttaagtcttttaaaacctttaagttggctgacaaagattacccaagtgtttgcattggttagcagctctcaaacttagagtacacatgagtcatctacagggtttgttaacaaatgcagattcccaggccaaattcccaattatcgtcattcagtaggtctggagtgggagcccgggaatcttcatttaggcttttcaagcatttcctcctcatgtggtttgcaaacactaccctaaatttacttgagctcctcagacagtggctaccagattatatatatcttttc

SEQ ID NO: 56785 - DNA, 2626 bp, Homo sapiens
ctcagaatatgtttggtctagactgtggatttaaaaaaaatccacaacacattctaaagaagtactagaaatagcagtgcctcaaagtgagggcttctagaatttctgatatatattccttggaatagacttcttattttgagggtcataaagaattgagagactagccatggttgcacacactccacattaggtctgagctcatcagtcttgatggttctctctcctgaactctcgtgaaggcaatatctacttgtagttgatggagtatcaggcaaaacaaagtgctgtcttagatttatgaactcctttatcactcaaggtaaggagattccagaattcagaatactatatttttatctcatgcctgggactagattaaatgttgaagtacatgatagatgaagctggaattaattagtgtcagtctcatataaattgcttatgctaagtaacagtgaaatcaaggtaagtagatgtgatacattaccattcctcttcatttaacccagctgcgaggtgggacaggaggaaaacgcactgcatatgcaagaaaaatggcagcgttggtgatagatttacattcatttccttttcagaatgttcaggagatgctctcaggaatccaaaattcatattcactgtataaatcagctctatgctttcattgaaaagcattatctggtttgttctatttagcaataatataaccctttattttagcaatgcaaacttgcaaggaaaattgggaaattttcaacgattgaaatattaaagtgataacacctttctagctaagttttgagtgagatgagcttcctcagagcctggcacacatgacaggagggaggagtcagtgttctttttgactttgctcatatgcattcagaagtcaaagccaggctatccccaggatgtacagagtcagatctgatgatcaactccaaaatcttttctgagtcaccacgtccctgttctctgcaaggaatgaggactcagtgacaaagcagagaatggtcctgacctacagaggttccaatctggcagagcaccactcaagtgtgtcaaagaggacaaagtgcaggagagggattgggaaaggagaaactgcaaaaatctagtttgctaattttaccacccacctaaatgtaatgaaagcactttttaaatttattaaacgaacacatatatgctaggcttggggttaaatgctaaggacaccaggtgaatgtcaagaacccttccctggagaaattagttggagagatagacacataaacaaataatgtggaaggtacaacaatagagaaaggacaaaatattatgggagtgcttgcaggaattgcgatgtcctcatcatgacatgaccctgggctaggtctcagagtagagaaaaggtcacccttcagagggggaagggtgtatgagacagagggaactgcaaaagcaaaggcatagtagcctgaaatatatggtcagaatttttacctatctgattgtcaataattttaaaatgtaaataatattgtatggacactcatgttgaaaacaaaccctttcctgtgctgctgattggagtgtaaattggtatgaacccttactcaggataatttggcaaatttctcatgattacaaaggcacctacatttactctagcaattcctcttttaggaagttgtcctagaggtacactcaccctggcgcaaattgtgctaagttaatgatgacggcactgtttttgagagcaaaatactggaaataacttaagtgtatgtcacagggaactggaaaaatagactttgatgcagtcctgcaccagaataaatggcaccacgaaagaatgagaagccaccttatgattggatatgaaattatctctaagatatatgattcaggaaaagcagaaggtacagaacgacagtatggaagatactatttgtgtaaataaagtgaacaaaatagaacaaacataaatattttgtaactgtgatggttaattttagatgtcaacttgtctgggttaaggggtacccagatagccggcaaagcattattttgagtgtgtctgtgatggtgttcctggagaattaagcatgtgaatcaacagattaaggaagatctgccctcaccagtgcagggtatcatccaatctgttgagggcttgaatagaacaaaaaggcagaggaagggaaaatttgctctctcttctgctgctgaggcatccatattctcctgtcctcagacatcagaactccaggttcttgggcctttagactctgcagcttacaccagtgtctctctgatttctcaggcttttgacctcagactgagttgccccatcagctcccctggttcttaggcctttgcactcaggatgaatgacaccagtttccctggttttccatcttttctttcttttgtcttttttgttgaatcaattgtagtatattttaaataagtcaacttaagcctacatgtatcaacatggacaagtcccccaaaactcatgttaatggaggaacttgtacaattatattaaagtataatactgcttatatcatgttttaaaacatcatagtaacctgtatattccatcagttatatacatgcaacaatattattaaaa

SEQ ID NO: 56786 - DNA, 1110 bp, Homo sapiens
atttttcagtaaacaatatattgttattaactataggccagataaaatattaatccagaatatctctgggccttgccaacagtaattctacctctgaattctaaagaggaccagagctttcctaggatgtgctctagggagtgaagtggtgggttcagggaaacacagggttaaagatgcaacttagcaaatgctttccagtttctgcactgtgggctgaaaactactggggtaggatctacaggcttcactgctggagaattgccacgcagagactgctaggagagaaaaaccacaagctcacattgttggtcagtgcaaagtctcatgattgacgaaggagagtttgcttttgactaaaatcaattctcacagggtttattttggctaaaaggtttacagagtccaatacagagagtgaacctgtcagagtccagggcagacaggtttgtagaaagagcttattcctttagcttctcttccctggactttcgcaatttattttgttttattattttttgttttgaaccaaattcaaaattataagataaaactactacatgttattttattagatttgattcctctcttgaggctgcctaatcttttcagatcctaattatgcagtcaaatatattcaacatttatggagtatctactccatgccaggtgctttgtatattgcctctaatttgcataataagcctgagggtaagtgtcttagtctgttttctacagctataacagaataccacagactggataatttataaagaacagaagtccatttggctcacagttccagaggctgggatgtcctagagcatggcactggcatctgaagagggtcacctcatggaaaaaggcatcccgtggcaagtaaacacatgagatagagagggaatgggggctgaacttacccttttatcaggatgccactcctatgataactaccccattccctgaatcatgccattaatgcattcatgagggtggagccctcatgaccttagccccacctcccaataccattacatcatctgtcaaatttcaacatgagttttggaggggacattgaaaccatagaagtaagtattattattatctcca

SEQ ID NO: 56787 - DNA, 2213 bp, Homo sapiens
atcagaaacatgggctctggggctctggggaccacacaggagctatggggaaggaggctgaagtagccaagagtaatgatggggaggttttatttatttatttatttatttatttatttatttatttatttattttcagaaaccgagaattcctatgtgaaattgttattgtgctgaatatgaccccacattttcttttggaaatccaaaccagacactatcttatacagacccctgacatgtgaggtgatcatcaggagtttgcagagacttatggtcagtgcaagacccagaggttttcattccagctcccattatcaagagaaggtgtaaatagcccatcgtcctcacccatttctgtgctgtggaatccctggttgcagagtatttcaaagtatactgatcataggttgatagcggtaaaggataaaattgggagtgtacatgaaaaggtaaaatctgttcttcctactcagatgattcattgtagtaatcagcatcgggtggattctcatcacttggagactcactcatgtcttgccggagctcttacaaagtgttgctaaggtaggacactgctggtgcaggtggggatagttcacaaggctcagggtctttctttcagaaaaaaagatacagaggagagatgtttcttttttctttttttttccagcacatggttgttacccaaagttattttactgaattagtttaatttttttttttgatggaaactaatgaggtggtggcattcatataagaaattcacttttttgagtatacttatgactgtatatgtacttccatctctttgttaccagagaaaatataaaaacgcaaatacatgacaatgctataaatactgtaataacctggaatcacatctaatctacaaaataatttttaattaaaaagtaaatcatctgaaaataaagagatgtttctattaatgtggccatggtggatgggaaagctctgtttctgagaggtcatcaacgcccccaaatggtttttgtactttcatactctgattattattacaagatgacaaatatgaggatgctcctgggttgactcatatctgtggcaaacaccatgtaacttgtagtaataaacacccatgcaattgcacacattcaggatgattcagctgtctgtcatcacagcatgaaaagtggcctacactgtttctccctcctctgggcctcttcagattggcacagtggaaaaacaccaccacagagattagctttcaagagagacacggagtggtgagtgcttttggtgcacttcctcaaagacacaggaatgaaagttttgtcaaaaaaatcagatcagatttaaaaattgtaagagtttattgtgcactcaaaagaatagctggggaactgggaggcttcaaaccagaagaggtaagaagctctgcttatggccaggcgtggtggctcacgcctgtaatcccagcactttgggaggccaaggcaggtggatcatgaggtcaggagatcaagaccatcctggctaacatggtgaaaccctgtctctactaaaaatacaaaacattagccgggcatggtagcgggcgcctgtagtcccagctactcgggaggctgaggcaggagaatggggtgaacctgggaggcggagtttgcagtgagccgagatggcgccactgcactccagcatgggcgacagagtgagactctgtctcaaaaaaaaaaaaaaaaaaaaagaagctctgcttacaacagttactgtgcagtttataaagcattaaggaggaagtattgtgaccttttttgtaattggttgttacacattaacattcttttagggcaagtagagctgtttaagctgatctgacttttgctgattagtttacttttaccgaatcctgctggcaaaaacgtaaagcttttattttgtgtttcatttatgattagggctaccatttctgaaaaattaggatgacttcagctttggctacctggctatgggcaattggccttggattatatctaaactatgacctccatttttttttttaaccattgctttcttccagtgattctctcagctgaactcagagtgtgaccaactacctatcattactcttggtcatcacattttcttttctgtagacctttgtaggagcaaactagaatctcattagattctgtgattcttgtccaggtagtttctgttgtttaatc

SEQ ID NO: 56788 - DNA, 1477 bp, Homo sapiens
attattacggcctgaaaacaattccattgcaaagtgccctgcaggctattagaggaataacaacaacctatcagttacttataatacggtattttttaaagttcaacggttttcttgaagattccatttagatttaattttttaattacatttaatcagcatcgaatgaaaaatactcccaagtacagtacgtataactgggagagcgatcattttaccaccctgatccttacttttttattttggacagcgggaaaccgtaaacaaacacgccctgtcgccaagaaacaagatgggaggaaagcagcaaaaaacaaacaaactttgccaagtgagcaagctacaggtatctcctgttcattctggtcagcacgacctgttcgaaactctgggataacaaggagtaaaatgaggattcatctggagattccgaatggggctgcagcatttgaaaagcagaacaatgataacttccttaaagcatcattgggaaaaaaaccgtgagtcacggcgcaggctcttgcgtctttgacgtgtacccacagggccccgccccactcaacacacacactcacccacacgcgcgcgcgcaaacacacacacacatattttaacgccctattcaggcctgggcttcgtctgaccaagttctcggggtcagataaccggttcctttgcggatgctgaccacggggtcagttagcaatcgggcctcaactcaggccaagcgcggggcccctggaggtgtgggcgcacccgactcccgcacagacccccgcccacgtcagccccggctccctgcccacgcacaacaccgacctagctcctcgcgcctcgccgccccggcagccgccggcgtcgccgccgcttccatctctcgcgggtctccaggacgccgccgcccgagtgctcactctcccgccgctgcgtggccggcgtcaggcccaggcctacctcccctgcccggagggacccgcgcctggtgcccgcctccctgccccggcgctccccaaccgcgcggcgaggagcatgcgcagtgggacagcccggctcggcgggcaccgccggcgaggggcgggaggggccgaagacccgaggactgctgcgaggccgggttgggtaacccgagaggagggttgggtaacctgagatcagcgagggtgggaccttagagctagccgagacccgggcccatagctccctgggggttttaaagatgacggcgaacttaaatttggggcgcctgtccgtatgcaaggcgttagcgttctgtaagtcaccttggagaatgcgaagaaggacgggatttgtcccctacccatgctgaggttctgactactctggttattcgtctccctgtttctatagttagagttacaggagacacttaaatagaatttaattaagtcatatacaatttcactttcaggatatttcaatgtccttccagatatttgacgttgaccgtggtgctgaa

SEQ ID NO: 56789 - DNA, 660 bp, Homo sapiens
agaagggtatatatggagaaagctccaccatctcttcttgtaactgtgtcattattacaatatgaggcattagaagggccaaactgctctatgctttatgctataagcccagggaagctgccctgggttcagggagacataaattctgcacttgagagcagcagctctgcggttcatcaagtgtgcttgcttcattttatgtccctggtatttagccataacgggcctgtgatcacttcactccagtctgcggcagagtgggggtagggggcagacaggctgacaggagaattgtgcaagatgggactccggacacccgcaaagcacctgctgataacataagcgtctgccccaggaacatatacatgaacaaacaatgacagccacacaggtgccagctccactagctccctgctgccgacaggccacaggggtcaggaaagctcttgacctgaaggccagtgggtgtatggaggggaggagggatcatagctacagacagataaaagatacacacacacacttctcataccaagggcagaaaaaataagaaaatgttatttggcagcagtggcagcagcactgactactcccaaataaaaatccagaaacacaaaagaatctttgagtgggttgccgaatgacagagacatgaaagct

SEQ ID NO: 56790 - DNA, 1344 bp, Homo sapiens
attcacagtccaattgagggagataaaaaataaacaaataaaagtgtaatatgtcaaggaacaaagtgctatgaagaaagacaaaagagtgtaaggtgaccaggtgggagacgtgatttaacccagagagcattacaagggactgcctctgtgactggagagcagaggcctgcaggaaaggctggagcaagccccaaggagacctcaaagaagagggtgccagggaagggcatggagggcaaaggccacaaggcaggagcagcctgaaggttttaaggggtagcaaggggccagggcgaccagagcagaacgagttgatgaacgatgagcaaggggactagccaaggagctgagacggccggtccaaaagggattctgcaaacacactgtgcactctcaatgcttaccatgtgtgcttcactgcagacctttgattcctgacaaaattcatatattttgcaaaagaaaggcagtaagctaagctgctatcaaatatttacatagcggtgtgtcaatgttctccaaggtctcctaagagtctattttagggtaggagaaagggaatgaccccatcagaaaatgaacttgagctgctgaagttgcatttgtcattaacaaagtgataaatatttgatctttaatttaaatgtcctcctttttgctgaaccttaagctgatttaccagtcaatgagaatggtttcggcaatggcacagaacaagaaggcttttgagcactgaagacaaggtttattgatcttgccactggtccaactgcagactgcacagaagcctccaggtcagcaagagtcagaccagctccagtcttaggtccactcaggccaccgtgggtccactgttaactaaggcaagcctgggcaccagaacagaggagagctctcccagtcaccttctactccaccttccccacgctgcccccacctgctcctggttaatagcttaccaagggctgctcattctcctctgtgttgactctagaatctgtatcacacgccacccccaaataaaatagaggctgcagacactgcacgcatacccatgcctgtatgttctccctgccattaccgagtcctcagcatctccacccagatgcctcccttcctccagcctcctgattcctcaatttccagggaatgatttcacagaaacccatgtctgatcttagtcctctaactagaatgtgttcatgtgttccccactgtcaacaaaacagggtacagataggacctggctttcaacatctctgtgctgagcccaaccctgacctctgacatcgcatcatgcacggctgttctgtctgcacatagtgggagaacaagccaaac

SEQ ID NO: 56791 - DNA, 1046 bp, Homo sapiens
caaataaaacaaaatgtttatagtgattatctctgaagaaggattatgggtaattttcagcattatgccttctgctatttacccaaatttctacaattagtctgaattatttttacaaagaaaaagttattttaaaagtaggaatccatgatatttctgcaactccaacttaatcaaagaagattagaaatcaagaggtccaaaaactcaatgggaatttccctaattcaatctcagagcaacaccaaaaaatttagcaacctggatacatgtcattccctaaatgactccactcaacccttggtctcttgaaagcctgttggttttcagactctggcaggaagatgatgtggctgaagaagtttcaggcttctttgaagaggataacctgaaaaggtaaatattttcctgcttatctacccatacaagagaaggaatgagagatttttgtgcattcccagagctcatccagcccaaagcctgtggccacatgccaaaaccaaaagcaccagttaataaacatgtaaatgtttgatttctctgtaggtgactttgcagaatgaaacatcaaatcaaacactgacctaatcttcttacaaaagtcctgactccaaggctattctgtcgcaaaaccctcctgctatcatctgcccaggaagccaccagaccacaggccaattttactgtatcaacatcatgccctttgattaaatatattcatacaaatagtatattaacattttccccaacgtgtgggcagtactggatcaaaacagaaagatgtgtttttctgttttgcatggtggggaagggaagagtcactggatccatccaaaatggggccaggtcagagcaagggggtgcaggaaatgcatgtgaaatgattttattcagtccccctgtacagcacagtgagttagggcagtgggtgaagaaaccacagtgtagggtttgtctttcagtccaggtttttctaagtatgtttatgcatacttcatgcagtctatcaatatgtacaagtacttattaaacatgaggcactaaga

SEQ ID NO: 56792 - DNA, 1179 bp, Homo sapiens
aaagggtataaactcagaattctgtgatccagtcacaccagagtgacatcataaaacataactccagttccacaaagacagatgcttccctgggctgggcggcccacatccccaacacccacagctggcctctactcagaggaaggttgcactcaacccacaatgggccaaggagccactactgtactgccactcccagctgtggtcagaataccctctcccagggctcctgctgccacttccagctgtggccagaacacctcccagggctcctgagaccactgtgctatgcagcaaaaggccacactctgatcagaagatcttacgtttgaatctcaagcactgctacttacacactgggtctgtcagcaaattactgccccactgattctcaggtcttttcctctgtaaaatggagaaaataataaccactttctgagcttgttgtgaggattaaatgagataatctgcataaaaggcaaggcacacagcaactgaagctattatccaacttgaagcagaggccagctaatattgggtaaaaattaaatttgattccttgaaagaaaaaagttccatagagttagtgaggatcagcaattttcagaaaatttaaggaagtgaggtggaaaaattccactccccccattcctaaagggttttgaagcccacccactcctggctctcctgcaggaatagagaactgcagtgtctccagactcttcccactttataaatacaccctacgaccaaccagagagtgcttgctgccaaactcctgggcaaacgcgaccaacaggattggatccggaaattagatgtccaagcagcccagtcatactcaattcaaaatagatatctgtgacctacttagtcttcgagtaccattctcaaagccaaaaaacaagacagggccactgacttcagcagagccctgcatgggcccctgctttcctgtcagatgaaacgtgcactgcaacagtgatgactcaagaaattatctcaggatagctggacagaaaccccagcttggaaagagctgattcaaacagttgtgaaaaagcaaaaagtcacagaagtcctgccaacagtttatcctctctgactatccccaataatccatcttcatccacttggactgagggttacacctctcatgacagggacttctcaagctgt

SEQ ID NO: 56793 - DNA, 1099 bp, Homo sapiens
tccctaacactcatattggtttgagtatacatatcttcccataaaacaagggattctgcctactgtaccttgatgttctacaaagcatcaagcacagaaagggtccaatgaagagcaagcaccacccaagggggaccccctcccctccccaggggcagaccaccaggttccagcccactcacacgcttggctgctcaagattagagaacagaaacagacaaatatttgctaaaaaaaaaaaaaaattaggaagacaaacaagaccagggaaagttgctatgtactttcaaccaccgcagttacagaatgatctcctaaattacaactcatttcaccaaagagatgagagttttggggagagtgaatccaaggaatttggcagggacaaattccagtgaaatcctagagcattcagcactaggcagtacaacaccaggtagacagtggaacattatacttcaccagtgaagcgatggtagaggaaacaagctgctgccaaaaacaaaaatgaaataaagcaaacctgctgctcttcacatccgcatccatcctcctcacatctccaaggtcagccccactgttctcacgcaccattgtacactcaaaattctcatcagagaaacttccttgagagccctgtggtttcctcagcactttttccctacatcatgacatttaatcatcaccaccatcctgggaggcaggtggaacaggcatttttatcactcactgagaaatgaggaaatggaagcctaagtatgtctaccacacggcacaatcaggactaaagtacagactaattcccaagttcaatgtgtgttctccaaaataacccagacctgacaaggccacatatctgagctctaggccattgccctttccactgcactgctgaggaccttctagagacagaattccgacacacaaccctctcagtacagcagcccactcttcaaccttctcaagacacaacagagctcacaaaccaaccttggcaaccgctgacaggcagcacctgcgtcagccacacaccctaaatcgggctgaccaccacctcactggcaaacacaatccaacccctagagtttcaaaaaagaga

SEQ ID NO: 56794 - DNA, 1742 bp, Homo sapiens
aaggaaaatgtgggatgcaaggaaaacatctgtaaaagctctgtggaagctgcaaaccagtcctaccctgaacctgctcatcaccaaaactcactagttctggggccttcctccctctcatccctataggatgagaaataagccaaaaccggaatcaagagagaattccctttcccacggcagagggaggcctccactgtcaccagcagagctgctcccaggcaaagccaaagaaacggcctggccaaactccaccttcctgacaaaggcaccatgtgccaggctcctgggattgcagggacagccaagactggcagccctgaagcccacgcatttgagtccctccacttcggcaaacagcccaggaatcttttcacactcactactgaaatccaaactgaaccagtatacaaatcagatggtcctgccaacaaaacaggaacaaaatggaaaaaagggtgataaatcaatgatatcctggctaaatatatacttcttctttctgcttgcaggggcactgctatagatttaaacctttgataaatatcttttttgcttcccagtaataattaaagcaaacacacccaaacacgcacctaaacacgaagcaaaaagaacgagaaaagggctttgctcaggacataatgttcaagaggtaggcatgacagctcatatccacaggcagaaatgctcttctcccattaaaacatgtacctgtctggcacgggttcttaccccacaaaagaaacaactggacactctaggggactgccgagaagtgccctcagaacaagaagaggttccctctttgagggaaaagtgtaaacatcaagcagaaagtgggtgagcagactcttgcacggagtgactcaccggcagagacagcttgttgctggagatgctgggagcaggcaggtccaacagaggtaacctggcttcctcctcgcagcgagaacacagcccaaataaagccagaatctgaccacctgacctccggcctgaccagagccagcacaaactctcagaagggcagggatgttgcacaatttggaaaaacggaagcccaaaagcaagtttatgaccacgtctggcactgactaggggaaagggcacaaaaccagtatattcctgacatggcaacagtgcgtcctaccgatgacaggacatgcagaccccagccaatcatctccttgggctctgatgcccgcttccctgagcatggcttggcgccccgcagagactgcacccgtcagaggaggctggcctcgactcctcttggggctggccattatgttcactgccactcctgcttcccagtcaacccctgcaagtttggtgaccacaagttaaccccatctagggcagatcaactcttatggaatagccaaaactgaggaccaaaccctggtgggtcccctgtgccaccagggaagaggggtgtgcagacaataccccaggaaggcgtcttcccttccacacttctaaccttgactagcatttcccaaaatgcagtctgaggaatccaacttcattctctgcgatgctcctggaaagttaggaatgataaggctggggtggcacagggaagggaaggccctttcggactgtgctcagccacctttctctagctgttagcagagaccaaaggaggcacttttggtttctgcagagattgcttttagcctgcacatagtcagcatctccaacacccatccctggggcatcagacctgaaatgggaag

SEQ ID NO: 56795 - DNA, 2469 bp, Homo sapiens
tttttgcaatatttcttctcatattttattttaaatctaagctaatttctttataagaacaggctaaggcttattttctgtggctgatccagccttacaagaaaaaagatttcactgtgtccctcagaaacctactcctgtctacatcacactgtcgagctctctctttataccccatgtgacagataagaaaacagaagtccagagagagcaagtgactcatccaaggtcaaacttcttgctaacacatctaggacgagaataagggctcaagaagcccactatgggtctcttgccgtatcactgctgcaaatgaccaggcatactggtgtcttgaatacaaagtttatttgtaaaggggaaaaaaaaaaagccaacatgagtcatctgcattgtcaacgggctccacacaggttgttctaataaagcatccagcacctccagaaccacttgtttctgaaagcaccaacctacgcagacactagcaggccatgtcttccacccttgccaccctcgaggctgtgagcagatgcgctgttgggctctggggatctagaggtgtcacttaaagagcaagggagcctggagcttggcagtactgactggatgagtggatgggtgggtgtatgaggacatgggagtgttttctgacagctcccggagatagttatgatatcatgcagcctaatcccactcatcttggaacaccccaaacatctcatccgctcagctgtccctcctcaacttcctcagggcaaaagcactgcagtctgaggtgaatctggccgctggggaggggcggtagtcggccccagcagcagaggaagcaacgctcagctccctcctccacccaccccgtacaggaactccccactgggtcttcagatgccagaggcgtacccagctcggagcctgccccgggtctcagggtcggtcccgaaagaacgggggaggaggaaggctctatcccgcccccgcctcacctctactccccgacccccaggcgccgacccttctcacccgcaaggtccgccgccggactcttgtccactcccagagaccctgagcgcacccctttctcggcgtcctcaaaggacccgcgtttcccaccttcccatacggggccctcccggccgccccggcccaagccctttgcactgcgtcccccggcccctgagtccgccccgcacccgcacttcccgcccggccccgcgggctcgcggtccgccccaacttttcccagcccccgccccgcagcaaccgggatgcagcgtctcgagccgcgacgggcaggcgagctcgagtccctcgggcccccaaccccgcccgcacgagttgcgctcgggacccgccgggcgcccaggcctgggtcagcagcactgcgcggaggcggagccggcgtggcgggaaccgtactgtcccggcgccgcacccccgcccggtgcccggtgccccgtgccccgcgcccgcccgccggctcgcccgccccgccgccgccgccgccgcgccgctcccagcccacctgcccgcgggcgccgccgccgccgccgccaccactgccgggaatacgtggcagtggccgccgccgcttgcgctccccgcctcgcctctcctctcggcgcccgcgcgggcgactctggcgcgccagaccgcagcgccaggcgccctctgccgccgggaagccgaatcctcccgtcctaaccctaactcgctggctgcccccgcccgggcctcggctcccgccccctcttccccgttcccggctcagactgtcgcttccgagcgacctgggttctcgcccggcctgctgctgccgctgcctccaggaagttcgccctgaccacctctgcaggctcagcgcgcttcctccggctcccgcgcagcgggtgcttaagtcacccccttgttgatatatttcctgcttctttgaacgcctcgcccgtgagatagcagaatcggaaaggggatagttggaggcaaacgccatgtctgttgtgttcaccattctctcctccagggcaaggttagcgccctgtctggaatactgaagtgcgcaataaatacttgtgaagagagcaaacgagtagatgaatgagttgagacttttaccgctgtctacccaagtaggctttgaaacctcaagcggacagagatcctgacctggatttgttttttgtaacttacacgtgcatatgtgtgcgcagctcagcataaataaatgagattcacaattccccacctcggaccagcgccaaatccgcaagaggcccacggctaaatgttattcagggcttttggtcaaacacgtttaggtttgagatctacctcttaaaagctgggcaatcgcgggaaagctcatctccctggcccacagtgaacacgtctataaattaagaataataaaacctacttcacagagttgtgagaattaattgagatggtgcactataaagttctttacgcagcccc

SEQ ID NO: 56796 - DNA, 1010 bp, Homo sapiens
ccgctaacaagcccggctaatttttgtatttttagtagagacagggtttcaccatgtcgtttaggctggtcccaaagtcctaacctcaggtgatccacctgcctcagcctcccaaagtgctgggattacaggcgtgagccaccgcacctggcccacattattacttttaacaggactttgttttctcttttgcctacctcatgtccacatcaatttaattttttttttgtaatagtgcctcaaattccttttaggaaattattcttccttattatatacagcctgctgggttatttcatcaaggtgtgcaactttcccctagtgaagggattgagggacaccctacccaagctagactattcagatgtgtcaacagtgaccagaacgtcaaaggcctggccacagatggagcttactcattccaggcatgggatgtagacaagactgtccagagcttctgctacaaaaagcctctaaaaccacatggttccaaagtccatttctgttatttacaggcaaagaattctaaatgggacagtgctttttgctgatagtacatctaaaactgaagttcttaatctgaggtccagagacttggacatggttcatgggtgggtgtcagggttcaacagataagatataatttttatatctgctgatgagtttattttcccagtgagatggtctacaggcagctttgatcagattctcaaaggggtctatggctgaaaatggattagaaacaattgatcccagagcaggagttcttaataagtctgtgtataaactcagatgggcaaaaattatatctttgtttgtactaacttccattcatggttgcttatttatgaatgttggtaacaaaccacagtattattagcaattcccatgaatttgctaccagtagaaatcagatattttcatatcatgttacagtgttgcagatctcaaaacataatttacacctttcactgctttaaaattacagtgttagtagacccaagctagat

SEQ ID NO: 56797 - DNA, 1024 bp, Homo sapiens
caagattaataatgagaagacggaaggcctgtgtgatttggcatcctgtgaatctcggaggcttagcctcaacccagctgggaggtctccggtcgtcaaaagagcaactcacattggcagcccctgctgtgacaccaggaccttggcgggtcctcctggggccctgctgtgaagtgttggcttgggaatgacccagggcatggctgtggctgaaccatctccaagaagccagcttctctgcttttggctggagggaggtttgggtgtccactactgccaatttcagctgggcacttgccacgttttggcagcgaagctctgggaaaatgtgacctcttgttttactatattctgcacaggctcattgccagagctggattttggcctgcaccatggagctggtgcacagcaaggaagcagtggctgctttacggagtgagtgattcattagcctaggctccacccaagtagtgtcaagcaagctaacgctgcctgtctggcctgtcacccctactccagctggaatatggtgcccacccagtagttttcccttgctgtctttgcaataccatgaattcaaaatgctgaaaacaaggctcagagccaaaccatcattcttcccctcagtcccatccctcacccaccctttccaaactaacaaaagtatgttgcacttcagaaaaccaaacaagagaagcccagcagaaagtaaaggtgatgtgccaaggtgctcaacccttgacacatcaaattcttcaactgcactcaaatgctgacacatttctagagcatgacatttttacataaaaatgaatatgattatgggactcctttctaaggttgccccaaatctagttcaatgatgcaacccgttgcccttcctgtcaattgtccattgtttcttctttctatttacataacatattcatttaaattagaatttattgtatattttatctttactataaggagacagaatatcatggtattgaagtccaagtgataaagtctgattgcctgggtt

SEQ ID NO: 56798 - DNA, 1084 bp, Homo sapiens
cacaaaaaaacataaaacactaaatcctccagcttctgttgtatcccaaagtaacaaaacatttctccttgtgtctttaactatggctaaagactgaagagaacttgattcagcttgatttttcagctgatcgagcctcagctctgcattctgatttttatctaatagttcttaaataataaaatacaaggaaatacaaatgcactagcaaatgaaagttaaatcataccagggcaggctggaggggtggcataaaggctgcatttcactttaaaccctaaaacaaacagcaggtgaaatgtcttcaggtcaaactcttccctccaaattgcactgtggaggctgagtcagacacgctgagcacagggaactctcactgacgtcagtgcatatttggagaatcagctattaaagctgcagtcaggcaggcagctcttgcagcaaaattgtgcccttggactttgcctttgagggttaatgtctcactgtgttttcaaaagtgtgggcagccaactggctttcgacatagggtattgggaattggcaagtcaaaatctttggagagagatatgtttcctggcctaatagggcaaatgcctccgcaatttatagtgtccttgaatctcattcactcaaagtaaatgattctctgacccaagaagacttagaggctaggcttgcatcgttctatagatttttttttattaatccatttcctaagggtccatttactctttaacaaatatttattgaggacttgctataagcaaggtccagatacatggaaaagcaagcagagacaggtatgtatggttcaagcctgtatgaaactcagagtcaagttaagagccagccattaatccatcaaatcaatgacactagtgaatgtgtcatactgaatagggataaatagacttacgagggaaataaggttctttaagagcgaataggccgggcacggtggctcatgcttgtaatcccagcactttgggaggctgaggcaggtggatcacgaggccaggagatcgactccatcctggctaacacagtgaaaccccgtctctactaaaaaaaaaaaaataca

SEQ ID NO: 56799 - DNA, 1426 bp, Homo sapiens
tcgtattttttgtaaagatgaggtttcaccatgtttttaaaaggacttggtcttgaactcataaccaaaaatacataacctcgaactcttgggctcaagtgatcctcccgccttggcctcccaaagtgctgggattacaggcgcgagccaccgagcgcggcccatacgggaaaacgtcaaagcctgacaggtgtgacaaataatgggcccctaggcaggctggggctggcgcgtgcctgtgcgcgtgcgcggggcgcggggtttttaacaccgcgcagccttcccggcggcccccgaggaaggcgggacagggcctattcccgcggtttggtccggccattggcgggcggtttgaatgacggaagtgacggcggctcggcgatggctctcccgcaggcgcagaaacggctgctgggcagctgatgggcaggagcttaccaggctggcttgctctgagctgcggttactgtgtccaggccccgggttctcaggtgagtcagggatgcactggcttcccagtcgccccgtaggagcatgactccccgaggcccaagagctgggattgtattccggaggaatgggatcccaggaaggcgccttgttgcgaacgcaggtacggctcgcgtttctcaggctccgcaggccgtgggccctgcccgcggtcgggctggcggctgtaaggagtgtccggaccagacccggtaactcagtgcgagaggctttgcgcgctctcctggggtcgggtcgcgcgagcttcccacgcagcctcccctgtcgcggagcttccgtgtcgggggaggggcgcttcccccagatcacccgcggacatggcctgccacctggtagctgttaaaagagccttgcctggatcgtttcatgcaaagagcacgctctcttttggtgtctgccaccttaatctcacagttattcaatcctgtcacaaactcaacttttaaaacaatggtgaacttttgagtccttaatacttagagtgtatttgaagacttcacgctaagtcacatagacgtcagaacaaaccttttggggtagatattattattccctttatacagtttaagaaaacgaaaccaaagtgacttcagtgacttggccagtatcttcctgctaataagtggcagtgttgggtcttgaacccagatcttccaagtttagtgttaattttgtgattactatgtaccaggagccatttaatcctcaggacgaaatcttgcaagataagtagtataatcttcaatattggatagtaataaaatgtagaatttaaaaatccatattactaagaataaataattaataaacaagtaaatggggcagcagggaaaacttccttacagcaggattccgattgataattgtagaaggaataatggaaatagaaaatactatttggtaaacaccacagtag

SEQ ID NO: 56800 - DNA, 3795 bp, Homo sapiens
ttcctgatttatccatcaattgctctttgttttaaacagttttctgaaattatgaaatttagtaaatatgacaaagcttccctaaatattgacagtatctactacagtgttgaacgtggtcagactatgccaatgatttcaggcgaaatcatttaccaaggttaagcttcttatccatttcagatcagtttctttaaaaagaaatccagaaattctattcacaggttctttcagttgttaccctctaaatgtattcaacgcaacaagattccaaaaaagtaccgtcccttccaacaaaagcatctttcaatataagtaaaaaatgtagttttatcattagccacatattttaacgtacaattaccaatacagtattaatgtacaattaaaagccgttttccaagatcaaagggggaattcctaaagcaaagtgtgccctatataaaccaggaaaaggatctccaatcaataaaccattttaaactcctaatcacctctccattataattcctagattcttcattcctagattcatttaagcaactgaactttgtcatattgtatctttgccattattggtggaaactgacaagttctgaattctcaacctttttcaatgaactatcataattcttgtgtcttcatccccatggtagagagtatacaacataccaaaaaaaaaaaaaaaaaaaaagaaaaagattccttcttgtgagctaaaagaaaaaagaaaaacaggttggtctgggtggctcaggcctgtgtaacacagcactttgggaggtcgaggcgggcggatcgcttgagcccaggagctcaagaccaacctgggcaacgtggtgaaactccgtctctacaaaaaatacggaaattagccagaatagtggcgcgcgcctgtggtcaggaggctggggtaggtggaatacctgagcctgggaggtggagcttgtatgtagtgagcctcagcaacacaaggagacccttgtctctacaaaaaattcttaaaatactggctaggtgtgttggcccgtgcctttgctcccagccactcgggaggatcgcttaagccgcggtggaggttgctgttagccgagattgcaccactgcactccagcctggacgacagagcaagaccctgtctcaggaaaaaaaaaaaaaaaaaaaaaaaaaaaaaaaaaggcatggcaacaaaaattaaagataactacttatttcattattgtacatgccttagtcaatctcttgtctcattctgtagcttcttgggacctgacatgagtcattacatataaatcctaggatgaactagcaaaatatttaaaatatgaaacgataaggtcaccaagagctcagatttgttaaatgccccctgtggtattttcctggtacaaggtcttactagtttttttaagtacaagattctacaaagtcattaaatatcgaatgctcaaaaacggaattcaacaaaaatttgcccccatgctttaacggtatacctgtagttaattttttttaaaagtagggattatcaaaataaagctagctcaataatcactttttcgaagtgtttagaagacactcctacttgggtgtcgatgcctccgtggggattctgcaattcttagaggccacgtgggcagagagcggcgctttacccggagctaacgctgtgaccaccagcgcctctcacccggcagcgcctaacctgcagaaaaccggcgcgagtaatgggtacctcacatacgaaggttaaatcatttaaatcacgtaataaggttaaacttgtccgcaacacgatttaacacctccatctcaagatataatgaagcccgtccacactacaaccacgtttgtgtgggactcataccagccgcgtggcgcggagtggcctgcggccgtgatcccttcaccctctcggaccgacttcggagtctcgatcctccggaccaacgaaggggccccgggaaaccccagatatgcaacgcctcccccgcccgccaggcccggacggcctcgccctcttagcaacctacctaaaacggcctcgcagtggccccaaccgcgcacttgctgcttgtaacccaggcctcggcccaaaacccgcgactggcctggtgtcctagagctctgtacacaccaccctcccgacctcagccctccaactcccgataaccagccgacctcctccaaccgtgcggaagaaaagggttggctatttccgtggcccaagtaatagtcaggccgaaatctcgcgatacaacttagcttccgggaagaaggcgagcggtgggaggagacgcgacgtgggggcgccatttttctcgccgcgcagggaggactgactaacgtgggcggagctctagctcgcgtattctgaggaggcggggttggcctaggcgaagatccggactctgggtgttttgctaccgtgaccgtttaggtgagtggaatagccaagaacatttcggcaaataacaaaaacaaaacgtgcggtcacttgtgagtggatgagaactgtgaggaaacagcctctcagcccggttcgtttccggtggtctcgcgtttgctgagctgtcgcctggctttctaaatctggtcccgggtgtgtggcgagggtgacgggtgggatgtgtgcctgagtgttttgtaatcctttgtctatttctgccttcagaaacccttgtgtgttaaaatattggagaaggctcattctttgaccatgactcgaagtgtgtaacctttgtgctggacgccagtgttattccatagcacgcccaggtctcctccccacttttgcacctgtttcgtaagctcaccctttctgcctcccaggagttggctaacatgtcacaagtgagacctgtggaggatttgtttttcctaagtttcctcctacatcccccctgccccacaccattagttccttgaccggttcctgagttaagattaaacagtgtaaactagtttagttttggtggggtttttttctcccaaagtaatttttttttttttgagaccgagtttcgctcttgttgcccaggctggagtgcaacggtgcgatcttggctcaccgcaacatctgcttcccgggttcaagcgattctcctgcctcagtctccccagtagctgagattacaggcgtgcgccaccatgcccagctaatttttgcatttttagtagaggcgggggtttctccatgttggtcaggctggtctcaaactcccgacctcaggtgatcctcccgcctcggcctcccaaagtaattttaaaaaggaatgaactggtttgatttttccgctttcaaaattctgttttcatatgataaaccacaaaaatcagtaaagctgtctagtcttattttatagttcacattttaggattgaacgggccttaaaagtaatctggtctctttacctgctttgctccatagtttggacaattccggggataaaaagtccgatcctttaggcagcccactgcatttgatccacagggtctgggcaatgacgaagctccaggactggtatggcatgtccctcactgccgtattcagcagcaagcctagctgtgtaatttgtgaggctcaatgcaaaatgaaaatgcagcgtcccttgttcaaaaagaaggggaaaagtgctattaaagggaaggaacatttaactcctaatgcagaatcattgaaatttcacatttcattttgtattttttcttttttctttttttttttagaaacagagtctcgctctgtcgcccaggctggagtgcagtgtggcccgatctcagctcactgcaacc

SEQ ID NO: 56801 - DNA, 1229 bp, Homo sapiens
ccattaatttccttttccttaactcttctagcctctgcagctttctttcctcatccactttttaaacaaacgcaggcttaaaaagcaaggaatatacccgccacactctcggctcccaaaccgctctttccctccctctgccggccacgcctcttataggcccggaagtttaccccaccctgcaccgtgattcaccggaagcgctctagggaaccctggagcttccgcgcctgcccagttttgctccgaaagacttaccgaggagggagcttgcggtgcgttctgggaaagttgctgggccagctcctttgtttccagtctgagcgttgcgttcggtttcccgagggtcttctgaggcaccgcggctgcgggcttctgagttcccggctctccgcagggaagcctcctcttcgtacctcgttttttggctcgtggggggtcctcccaccgctggccgacgcagccagcatgtccggggtgcgcgcagtgcggatcagcatcgaatcggcctgcgagaagcaggtccatgaggtgggcctggatggcaccgagacgtacctgcccccgctgtccatgtcgcagaatctggcgcgtctggcccagcggatagacttcagccagggttcgggctccgaggaggaggaggcggcggggaccgagggcgacgcgcaggagtggccgggcgccgggtccagcgcagaccaggacgacgaggaaggtaaggcctgcatccgctgcccgagtcccccggtctgggtcccagcacccgcgcgggcctccgcctctcccgcgatgggggtgatcttgtgcgtgcgagaacttttgagtgtccctctagcggaagcgtaaggatacttggtcgtcatctttttgttgctgccggacaaggtaggacacgactttacgtaatactcctgcgggtctccttgaatggcagcgtttagagacactgtcaaaccgtgaaatgtttaaatgaatgcttctctgtagagggcctttaatgtagcacacttagtggctaaaagagccctagatcggggctctgccccttgccggctgtgtgaccttgggcgagttactttgcatccttgtgcggtgtgaatgatgatagtagcacctgcagaaaagaggtctgttttgactgaaatgtgtgacgaggtccaagaggtaggcgggtccagatcatgtagaacccagtaggccgggataagcgtttgactagtgttaag

SEQ ID NO: 56802 - DNA, 688 bp, Homo sapiens
tcagtattcaatatcatattctcctagcttttctagttcacatgtgggttcccctgacttccctctctaaagtgggtccttccctctgttatttactatcttcactgttttcctttgcagcacttattacaggacataatcattttatgtctgttggcttaagttttgtctgcctctttggctggaatgtagctctgtggaagcaaggatgcctgacctgtttggctcaatgttgcatccccagcagagatcatagtacaaatacataatagtttatcagcaaatattcattgaatgaatgaatatataaagagattaggcagtctactgaacttcactattttgacttagactattttggttgcaaaactctcatattcaaatgtcaaggttctcaaacaagtaaaacagagttctgagagactgcctatgagtttcacaacctaccttggcttcttttttgtttgtttaagacagagtcttgctctgtttcccaggctggagtgcaatggcacaatcttggctcactgccatctccacctcctggtttcaagcgattctcttgcctcggcctcctgagtagctgggattacaggcatgtgccaccatgcctggctaacgcctggctagcttttgtatttttagtagagacatggtcagccaggctggtcatgttggccaggctggt

SEQ ID NO: 56803 - DNA, 4084 bp, Homo sapiens
cagttcctcaaactgctgatgtactgattagtatgtaaaatactgacattgaaaagaacactgacttgtttctgaatcatataaactttgattttcttgtgcacaaaacattttagcctgtatgttgtcatctgcagccagtgactgtaacctgtgtaccataccctccgatgaaaaaaatcccacctctgatataaggggtcctcctcccttttcctaaactttcttctaaaacccttccaacgtgtaacaaattttgaaacatgcccaactttgctggtaagtcttcttgggtggatcctcacatttagcttccaataaatcaaattatttctacttcaacagccttaatttccgtggacactggtcagagtatttcctcctgtctttccatcatccacttcctatgagctgttcagaagcagctctctgcagccccaacacccacctacctgcaggcccccctctctctgctggctcccggaacaaggctctgattgggatggcagaggaaagagaaacgggaccagcagcgctactcaggcctcgaaactccacactcactaccgtttccgcgccaccctctcacgcggagctcctggaagggtccagcgctccctctgcaaggcaccgtcggtctacaccgctcgattggccttttatggcactgactgttctttgaagcttttgcagctccttctaacccgatttcaccgtgttggaaatgttgggggtggggcgtaaagggggccatcccatccacagaaagagtcgcttgcagaaatgattttaaaactcccgggtgccaggacgtgaggagaatccggcagggagggacgggagaatttccaaaggtgccgctcagtgggaaaatccctttgtcagagagtggcccgaggggcgcggaatgcagccgcgcccaccccgccccgcgtcaccgcgtcttccggaagctccacgcccctgggtacttggtttccccgcatggttccggaagagcgcggcgcagctggctgtgagcgcagggctatcccggcggccgcttcggcagccagggcggcgcggaggggcagggccagagggaagcgctttgttccgcgcgtggttcccgcgcctgggggtgcgcgggagaggcgcgaatccgagtgccgcgcgcggcccggggacttgcacgggcgtgcggggtggaaccgcaggaagcggagctctcgggttcccgccccgccccgccccgccggcggcggaggcagcgagcgcgagagcccagcggagtcgctgggagcctgaggcaccgagacacaaaggcaggcgggatgcgggagcaggcaaagggaaagcgaaagccgcgcgcccggccggtgactgggtgaaggcgccgcgcagctttcccgacgccggctgtacccggacctcctggtcgagcctggcgcgccgcagccatggccatcgctcaactggccacggagtacgtgttctcggatttcttgctgaaggagcccacggagcccaagttcaaggggctgcgactggagctggctgtggacaagatggtcacgtgcattgcggtggggctgcccctgctgctcatctcgctggccttcgcgcaggagatctcgattggtaagcctcgcccaggacggaggggagtggccgccccggtctggcccggtgagctgcgattttacggctcacaggcccgagtctgggtacgcccagctgtgatggtcgtgagcgtcaggaagggcagtggccccagttttatggtccaaagcgttctttgcccaggtgtttcattggtaccctggtctactctgctcgcatccctactcctcagttcttttgttcctcatgcccctctgatcggactgtggcttatagtttatgttccacccttagaactggcaccttgccaccagatttgccaagaatagctgtgtccccgtttttcacccctgtctcctacatatttgtccagccgcctaaaattttacaccagagaagttcctgagtggctacatggaggatgtgaagaccggtgctccatgagaagtgtgttctttcagtgtcttacatataattggtatttgctgagatcttagctctctagggttgtgaatgataggaaatatctgcacttggcaggcattagagggatcctcaacttggacggtcttacaaatgtgagatgaacaagtccccttcctgtaaattatcatttgagcttcataacagttgtgtgagattggaaagtctggtggtttgggcaggatcacgtggctacgtgccttaccttcctcatcagctgttctgactctccacacaggagagagtgtttatgaaccaacaggaaggtagcgcaggagggttaaatacagttctgtggcaggggaagagagaggacccagtgcggctggactttgggaaaacttttgtcagagggtgggtgggatttggacaagaaggagtaagacctttgttaaggttttgagatggcagagaatgttatatgttcctggaaagagagacacagtgactctcctagccaaggcaggaggataagtcagagttcctggagtctgagagtgaatatgggcctgggtcagcctggaacagaagagtgtaggctgatggtttcagaactgtgaagttattgtttgagcagaggacagactggttgaatgatggtggcatttagggtctgggaagaaggtgagaggatggggcctggagggctgggtgccagagagcaaggcatcggctgaggtcttgtgcacagagggtgtgaagagtggaagaaaatgggtgggtgattgctgtgcgatcaaggagtaaataagcagcacttgagtacctagtatttaataggccatgaacggcagtactggtcaaacgtgctgcggaggttgtatgtctgggtgagtggagtgtggtgttggtggtgatgggaattgtgaagttgagggaatagttgattaggaaagaatgactatgagtgtgattttgcaatctgcagcactaagttgttcagcttggcaggaagttgccaaattcattgtggaaaatagtttttagttttcctgctctttgcgcaggcatagtcatcgggatgttctttaagtttccatttgacagtggattgaggcttccagctgaaagcaaaaccaccaagtagcatgagtcctggagataatctctccctttggtcaattcctccttcagtactggctgtgtgctgaactcggtgctgacctccaaggacccgggagtaaaagaggcatgatccctgtcttggaggtgcaagtcttgggtacctggttgggacagaaaggcaggaggaaggagttagtcaccctctgtgaccaatctccacctctagcacatgtactagagggactcctaaggcacctgtacctgtaatgccttagatacgtctaaattggtgggctgtctgagaggtatttttggggtattgggagtggttttaactagcaagagtttgagctcatgctgtgtgcatagcactgttgtgtgctgagggagatgggaaaggattttgagaccttgttcttgccctgccctctccctgccctgtggcagtttactatgcagttgggcactagaaggtatctgttagcaggtaagtcattcagctgtgtgtaattcagcacccagccaggtgttgagctatgagctccaggctggtgaaggttggcaggcacttgggtgaggagctgtcaagcagactcccatgttttctgaagtgttttcaggagttccaggggaggacagacatgtgggatgaagctaacaggaccagggaagacctattagattaggtatacatttagataaaaccagaagaagggcttttgagaagaggggagaggtacatagattaatacatggagttggtacagtgggagggatcatgtcatgcagcatttaattttgtgtagttagtagtatgcactcagccaaaaacaaaccaaaaaaaagaacagcaataaagggagaatgaagtaattgaaatggagctggcactttgcccaccatattggccagtgaactcaggccccgggaagac

SEQ ID NO: 56804 - DNA, 1988 bp, Homo sapiens
gaatataagcatgattgcatgacgtgaccttcaagctctgaaattctagaagtatttctctaaagttatgaattcccttagtgtgctgcagttatggactgaatgtttgtgtctcccaaccgcaaaattcatatgtcgaagtcctgatccccaatgtgatgctaattggagatccctttgggaggtaattaggtttggatgagattatgagagtgggaccttcatgatgggatgcccttagaaaaagaagaaatccctctttctctcccccctccctcttcctctcccccctccctcttcctccttctctccctctttccctctctctcccactaccccccttcctctcttcttccctcttcctctctccacaagtgcggccacaaggaaaggtgtgtgagcacgctgggagaagggggccatctgcaaactaggaaaagagctctcaccagacaccgaatctgctggtaccttgatcttgaacttcccaggctgtgagaaaataactgttgtttaagccacccagtctgtgggattttcttacagcagcctggttgaagacaaaactatcaacagaccagactctgaatgggattcatgtttaaggggtcttttgacagggcctcctgtgccctgcgcttagggctgtacaaggcctgaggcgtcaggggctgctttgattccctggtgcctcatgtggcacatatcccctgggaaggagagcccgtgtctcctgccaggatgtttctggctggctggaccaggtggggagctggggcagccagtagtctactagggaaagggtgtctggtcagccggggaccctgcctccctcacccactgacctcttagtgggcagccaccgttctgggtagagaaggacttagtctttctgagttagcactgctcttttgctatcattacagggcaggcattgggccagccccagtgagtcaaaggatagatataactgcagctgcttccaatatagtttgcttggagttcccctttcatttcctgcaactgagtcagcggctgggtggcttaagttatctgctctgttgtggctgaatttagacctgtctttgggaatatcttcaggctgctttttagcatgtaccagctggcaaagcagatcgattcttttcagggttgtctatcagagtgggccaatatttagggtctcatggcataggtcctataatagaacatcttcaactcacactaaaccaaagagccaagagagactcctaacccctccagaaggatgcatgctgtccagagagtctactgttggatacatgttttactttgttaatatttttcttgtacaagtagtagctaaatacatcatcatggtaaaggattcataaatctctttcactatgtgctgaaggtaggtggacactttgtgcagccttattgctgtactttgtctgcattagcataacgtgtacaccttattttattttttaaaacaaatcgagtcataccatagtggcttgctttttctcacttagtatgtttggagagctttccgtgccagtacataggtgtcacctcactgttttataatagaacagtattccatagcttagaatatacttacaattcatctaagcagtcccctaatgatggacatttactttctttcaaaatttctactcacacataaagcttgtttgcatgaaaatcttcgtaaatatttctctcctcccagcattaaaaggaaaggagactagtcgcagcagtatcagtttccagaaggatgacatcattttccgaatagttttgcattcctgcgttcctatttgaaataagtggaagaaaaaaaaaaaccactgccctgtacactatccagctctgactccctcaaaatgtgactgcattagaagtttggaagaagcattttgatgtgctcttggttttaagaaagaaagggcctccttcagggggtagaattgcaactttaagtagaacttcatgat

SEQ ID NO: 56805 - DNA, 3989 bp, Homo sapiens
atgttgagccccaggagtggcaagatagaactgagctctaggatgaataacttggcaacagtttaaacaggtggagaagggagagactggaagacttcctgactcagactacttggaaaactcacgaagatctaacgtgtttacctcccaatattatcttgaagagtaaatgagatagaggatgtggaaatacatttgaaaaaatgaatccggatggtccctgtcccaagcttcctggcccccggccccctggcagcagctgatcaccctgaccccttgcctttaggtgccttcaggcagcctgggtgaaggtgtgggctcagagcccagctgtgccggtcccctgtaccctcctgctttgcccccctcttcactcctgctcttcactccctatttgttgcctgcccctccctgcctggctcttgacatccttgacttggtttcccatttctggcctgggaatacccaatacctggggattgatgtgtttctttttctagaaatgcccttgacccttcccaggaagctgtccccttcctggccacttggaggaaccacctacttagaccacacccattccaacaaagccctggtccccaggagctcctccagggtggccttgcaggggtgactggcttagagaggagtgctgagagaaactgggagttggatacagatttaaatgaatgctgctaccattcactagcttgggtaggggattactgaactacttggagctttggtttactccaggggaaaaggaaaataatgatgtgtctctccatttggttgtgaggcttaaatgaggtaatgatttaaagggctggttggtgtctagtgaatatgagttggccactgccttttcttctgactttccattccagatgaagaccatttcttaagagcttcacatgtttctgccctcctctctctattttccttcttcctcttttgcaaaagctttagtataaaaagtgtagttatttctgctccaggagtttctactgctgccttgagggggaggtcctcgagatcccaagatagagcttgaagcactctttcctatagaaagaatgttaataaatgttggatacttgcacaatgaggactttgcctaaggaacattctgggccaggcaggctttcatgaaatcataacagcattattcattttcatgagtgagtacttggacagatattcccaagcaagcagcttatcagcatccttgccagaaaccatctgattgtaacctgaggactatctgtccccttaggtatttactgttgccctcataagccttggtaggtggttggcttaggaagcatttcacactgatgcgggaaccgtgtgagcttagtgccaagtcctgtgctgtcccgactactcatctttttataaaatctaagaacttaagtttaatgggataagacagtcagaagggaccttgaaatatcttacctgtcccccactcatatttaagccattcttgaatggcaagaactaccccattatagaacacttgctgatgtttgtgacttttcatgatgatttcctgtaaagcctcttgctgacaagtcctttcttgatggctgtgggtgcacaggcccctgatggggaagaaatgctcagggctttgccgcataccactcctaccacaagaatatactctcctgaaaacatctccatcacttctctcttgtaccataagcataaaggccactccctccccaggcaaagatgagtgtcgaggccttttatgtgccagggattagggaaatccagctccgtaacttcccactgtccctatcattgctccatagggtgggaagggagaatggtaggcacatcccagtctttaaggcaatatgagaatctacttgttgcttcatctagaaaaatgtaacactaattcagcaacttctgggaaccagacaccctcgcaagtgctgcagcaagttttgttttttgttttttgtgtgtttttttaatttttgtattcaccacaacaaatctgtaatgtggatacactattaatgtcattcctattttagagatcccaggctttgggaaattaatgacttatcagctgtgactcaccctgctgagagtggcagagtcaaatttaaatatgactcatgtcagagcccagtcactgagcacactcccaggctgtgatggatgtggaagagagtgtgcctgtcatggagccttagctctgacccctatgcctgtgacacacacacctttgaatgtgccaggtggggacaggggatcagggctgggccaggcaaggcctagcgccagcccctgtgctactggtgggaaggggaggacacagccctgcctgagccttacgatcctattggtcagtttccctccatggcctgtgtgtgtcaggagcacaaagagtcttccagatggtaggttttacagatgtgacggtagcatctgcagagagatgtaatcttcagtttgcagaggagaaaaccaagtcccagagtcccttcccagaagagcgagtgaacggtagagccccaccaggacccaggtcttcccattccccatctaccgcccatctgctgttgggaggtttgcagtcgtgagcgtttcccttccaaatgtaaaccagttgggctgcagtttcagcctgtttcttctttagtgttacaggaggtaggaaaccactgatttcccatccagtgttctattaccaatgttcccttcagctttctcttcctcaggctaatagttctttgcttctttgttctaaaagaacttgtttttttagtccaattttccgcattcaggtgcctcactgaccctcccacataacctttcctttttctcaatccttactccaaactaaaccaggtctctccacgcttgcctcttgaattctgggctctggttcttttcctgcttcctttttctttgtatggtagttctacttcttttaagaatttttccccaactgaggccaagctgctatcatgaccagtgttggccaaaaccactctgtgatcttttgttttaatatgaacttgggtgtttgtttttagttctgtcctaatgtctccacctcctgtcctggtgctccctaacttagacaaaactaaaaacatgtgagatggggacaagagtccaggtaagctgtgttttcattggaaactatctgttttgcttcttaggtacacagataagctgtttctctccaagttctttctcctggcgtcaggctgcctttgtggattcatattgctgggcggctgttcagcagaagaactcactgcagagcgagtctggaaacctcccactgtggctgcataaggtaaagggagacatttccaaatagaacctgtttgctttatagataaggaaactaaagcccagggaggctatgccaaagaccacacagatattgtagccaaccagtgctgtatctcagattgtaaaactgtagcaccttatagtcaaaaagaacctcagagatgacttggtgtaggcaccatcatttagcacaatggggcaatgggaagtgttctttgagttttagctctataacagcaggcaccttttgtgtcttgacacctttatatcataatgcccagcaggatgtctggcccgtagtaggttcttagtacattttgagtgtctgaatgagcatagctagacagtggcagagctaggattcatgcatagcttctcagctagcaccttttctaccacacacagggtctcttgcagaaagtaaggactgacctagagttcagttgcttctagctgatacgttactggaacatcaaaaagcctagtgatgaggccctctgggggtgttggctgtagcactgtttttggaatggatccctttgctttttgatagatccagatactgcagggaaggggagatactacacaagagacaccaatgtctgggttccactccacttcccatagagaagaggtacattctgtagtcagggaagtggtgg

SEQ ID NO: 56806 - DNA, 615 bp, Homo sapiens
aggggatgcagtgaggaacttaggcagcagttgataagtttgtgcagaagaatgttctctgagttatgaagtgactgcattaggtcttctctgtgcttctgaaagtaggactttgtttcagcctgtcattaatttcaaccactgtttcttttgtccattgtgaaaacaattagaatgtgtatcttctggtattcttttctgctgaagaaaatatagaattttagctttcgaaaacccaaaagccaaagtttgactctcttctgctttgacctgcttccagacacaccatcagcatccttcttcgtaaaaggaatgatttaagggagctatgactcaggcatgtttgtttatagttgacccttgaacaatgtgggggtcggggcactggtcccctgcacagtcaaaaatttgtgtgtaacatttgacttccccaaaacttaactactgatagcctactgttgactggaagccttaccaataacataaacagtcaattaacacatattttatatgctatatgtattatatactgtattcttacaataagctagagaacagaaaatgttattaagaatattataaggaaaagaaaatatatttactattcagtttgtg

SEQ ID NO: 56807 - DNA, 1174 bp, Homo sapiens
gtggagaaagcaatgtaataagagcacatggtagagtccctccaaaagttttcccatcagatgagctttctaagtcatagactcccactgcctaagtggagaaaaattcataccctattttctcccagcctagtgctcccttcactatcctgtgccttcctccaagcctgcaatctgtgccaggtgattcatctcccacttggcccaaggatggcctttgtgcagcacatcaactgagaagctgggctcgtattcaagccagtgagtcatccctgagcattgatcaggttggggcagggaaccaagggttggtgggcttttccctagataggaaactcatgaggaaatagccttcatgacttcagactcagttgcagagtgaagttggtattcattcattcaacaaagggtttttcaaacacctgctatctggtattgggcatattaaggtgaaaaatccagcaagcctctggggtcatggagtttgctgggaattatggtggcaaaaaggaaaaggaagaccaagaaagcctaaagctttgtttccatctataatttcgcctctctgagccatttgcccagtgaggggcttggactaaacaacctctagaatctattggtctgtgtctctgtggtctatgtcttctttcatcgtgtcccacactagatccctgggaatccagatggaaagaaggaaggaaattagtatttgttgagtgcctacatgccaggcattaaacagtgcatattagctcattaaatcttcacaatccagtgaggatgttcctttagttttggggtgagggacattaagggaatgggttctcaagacaagctgcctgagttctggcctgaggctgcccgctgacctgcgtgacctgagttcttgactcctctgggccttagttccctcctgtatgacagaaagtcatggattttgacgagggctgaagtcgattaaacaaaggcagtaaacgtaatgccggcacataataaacactcaatccctcagtcttttttaagtctagcagcattttctttattcacatcgtaagccatgtttgaaaaacgagaaaatcccaaactattggagcattacagacaggcgatttagcatattgagaaagcccaatttgagttttgatatcagaaaatctggtttggagtcttagct

SEQ ID NO: 56808 - DNA, 1195 bp, Homo sapiens
cacaagttctctcttcttagctcacctccaccctggggtcccctctttcttcctgcagcccccagaacaagccgacaaccaacctgccctcagataactccccatcatgtcatcagaagagacatgcactcaggtggtggtgcacaggcttagggggcaggcgggaagtctcctggccctaggaaaagtttccttcacaaagcacctgctgtggtaggtgctttgctaaagcacacagtctaaatgaactagtttaccccttactatgtaataatgagtaggttggcaccctccccagaagagtaaacagaagcctgggagctccatgacctgcccaaaccacacggccaggatctaatcctgggccagcctgactcgaaaacccgagtcatgtcagtgctaactgtgaccagaggactgcttgcatcagaatatgtggacatgcttgttaaaaaggcagattcctgggcctctccacagacccactgagtcaggacctctggggcagggcctggggatgtgcatttatcacaccttcctggtgactctgaaacataccaacatctgagaatccctgccctgtgctgtactgcctgcctgtgcactgaaccagggggacccagcagaagacagctaggagaaggggaagttgttccagaaggatcagaatctgtcaacacctgtttattaggaagatctagtggcgtttttgggaaccaaaggaacaatgaaggtccctgaggacacccccactataggccatgctagaggcctggtgccctgcacacatttctagctcctttcaccagttccaagaaaagacagtgttctgagagggcacgtacattcacagaagcaacaaggcagcaccagctgtggcccactggactatcttggcttcccaccctgactcaagggctgggcatccctgatggccctgtgcaccccacccccatgagtgtagcccaccctgaactggggctgagtgctgccaatgtggttggccctctgatagggtttggctgtgtccctacccaaatctcaacttgaattgtatctcccagaattcccaggtgttgtgagagggacccagcagagataattgaatcatgggggctggtctttcctgtgctattctcgtgatagtgagtaagtctcacgagaactggtgggtttatcaggggttttcgctttt

SEQ ID NO: 56809 - DNA, 623 bp, Homo sapiens
aaagaaaaaaaaattagtaattttcagcatcatcataatgtctccagtgaagctgaaaccaccacacatactgcagatggagttttgtcactgtacactgcacaatgatagggacccctggggcacctccagacagcatgaaggtgactgacctccctgtagactaacctcctagaccctgtgcatcagtgtgacgagtgcatgcatttcatgactcagttcaaacggcagctcctctttgaacaggaccctggctgctcactcatagtaatgcccttttgtgtactcccagtgcagtttatttatacatctgtttaataattaccagatgcttccagtgttccctttgcccccttggagttaaattcttcccagcccttttggagttaaatatggccacatgaatttgatgaagcaaacatgagtgaaagtgacatgctccttacgagctaaggcacagtgtactagggttcctttccctctgccacagcaaccagcaacagctgctatgtcagcctgggccctagagtgagaattatatgagtggaggccatgaacatttaggacaaggtttgttgattaaaaacactgaaagttgtcgattgttactgtagtattaactg

SEQ ID NO: 56810 - DNA, 1571 bp, Homo sapiens
ctacttgagaggctgaggtaggaggatcgctcaagcctgggggaagcagtggggaggggagttgttgcagtgagctgagattgcaccactgcacttcagcctaggtgacacagtgagaccttgcctaaaaaaaaaatgaaaagaaacggaagaattaaggagaatatatcaactgaaagcctaagcctaagaaggaataaacaccttaggaccaagaacatgccacgcatttttaatttggtaagaatccatttagaaaagacatcgtgccactgcactccagcctggcaacagagcgagaccctgtcaccaaaaaataaaataaaatataaataaaagcaattttgccttgatcttcccttaaaccaatcaaaaggtagtaagagaacaaaaacaaaatacattttccataaaattaaaaaatagttccaaacccccaaacacacaaactataaagaagagttaatgaatatgataaatatttgacctagctaagggagaaaggtgagaagagtttcaggtattatacagctctccaaaactgatgtataaatcccaagaagacatgataacagtctctcttgcttggaatggcagttctgggtctaagaatagctgaccagaacatttctaagctctgtgataccataaagtaaggagacccagggctaaatgaggagatgtgaacaaggcaggcagcataaagtgggactgaagtggcaacttcatgatgagatgatctcagctgaggtgaaatcacagctaactcactgcatgcagggttcaatacagcattacaatgcaaaaagaaaacacttcaggaaatacaacaaaaaatataagaaacaacagtgatttcaattcatctttcctgtcccacatgaaatacagttaatcctcattattcattaatcctatatttgcaaattcaccgacttgccaaaatttctctgtaaccctaaaaatcaacactcacgatacttttggcatcatttatggagacgcagagtggtaaatattttgaattgcctgacacacatattcccagctgaggctgaacaatgagccactctgccttcttgtttccacttgtgtactttaaagtgtcctttctgtgatagtcatgcattgcttaatgatggatgcctcatgagaaatgtgtcatcaggtgatttcattattgtgcaaacatcatagtgtgtacttacacaaagctaaatggtacagtctactacaaacccagactataggagatagcctattgctccttggctacaaacctgtacaacatgttactgtactgaatactgcaggcaattataacaccatagctatgtatttgggtatctaagcatatcttaatagaaaagatatagtaaaaatatggtattataatctcatgggaccaccactggatatgcagtctgacatcgatcaaaatgttgtatgtggcacatgactacatatttattgcattttctgcatttttgtacttttgctttggtaatgtggtgttttcaaatgaccccctcaacatgtttagtgttcattcctacatgcaaaaaggctgc

SEQ ID NO: 56811 - DNA, 1705 bp, Homo sapiens
atacttttttttaatgaactgagcatagaaaataatatatctccagtgtacatcctgtttcctagtttcaccaagatgattaaactcctattttcctttcccgtgctcttatgggaaattaatgtatgctaaataaatgggcagaaagggtcacatacggttctggttcaacacacaaacaactctagatgtgcagatatttttaagttgcacgcataggttactctggagaacagaggcaatcctgtatttcctattcaaaccccacgattttttttaaaggacctggctagtttggaaaagggaacgggcccgcgtttaaagcgagtgtaaataaacaaacacgtggtctgcggaggaacacctttaagcaccagcaggatgactgaaaatagccaggtttggggaagagtggctgccaccgcgagacaacccccaccacatctggagctccagattccgtcgggattccaagcctcaacacgccctcaccgcagggaacctcggaatcagaacgctgagcccgccaggacccctcccctgcccactcggcccgctcttcccgaggttccagttaactctgggcttccgcctgggaacctgcagaaacaggagacgaatgcgattcctaaattaccccactgctggactcttcgaagccccacaatcgcgacccaaggctgtcttcttttcgggaagaaagggcaggatccgtgaaaagaaaacaacacggtctgaacttgcctctgagaacccgcagggccgtaaacctgaattccgcgggagagaacggcgtccgtttctctcgcgacacttcatggataacgtagatgcttcaagtccagttcggctctcattggctaccgcacgcagtgagggggcggggaaagtagcggcgaggccccgccctcacgcaggagccaatcctgagcaggctaggagacgaacccggaagtgagatgcaaggcggcgattttcccttctgtcaggtgggttgttattccctgtcccggacctcgctttttgatggaccggcgccatctaagaactcctgagcccgtgggggtgggtagcctgtggacacaggccgagccctgcaggtcaggccgcttcgtggtccccaggtaggaccgaagccgcttctccgctcttggctgtttggaaggccgcaggcggagctcacgggcctgtgagctcccggctggtggcagagtgccggagctggatcccctctccctccctcccagtcgccagaccctctacaggtgtcgcccctaggtccttgagttcagcacatctgcactgctttgtgctgagagcagtaagatgtatagtgcagcgaaaaataatgtagaacttttgaattagaacgtctgccctttcagttccattgaagggtccttgatctagggcaagttgttttaatctatctgaacctccttcaccagtaaggtttatagccccgcctatcactgagttgtttgtaaggagttgacatagttcggatctctctcaaaataggatatgccctttaagttaggaaacataccctgacattcctgatggaatatcaggaatatcatcatcaagtcatcagttttgtttcttaactgtaagtcgggtagatgcgcctaggcttggctttttaaactaaatataccagtaaaattttgtacataattttttgtatctggatctgtaaact

SEQ ID NO: 56812 - DNA, 1949 bp, Homo sapiens
tgtctccagtgtcgcctaataaggtagaagaggccagtgcgatactgtctttacacccttaacttgggtgctagaatatttatcttcgtcatcattttatcatccaaactattttgcataactttcatgggtgcagaaaatgttttttaagtgcttggtaaaattaatagtgatattcattcattcatctcactgaacaggcaataaattccttgacgacaagggccttgggggggtcacatcttcatctttggtttatgagtcctgtgcgtcttggtacaagcaatactactatgagccggcaagtcagacttatttggtaggggaccaaaggaaagaacatgttttgattgctaagaaaacattttgttctctatcctttactgggctggcaggcaaaggaaatgttcttatgagcactcacattgaaaacttaagttcttcaccaaatgcagagactctgaaggccacgccgctgcgggctgcctccacaattcgaccgtctcggcgggccacgagatcctggccacggatgcggtggccgcgcctctgctcgcacgttcccccggcctctggactccctccctccctcaatccctccctccggcgggcgtcgctggcgggtggctaggcccaacggcaggaagccgacgctatcctccgttccgcggcgccgggtccgccttccgtctgttctagggcctgctcctgcgcggcagctgctttagaaggtctcgagcctcctgtaccttcccagggatgaaccgggccttccctctggaaggcgagggttcgggccacagtgagcgagggccagggcggtgggcgcgcgcagagggaaaccggatcagttgagagagaatcaagagtagcggatgaggcgcttgtggggcgcggcccggaagccctcgggcgcgggctgggagaaggagtgggcggaggcgccgcaggaggctcccggggcctggtcgggccggctgggccccgggcgcagtggaagaaagggacgggcggtgcccggttgggcgtcctggccagctcaccttgccctggcggctcgccccgcccggcacttgggaggagcagggcagggcccgcggcctttgcattctgggaccgcccccttccattcccgggccagcggcgagcggcagcgacggctggagccgcagctacagcatgagagccggtgccgctcctccacgcctgcggacgcgtggcgagcggaggcagcgctgcctgttcgcgccatgggggcaccgtggggctcgccgacggcggcggcgggcgggcggcgcgggtggcgccgaggccgggggctgccatggaccgtctgtgtgctggcggccgccggcttgacgtgtacggcgctgatcacctacgcttgctgggggcagctgccgccgctgccctgggcgtcgccaaccccgtcgcgaccggtgggcgtgctgctgtggtgggagcccttcggggggcgcgatagcgccccgaggccgccccctgactgccggctgcgcttcaacatcagcggctgccgcctgctcaccgaccgcgcgtcctacggagaggctcaggccgtgcttttccaccaccgcgacctcgtgaaggggccccccgactggcccccgccctggggcatccaggcgcacactgccgaggaggtggatctgcgcgtgttggactacgaggaggcagcggcggcggcagaagccctggcgacctccagccccaggcccccgggccagcgctgggtttggatgaacttcgagtcgccctcgcactccccggggctgcgaagcctggcaagtaacctcttcaactggacgctctcctaccgggcggactcggacgtctttgtgccttatggctacctctaccccagaagccaccccggcgacccgccctcaggcctggccccgccactgtccaggaaacaggggctggtggca

SEQ ID NO: 56813 - DNA, 1092 bp, Homo sapiens
cagtgtgccagcagtgatgccaccgttagggcaatttctcaagcaccttctcctacatgaacaataatgtgcaatgcagcccattacagccactcagtggcacagactgttaatatccagtattgtcctaagttgagacaaataatacggggattattgctgtctcactggtagcagggagggtacccttttccttttcttctttttctgtgtcttttcccagacttaaaagttcatttagcaaacttagttaagtttggcttaataaactgaagaatttgtttttctcctagccgattgatttaggaaagaagatcactgtctgctttctgccctggctccaccctcagcccatttctttcccccacacctacatggttgtagctcagctcttcagtgttctgcagactggtctaaggatcacatactccagcgtcttcttaggggtggaatggagctccataaaaggcatattccctggaccttcactgaatctagttagtaaacagaagttcacagataggcctgaaaattcacatttttaggatacactgaagcttgagaaccactgttttacatgctgctagtgtggatcattaagatgatctgttagaaaccttacaggcaagttctttgttcaacagtgacctctggaaggcatgaagatggggaagtttggggatttcctgagtcgtatgagcacatcaggaacttcccccacccagatgtcctaattcctaattccagtcagatgtcttgtccagcaccttttggtcatatctgagcctcagcttactgcatatcagctcttcagaagccagtcttgcatgctgacatttggaagatgctttcagtgagaaagttctttcacttgtcttttatcttactttaccctcactagagcaacccgaggcaagtgctattaaaatccttatttttaagagaaaggggcttaggctcagtgacatttggcagccaaaatcacagttgaaacgcgtttcctgacttgaaacccccatgtaggtcaaattcctaaggtgaccaggattacttgctgaagacacagtcttggtcatttggcagtacctgggg

SEQ ID NO: 56814 - DNA, 1124 bp, Homo sapiens
tctttccagtaccagttgggatataaatctttaataagtccatatattgtcttctcaactgtttttccttctttcagatcagtttttcatatcagttatttacttaataggaaatggatattaaaaaacagaagttgcatgtcctgacttttacttgattttatgctttaaaatttaatatgaaaatagatctcaaataagcttttctgattctgttactgtagcatactattagtcattcagagagttttctgataagactaaggtcaaccatttattcttagaatgtttattgagtactaatatgtgtagatactatgccagttgctgggaatgagaaagataaataaatagtttttcattgagtaagagatacatatacaatcacactgaaaataaatactgttttgctttagaaaagccataaagttggtcatgcctcattttactgaaactgatatgcttagaaaagaggaacagatacttttctttgttataatggagttattctttaaacacatagttactaattaattgcatcagcagcacaagtattaatcccaaagtctcatttaacaccattgtttagaactctcctcttatcaaatctgttaataaatagcctggattgagtttcacccgctctactttctctaaacccatgagctaataaagcaggaaatgattatgaaagaagccacagtccgcagatcctgggctgacatcacaggctctttctcatgtgaattctggaacaagcccattgctatgttctgtccttggcctgttttatttgaaagctcgtattttatttcaaccttcttttttccatgaagtatccatttacctgttagatttatatgcatagcttctgtcttctaaaacattcacctgatgattttaggagtggactgtaagtgcagcagagtcagagtgcgagagtttgaattggatgagtcaggaccatctagttgctgagacggttcggccagccagtcacataggtctgttagtatctgcagtcatggggttgatggtcctgtcacctgctgggcgagttttaaaaagccgctgggcattgggacagttcacttatatacacataaaagaggctgattctacat

SEQ ID NO: 56815 - DNA, 3103 bp, Homo sapiens
agaaactcaggaaggagatgaggacattcccatcttatggtcgtttggtatcaataattagtcacttaccactagctatggccttgtgggaaatgggtagataacaaacctagtgagaagtttcaaattaccagttggaagccattgctgaaaaacaggattttttcttttaatggaattttcttttgagcaaggatgttaatttttaaaaaagtactatgattctttccccagagtaaaataagttactttagctgaaaagagccttaaacttggtgcccatgcagaggaatcagtgcagagagggaaaacagcctgggcccgtcctgctgaatgttcccatggatgttgtgtgtgcggtatcagtgttactgtagtactatctcatgttcagtgactgaaggactgaacacagtgtcacatttaattggaacaggaagcacactccagtttgtgtgtgaagcagataaactggagctgaaaggccagtgcttggcagaagaccagaccccattgccccagctccacactgtaacattagactccagaagtctttgagtggggcagagagcacattctcttgctaacacatggtgtggcagaatgaccactcctttctgtatcttttatgtattttgaaagacagctgctcttcctgttttgctttccttcagtggcctccctgcttccctcctttctgtcctcaaccttgaccattcagaactttgtgacacattcagtcccgcagaggacttgactttcgctggtgctgctgcaacccttggaaccgggttgtgtgagaacattagagcatttgcgccttcactcagtgtgtcttgaggactgttatgttgacctcacgggtcattttggtgggtggctggacttgtgataattctgaatagtaactttggaattttatgaatcaaaaagaaagagctccctctgccaagttgaaacactgtgggagaatgcctggtgggttcttgtgagtcacacaggaaggaaggaggacttgatgggcactcatattcacttcgctttctttcccccagggtccccttctgcttgttatagccccagtagtcctgtccaggttctagaagactccacctacttttccccagactttcagctctattctgggaggcatgaaacatctgctttgacggtggaggcaaccagtagcatcagggaaaaagttggtaagtccttttaccggcacttgtgttggaaaagcaaaatgatcttacgtttctcatctttagctcttttgcataattcagatgtttattctctaatcttgttttttaaatcatcatattggattattgattgtctgttcatagatgccttatttttaatcatgttttgctatggtgttaatagactgctttactctaatatgtgactctgtctgagagcatcatacctaaacatgtaggaacttcagaattataccacttattttcagtttttctctgattcctaaatacttttttctcccctttctcagaatctcatttcttttttccttctctgcttttgtttttatctctttttgcaaataatttagaagttaaaagaagtaattcagaactatagcaaggaaggagctgtctcctttgtaaaaacttcctatctctttttgagggcttttgagactggttaaactgtgagggaatctttaaaccactttagggaaggatgtcatggttcttgctaaatatgcttataactcatctctctcttacttcagtgaaaggggaattcaatagttttcatgcttgttgagatctattcctttattattcatccaaatacatcattctcctttggaaatatattttgatttgaagttgtattcattttattttaaaatgttttaaaatttttttatttgaatgtgcttgttccattaagtctttcagatcagttaccctgaggggaggactgtgtcctctttactttcgtaaccccagcacctgtcccaatgcctgaactataacacgttttcagtaaatatggtagagtgaaagagcagaccagtccaacccacattgatctgtctttccttgggtagttaatggtttattacaaatatttggcaattcatgttgtgtagagttttaatagtttgtttttattgtttaaaatttttttgctgttgaactttgggtttatatctcagttacaatattgattctttgacggtaagggataaatttcagtttatttcacatacattcctatgaggcagatatgaaagtttctccatttttcagaggagagaggttcagagaagccacagaggtgagattttgggggtaagggtgacagggagagccttatgatcaaagttgagcttcaggaaccagtgtgtaaactcccttcatttcctcaacaatcatgtcctgaacgccttctgtgtatcaggacagggttcaaggcactggggaggcaacacataaatataacaaacagaactctctgctcccgggagtttgaatctggcagaggaagacaggtcataatgcaatatggattgaaaggagaaggagccaggggcaagagatattgagaggccattcagcatgtctaaatggctggcaaggagagttggaacccgtagagtggctgagggcacggaagaacggatgggatgggggagcttgttggtgtagaaactagggcttggttgtgatttgtaactgttataaatgtgaaatttcttaatgaaaattagggggccatcacggagttacagtattttgctattgcaaggacagtaacaatgtcatctgctgtcacctttttttcatattttaataccaaaaatgtaggagggatgtgatccttgacagttcttgccccaaaaagggcagttatgaaccttctaatggcatatgtctatttacatacacatatagatgtattaatatacatatatgtatatatcttgtatataagcatatcacaccacctttgtttttttctcatttcactgtagactgagaaaaacgagcgtggcagttgattaaatgtggagagcaaaggataaaaaggtcagaagtgaatatgacacttctatctggatgactca

SEQ ID NO: 56816 - DNA, 1595 bp, Homo sapiens
tgaaataactgggatcaacgttccccaggcaaggtaaagaactggagagctcagtgcaattctttattccataagtgacttcaccttgcaaccatccgcagttttcagaaaggaatgttatcagtgggcacacctaaaccatccctcccctctctcgctacacacccactgcataacctgccatctctttagacacaaagcatttctgcatcttggtgaatttgtgccccttccacactgaagtgcgtgtgaatatacatgtcgtcccatgtgtacaaggaagtccaactccaccacaagagtgaaattcacaatgccctgctttcaccccaggtcacaggagcttcgatcaggaatggacccaaaacactacacatctgtcactgagtcagtgcttcctgcaggctggctaaatcctacaataatacatttttcagggaaaagaggttctcttggtaagagccaaaatgccacagattacaccactgcttttgaatgaaagggcagaaacccattcccacctcctgagtattccctttcacacttcacttaatgtgaagaggaaacgcagctgtctcctacaggctgaggggcacagatgagtctacaactccctccccttctactcaggtagcttcgggtggggcttctatcttttaacatttatttaactctgggatttggaagtcacttatggtcaatgggagcttatcttctccatcatctttttatgtcaggtagcaattacaaggaaaaccaaggagagaggctgaaatcaggtgatagtgctttcttgatgccagcatacgtcatcagtgatggtgactagttacctgaatgacagtgcagaaaaggcaggtttgccaagcttaagggacaggaaagaatgggctttttcaaaatgggaaattttctatcaaacagagagcactggcctcacaaataactcagttacgcattcatgctaataaataccacattacgatggacaatgtgcaggcaggagagaaacttctattccttggctccactgctcagccagctggggtgagtgagctcaaaggtctgtacaagcagatctgagcttagtgtaaacgagggagaaggagtgtcagaagggaacaggacaatttcacagaaaatcataccagtgctatgaaacagcctatcctcggcttgcaaagataatgttattgatgggcccctattacgataaacacgtgcaagtaatggggacacaaagaaaaggggaaaagagaggatgggagcccacacttactgataaactacttgtgactataactccatgttctaattgtctatttgtgagcctgtttccctattagattgtgaaatcagagaggaagcttactagacatcctgtatctccgtttcatgggactataatgccacttattcagttgtcagagtctgatacatagtaagcactgcataaatgttagatattctcaccatgattataattattatcattgtatcccacaccccctaatacagagcttagcactgggcattcatgagaagcctggtaaattttttctattacagcaaacatttattgaacactttttaca

SEQ ID NO: 56817 - DNA, 676 bp, Homo sapiens
tttgcctgggattcctttgtggtctcagatgattggcccatgttccagattcacataaaaggctatagcggcactttgaattacttgcttttgtaacaaaatttatcttatatctcttcctgtgggtgcaatagatctcaccttggtttcatttgaaaggtgagttgtctttactacttgcatttaagatcgtgacacattccttctggatgaccgcatgcctaggtatagttagtgtctttggcaggtatgttagcaatgccagtgttgtacactctgtggatactttgccttcttgtcaagggacataatttgattacttagttcaggtcaaaatggaaaagccagttcagtttcacctgatgggcattgttctggcctcccagccaaggctggtgtggaataatggagtaatagggtttagtgctgtgtgaactcagaaatgttcttcagaaagactttaaccttctggctcaaagctgaaacatcaattatcaagcaaagaggcccttccagcttgacaaggaattatttgttctgtgcaaatatgctccacttgtgttctgaaggcaaacacaagagaccagaggcatttttcaactgcttaaaggatctcagtgtcgatatgtaatgtaattgaatctaggcagagcatttgaagcaggtttggtaatgg

SEQ ID NO: 56818 - DNA, 687 bp, Homo sapiens
tatgttgtaaagctcttggaacagtagctgggacatggtaagtccccaggaatatatgttagctcttgttgttatttatcaagtatagtactatgtgccaagtcctgtggtaggcattttatgggtacttattttaatcctcacccgcagttctgcaaaatagatcttgtgagcttcatttgaggagatggagtctcagagaggtaaagtcatgtgtccaaggtgagctgctatgtgaaggtgccaaagtcaaaccaggtcggcctggccacacagcctgtgccatcactgtggtttcaagagtaaacagtgtatgagcagacatccttctatgtaaatgggaccagagccatcaagctaaacagctccctgcgccacacagttcagggtagttcatatccactgagtaaacagaccattctgggcaagaattcccttgtgtcaacttgcctgttctaggaattctcagtatatatattggagccctaccaaaaattcatcacgagacttgtctttcttgagatccatcctaagaggcttagctaataaactgaagggccttcttatgaggtggtttcaccatgggactctcccttgttatctcccgaaggatgacttctttgagtgagtctgatacacttcatggtccccatgtctccaagagttggggagcatagctagcccacc

SEQ ID NO: 56819 - DNA, 2612 bp, Homo sapiens
ctgaggtccagatgtgctgaatttattgacctattaaattttaattgacatttattttgtagtcttgtattgggaaattcttctgttttctatatatttttggttgttgcaggttatatgatcaaaattgttgtttgttgtgcaaattattatagcattactagttttgttctctgcactattgatttctgagaaaacggtgttacggggaaaaaacaaacttccatcatgagtgcagatttttcagttttaccttataactctcagtcttggctatgtgtcactgttatgtgtttaggtgcgttaagttcatcactgtaatgttttcctagtgaattttcttttcaataactatgaaatgtgctcctttgatcctatcaatacactggatattaatattgttgccctaggtttcttttgtttaatatttgtctggattgcctgttcccataaattgacctttaatcagttagctttgttcttaagattggtttaaaacgtagaataatagggaggagcatgggagggtgggacgtctaatgtaaatccagcccagtgattacattagctgggcgctgattaggttaggatgttgcccaggtacaaggccaggatcttcggggcctggcttcatttggagttcagctaccaaaaggaaaccttcctctgggtcctggagtatttggcctgaaattgggaactcggaagttgctgctccagggcgctccctgcggagctccgccgcccgcctctccgcccggcctttcccggcgtccccacgcggggcgcaaccgcgagaaagaaacgcaggtcgcaccgtcagcgcccagagcagcgccagtttccgggcccgggctgctctcggagccatgagctgcggccgcccccctcccgacgtggacggcatgatcaccctcaaggtggacaacctgacctaccgcacctctcccgacagcttgaggcgcgtgttcgagaagtacgggcgcgtgggcgacgtgtacatcccgcgggagccccacaccaaggcgccccggggcttcgctttcgtccgctttcacgaccggcgcgacgcccaagacgccgaggccgccatggacggggcggagctggacggacgcgagctgcgggtgcaggtggcgcgctatggccgccgggacctgccccgcagccgccagggagagccacgcggcaggtccagaggcggcggctacggacggcggagccgcagctacgggcggcggagccgcagccccaggcggcgacaccgcagccgatcccggggtcccagctgctccaggtcccgcagccgatctcgctataggggttctcgctatagccggtctccctacagccgatctccttacagccggtcgcgctacagcgctctccctacagcagatctcgctacagggaatctcgctacggcggatctcactacagctcatctggttacagtaactctcgctacagccgatatcacagcagccggtctcactcgaagtctgggtcctccactagctctcgctctgcatcaacctccaaatcgagctctgcgcgacgatccaagtcctcctcggtctccaggtctcgctcgcggtccaggtcttcatctatgaccaggagtcctccccgggtatccaagaggaaatccaagtcaaggtcgcgatccaagaggccccccaagtctcctgaagaggaaggacagatgtcctcttaagaaaatgatgcatcaggaagcaacgtgatggaggacttgggggaaaaggatcacatactcagtctatggaagcaacgtccctggaagaagaggctgcctattgaaaaggttgtgtcacacttttctacctttttgccagtttgaagctttgcatcaggtggcaaaattcattctatgtgccgttttgttgttattcacattttattgtaacttaggaggtgaacgacctaagattacgttattgggtttggatatttgaggcaaaaatttatttttatttctatagtgatgactgttttggtttgaaatgaacagattggtaacctaatttgtggcctcctgacttttaaggaaacgtgtgcagccattacacacagcctaacgctgtcaagacatgcttcaacattgccttcattccttaaaaacctacaaaaggtggtgtaaattaatatggataattttatttacctccaggtctaaaaggtagtgtgacccaaatttgtataaagatttttcatgtgaaaggactggggttttagcaaacacaggtctaatctcttttgtgtttttgtgcaccaggcccggctgcgtagcagttgagtgatgctggttagctattaaggtggcctgttgcagtgcagagtgctgagctgcttcctgttttcttctgattgctcctggggaaaacacgccttgtcctgaagaacaaatggctgtccagtttattaaaatgcctgtcaactgcacttccagtcacccaggccttgcagataaataatggagcatgcagtgagcacatctagctgacgataatcacaccttttcccccgtcttttctgaaaaattgtaaatctgatcatatcaacatgtatgaacttaaaatatggagaatgtt

SEQ ID NO: 56820 - DNA, 1393 bp, Homo sapiens
tctgcctagtttaggaacttcctttaacagtatttctttactctctgagtttctggtgagctaaaaaaacataacaaaaaacaaaaaactccatcaaaattgtatgcgtgtgctggtcgttgagtacttcggtggagagtgggagacgcatcttcatgaaatttcagaggggaactctgcccatccactccgaaccagccgcagctccacgagcatctcacgccacccctctgcatcaccagggcggccgtggggcgcgcgcgatcagcaggcttcttggcgcccagtccatgcgactatctcttcccagccccgggactaggcccgccccactcggattctccactcttggtagcgcgcgtcccccggactgctgagaccaggcggcgcggaggcaggtgacccgcgtctccagtcccgggcgcagcccagggtacgttgtcagcatcgcggagcgcggccctgggcctctgcagccatcttcagggagggaggcgcggcctcccgacgcggacccgcccccgccgcccgggccgccccgcccggctccgcagagcgccgcgcctaggttgcgacttcccttccctaccctgctcggctgcgtagtgcgctccccgcccagcctgcagagctcgcgccgcggcagcccagccgctcggccccgccgcgctcgcagaggccgccatgggcaccgcgcgctggctcgcgctgggcagcctcttcgccctggctgggctgctggaaggccggctcgtgggcgaggaggaagccggctttggcgaatgtgacaagttcttctacgccgggaccccgcctgcggggctggcggccgattcccacgtgaagatctgtcagcgcgcggagggtgctgagcgcttcgccaccctctacagcacccgggaccgcatccccgtgtactccgcgttccgcgccccgcgccctgcgcccggcggcgccgagcagcgatggctggtggagccgcaggtaagcgaagtggttcccgagccgggctgcgggcgccggagaccgtgccgctggacatgcccccagttgcagctaccgcgaggggcgggccgggaacagcaatccctacgccttcggtgccttgggccaagaaacccgggttccaggtccaccctgttgcgtccccggagttagcctgcctcgcccctgtcgagctacaataagagcctggcgatctgcgagccttcacttcatgagctgcagggcgggaggtcccctgtgggaggaggttctccctgcatttctgagcagacatccgcagtgtttcattcctgaatggtgaagagcttgatacagagaccctggagaccgttcagatccgcagaaagcctaggctgggcgctcacaggccttcgtgcaacttattgcc

SEQ ID NO: 56821 - DNA, 2166 bp, Homo sapiens
gggggctaggtgacagcatcgccctttcctctccggctattgcgcaccttctggagcctcgctcagcctgctccctccggcgtaatacgccaatgctgctacccacaacgcacagaccagaaaccaggatagacagaagcctagaatggcctggcatcgagcaggcccagcgcaaacgcaaggtctcttcctctcctttcggtgaaccccacgcccagtcccgagagagagagcggatgctcatttccgaaagctggcaatcctgcagtggccactggaaaaatacatatacgtgtgtgtgtgtgtgtgtgtgtgtgtgtgtgtgtgtgtgcgcgcgcgcgcacacagtgcatatcgtgcccatctacaaggaaacctggaggctccacaaacaactttgagtcccgggagggcggaggtggagagagattctccgcttggataagggcggctggatagccgagtactctcttttggggctgttggccgtctccggagtctcgggagcgccttgatgtcccttcccagggctcgggttcctttgagagaatcaagaggaaggtgtttttcactaggactcgcggtgggccccacctgcctaccgtggccggccgggagctattacagcagggtctgcccgtccgacgacggcggctccaatctggggtcccgccggcgccgacccctcagctctctcccgatacctgctggcctctctcatctttggtggcactcgccgccacggggacggtgagatcaaagaggtagacctaggccaggagggactgccagggctccttcccgcgggccagcctctcgtccttcctcccgggacggggctctttccctttctccggatgcgggcctttgagagtcagcgacgccttagactcctcccagaaaaatgcaccctcatctacccaattctgccctaccctttggagctcctggaccctctaaccgctcggtggggtcagagcccacccccggaagggccgctggtcggggactggttcgccctctcctggcctcctcggaccagtgcgcggggaggatcccgctaacgccgggcgcctgcagaccttgagcggcctcgccctggtgacctccccgggaaaggctgggcggtgcttccacaatgagggccacctgttaatttgcacgagaaagtgctgccgagggcccacacgtgcgaatccacctgtggagtgcgtcccctctctggggccaaggcctaggggaggccgaagcggagaagttgcctgaagactgggaagtaagagtaggggcgtcggaggaatcgaagttgcagtgacatcaggctcggacagccggcggactcctcgcaaggtgatcggatacttccgagagccccacagtcctcctgggcctttgccctcgcgtctgggatgcgctcgggcgcccccagtctgcgatgcgttcgtacctccagtagggtgacgttttcgccgggcccctctgcgaacagtctccgccctcctccactgtgagatatttcacagtttcacccgcagagggcaaccttattccaagttcccgagcgccctaggcctctttctcctccctgcctaactggtgaggtgggacttcaatgccttttaggtttacagtcttttcctccccacggcttctctttcctccccgtctcaggcactgggcatttccagtcgatccagcaggtctggcttctctcacatatgcagtaagggttaggggagaaggtcccagctcctcttgtctctagcagagtgtaaactggctctgctgaggaggtggctgtgcttttattccttctcctgagaactgtttatatattaaggagcttcacagcctccaacataaggaaagcaggtaggaactgatcatataacgctttgtaaatgttttagactttggctttaatgggaaagaaatggggagccattcgtgggtttttgagcagcaggtggacattgcttttcataatgaccacgccagctgctgtttggagaatagactgtaggggtcactgcgcaaattggaggccgcgatccaggtgagaaccaggtgaaacagagctcgggccatggagtggcgctggaggtaaggagaaacactcagactctgggtatgttttttgaaagtaggataaaaggccgggcgcgg

SEQ ID NO: 56822 - DNA, 3371 bp, Homo sapiens
tgaacaaacagaagcatctcacctaacgtttccacttaataaaatgtaaaaatagagtttgaatacgaataaactgattataatattactttggggcagctgttaaaatctgatcaaaaagtctagagacctttttttcattcccttccccatccctctcgcccttccccgcggggcgattaagccaagtaagctaaacaatactggagtaaactttctatcagtcactctaggaagcagcaataaactgatggtgcgcctcatttttctggatcaacacgggggcaggggggtgctaaggaggaataacccacatccacctcagtcttctcctcccccaaccccagcctcaggaactggccaggtcgaattgcatttcccatgggcataaagttcaagatgctttactggttcctttcgagactgaactacagacacaggactaccatccaaacaatttgaaaacgggggttgttgagcaaggcgcgcaaggcagaagcaaccgaataaacaaaaacaacactcgcaagagttagccacagcaaagaggggccaggttcctcgggatccgacccagctgctctgatttcacaccgacctccatcaacagctaaactgcacagggaggaggatcgaacggatccctcccgccctccgcccaaggagccgacccggggtagcaaggtagggaaatgagccgtaaaggagagcaaaggcaccaaataaaaggaacaagggaagaaaaaatatcccaacccctccagacttgggtctgtcccggcggaaataaaaagccgcagtagtccaaaccctcctgccctcaacccacgccccctttctcagtccctgcggagggacggtgcccggggatccctctcagcctcccccagtgcgcgcccggggacgagccgcccgagccccggccggcaggaagcgaccctcgccggcaggaccccgggccgaacccgtaccttccgcagcactttccggcagttggtacagagcaggtagttggcggcggccgacgggctgccgccgccccggttcatcgtggctgcgggcgccgaggcgagagcgggcggagggccgggtccgggctgtcactgcggccactgcagggccggtccgtccccccgccgccagccgcgattccgcctcagcctcctcaaggcgggatgtcgggaggagaggcgactgcctgaaagctagcggcactgccagaggcgaccaccgcggcagctgccccagcgacggcggagacggcggcggctgctcctcaccggcccgttgttccacccgcccccatcttccagacccccgcccccgccaggctaggacgagcagccgccaccgctgccaccgccaccaccgccgccgcagcgcctcagtgcggccccgcctccgccgccccaccaccttcaccacctccacgctccggtaccgcccctcccgccaatcggacagctccggctacgcccccagggcgctagcccgcagccaatgagcaacgagagcccgactgggagtcgcgccggccaatcgcaggggccgaggaagccttgaatctccgggcaagttaagtttatctccgaggctcggaactgaagggaggtggcggttagctaagtagtagggtagcagggaacagtttgctctcctctgccaataagaggacgagggtgtgtcatatgcaaatatactgccctccaagccccacccccaagataagctacgcccccttctctaggtccctgcagaagtggtgaggagaatgagataaatagttgggagctagagctcgctagagagtctaagattgagctaaatatttcctgatctctcgagaaagggggaggggagtgggaggattaaatgttccttccttcagggcagtggttaggctttctctccaccaaaatctaactttagctgtaaagaagactgcagttatgtagtactttgtatccagggatctcaaagaactttacgcatcatttattgtgaaccttgttttgcaaagatttcagttacttgaggcttgggaggcggataggggataaatgtctgagttatatatatatttacgcaagtaatcgagtttgaggggagagacacaaaacctctggtttagcggtttcctcttgtttgtgaagcaccttctagcagttatcttagagatgtaagttcatttacttgtccagcactaaaaggccaaaggggcttgttttctcacccaaaagaccttcctgaggcagctgttcggatacatgcagagcacagcgccctgctcagaaaggaaggttcagagaacaaattgtcgtttaaaactattgggacaaacctacctcttctaaagcttaaaatggtaagtcagggttttagcgtccacgttctgcggagagaaggcagacttgactggggaaagcgcaggctgaccgagtgtggcgggacagacgggtaggggagccaggtctcccgaaggggctagcaatgcgcgtccgagtcgaatgcgggttcccgatgctagacgcccgcaacctgctcccgagtgagaacaaaggccggcgcagagcgagaacctgattggtgcccggtcctcactcgtgtcctccgggccccagagataacttgcatcgcctactggcaaggagctctgtgctcactggagcccagctccccacccggccatggccgtggccacaggactgtgcattatgacatcacctgttttcgatttttagaacctaatcagtattctcggcttctccctttttaaaggtctccagcgtaccaggatttgtgaaggcctgaagttcgtagaatgaaatctatgtggagatgatttaaaagaacggtttcactggtttgcatttctttcttttctttttaattaaaaaaaaacaacaaccctggtttccttagggattcagggtggtgttatgcaaaatcggaaaggtacacttggaggagctagcaagtttagcatatcaaagctattagaccaatttgtgcggttaaaactgccattctcatttctcaacagctgtctcctctctgtccctttttagagaccaacacatataaaccaagtctacacaagaaacaaaggtaatggaaatctgctagtatcaggtttaaatagatcaaaatagagtagaaaaccccaaaagggtctaagttatgtagttgggtaaaggtgttgatctatttagccagtgttagctaaaggtcgcttgatgctgtgtagacatacataactaaagagcaatgaatggtgtggggaaggtgcttaagattcagttagaagaaactgtaaaagcaagtaaattcagaaaaggagggaattaccacatgcccttcgatgcagagaa

SEQ ID NO: 56823 - DNA, 788 bp, Homo sapiens
aagctgcaaggaggtatttgaattgagctaaaacagataagaagaatattgagaagtagagatgatgtgagtagggagggagggtagggaatggagatggtattcctggaagtaaacattatgagcaaaagtacagaagcaggaaggagccaggtatgtttggagacaaggagaagtacaattttactaataaatagaatactgaagggaacttaaggacaaggactgtgtttccagaacactttgtacagagcccagaacctcatccaaggttcagtaaattagctatgagtcactgaaatggagtgctcttgaaatgagcatccagaagcccagggagaagattgcttagccacagaaaagaaaggtctccggcatggggatcgctacaaacaaaagaagaagcatgggactgattatcatgttgcttccaaacccacccaccagtagcgtctgggaggatttcaccacattctaggaaattaggactttggaaccctgggtttattggcttgagacccgcctgtctctgcattttgactctaaataaaaagtactggtgcttctattacaaaattcatttgtttataagagcatgcagttctaaagaacatctgtataacgcagagctgtgtctaacaggtgacattcagcctcttaatcttggtagttagagcatagaacaaaatacagtctaaatcttgcaaagaatactcaactgagctgcagtggagaaactttggatcgtcttcaagtgtctaagatttctatgtgacaagatcaacccc

SEQ ID NO: 56824 - DNA, 838 bp, Homo sapiens
gactccgaggtacatccaggaatggcaatctgttcatcatactcctgtctaaatggcttccctttgctcttagaagagaagtgaatatctttaacgcgacacaaggccctgcacaatctggaccctgtcctctccatcactgggctgaagccacattggctttctctcagcttctgggacatgccagcatcatgcttcatgctgtacccatcctcaagtttgcacaagcttttctctcttcctgcatgtttattgtcctcctctcctcaccccaccaaaaaacaaaacaaaacaaaacaaaatcatctccattcctccctgaaaaaaggatgttagcaatgttgagtgcaggcaccatgttgttcttgttcacactctgtccccatacctagaatagtacctggcatgtagtcagtgctcaatcgatatttgttgaatgaatgaatggagccagattgtttcaaacagtcacagtttcattgcataatattgttggacaattgcttaatctgttggacaaactgtataaacacaaaggctggttacatagcatacttctacaatacattgcaaactagatgtcaatcaatcaatgacttgtacctatagaatgccaagtgccatgcttggtgctgtcaacttgacagttgaacagttctctgagttcaaattctccaaaggaaagccttaatggtgtaggggttggggaagacagtctaacgagtgccctatgcctttcccacacaagagagagatagagaggaattgaaatgacagtggtatagtttcaaattcaggcagtgaaccagctcacagggatggaatatcttggattcaa

SEQ ID NO: 56825 - DNA, 1018 bp, Homo sapiens
atgcatataagggagaaacatctaaggctatttcaagattcaaaataactgttccagagaccctgggcaaaagcagtgaaaaatcaaagcagctaaatcccccctcaatcccaaaccaagtgtttactccttagcaaaacaaagctgctgaaagagaatcagcagaacaaaagcagagacttggaaagtaactttgagagatattgcagagaattgtaaagaaactgtcctttctaatcccagagttgctgaaactacagaaaagctagtagaaattaaccgtttgtgtcacaggcggagcaccatatgctgctccccttccctggagaaagaacagccagcaattgcttccccatccccagcaaggctgctgagctcagcctgcactcacttgggctctctaatgaaatgcaattgaacaagccaggccccagcatacttaacctttggaccacggatgcctacgtttctctggagaaacagccagttgtgcttgtcttagtgactgtgatgcaaccactgaagggaaaagaaggcttatacccactacgattttgcaatggctccaacaaagagcttaaagtatttcagatgcattcagaaattaaactctgctggtcctcctgagccagcatctcttctgaatgccagagggactgacaatgacaaaacccagactcaactgctgatgcaggcgtggtggtatttgggttgtctagtcatgacaaggcataaacaaatctctttgccactgtttgcatgtgaaaaaatggcatctcatcagaccactttctacccagctccattggcaagctacctcaataccaaccccccgacccccggagtggatctttgggaaactggccttgaatatagaacatggaattttttaagagaataaatgtgctcattctctctctggttatacaaatatttctagtcaaaggttgactgacagtaagggattcaggacagttggacaagaggttggctcctgctgacatcaatgaaaaggggc

SEQ ID NO: 56826 - DNA, 2411 bp, Homo sapiens
tctcttgcttgttctctttgaatcttttctctggcctctttacctcacatgcttcccctatgtgcagtttctctttaggctgtagaacacacacacacacacacacaaacacacacacacacacacacacacacacacactctctcacgtaaaccccttcttagactccctgagagcttagcagaaaacaagtccttgcttgtggggagcttaggaaggccagcccaggaaagcaaggctccggtggctgctcgccacgggctttctctttcgtatcctgccagatggtttccaaccccctttcagttccagaacggcctaaagcccagggcgggcaggctgcctccccggagtgacatctgtgtttctaggaaggcagtcttctggttctctaagacactctctactcttcctgctttggcctaaaagcctgcactgggggaaccttgcctttagctgaggtgataatcctctttaaaatgcaaatccccctgggagaggggacaagttgtagctcatacatcctttgcactagacagggagcgaatttctgtaacctgggagagtaccaattcacttggatcctgtgggcccataatatggagggactaaactcttagcacagggttgataggaattccagtgatgattgatgaaatgaattgaggtgccctggagagaggccatgcagggtagatctgagactgttctaatactcctatggtggctctggtctgcctaactattgtagtatagtagctgtttttactagactgtcttcctacagaatagtaggcagagattgtgtttgtcatgactgtattctcagtgctgagcgtggtgtgtctcaaacacagtaggcccttaaagactgtttgaagaacaaatgaaggaatgaatggtatgtcgggtgaagcctccttcatcaagaacaaattctaacaacttctcagcatgtttatcaaacctggccactctggaacagtgacattggctgtcacctatgtccaaacttgcagggatttctgaatctgcctttgcacaataggcactggggctcttcacatccctctgggggctgtgccagggcagctgctttcccacccagctcactccccagttgagtctctgcttttttttttttttccaaacctttccacctggctcagagccaaggaggcctctaagtcacactcagaatttccatgacagtaaatagactaaacgaaggcctttccagcccctgaaagaggcctcttccaattccgccctgtctggcagcatttttgttccccccattttgatacaggcctgtggaaggtcaatgactcctttaaaaataaggaaaacatggacaagcgcccagttcctaacctgctgacagtgcagttctctgcagccagcccacagttctctgctgaagccttcacagtgatttttcacaaaggtctgcaatctattatgctacagttgactgccacattcaaatgtaaaaacagatccttggatcaacaccctataaaaagccaagaaaaatgtggtagtgttcttttctggccggagccaagaactttctgagggaggaatcctttgcaagccagcagctctgtacctgtgtggtttcactgtaacttgatcaattcagaatcccggcaaactgtagaggttgcaggcattagcccacccattgggttgaaaaggatctaaagatgctgaagggactaatcactaaattattttcaccaactcagagctcttggaaagatccctcgaggtctttaattttatccagcttcctcgctgttttcagtctggcctaagtcattctggaagatggcactttaaaacctctgctcaaaacatgctccctagctaaaatacagccactttcttaaaataaaacaacatgcctgcagcccagagatcctggctgagcccaaacaaaaacaaagtttcctgcctgggaaggaatgtccaagggacattgcttaccactggcgcataaaatccacacaggaaaaatgttagttaagaaagatcaattggaatgtttgaaggtgtggaaaaaagatacccatattctccttcctgtcagcttgtcacctttctcctgttgtcccctatcccctaagcgtgtcttaaggcagtgaggagtgcagtgtcaggagtagttggataactagtttcaaactgttttgctggactgtaactactggtggtatgccacactgacattagccccacaaactcatcccctccccacaggactgccaaattgctgctcatattctgtctgcttcatttgttcacctattggcaattaccttgctgagatcattgttttcctcttctgtatttttagctccttatgaaacttgtaacaggatgactatctcatatctagtctttgc

SEQ ID NO: 56827 - DNA, 1562 bp, Homo sapiens
ctttgtgtcctaccactttacaaaatgtaagtttctggtgtttttaaagttgtgtcatgcgccagttcctctcttctaaattgctctgggacacagtagggactcaactgatattttgttgaggggatgagtggaatcctcatgcatctaataatttttaaaagatcagaagctttaggtgaaaatgtaagcaaagtaaatagatcagaaaagttacataagtatgttataagggactgggtaaaatgtcagcacttgggaagtttcagcagctgttgggaaatgcagccagaaaagccatattgggttcccaggagaagaagaaaggccactcccttgccacagcactaagcacctgttttagtaatcagtgttggcctggggctttgcagctaacttttagccctgaaagcacccattggtttgcgaggacttaggtggtttggccagacccaggattaaagcatctcatttattttagtcaatgtttgcctattccaaagggcacttgtccacaggtatctgtactttttgctgtattctctctttgtaagctgtagctcatcatcctctgggaacctccatacccggtatagagttttagtgtatgtacactggatgcagacacattattatatttaatccacattacacccctgtcttccttattttacagctaaaggatcagagaggttactagacttggccaaggtcacacagctaggaggtgacatagctgaaattccaacccaggattcttggcttaagcacagtatttttgtctgttgcatggtgacagatgcaggcttcattctaccttcactgccagggcagcggggcctttcctgcttctgtactttggcgtcagattgactggctgggcatcaaattccagctccactacttcttgctatgtgacccgaggcaacttgcttaatttttcccaacctccatttccttctctgttgattaggctcatgattccttttcacaggattttccttcccttacataaagctgaaggctgcctgtgttggaaaaagactgagttaagatattatgtgcaagtttgtacaaggcagcctcttctcaattgtggcagcactgtgcttgctctaagccctggatttgagagagagagaagcaaagctcttggagggagaagttaaagccccagttggttaatttccagcagtaaagccaagtctccctgagcccctttcctgtctaggaaaaggcgatcctaacacctttcctaggggtgctttgggtattcactgagattgtgcatataaaagccctctgtggattttaaataatcatatagatgttcattctcattatcagaataatctcattatttccaaatcaggcctctcagcttagacttttctaagtccacatgaggtctccattttctcctctactaggagcagcagattaccaaagaaagaaaaggtagagatatgaacgtgcttcccattcactactccctacctgtttcttgcagtcgtgtattctgggactttcctcatggtgggacctttcacacaaccctcctc

SEQ ID NO: 56828 - DNA, 1056 bp, Homo sapiens
aatataaacacatttgaaaaaataggaatttgattcagatcctgaggagagaaatgatgactgagggttcgaataactttttttctttttatttccatattaagttatgcatcacaaactatggtacagggtagtagttgtgatgccaggtgtgtatcctaatgactaggggagcttttaaaaaaaacaccccctgggcctgatccccacccccaaccagagatgtatcttcagagggtgtctggggaaggagacctggggaatctgtgctaaagattactactttgcaggcaatcttgatatgtagccataagggagaacctactgggggaaggggatgctctgataaatagtcttagttcctgtcccaccactccaccatatccatctgtcctgtcctgtcattcaacagattctgttgaacatagactatgtgccaacatgctcttaagcatgtgggacagatccagtcgcagtcctcataaatcttacattctaattggggagataaacaataaataagacagataagcaaaacatattagctgctgctacttgcccaggagaaaaaaatacagcggataatgtatttacttccttaccacccactctcaatttatccaatctggcttttattcccagctttgcagattgttcatttgtatgggcccaactctatccaacttgccaaatctagtgggcacattttagtctttgtcttgcttggcccctctgtggtattcagtatgacgcatgactcactccttaggtaaatattgagacaagtactgtgtctttacaagttaaaaaataacttatttttaaaatgtttcacaactatacctaagataggcagtattatttttgtcattttaaaagagggaaactgaggcacacagaagtgaaataacttgctcaagttcacacagctagcaagtagaagagtggacattgttctgactgtcagctctccctttccacaccaagtttccctgttaccaccctaggcttcttttactccttctctcatcattcactttccaacagatcccaggc

SEQ ID NO: 56829 - DNA, 433 bp, Homo sapiens
actctagcctgggcaacagagtgagcctctgtctcaaaaaaaaacaaaaaacaaaagaaagaaagaaagaaaagaagctctcattgtaaaacttgctttcccaataaattagtaattcttcagccaccttgatgagccagagggaaaatcccctaaatgtcactactcggatgaggaatgtgatcccctgggggctgtgtggtagggcctcaaatcgaggccagggtacatttcctgctcaaggcccagcctcctgaaattcctgaacacatctatttccaaaattagagaggacacctcacagaacagcttggcagcttgtaaagaaagggatgaatgcttcccaaggaggaatttctgggacaccaagcaacagaatagaagaaaataggacaaacagaatagtccaatcaaactgaaagttcagttccct

SEQ ID NO: 56830 - DNA, 632 bp, Homo sapiens
ttatctcgatgataatttctaattcactgatagaccaggagcagagagtggctggtgaggtatctatgtgtaattgaaagtggcatgattagaatcagaggtaccaatcgtcgaccatagcaattatccaactgagaggtgttggccaaggagcatgtttaagtctttggcttggacaaccaggaagatggagatgggaggtattcattccaggaaagagaaagtaatgaagactgagcaggcctagataatagtagcttcaagttaggacatgtggactttgagatggctgggacactgtccaagtggtgatgcatagtaggaaattagggatctagatctggatgttaacaaagaggacttaccaagagatagtcgatattagaagggaaacggctcactgaagaggcagtgtagggtaatggttaagagagggactttaggaactctaacacttccttgctgtgtaactttgaccaagttactctacttctttacgcctcagcttcatcatctataaaataactgtttagtttttacccaacagagtcattgtgatgattaaataatgtagaacatgtaaaagaatgcatggcattcctaataaacattatcgttactattttctcctt

SEQ ID NO: 56831 - DNA, 538 bp, Homo sapiens
tatttccagagcctctgagattctatttgattcatgttcttcttaaaggttttgctcaaaaagagccttgtttcctgccaatttctgatggctgccctccattacctgcccttttgtttcccagaagcccataggccattagcctaagtatgcatcactggcaggggccctacatttggcggcactaagcacagcatgggcagatgaaatgcaccttggaggttgcccatccaaacatggacagcatccaaggcttgaggtgatgacatagcctgaggtggaacgagtacatagggctctcaacagttatgtaataagggcaggaggaggatgtggtgcatgaaagtaaaaatgaaacattgcacaagtaggctttggtttcgtgaggaagcctgagagtaagaaaggtgatttaggctttatattgcatgtgatgttgcaccagcaaaggtggccaaaaaccaatgaggaaggaaaatactggtcttacagctcttaccaatggcatgaaggaaaagaacagaagactatgcctttt

SEQ ID NO: 56832 - DNA, 751 bp, Homo sapiens
agatattaatatacgtggtgaagtaaaagatgcaaccgtttgcattttctgagattttctcattctcttttcctgttatctcaaaattctttgataatagtttctccctccactgcaggatcatctcatgggatgagaaaaacagcttgagaagccttggtgtactgagaaaagtcctagtctagacatcaggagttctaagttccagctcccaccctatcactgactcttctctatgctcttggcaggttgctttaaattcttttagcctccaagctccaatgtgtaaataaaatgattgcatcatctaagagctctcagattctttccagctcacatacttcccagctcaaatattctatgattctacacaagagggtgaatagaaatatatatttcctgagaagtaacaaagcacttcttggtaaaacaaaagaacccttgtttgcacagtcctgtatgtatagtctttgaaggtatttcttccaatttctatttaattcacacaactctgagagacagcaatatttatcatgcctgttttacaggtgaggaatgcttccaacaggcttcccagactcagtattcctttcaaatcctcctccatatgctgtcagagtgatatttctaaaactaaatatctaccccttactcaaaatccctccatggctccccattgcttacctaaaaaaaaccaagcacattatacagcatgtaaggcctgactacctccccatcctccttactcata

SEQ ID NO: 56833 - DNA, 3120 bp, Homo sapiens
tcagggcctatttcaaggattggttaaatgtgaaactacttattattttgcaccgttgctcacagacagcatccaggctttaatgggatgggaggagctccaaatcagagcattctgttcccaaaccagtcgcttcgctttcctggacagggaagaaggatgccatcagctttgcggcttcgggttcctagcaagaaagtgcaaaaaccgtcccctgcctcctggtggaagaagaggacagaccaggcagaaaaccgagatgaaaacatctccacccctgggtctctgcggcatagacaggtggctgcctcactcaaccccactcctgagacccccagacgctgacggggcccggcaccctcctgggccgcctggaaaagggcacgattctgcctccctttcagggtccgttcccagctaatgttcaagcccccagaaaaaggggtccccgagtggggaggcgagggctccagactcccaaacccctgaggcgccggcgaagaggggctgcagtgcagcggctacccggccccctccggctacggccgaggacacccatcccgcccgcctcccggagcccacggaccttgcagagctgctggccctgggagagctcctcgaaaggataacgctgggtacacttggtgcaggcgtacagggccgaggccgccatcctgctcctcagtctcctcctccgccgccgcccgctccgaggcggggccctacggagaacccgagagccgccgccgcccgggccgcgggctcctcctcctccccctccccctgcctcgcgcccaccagggcctcgccgcgagagcccagggccccgcggacgacgccaccgtctccctccgcctccacttccgccccagcccacccagtgacgccgtgccagccgctcccgcttaggccccgatagcggcggagggagacgaagcgggtagggggttgctgtttagctgtgcggccgtggatccgcttccttctcggcctccctttcccatccctgattggctgcgaaggctatcgcgtcattcgatggctcctcccaactcccaacttccgcgacgcaggaagcgcccacaaagggaggatgtcgccggccaatgacatcccggagctctcagcgcgcgaaatccgctttgaacctgccccgcccaaaggtctgcggtcgcggctatttctaacagccagtcccaggtttggctgagagcgccccaatccaattgagcaaatgttcgcgaaaggctcgttctctgccgcaactttttttcccttgctttctattggactaaatcgttaagtccctcctaatcctatttgttattggccaaaaggtaaatacttcacctggagaggcgtccccgaggcaaattcacgctctctccggcgtttaatccgagggaactcgtggagtgctttaacttcgccttcgcttttgttttatctccattactcccttcagttgccactggcgacaccactactcgcccacgcttcttactggaggaggcccgaccctccgtagaatccccgcagagccggcctgtaaccccggcgttgtctgccccagcgggccccgttacgcgctaccttgtgacgtcaccagggaagaggcggattctctcctactacagaaagacgtctgctgttttgattggctaggaaagacgtccgttaggacgtgttgccctttctgtgtaagctgtgagcgtaggcggccctgagggggtgtgttgcaggggtttccaagcccagcaccagcacccttgcccttttccatcaggggttcagcctagggtccccgctggtgggcggctcccgagtcttggagaagagcacgagaacctagaccgcccccgaagtgcggagaccccctgggcaggctgaaagatggcggcggcgtctgtctctgcggcttctggttctcacttgtcggtaagaagcagttggcgcgagtgggccccacgtcggccctaagcgcctctttgagtttcctcacgtttcagggcgctgtcagtccagcttctgacgcaattctggaggtcggcgggaatgcctagattgccccgcgctccccaagcttccattcactgtggctgtgtcgaagctgcaccctctggctcccagtgaaactgggctggccgcccctgttccccagcccttattcaccttttggcgtagcaaccaaccccggttgcctaacattcccaagggccggctgggataactgcccactccctggcctgcaaaaatgtagctcttttggtcacgtgggttcagcggcccctctaggaaactcgccagatcaggtgaggcgcgccagtgtgtttaagagacgttgcagaatagtagtccgccgtctctcgagcgcttactagtcgttgcttatgctgtttcctatccctgcagtgcctcccactcccatccacattaacttcgttgtgtgatgctcgtagccagaacgcgcgcttcctgtcacctagaattactggaacttcaatgtggaaatgcccttttggagaggcgacagggggaattgattttaaatattgttttcgcctcatcaaatgtcaccatccagtttagttactggtattcactggtatttctcaaattggagtgtcgaatgcttaggtttttgaaaaccgcggcattggaaagctttgataggaagtaaatgttggagctcttatttctccagttagcaaatgttcgatgcctggtatactgttagggtccaaatgaacagaatagaaaccctgctttgaaggagaaaaacactgaagagaaactacacgtaattagtgattactgcgcagtatagtttaggaagtgctaccgtagtagaataatctagaggggagtgattaacagtgcttgggtaggctagagaaggtttcctagaagggaagatggagctagttgcgtgtcgaaggaattgtgattgcttgtcccaagagtagagaaaggagaaaaaggcagtgcgggaattttggagtatgtgctagaacagtaggtgcttttaggaaacttgagatagttcggaatgagaagaagtaatacggaggtagagctggatgaggtgaattggaaacgtaggtaaaaacgtgaaaaaag

SEQ ID NO: 56834 - DNA, 1024 bp, Homo sapiens
agtttatttctagtttttaattgtgtgatatatattttcataagttgcattttctaatatataaaattactgactcttacatatctattttactcagcaatcttccagacttaattctcataattgaggattttttgttttgttctatttagtcatgatacgaaattgggattcttccttttcaatcttaatagctgttattctttttttttttcttagtgtgcagactagggaaatgaagtacaatgttgaccagaattgatgtaggtatctttgtcttactcctgattttaaaaggaatatttcaagttttccaccattaagtatgtttgccatcttttcttgtaaaacttcatattatcataaggaagtaagttttttaaaaaataatggctggatgttgaattttattgaatgcttttctacatttgttgacgatcgtattgatatttagtttggaactgttgcattgattgcactgctcagagctgtacatcatgttcctccaccattggaccttgacttctccaattttatttcctcaacatgtgtacacaaactctttttttcagctaaactgatgtattcattaacctggaaataattgccttttatatccatttctagcttgcctatcagaatacatgtcaatctacaagacccagtatcgatttcagcactaataaagaccttcctttaccatactgttttgaagcagtgttctgttgaatgcatctgaatttaatttgcacttagtctctattacatccaatttaccagttcccacctactgttttgtatttgagttttatctaggtaatatcttgcagctgtgttgcatgtgccacttataaagaaagcaagtaatatgcatttttaaattatgcttcatacttcacacagtgtcataaaaagatgttcaataaatatttgaattatgtgttcctaaatgagatatttgccctaagaactaaaggctgcaggaaaagctagtgatcaggttaaacattttgcctttaatcct

SEQ ID NO: 56835 - DNA, 2162 bp, Homo sapiens
gatttagaaaagagaagcacaggagacatttttatttacatatttaagcaaaaagggaggcgagaagaaaatcagagtgtagagaaaagcatgaaagaaattaagaaggtgaagccatgaaaagagagaaaagggctgggcaagaacccaaaaaccaaagacataagaaggggtggaggaggaaagactgactttaggatggttttggaaaaagtgacagagaaagacaggaaatgtggggaaaagaatgggggcggggggaactgtcttaaaaaaggtttgagagggaatgaaagacaggagaaagtaattaactgggaccacctccatcggggagaaaacgagatcggaatatgaaaggtagaggaatcgataaagaagcagcgagttttaacctccttttcctcagcctccacgccccagggagggaggcagaagtggttcccaagtcccggggaaggaattccggcgtagccttcagaaaccagaatccgcgaattggggcaacaatccagcaggtccccggcccctctccatccccttcggacgctgggcggggccctgggcgtcctggttacctggacaaggagtccacgctgggcggccgagccgccgccggctgggagccaagactctcgcagctcgagctcttctccatcgcgcggcaggggcagcacagggaaaggctgaagcagtcttcgcggctacagggcgggagaagcggagggcggagtgctacggaccggggccgcagtcaggccagcgccggcccgggagggagaccggaagcggccatgttcccccagagtgcaccgcgcctgtaggctgctgggcagcgggaagaccccactgcgcagctcagacgccggcatcgactctccgtgctggctgtgtccggccgcgcgacatctggtcttggggaaagggaggtggcggctcccagggtgagggggtctggtgaagcgggagggatgaaggaccagacccttatggaaggaggagaaatcctaggtgtaagaggaatgagggaacactaaacatgagggtctcaggaaggcgataaggacctgaggccaggaggatgatttagacaggaatgtgggggtcaaggaaaacaagaggaccggataatgagagaaaagtgagaaagaggtatgggagagggattggggaggatctgatatacatgcaaaaagaattatatactactggatgcggtggtgttggattacccaagtagaagacaaactttcaccgatttttccctgccctttcaaattcccgtgcctagcaggaagggagtgtggaggaatagaactgtgataagagaacaggaactgggtaaaggggaaatgcttctgctaggatttttctgttaggatacaggaaagccataaggacaccataaagggatttttctgattgagattgaatcctaatcatctcatgtatggggtgtaaaattatgcaaagattattcctgtaaaaaaaaaatcagaccatccttaaaaaacttccttgctaggataaattgaattatattgatttaaactagatttaatttataatgtacaactgatgtcttttaaaaaaccttatagttgcagtgcagtattaacttgcaagtacattcccaagaagaacaacctagcttagttatgttcagtgtaaggtagaatagttactgatgagtatgtgtttaagcacaaaaggcttagccttttttgagtttggcgaggacagacagcgaccgattgtttttatttccataatttttaagataccttaactggactctgtaggcaaagggagtaggtagtcaaaaacattttttaacaagcttaaatatctatcatgactcatagaagaatttccttatttcttcaccatctctacctgccttccaaaatgctgactcactgtcagctactttgacttaaatttccttagtgaaggctgatgaacccttgaatgggagacctatgtactttcttccacccagttcattcgtagcactttgttaatagaaccctcgaaaccttctgcctgatgtaacaatatgtgtatggttctatctagtgattaataaagaacagtgtagtaaaagtgtagagactttggaaccagacagatcttcatcggaatcccggttctgtctctac

SEQ ID NO: 56836 - DNA, 396 bp, Homo sapiens
gttgaaggtatgagaacgcctaggaacaaggaaaatcctgcacagcagaactggggctggggtcctcagtaaactgcttctttttaagtagctatgcttcacttttccaaaagacttgaaacataaactttctggagggatttgaaaatgccattattgcacaatcctctggtttctgtttcttcccctgcccccatccctttccacaaaataaatgcattctttgtctccggtgctgccctagaaacagggaatgtgccacacaaaggtaacaattcagtccataggtcactttttttcaccccaggtagacttctgtctttctcaaccaggcataaacacaagaaccaaatctgccactgcctacatactcaagggaatatcttggttccatca

SEQ ID NO: 56837 - DNA, 1479 bp, Homo sapiens
attgtccagcaagagacagaaacacacagcaaaaggtattgagagaggtattaatagagaggactccccctcacctagttgtttccgacaattctttatggggatgtttctgcagagaaacacatttctaccatgtctatgtaaccagcagccttgacttttcctcaggttaaataaaaaaccaaaacaaaacaaaacagtgctgtttcagaagatgtttaagtcactgttcaaaatgtgcaaaaatcaagggagactgtcttttggcttttaatttttcctccctttcctttcgctccggtgttttctcctctttggggtactgtaggatgttgtcttctcccaaaagagggagacagcttttcaactgttaacaatgtcagtaattggacttttggaccatgcttttttcttcagctaatccaatcaccggtaaaatcctcactccctctaaggtttcctagccttaaatgaaaagcaatcttaagtcgctagccactgagagagatccttcaacacatttttttctttcccgcttacgtttctattcctcacccccggctctattctaatacagtatcaagagagacaaactcttccgagagtaatttacaaacgatggtcaaacttacaaacttccagcaaattgcaccgagtcatgtccagccacttttctgtccacttttgtacattccatccccggccagtggatctgagggtctggactcgcaataagcaatctggttctatctcctgtatttgctccgctttatagatggaaaaaaaaagtagcttgtattttcctttctctttctcgtctgttgttagccgctttgctgacactggctcgcgcccggagtcacggcgatacacaggctttcattgtgctccgataggagagggagagaaagagagagagtgagacagagaaggagaaagagagagccagcaagctgcagatgggggtgggggggcggggagagggcgggagagctcgttcgaggctccctggtggaaggctggtgccactgcgcgagtgagtaatcgcagccaggcaccggggaaaggggaacgcagagggcctcccagtggctgaagaggtaaatcccaagccctgcgcatctcagctgccctggctcagctcagcatcagactcggttaagcggggaaggctggggaaattccccaacctctacacaaccatttcaccagctctaaatgtttaagaaattccgggccaggaatgtgttttccctttcagccctacattacgccccgctgaggatatcattttcatttttcagtatattgtaaatgacaccactgagcaacctagcacgagctgtgtgagcaccgaggaaatgttcattaatagaataaggaagatatgaatgtgtgtgttgagggcggaaggggttgcgcgtggagaggagaggtaatcacattgttagctcctaaagggcaggcaggtgtagcgtt

SEQ ID NO: 56838 - DNA, 2144 bp, Homo sapiens
aattctaccaggagggatccattcttgggtgtaaaacatcactcctcttcgatgttttcttttatatggcagtttggagagcaaagattaataagccgaaaaataattattgaatatctaccaaaatgcaagcacctgctaggaactgtgctgccaccatttcaaataaacatggtctctgctcccaaggagctcacaatctgatgaaattactagggacaccaaaaacaagccagcataatacacgatttgagggctacagtgtatgattaagatcaagttcttatcacactgctatgaataaatttatcatagttcttctattggcaggaaaacaagacagaacatgacagaaataggatataagaaaataaacataaagagaggaaagcctatttcccccacttagaatcacagtccaacagtccacaatttcgcaaagtggatcctgccagcatggtatccgggataactatattattcattaaaatccgttaacaatgaaggttaatgcagcaggaatgagtggtagacagtggaatagatcctctcaggaattaacacccggaagggtgactttcatgattacaaacctctttggcgggacgcaggaacccagcgcccgctagcccactagtccgtcactctgcctccaggagggaggggcacagtagctaggaaaccggaccctcaggccaagcttcgcgatgacgcgcgcaggacgacggaaacccccagaccccaaaagagctctgcaccgagaaaacaattacaagggtctggaaaggccagaaacccgagaaatcaccaaccgagctccctacatcagttccaagcacctccccaaggcggaaataacgggcaccgcgcccactgcagctcagctgaggagggttagaggcgcaaagggctgaggggcgttctccggcccacccaaagagcgcccgcgggaatttttctcttagtccgcgaggaggcacggcttcccccgcccctctcataaaccattagcaccgggagcgcgagcgagtcccagccgggagacagccccgcaccgccctcgcgctctcacctttcaaagcgcctccacctctgcctccgcctccgcccctgccccggcaaccagctcaggacaagcgatgctcctcccccccttccggggaccaagggaagtcccgcctctgggtggggcgaggggtggggccaggcggcgggagggatcatcttccgggagcgtggctaggggcggagcgactgccgcgcgatagtcagggagctgtgcgggtcctggttgcaagagaggtggggagaggggcctggcgggttttgagggactgggaggactgtcccggctaaagctggcgcgggaaactggggctgcgcggcgggagggccctgctgctggggaaggaatctaatatatccgttcccctgaggaagggtgccagtccttgactcctaggctcttcggctctctgtcgtaactttggggtgtggcaggggttagtgacgcgcggttacccgggatctggacgtgcaggaggttcgtggccacaatgggggtatagtctttctcacggctgctggggtaataaaacacatgcttttaatccggattatccgcggtgacatggggcctccgctactgcccgtataagttaaagaaaggcctgttctctcaaacttcctcctctttcaccttcttctgcagtctatttgccagccaaccccagcccgggaggggatcagggccaccaggttgctggtaaggatgaaagactgagtgtgttaagactgttgaagtgagcctgtgtaagagaaggaaggattttgtggattgctacattgtgagtgtggggtgagtcccagaacctcgctatgtcagggaaacggaagcgtgtggtgttgactattaaagataagcttgatataataaagaaacttgaagacggaggttcttccaaacaactggcagtgatttatggaattggtgaaacaacagttcgggatataagaaaaaataaggaaaagattataacttatgcaagcagttctgattccacaagtcttttggccaagaggaaatctatgaagccatccatgtatgaggaattggacagggcaatgctggaatggttcaacca

SEQ ID NO: 56839 - DNA, 412 bp, Homo sapiens
ttttaaaatatcatttcagggtgtatttgagcatgaacatacacttatttattatacatatacatgtaatgtatgtacatatagcataacatattttacctcctcctgcatgtatattgctagtgtgttgtctcttttattattggagaaagacactctgcattaactaatcccattgaccttgctgcgaggtcagctttcacaggggagactgcgtcactgttgctgcctgatgcaattatttcttaactatttgttttttcatttcctaatgtagctgctgctagtgaaggaggtttgtaggcagttaagagttttaaagtttcttctttaatgttcctatgatgcaaaacaaattgtccccaagccatttgtttaccaaaagtatatttaagataaaaattaagtgcca

SEQ ID NO: 56840 - DNA, 891 bp, Homo sapiens
cacacatgaactctccttcaaaatgtttagaacatattaaaaaaaggacaagtaaatgtttgcacatattccaagatagatgcacaccttaaaaataaggtaatgacattatgatggtgctaaggaggatactaataaaaataatactgattaagctctttgcccaaatcattcagatgccaaatgacagagccagattcagattcgggtctgcatttttctcagggtctgttacatgtgttagagaaggtgcacatggttcagaagaaaggtaagaacagaacaaaatctgggagaattcaacaaatttatttccattctctattagatttaggaataaaaactctattgtttgcagagcatcttcacaaatatttactctggaaaaggtgccatgtgaataaaaccaggaaggaagggtaggtcaaattccatttcacatgtgaggaagtgaactgtcacaagctaagagcattgctcaacgttgcacaacctcactgtagactggtggagatgaagacatgtctacaaactgtttttattgctctttttactagtttgtcaaactatccatctttactagtttgtcaaactatccatacctatcttaaaaggagctataatttcatgatgagaacacttcatagtgattgttgcagccaatttaaagaacattgtggatattcattgatttttttaatgaaaaaaaggtgtaattttttattcatttatttttaatattgaaatggttacgctttggattctatcttagcaagttcagatttcaggaaagtagttgaataaatatactcatttctgaagccaaggcaagtttcatgaagactgtcttctaatgtgtatgtcttcatattatagtatacatacacaagc

SEQ ID NO: 56841 - DNA, 533 bp, Homo sapiens
agggcttcagcactttttatttgctaatgagattaggcactcagtaaatgtttgttgaataagtagatccccggatatacaatgtggagggtaggttttcaggaggaaggttcagatgagagggtgagggggtccagtaccattctccgagttagaaaggacaggaataaaaagtaggtttggatatggaaatgatgaaatcagtttacagcatttgggatttgcaatgaccctgggatgtccaaaacaagcaaaaagcctagcaattagccttgagaggtgactccaaagagggctgaccttttccaggacaccattgcataatgtccctggataataaccacatttcctactgtgaacttaatcacaacttaggggaaaacctattagcgttattcagtaatgaagggaagcatttcctgctacttgctgataggtgagagtaggtgacagcccagaaggatgaaaagaggaatcctatgctgaagaaaagatagaaataaaacattttatgatcttatgatcatattatc

SEQ ID NO: 56842 - DNA, 1254 bp, Homo sapiens
ttataaaataatgaaattaaaggtgttacaattttcttcttttcacttgtcttcattttctaatttttctaaaataagcatatgatactattataataaggaaaaaatgttttactcaaaaaatttggaagccattacaataggtatcaggactcaggtaattaaatagggtaggtgcagggatatttggtttgaaggtgttccaagcagatgacccagcccagaaaacaaatcaccaagatttggggaataggcaaatttgagagaaatttttaagggaagggaaaacttagcaagtggaaaactgagaagagaaagtgttcagtagtttaaatagcaggaatcagggcgcagaggcaaggttctgcctggtaggccaaaggttcactgtgtcagttggcagcacccacatgttctgtaggtagttaaagacacactggttaggaatgtccaggttcagcagagccatgaatgcgcaacacacatagcatttagggaatggagggctactacagatgttttgatccagacagtgacatgtacaaatgagaaggtcagtgggataataaacaacaagagaaaaagagagagcagctgtagccaggcttctgtttctcatgtgagagataaagcagacaataacccacacaactagactgtttccatgaggaacttacaggaaattcccagtcacctgtggattaaatgataaagcctcttgatctgcttaaggacattcagtaacttgcccgccacactctctcttcccctcaaatccccagtgctcctctctctactcatcttaggcatgaaattaaggtctccttgctgtcccctaggactccaggaccctcccctttctgaaatgccactgcaggcgttttcacccctctagtgcagtgcaattccaagagctcgctgaggaatggggcaggctgtctgtggagcagaagacaggaaggtgttctaggcaggtggtccaggctggaaaacagatcagaagagggagaaaatagtactatgtctcagacaatgaactcagcagatactctgaagagagccaacttttcatgaggggtgagtaggaagatggcaggcataagatggatcatttaaaagtggcacttgccatcaaactagcaaatagccaagttagctgatatgaatttcacctcacctccttttttatctttttcttttattcattcttgcattcaatgtacatttattgaatatttaatgtcaccccagaac

SEQ ID NO: 56843 - DNA, 1035 bp, Homo sapiens
actattttacagaggaaaaaactgaagtccaaagagtttaggacgaggattcaaatccagaatttttgcccactttttcttctagctagcacataattttgtcctgctctggtcaactacttcctccaagagcctaaccttcagggcacggtgttttcttgagaatgtatgattttctctcccaagcctcatccaagttctcagttttgccctttggatctctggaaaaagatggagttttgttttgttttgttttgctttattttggcttggttccaaaggtttctctgtcataaacattggaaggcttggcgatgagctattttggaacttcagtgtcatagtccaaaggaaaggcagaaagcactagggaagtgaaggctggaaaagcaataaacctaattacagagtacaaagagacatggtgaacttgtccttgattctatctactgtccatatccgtgaggactcattccagggaggagactgcagcagcaggcgaggtagtgagaccaattgaagtcacatggctgcagcatgagagtttcagagatcagtctgttggaagcaggactccagccagaaccagcagttggaaatacacacattagagtctagctatgaaagacggagaatttctctgagcttggcattctgccagggccccggataagtgtgttgatatttagggcagtgttgcattccaaccagggacaaatgtacccagtagaaaacaaagtagcctgggccacatccacttagtgggcacctggggctgactgtcacctcaagaacatgtgacactggtccttgaacagcagaatttaagttccaacataagaagaatggccaaatcacaccggaaaaaagaaacacagagaaacaatattgagaggacggggctcagaaatggggagaggaggagccaagtgcttgtttttagtaacagaaaataattagatattgtcaaagagtgatcaagaattcgaaataaaaatacttagaaatacaaagatgaataccagaaggaaacag

SEQ ID NO: 56844 - DNA, 568 bp, Homo sapiens
atcttcttagtgtagctttaagttagtttatagagtgaatagggatggtatggctgccacacaacttaccagttcttcaactttcttcttcagtaagttcttcttcctgtacccctgggaaaatagagaagttcctttattttcagacgagtgaaacaccaagaaggctgtagagtgttttttctagtcatttggacaagtgagtataaatgagtagaggtcagggatcttccttgcataactatgaaaatcagtgtgtcgaaaatttataaatagaggtgaggcattgagcaacaggtgagcgtatttgttaggatctttctggcaatgcttttccctttggccttttccaggagcacggttcttttgtatttgtcacacaggacctgggtgcctgactaaatagcatggctttagacagcaaataactctttagccatagcagaatgcaagcgtgagttgataaactttttttttttaactctgccactgttcgtttttctcccttctgaccttgaaaacaaaaattgatctgacttctacaagaagattttgtttagagtaccat

SEQ ID NO: 56845 - DNA, 2140 bp, Homo sapiens
acctccaccggaggaaggataaagcctgtgggtaggagttaactatttatttcaaactccagtccacttcaacaatttgaaaattttcccgctcctaggacaattccatccaggtgccaataggagatactactattgtgatgcaaataggtattctactagaagtaggagcacgtaagcagagtgaggatgacttgaaaaatcgtcccaccttcccagctatggagtgggggcagggggaagaaacacctccaggctggatcattgaagctgaggggtgggagagcgacgggacaatttttcaacgtggaattcaaatgcattcggtggggaagtgtgaagtaaaatctaaacgaacgctagacagtagtatcttccatctacgcttcaaaatactcagactttagggaaacttaacgttggtttttctcccagagaattgtagggagtgggtggaggggacactgttaggggaggtatattgggagtcagatccttttgtggagcgagggaccccgaagtgtcaccaagggctagccgaaaccaggggcccaagaggggacagggctaacaccccagccaaggccggagcgcaagcgcggggctgcagcgcggggagccctggagcccagtgcgggcggacgggtggggcaggagggcaaaggggcgaaggggcggggtggcgctgggtgggagcgcggcggcggggaggagggtctgggagcccgggtgcgatttgcaagcgctctgagcctgcgtccgccgagggggagggtttccccagcccggccggagttgcggctgtgcgctgcttctggctcacaacgccgacgactgtcaagagagttggggagtggaactgccggaagtgtctgcgcgccgtgagagaaactttcctgctccggccgcggcccggagcctcgccgcccccgcgttccgaacgacgatgcgtccagatgacaacaacctgaggggactcgcgcctcggcccgccgcccgcgcctgcgctcgcctagcctcgggggaggaagactgagcccggcgcaggcggcgcggcgctcggggcccgtttcctccgcgcaatcagtcccctcgcgtcccggcgccttccccgcgatcgcgcgaccccagcgcccgccgcggccgccggctgcccccgccctgacctccggcccggacgtgtccgcggccgccgctggcagcgcctgtgccatggggctgcccactctggagttcagcgattcctacttggacagcccagatttcagggagcgcttgcagtgtcacgagattgagctggagcgaaccaacaagttcatcaaggagctcattaaggacggctctctgctcattggggcgttgaggagtaagtagggctggcgggggagtggacacccgcatctggagagtccccgcggggtgcgggtccgaagggtgggttggaggagtcggagcttcttttgtttgaatggatttggggacaaaagctgaagagctcccctgctggtggccaacaaagtttgttcttgaggtgttctttacttactcacatgtctacagggatggggaaagttctctacagggcactggaatatatcctgaggaaagtcgttcaaagtcatctcgttgtgtaatgctcctaggaagatgttggggactttaattttttttttttaatttattgtgtctattaatagtttgaactaaaaaagcccttaaggggggaatcaagagtttgtcttaaagataaaattaggctagtttagtgatattgaaagaaaattattaatgtctctcatacgtcagtggctcttcattggacacagtcattgagttggctttttaaaaagcatacatttgcagttttgccattttgtaagataatggaagacagcaaggcaccagtgcattttaactctgcaagttttctgtgcgtcttagttttggtttgcattgtgtgggtgttgggtgtgtcattgggatgaaagttaaggggttaaaggccaatcagaacttttgatgatctgtagaatataaagactgttatagtctataatatagggcttcttccacctcctttcccatacacctcttgatcaaattttccttcctccttttatcctctggatcttagctttca

SEQ ID NO: 56846 - DNA, 800 bp, Homo sapiens
ttttccttagcttgttgtctgcctgcacttggcagcaagctggaggtcagatttgtgatgcaaacacatttgcatccaggttctggtatctactcactaactcacaggtgacctcacccatatctctgcctctctctttcctttttttcttttattgtgtgtgtgtgtgttgtgtgtgcaggttcaaaatgacaggtggtaaaatgagcagcaaaaggatactcttggctataccggctcttcctgtctttcagatattgcacatcctgagcctgttgttttacatggaagaaaaatgaagccccttcacacattcatagagaagtgtgcttgaaaagagagaagaagcagcagagagtgcttagcagcaaggctatttactacttctgtatcctaggcagttttccaggctgtagtttcacccccaaccttgcctcccctgctgaatgtggctggtgccaaattcctgctattggctgagtcatcatgtcctagttgatctggcaccgtagtcaacatttgtagcttttaccattgttgctttggagctagatcactaggttagattataggctagataattaggttttcctaaatagagaatctgctggtgctgaaacttgccccagaaggcacaccgtggtggttattcacgtagatggcctggtgtatgtgagatgggaaaatccagtaagtcactccttaattcaattcagcagccttttactgattgcccagaaactggatgatctggcagaattaaatggattattttgtttaaaacctaaagcaaaaagttt

SEQ ID NO: 56847 - DNA, 593 bp, Homo sapiens
ataaaaatactctaatttgatttactgaagcagtcaggatgaaatattttgcatagtgaagtgtgctaaatctttaaaactatttctagagtttttaaagaaagaattttaaaatgtaatgtacgaaggtataattctgtgtatctatactttgtttctccctcccctctgcatctaataagcccctcttttcttgttccttttgtaaacatgagttgcttatggcttgtgtactgaaaatgctgccaggaagtagggtgagcataacttcttttcccatgaccctcagtctaatgttgttccaagggttccttacttagaaatgccttgataaccgcattcattcctgacataccccacccccaacacacacaactgctgagtgccatctgacccacagtccagctgcagcttttaaaaatactagtggcaaaggcttttacctagaacggtgactatctgtgaaaaaattttgtgtgtgatttgttttttgcgtgttgaaatattattttttaaagaaagttacttggtgtcagcctgcaagttaaagggttattagtacaatttttttttttttttttaattttcaactc

SEQ ID NO: 56848 - DNA, 3616 bp, Homo sapiens
aagctcatcttttgtatgtgggtcatgtcagtgcaaaatgacttgaaaagtaagacatcggcaggctttctgtgtgtaagttggtggtgggaatgggtaggaagggaagaggaagatgaataaagatgtctgctttcattgcgcttacagtggaagaggataaaaaaaggttttgggcaaagtaaggaagagaaggtggtgttattctatcagtataattgcctaattatgaaagttgttctgggagggtgtttgatgtgtaggcccatgtctggcctgtacatctgtcccaacgcttcactggttccctctgcctccacccttttggcctgtgcttgctgggttttttgttttgttttgttttgcgccagtgacacactgctggcttggaaggaggcaaaatgggattcgttgttcgagacccagtggggaattcctgtggctcagagagcaggtcaggactgaagttccaagcagggcagtgtcctgcactttttttttttagcacctcccttttcattgaagagcatcaagaggccattgccctcccttctctaaggataaatgagctgcaggtgagctttggcctgttccctttcatctgctcactgcagtgctgggtgagtgggaagtggcctattgagtccatccacataacttcccacagctgcactaactgcccactttttatttggctttggtgttttgaactgagtaaggaagacattgagttaggagtacagtgctagacacgcggggctcagaaattggtgatggaggggagaagagtgactataaaccggtataagatagattcaagcttcctctcatatatatttataggggtagaccaaatacaaaaaggtaccatcatttaactataattacacaagtaatatgtatgtaaatacaaaaacaatacccattgcatcagtcctggagcacactcttgcatgggaattgataacgttccaacatgagttatttgcccagccttaaaaccttactgataggaaataaaaggttatttgtgcagaaactaaaatcatattcttttgaaaacactgtttatggtgggttagttcaaacggctggatgtccaaagatactactgtgaatctgcctatgagacgggttgtttagctgcattgatttagcacattagtgtataggataataaaagactttaagtctgagcacatcacttgagaatttttaaccacaccaaagctggagtatgcaagttactctattttgtttttgtattaagtacttataatttgaaatcattttaaatcaaagattaaaaatgagaagacctctaggttttaaaaaaatttagatattgtggccgggtacggtggctcacgcttgtaatcccagcactttgggaggctgaggcgggcggatcacctgaggttgggagttcgagaccagcctgaccaacatggtgaaaccccatctctactcaaaatacaaaattagccaggagtggtggtgaatgcctgtaatcccagctacttgggaatctgaggcaggagaatagcttgaacctgggagggggttgttgcggtgagctgagatcgtgccattgcactccagcctgggcaacaagagcaaaactccatttcaaaaaaaaaaaaagttagatattgttagtcaaactgaactagtgccaataaaaatgttagtcattaatatgaggcaaagtttattcattctatgtaatcttggaaaccattggaaagtccagttgcgattgtgcgtaaacagcttggttagtgatgttgtgtgatgacctagactctcaggaaagtcttgaacagtatgagctttggactcaagagattaaacatttaccaagaaggagagtcactttgctagtaaatatttttggtggagacttcattcctttagacacacctaaacagaaaattcctgtggtagtgacaggcaatacactaccatttgtcaactaaggtaatagctccaaattaggagtggagaaatgagtcagtcagttaggtagtttggatcaaactatattttttaacaatcccccagctatttctgacataactagtgtattgctggtcccttgtttactccattttaaatgcagatatgcagacatagcaacaaggatagtgcctaatagttagcatcggccgggcacagtggctcactcctgtaatcccagcactagcactttaggaggcctaggcaggcagatcacctcaggtcaggagttcaagaccagcctggtcaacatggtgaaaccccatctcttctaaaaatacaaaaatgagctgggcatgatggcacgtgcctgtaatcccagctactcgggaagctgaggcaggagaaccacttgaacccgggaggtggaggttgcagtgaactcagattgcaccactgcactccagcctgggcaacaaagtgaacactgtctcaaaaaaaaaaaaaaaaaaaacacgaagagcatgtcgcattttaaaaaagaagctgttttatggaaatgcttgtacgaatcgtacatgtactgattgatggatgagagctcgaacatgaaccaagttttgtgtacagcattggctgaggtgccctgacatttttacttcttgttctgtctttaggagaatgtgttgaaaggtgaaggtatagcaggttaaaatagtggcaattcaagtcacaggggctttactatgtcttcctgtgctggcagtgctttgccaaggtgcaaatatttattgtttgattacctctctgaggctgggtgtgcatcagtgggttactgtggtgaggtgactcacattgatctgtagatagaagcctgagagtgatcttggatacctgatctgagggtgtcaagaagaattttttcaagggagtggttggaaaatctcattcagtttctttgttagaagagtgactgtgtaaaaaggcataaaatttttacttactttgaagatgcgtctgttaggtcaaatggaaaggtaatatttgattctgtttcccaaatgagaaataggaatatagtctagggtggaaagtatgggaaacaatttactttttgtatttggaaaggattcctctatagtgtagaaacactttgagagataatagcttttgtttcaggttaaaaatcataactgccataataaatgcagaaaatgcattcaaaagatcattaataatttttcttaaaaaaaagacctattttcttttttgacttaaacaaattcaatgattaaattattgaaaatgcttctgtgaaaattttcttcagaatttggtcatgagtacaaatatgcatttttacagtttactcaatatttgtctagtggtattgtgatacaaaaggtagaactgggcggggtgtgatagttcacacctataatcctagtgcttgcagaagccatggcgggaggaatgcttgagaccaggagtcccagaccatcctggatgaggccccagttctataaaaagtaaaaatttagccaggcatggtggcatgcacctatagacctagctactcaggaggctgaggctgcaggatcccttgagcccagaagctgaggttacattaaactatgatcacaccactgtactgcag

SEQ ID NO: 56849 - DNA, 1001 bp, Homo sapiens
ataaagacagtgctgatcagagagtcttgaacttctctcacagaatcaggaggccgggccatctggtaagagtgaggggaagcctggggctgggttcttggtagaaagacgagaattctttttagataaccactgtgggaaataagattaggagtgaactagagttgaataaaaggattgccaaaaagcaaaagcaaaggggttagatagcttgaacttttagtgtccttgtgggtgtgtgaattacagagaagaggtcactggaggttaagaggttgtggaaaagagcactgggcaaggaagtggatgttgaggcttcactagggtgggtggtggcaggagcttgggtgcagaagagcatgaatgggatgcttcagcctgtggaatgtgaaggagtgctgggaggtcagttcctgatggcaggaaacatgggggcagtgcgaggtgtaagtggttgcttgtcagcagcaaattactgattattccccttcagtcaggatacttggcactcgattactctttgagcataaacagctctggaactgtttgcctttaaagatgataagcctgttcttttcctcctgtaatgtagcaggatacaggctggcactactttttaattttttccctttgacaataatggtttgttgggagagaacagactttggaatcaaacaatcaaaatcaaatacctgcttctctacctactagctctgggattgtagggcaagttctagctgatggattgtccttttttccctctgtgaaatcaggataacacctacttcagcacctcatattatgatgtggacattaaatgagatagtatatgtaatgtcactgcctcttggtagaggagctcccaaatgtgagaatactcaaatttgggaaaatggtttctgaattgggggtggttttgactttgggaaacagaataaacattaaaacaaaacaaaacaagggaacatcagaattgcacaggtcctcattttcatgagcac

SEQ ID NO: 56850 - DNA, 1701 bp, Homo sapiens
tgctgacatggtatttattgtttaggtataccacaaactgattgtgcttcttattttggttatggattaaattgttcttaaaatttaccattggatacagcagtcagtatgctacctttgattttttaagtgttcaaaaaattaagactctctcagtggaagttccaagcataaactactgatgtgatggtccttagattattgcatgcttttgtagtataatgctgggtatcacttggctatgtatgtttatcctgctcttatttttcttggtgtggccaggtctagaagcatatgaccaagtcatctgctctggcttatatccgatttaagtggtaatgttttactacttgtttcctactctgtatgaaatgtcagttaagaaggatactaagaaagggctttacagagcctacactgtcatccaaatggaaaagtaaggttattgttggggcatcatctggacttataaaatgtaattgcattggttcaatctggcttttatagacttctatagatttttaagttttcctagagatataacaacatctaaattcttactgctgacgcagttctccattgtagcatatctgagggtgttatgccaagtgtcaggttccagcctaagctgaggaccgaggggagtgggtggatgagtggcaggtagctggaaaaaatgcttgcaagatcgtagacagttttgatatggctttactctctctctgggcatgagtgagctgtgggtgcaagcaagccatgggtgcagtcaagccatgggcatgagtcttggcgtgagcattagcagggtaattataccttttacagacagtagtggctccaaaccaagcatgtgctcacgtgagtgatcacctaatgcgtcttgcatggttacataacgtacagagttgtgtgcctgtgctccaaatctgctgagtcatgctgcactggaaggccgccttggcctattcctgactaaagtgcagccatctcccttacagaaggtcataagggatttgggcagtctaataaagtgatatagcatgctgttgacattattgtatatgtcactgaatttatgatctgtactttttttggggtgtgtgttttacgttatttaagtttaaggaaagacttctggaagaaatttttaacacagcattgtctgattatgatataaatgttaattggatgcaagagagacatgctttcccaattctcatcgtagttttaaaatatgtaaagcccaaactgatcaattgttgaaacatttgatggtatattacctagtatttaagatagtggagttatgtcaacaatgaacacagcaatttttaacattttctctcattctacttttagacattaaacaggtcttccaggcaaaaatagtagtgtgaatttaagcgtgctaaaaagattaatctacaaaataggtattttagacagtttaggaatgtttcagaatttatgatattggcaaatatagaagctgtcatcatacttcctcactgtctaggtatgattcaactattatgtttgtgaacgtttatactctcagcacctgtcataaatagacttcagtaatagtttttttttttgttctgaaagtgtttttccaatattatgttgtagagataaaaggaaaccaatggtaatgttcttaaactcaataatttgttagaaagttaaaatttatatatg

SEQ ID NO: 56851 - DNA, 2703 bp, Homo sapiens
ggagcctgaatttccatgtgtgtgaacgggggccagtaacacctactccagccagctgttgtgatgattatacagaggagtggaccttgtaaagggtagctcagtttactgtcatcagtatcctcataaacatcatcattaggttattaaacaaggttttcattatactgggtatttctgagttcctgaagggaacaaaactgttcaagagaatgaataaaagtaaaattttactaagaaaaacacggaactgacttaaaaggagtcatccacatcgttaggatattataacattgtactaaaaaaattagttaatagggtgttcttttttgagaggagtcaagaaaatatccgatgaaacacgtttatgttagtgactcaccagtgttctgtaagcacagatggcctttgtatagggaagctcacattcctgccatccaagctactgctactgtagaagattttattcttagtatttttgctgctcttgctgggggttgcttgtggggaattccttgcctctgccagggcatggtggtctgtagataggtttctactttttctggtttactgggaaaggagggaaaagtgcattcccagcttaaatacttccactataaatggtttaaatataccaagagttaatttgggcacatggcaaatatatttcttcactgggaaaatgcattctatgcctcctatgccctattcatacttcaagataaaagctaacggggcaaggtgagggacaggaacttcagaacaaaatccacttggaaatggaggaattcatttttttctaattgatcaaataggactttagtaaataacgaatttttgtggactggcaggttggtctcttgaatccactgggtctgtttccccttgtgcagcacgtgtgtgctggatgattggctcagtggctctatgtctatcagataatctggcctctcttgccagagatggctttgtgagcccacgccaggctgttgagcaatggcatcccagttaggcacatgactttagctgacatattgggcagatgacaaggattcaggcttattgtgtggggataggctttttctttactctgcagaactgaacgaggatgggcatagtttcctgactgctgtcctacagcaagccacgggatgtagctgatattctaggcagcagagcagagacatgcaaagaatctggatctctgatgatctctctaagtttctggattagccagacctgaagcttctcttacccttgtttctccagttatataaactgatgtatttgttttatttaaaacaattcaaataggattttctactccttgagatcaaaagcttcctaacttatacacaaatctaaaagtcttcctaacacgatgtatgaacaaagtatttcaggattttgtcacatatgaaggtcaggaattcttttttgactggaaagctcagttaagagtgtgtttaccaaaatgtcagacaaacttacagaacattgaagctaaactcttcagtttattatttttcacaggatattgattatattattagttaagttccctctccctcctaagttactgctatcttgacacactttgcttgaccagatgtggcaccctcttgggcactgcatagtacaggatatgaattggaaggaagccaatttattggaaaataaattccttttactacaaaaaggctgaacctgaatccaagtaattggctctgaaatgtgacatggaaggattttgaatgggtatgctgaacagcaagctggattcctttttcagtggcaaagagaccagaagggaactatgctgcttggcatcacaggcgactagaatgtgggttttgtatcctgtaaatacaggcttctgacagaagtctaactctgcattttttcatattgccacatcccaagttatctgaatatctgccatttttaccaaaggtcattttgactcctgatgtcttggctcttctctgaaattcagcattgaaagtaaagttattctccagaatggaaattgaggtttgtacattttggttgaaataaataggaccaatttgttgcctaaaagtttctcagctttaaggagttttgatactttattagagaatgctactttgttcattctactaagtatcttttaaatgtgctatccagtattttaagaagaaatacataagatagtattctggttttccaatgctgtataacaaaccaatccaaatattagtggcttgaaatgacaccatgtatttactcatgaatctgcagtttgggcagggctcagatgggacagcttgtcattgtttcagtgtgtgtcagctggagtggcttgaaggctgggttgcagtcatctcaaggctcatccacatgtctcccaattaatgctggaaagactcaaacaatagaaggatgatatatggttctttgagcatttcttactgcatgtgatctctccagcatggtccttcagggtagccagatttcttacatgtaatatgacttccaaaacttctgtcccaagtgaaagagagttaggaagagcctgacttatcgcctcgtattgctttctttgacctagcccctgcacccacatagtacactaccattgtttcatatatgttagaagtgactcactctggctggcccatattcaacaggagggaaattgggctgtacctcttgatgaga

SEQ ID NO: 56852 - DNA, 1413 bp, Homo sapiens
caccttggcctcccaaaatgtaacttttctttcccactaaatatagtagatatctcttaattttttaggaggcaaaagaaagagaagcgagcagtttttcataattatataggatgattcaggtggcacatggcatagcctttctgctttaccttattatctgattgtacgcatcgtgataagtgcaggagagtgtgaatgtctcaaatgtctcaagctgtctggaagaaaagtagtttttaagcttcattttctggagaagaatcttaaacagcctcatagccaattctatgaactgaaagtaattcaagccatggcctaagggtaagaccaaaagaggtcagatgttaatgatttattaaatgattgtattttctgttggaacatgcttttcacagataaggaaaagtgtaatttttttaatgttgtttgtcatatgttttaaagagaatttgtctagtattgacatatcactcattcttcacatgatgtaagacctcacattaagggctgaaagaggctctttacttccttgggtaagaaaggcttttgacagctgtacagtgtggaaaactggcccatagtttatgaccagatctggatttggaaaagaccagggccgagagttataacatatggaacttatttgggaagtaattcttagctatgactaagagcctgtgctcaaacgcctgggaaagtttgaaagaaaatctttgcaaaataaatcatatctcttgtttgctaaattgtaggacgtagataacttttgggtattcatggactttgtattctgtgttaaagctctaaagttttctctttcagttaattttttttttggttttatttttaacaacactgtgattaaatttgctggcttattcaatcaaggaattatttatttaaaaagattattttctcttccccctaattctcagagatccttaaaatgttcacatccaaacagacactaaggggctagtttatagtaaagatatactgtgtgtgtgtattagcttctggtgctgttttttcttagctgtacaagttccaattaccatgtttcctgtgtttatttatatcgagatagcatgtgacataaacatcccaagtaagtgttgttccagggaaagtgaactaggaaaaggtaatattatgatgcttacgtttctgaaggaatattccttttttctcatttctcaaactttaattgggtagaattatgtatgagaaatgctcctcctttaatgatctcttcttaaccttactgtagccgtgctgatccttacctcatcattatattatttcaagtaagcatttcataagccaagaacaatcatcattattctactgaagttgactttttatcacacacataaacatggcatcagcacaatactgaaaccgtgtttg

SEQ ID NO: 56853 - DNA, 1137 bp, Homo sapiens
agtagctttctatggtgctagactgtgaaagattctagggatgaacctgaacactgaatgaatgatcacaaaatgttagctataaacattatttgctaacaagagcaacagcattcatggtgcatgccatttatatttagtcatgtattcataacatttcagtcagcaatgagtcacatacatgatattgatcccataagattataatggagctaaacaattcctatcgcctaatgacatcatagctgccttaacatcatagtgcaatacattacgtgtttctggtgatgccagtgcaaacaaatctgtgctgcccatctgtggaagtatggcacatagaattgtgtgtaatacgtagcacttgatcatgataatgaacacctttgttattggtttatgtattactatacttttgatcattattttagagtgtatacttctacttataatgaagttaaccataaaacagtctcaggcatgttcttcagaaggcattccatgtatacaatgtttgcacgatgacaaaatcgcctaacgatccatttctcagaacacatgcccattgttaagcaatgcgtaattacgtatttggctccaggcagtggtatgttggtaaaaagttaaccactggcactcaggtgcatgttgtatgcacatgcatgcatacatgtgcctatgtatgtgtgagaaatctgattggtagtgcttgctgatcttcactgagtaaatcctcccaccttggctgatttcaacacaaggtcacttacccagtgcaggttgggaagagatgagcacaaaggttctgtgagccactatgagcctgctttaacacactgctggccccagacctaattttccttaatttctccctgtattagttagatcattctctgctttatttatgtacatctgtatcctgcatagttccttccttctttccctcttctctcctgtcctcctctttattcccattctcccccattaatgcacaactacaataagtaatttaagaaattgcatatatattgggatatcttccatttttcttaaacttttagcaatctgctattatctaaatactgaacaattatgattaaattatattaacgttcagctactaaaatgcaattgctataa

SEQ ID NO: 56854 - DNA, 2011 bp, Homo sapiens
gtagcataaagagggtaaataaagagtaacattttttgacaagcggaaactgtagaattcagatttcagtgtccataaataaagttttattggaatatagtgtctcttacctgtttatgtgttctctgtggttgttatcttgttacaagagcacagttgggtggttgtgtaggagagcatgtggcccacaaaatataaaatgcttaactctttgattccttataaaaaaaatttgctcaccactcactggactaagacctgaaacaaatttcagtccttacctttgcaaaataccttctctggtagcacaaacttaataacatgtgtttgataatttggcttcctatgttggaaaaccacagaatttacagcaagatgaacttgaatttgaccttgaacaaatttgtggctgaaaataatattcttaacacagacaccacaaatttttatttcaagtatttttattttcatggaaaccttttacctttgaagaaaatatatacgttcttagtttagggctatagcttagcacacaagcaatatagaagagaaaaataaagaatcctttttgcttctgtagttggacgtatttaaatatttaagagaaggtcaggtaaaaacactttacaatcagatgcttttatttagttttcagaactgctaaatatggtggacaaccatcctcccaacaacatttgttattttaagtaagaatgtggtgaatctcatcacggatttgtctgtatgcactgcttttactttatacaaaatcagccaattaaaaagaaaaaattattttgtttccttgggattgtgcagataagtgaactcatttgttagccaacattattgaaatctgtgggtatgtttgtgtagactcagccctagagcaagcaatatatttgcaactgaacacatatattgagagaaatctggtaagctctaccatttatattcatcatagtaaacagctcactgactttattaataggtttcacttaatacagcttcttactgttctgtatttagagttgattttacgtctttctcttctatatacagccagtaataatctgaagccaaatttaatgctctccagagaccatgcaacccacgtttgcatcaagagcctggtgatttacagactctgagttggagagatgacctctacaattactgtagaaacccagtgagaagtgaagtgagctcactgtagaaagatttcaggcattgaaaaaacttgccttatttggtaaatgtggttaactggtcccagctggtaatactggtgagctcattgtgagatgtattgtctcttaaagccaaattcttgtatttttaaaaatctgttagaattggagtattaaatagtatttgttcagtttttcttgatgttctaggaagtaaatcaaatcagaaacaatagagttccattttgaaaactaaagctcagatgcagtgacacttaaaatattcccagtatatcttttcttgtctcttatgttgcttaccttacttagcctctggggaatttggagtttaatttatgccttgaaatacaagactcctacgggaagcaaatttatgtggccatgtgtgctttactatacttctttgctcatgtaagtttactctgtatattacactttcaggatagattctgttaattgcattttctttaatgaccagtagcatttcatgcttgtaaatgaaagactatggtttctcatgtcttctgtaaaattcctacctcagatttgtctgtatcttgagtctggctttccagagattcagttgtttcagaggaaaaaacacagggtttaagtcaaggagaacttggtttgaatcctggctctgctgtgtgtgaacttgatgacttcaggacagctccttaactgttgtgacagttaagaggtgttaccagggtgggcgcggtggctcacgcctgtaatcccagcactttgggaggctgaggcaggcagatcacgaggtcaggagttcgagaccaatc

SEQ ID NO: 56855 - DNA, 1261 bp, Homo sapiens
catcttaggactatgtatattggtagtgagcccaggttatgtccttcagggctctttggtcttgctcaggagtatctgagtatcctgatactcagatctgggagtatcaccccttgtccctttcatgtgctcaaggcctggttccagtgcagactcctgctgcagtgggaaccgcaggatgtatggtgcagaggcttcagggcacattggctccttccatcacgtctagacaatggatggagtactgcactgtcacctctgggctctgtcctctcccatgactgccagagggaccaggtgacactgaaagacaggagagttcttgttccatggggtgaattttgatcaattatgggaatgacgtggaagataaatcttgcttcttgcttgcttacccaatgaacggccccgaggtgtgttggttttggacagcatgaatggagatgtgccatagaggtagagcagctggctggctcctcacgctgctgtggccaggtcagctgaggccacttgtatttaccttccttccttgtctcacatctctttattcctcaatcttgctgtccaagatgcgcacacacacacacacacacacacacacacacacacacaccaagctttagcaggcaagctttgcctcaggcagttttcctgaaaatttgaactaaagcagtattatatgtaatataatataaaaatttaatttctactgctattgcttttaccttaggaataagaaaaaaaatacatctgttatttttagtcagatccagtacttgttataagttgtctaagtagtctatgttatgcctagtattttatcagttcatatttgttcatccaggttctttgtcatcccggaagagcagagaaatccaaatgcttggcatggaaaaaagcttcagtaactttaattaggaaatcttcaaattcacccagggtgattttccaaatatcctgtctggtatgcagaattatgtaaccctagttttgtccctaacttgatgtcagagccatcagcttctagccactccacacactgtctgcctcctaatgccagtattccttgtcttcccacagctccaaggggagattgacacttggatgctgtattagtcagggttctcttagagggacagaatgtatatatatacatgtccctcaaaatatatatatatatatatatatatatatatatatatatatatatatgtatgtaaaggaaagtttattaagttttaacttacacgatcacaaggtc

SEQ ID NO: 56856 - DNA, 566 bp, Homo sapiens
tgtgtttgaacatgacaggtgctctgtagatggtttctacattaataactattatcataattattgttgaaactgcttgcctaagacactcaagcctctgattaatatattagtggtatttaaacactaactcttaacagttacctgatattcttttgtactcttaaataaaactgaatgactcatagaagttgagggaatttccctgaccttctacaatgcctgtctcatttttgtttttttcctaaggagctcaaggttacccttgaattagaccttgaaagagatagaaccagtagaggcagtaggaagactagccatattttggaaagagaccagttgggagattttagtggatggccttgagccacggaaaagtaacccccccagcattgctgcaggcactgcaggtcattgaacacaggggtgatctaatctatgatgcaccagaacagatcattttccagcaggttgtgaaggggagagaacagtcaaccatttaggatggaactggtgagatttaaaaggccttaatcaggagagtagcaaagggatgaaaagctata

SEQ ID NO: 56857 - DNA, 1240 bp, Homo sapiens
ctttgggaaaagccacatttagtgttgccacatttagtgttggctctgcacccacttcccaattcacaatttaacatcttaggaacaatgcacgttaacatttgtgagaaaacccactagttagcaaacaaaaaccaaaaactcattcagctttatttaactgagtagcgcccagtttgaccatgaggctcttttctctctgtgtaacagtatcttatggaaccgacttttctttagagttcaaattgagaaagtcaggtctactttgttttatctatagccagtagaattgtagggccatatttgaaccagagatcctagccgaggtaaaatgacttgggttcatatgggaaagactgtgaagaatttaaaatttgaaagttactcaggctttgacatagttgccgtatgttggcttaccagttaaaattcctctttatatttatctttgtggtaatatagattttctctgtgtttcagaagaaattgtgtctgtgcatggttggtatatatgcatacacatgtgactctacttgcagcagtattttttcttctacatgaattaccagcaatctgtagccagctatatcctatctcagtctgaatttgggagtttaattattaaggagtttgatgacctggaacaagcagttcagctggtcaaagatttggaggaatgaagctaaacagaaaccgaaaacagactcttacttcctgtgatgtgtggtaaatggaacattttaaggtactaatttaaaccccttgtgttttgggtacataatattccaccaaaagtcttctaaacctactttacaatcttcaatttttctgtgttatttatttgtatgaagtaaggttggaggagcaatggcttcaagccaaataggcttgtgatttttctaaatcagaaattgcctcaaatatttctatctttcaatgtcctgggtcatggtgttctactgagttcaggcacagtacaggcaacttccaaattattttatttcccctttttttcagacttagattctagcagaaacgttttcaatctttagtcaatcacacacagtctatatttaagcttagtgctaaaacattacttatcttaccttaagaaacctgggaattcaggtagaatatatgatctacaataataaaggagtagaaggatatgaatgaatgagcctgattaatattctgtggtaattttttttaattttttcacaaattgctttgagaacct

SEQ ID NO: 56858 - DNA, 2513 bp, Homo sapiens
ccatctcaaaaaagtaataatgatgagcaaaaacttccaaatttaattttaaaatattaatttacatgtccaagaagctcaagaaactccaaccaggatacactcaaagacaattaaaatattctaaaattggttgttgtgatagttgcactttaaatatacaaaaagctattgaattgtactctttatatctgtaaattgaatggtatgttaattatatctcaataaagtttttaaaaagagaatgaggtaccaatacatccttacaacatggatgaacctttaaaactttgttctaagtgaaagaagccagtcacaaaaagccacgtatcatatagcccactcatataaaatgttcataataggcaattccatagacacagaaactagatttgcgcttgcagaagttggagggaagggagttactgacaatgggtatgggattcctttagggagtgataaaaatattctgcaattaaatagttgtgatggattcacaatcttgtgaatatgccaaaaatcactgaactacatacactaaaagggtgaactttatggtgtgtaagttatatctcaatgtttataaaagcaacaccctcctccccagaaatttcagtagtgaaaaggtgtaaaaccattgtaatggttgcacatgtttatgctggaaaattggtaaactgaaatgtttctttaaaacacttatacttcattgggagagagttatttctttggaaaatgccctttctcttttttctatgaatagtcaaagtttcaggaaaaagaaccagtaatacacatgtattttaaaaggtgtgactaagtgtcagagggtagattgtgcaagataggtaccttagagcttgaccaggacaactctttgctaatcttcaggaattcttgggactctggccctgactcagccaagacaagaatagtgagctaatgattaatgatgtgatgattaaagttcaaattctcctggtggcagtcagaaccagtttgtttattgatggcttatacccagtataatcagttggatatcctggcttggctatgtgaccaagaggatataaaagaccctgttggaaatgtttaagtacctttcccaaaacaaagatttatcatcacacaattcttggtaattcaatttggaaacattgcatatcctgatgcaaataagaaagacactggggagctgcgcttggaagtttcttggacctctgatgctttcttgcaatctcttgttcctgctttactgtatcctctgcctttattgaatatgctcttcgaggccttgttagtctttcaattatccagcctaatgcaatctcttttcatgagtaatgcattccatactgcagatcttttttataaaaagtaaaggagcagcaatctcagtaattatattcaaatgagactctcaaaaccctgtgagcaaatataagcaaaattagtcccacctgtgggacagcgccaatatacccagcagctgttcatgagtagagatggcagagagaatactgcctgttcccaaacatagaaatccaatctggttgtccaacccaaaccacgaaaatcgttgcattccacagacaaggatacaagagttatatttgtgaaaaagaagcttctgctgctcaagaactttctcaatgatgcctgaaattgagggtcaagaaacaaaccccagaatctagtaatcgactcttgagtaccaccccaccccacattatctagaccataggtctaagtcagagattctgatgatctcctcaggtactttggcaaattcatcacaaatatctcctgttaatatatgggtaaagaaatgtttggggttaatatgtgggtagagaaatgtcgggatgaccagagccatcctcatacatagtcatatctctgtagcacaagtgttcaaatttctccaaattccaccactaaaaagatatcagagccacatggatccataccttcatggcttagatgttttcccatgctttgcttgagctcacactatcaagaaggtaccaagagaaaggcaccattctttgaacttaatcgccagacccacttcttctggttgctatttaaccagactggtcatccactctcatttattctgtcatcctttctacccaaagtataaccagttgaacagtgtggattgccaccaccctagagcatttcaacaatatcctggctctaggttctctaatcttcttcctaacaaagactacacaggggttgtattagtcactcacctccctcccacccctggccgtattctgtacttccctacaaggagctattaagcttaagacccatgaattcagccagcaatttgtctttctcatttgcttataaaataagcaaggtttacaagggaaactcctgaggcaggtcttctgaagctggaaaataatttcaacccctacacacaaattaagccagagagaattgaagctgatgaggcatttaagtgggcaataaaaatctggagttggtggagggag

SEQ ID NO: 56859 - DNA, 1625 bp, Homo sapiens
ggctcactgcaacctccacctgccggtttcaagcaattctcctgcctcagcctccatagtagctaggattacaggcattcaccaccacacctggctaattttatatttttagtagagatggggtttcaccatgttggccaggccggtctcgaactcctgtcctcaggtgatctgtctgccttggcctccctaagtgctgggattacaggtgtgagccaccgcacccggctggcaccctgtcttcttaataccaaaggtgtcagcatcattagctgctagccaaatggcaaacaaaaccactttacctacttggccaagtaaatattgcgaaagtaaggaagggatggaaaaataaaggttatttagtcttagctattgtattcctaaagtaaatataatcttgcaagtcatcatggggaaaataactagggaaacctaaattatcctccaaaattccctttgcctttcatattcaataaagcctaaccctccctcaccatcaataagtcagtctgtctttggtttgctttggcggttgaatagctgctacgttagtggcatatacaaaatgagagggtagaagatcaatagagagattatgtaagaaagaaattcattacagtatctctttatagcacttctatttgcttattgactaaatatttatgttaagcactgtctatgtgccaggcactataccccagctacagaaaaaaaaaaaaaaaaaaaatgaatgatatattccctgccctccagtagttcagtttcctgggggaatgagacataagtaatcaactgtaatagggctgaacttgaccctaaaggagtcaagtggagaaagcacatatttttttctgtctgggaaagtcaggatattggggcttaaagtataagttgcggttcaccaggcagagagggacacaaaaaatattccaggaagacagaacagtatgttcaaggtgactacaagtagctcagcatgattgcagttcaggttgcaagttggggagtggcaggatatgaggctggaaaggcaaacataagcccaaatgacatgcataactgccttgtaatatcacacttaccttctcactgcattctagaacatgtcttattcatcaatgtctccctaactcaatgtgtgccatgtaataggtcctcaaataacagtacattaacagcccgacaatctttttaaatgtaattttatgtctatcataatcagttgtaaaactaggtcaacttgtattaagctgttagttggccttttttaaaactaatgtaatgactgccctctagtggttataaaacaataaacttttctatcagtcaatgccagtagctttcactctttccagtaagaaaacttaactaaggcatgccctttgatatttttatattctattgtattttattttaaaaaaatgttggttacaaggaataatatatcttcacccactaatagcttgccatccagtttgacaacgagtgttctctgagaacacttggtttaatatattaactatgtcatatagactatggtttatgatttaatttattctgaaagtagatatgatttaacgttttctgaaatagtaggctgcttaagtttaacaatacagata

SEQ ID NO: 56860 - DNA, 3643 bp, Homo sapiens
gtccacattaacggagtccaccgttgggccaggcacagggatagcaggggtagggacccagctccttgaggatgaaagacaggtacagaggcatgaatgcttgtacctgaagacgcactaattttttgggttgcggcttccagtgactattgcaaattcgagtactaaaaaagttgatgtgatttcactatttggaaaatgtagtgtttttgtttcttttaataagttacactgagttacagacctggtctcaaagcttcaattacagtaaccgtttacccctctcaagtgagtttttgcagactaacagataagtgaaacaattacaaaataaagttaatgctgaaaacaatggatctttattaacatcaatgccggctcacggtatctattttaactccaatctatcctcgcggctttaagctcgcacaggcgctccgctcggtcaagccggggtaacgcgaggaggaggaggtgggttcgcacatcctctctccacttctttcggccttggccctttcgcaggtccaggcgaactggaagcgcctttcccgagcacgggcggggaaaaggggccgagcggagcggaagaacttcctgcagccaagggcgcccgcgttctccgcagacaccacagttcggacccggattggacccatcgtttgcggttcgcggggcagaatacggggcacgcttcgggcccctgcccggctgagcgcgggcgaagggcggaccgggccagggcgagcgggtcacgtgcggccgggagaggcgccgcgggccgggagtgtgcaggaatgtagcaacttgcagcgaaaagtttccctgcgctgccggccgggccgcggtgcgggcgggcgcgcagaggaaggaagagccgagaggaggcggggccgcggcggcgcgggcgggcgcttctcctaactttagttttggcgtttgaggcgagtttctgtctcagtcgggcgcagccgccgccagggaaaagaaagggaggaaggaaggaacaagaaaaggaaataaagagaaaggggaggcggggaaaggcaacgagctgtccggcctccgtcaagggagttggagggaaaaagttctcaggcgccgcaggtccgagtgcctcgcagcccctcccgaggcgcagccgccagaccagtggagccggggcgcagggcgggggcggaggcgccggggcgggggatgcggggccgcggcgcagccccccggccctgagagcgaggacagcgccgcccggcccgcagccgtcgccgcttctccacctcggcccgtggagccggggcgtccgggcgtagccctcgctcgcctgggtcagggggtgcgcgtcgggggaggcagaagccatggatcccgggcagcagccgccgcctcaaccggccccccagggccaagggcagccgccttcgcagcccccgcaggggcagggcccgccgtccggacccgggcaaccggcacccgcggcgacccaggcggcgccgcaggcaccccccgccgggcatcagatcgtgcacgtccgcggggactcggagaccgacctggaggcgctcttcaacgccgtcatgaaccccaagacggccaacgtgccccagaccgtgcccatgaggctccggaagctgcccgactccttcttcaagccgccggagcccaaatcccactcccgacaggtaacctcgttgcccctctccccgtttccccgtcgggcgggcctcagaccgggggggcgctcgggagccgcggccgccagctctggtcaggggaggggggttgcgggaactctagctggggtgggggtcccgaggcgaagtggaactggagtcgtccactccgccgcggtgaccagctccccactcctcccagagtccggggctgagatttgtttttcccttctgagtttctctctgcggttgcagccccggggggcgtgctttccctccttcttcctttctttcttcccggggttcccgagaggttggcgggagtggaggaggggtggggaggaaggaagggggtggggaaaagtcgggcctgggccgcggtgggcttgcacaatgcgcgcgcctccgcgcgctccgcaccttcgctcccgccgggccgggctgggaaagggggaggggggcctctggcatttgtgtgtgggtgtgttgccagcggcggccgagtttgtgaagttgagccctgggcccctttcctttgcggcctctcggtccacttcagtctcctgggggagtcaaataattgttctcttgttttccagtgttgattagaggtgggggtagaaccggtccatttagttttttgctctttctttccttcccccctcccgtttcccctccccctcccgtaagcatttattttcctcgcggctcaggcgatttcggaatacaggtttcgggcttcccctgcccagactttcctggaagttgtttatggagttctttcacccctgctcttcccttgtgtgttggaacttgggccggcttgctcttatcaaacttagtaggtcgcgtgttggtttcccagttgtagactattatttacagtcggctgaaacgcttttgaattagccacatctgtacgttgcgcaggaactgagttgcgctttacagtaccgaggttttaacacaagcctttgataatacactgcaggttgactcataggccaagtcctgcctagttcaactgtgattaaaagttaatgtttgggaagcgatgactaattctaggatcgccattgctttttaattcttattgcggatatgaacatggctgctattccacatacacaatgttcgattattgtgccaacttgattcagcatagaagtgaaactgtttataatgagtgttaacattccaataggtcccagtggatttgttttgtgtagggttctctctttttctttcttttttatttcttcttctttttttttttttttttttttgagaacttgcttcaggctaaacttcagcataggaactttgcccaaaagttaataggttttccaaatactgcaatgtagttagcccactcgggatgtaacttgagtggaaagaagagttaccgcccccactcccattccctctcctatttgcaggcctgttgtatagtctcctgtcggagaccaaagggttttggaactcagaaaaaatcacttaacctgatgacaaaaacccgggttaaggaggaggaaagaaggaaaaacaatttagctgcttgcctaaacacttcaatttgtcttaggtatgcttttttctcttacccctcgaagtgggtttatggactcattgtgggtaaatgtatgttggcatgcaccctacagactgcacggtatgttttcaaagtataatacacatagattggatcccccattttgtggcatcagccacaaagaattacaactgggaagtgtactttttcttctagtaaataatttttacaagaatttatatccagcagttctaaaattcataaactattatagttttgtttgttttaaataagtttttaactaagtgttttgcatctgtaaattcgacttttatttctcctaatgatttcctaaatcatacttattctgatgggaaactcaaaaaggtgtatcactttaaggcattaatgactctactga

SEQ ID NO: 56861 - DNA, 710 bp, Homo sapiens
aaaaagctcacttaatagtgtttaatcaggttgagataataaagtgaaaaacagtgtaagttttgattcggataggtcttgacagtctactcctaaggcaaatgtaacatttatttatcataccagataacaccattaaggatgttttgttgtgtgaatcctagtatgtgttttatattgattgtcttccagggtgggttgctactttgtaatgtaagatagaaagttttgtgacagacttacagaagagcaaaggaaaaggtttgatcatgaaaagttcgtacagtttttttttgccccctttcctgcaactttttcttttcttttcttctttttttttaaaaaaattcattttctggtgtcctggtatccatttcaaaggatcaggtttcaaccagaacagtaaagggcctgagactggaaagtacacacaagtctggcaaactcatctgcatgagcaagatcatttgttctcaagcagacatccaaagtaaatgattgaaagagctgctagctgtgaaggatgtgtcttgaaggggaagggagtggaaacaaaccaggttgttaggaagaaaaagaaaggctgcacttttttgaacctctccctgctgggtcacatgctgacctggggagattgttaaacagcttaatagcctgctttccttctttctttggttgatgctgtggctaaaagtataaggttaaagagc

SEQ ID NO: 56862 - DNA, 1835 bp, Homo sapiens
cttcagtgattatttgtagatttttggaaactttgctcagctttggagtagagagaatgagaaagagattaaattatttccatttaagaaccagctcaaatgcctgttttattctcttgataagtgttggaatattatttttgtctttcccactgatttctaaatccttctggttactctattgctacaataattttatgactcataggaggaatatttgtgtgaaagattaagatgctaattctttaaaaatgatattcatagactaccatatatagtcagcataagtgaaacagaataaatcttgcaacagtactcacagttttccaaaataaggttttcttttgatgttagtaaggtaaggaagtggtaaaactttctttaggttaaaatcttaatgaaaggtattaatttgagcagtctgaagtctaagtgtgctatttgtttttccttcggcaaaactttacagaaagctaatctttaataaataaacttagtaaactaactctaagccatttcattgagttaaaatctaaaggacttaagtggcactgaagaaagtctgaagagttgcatattagtaggctcactgagcttgtacttgaccttttcttctagaaagttcttacagctataacctgacaaacaggaaaatgattttttaagcagtttcatagttttaccttgagataatagtatttttcccttcttaaatcattcattctacaaatatcaaatgccctgctttatactatgccctgtgattgcagaatcaagctaagacagactttttttatattaccataaaaaatgttatggcaggaccaggcgtggtggctcacacttgtaatcccagcactttgggaggccgaggcaggtggatcacctgaggttaggagttcgagaccagcttggccaacatggtgaaaccccgtctctactaaaaatacaaaaagttacctgggtgtttggtgccgtttgcctgtaatcccagctgcttgggaggctgacacaggagaattgcttgaacctgggaggcagaagttgcagtgagctgagattgtgtcactgtaccccagcctgggtgacaagagcagaacttcttctcaaaaaaaaataaaagaaaaagttgtggcagatgtatgcactgagtgctgagaaagtagagagagaggaacacatgagtcagtagtggaaaggaagaacagtgaagaattttttttttttttttttttttttttttggacacagggtgttgctccaccacccaggctggagtgcagtggcacgatcacagctcattgcagcttcaacttcacgggctcaagtgattctcatgcctcagcctcccaagtagctgggactacaggcatacggcaccatgcacagcgtttttttttttttttttttggtagagacaaaaggtgggcatggtagtgtatgcctatagtcccagctttttggcagcttttctggggattacatgtgtgagccaccacactctgccaagacttctttagggaggttcattgatttctttatccaaatattgaatacaaactatgtgccaggcatggttctaagttatgagaacggatatacaatgagtcagatattaaaagtggaagaaagaaaaatagaccagttatggtcagagtgataggctggggatggagggagatgatagcttagattaccttctccagtgcaggtctctgtaattgacgtcttttgagcagagatctgaatgaactgagagtgagagccatgtgaatatctggggaagggagagaatgcttcatgcataacacaacagcccgttcagaggccctgag

SEQ ID NO: 56863 - DNA, 1774 bp, Homo sapiens
actctagcctggcgacagagtgagactcggtctcaaaaaaaaaaaaaaaaaaaagtttatgtgaaagttttgagggacaaatggaaatggcattttgaagaaaccccactcaaaatatgggaacatatcttgtgaagtgtcaaatgtccagttggaggagaaagactagtattgaccctgtgagaggcattaaagatatgggagtcatttatgtgaatatggcaagccatgggatttcatgaaagttccaagaaaagaggattaaaaaaatatgattactgtttgtcataattgtggtgtagtattcaagagcatgatttctggagagctcaactgtcaaggtttgaatctcactctgccacttactaggttgggctgaatgatcctggacaagctaacttttctttgccttagattcctcatctgtaaagtgggtataataatagtacctccatcgtagggttgttaagtgacttaacatttgcttgcaaagaacttaggaaaagtgccgtgtacatagtaagaacagtttgtgaatcatcataaatacacgagaccagaatttcaaaacaagcagcaggcagaatgttcctttaaaaggtcattgaatgtacttttccagctactcttgttactttctaaggaaactacttgataatcctgtactttgtaggactcatcagggtgtgtttagtaaacttcagtgtcctaggtgacttctttattcccaaattgtggggcaggtgacaaggggaggttggtcctctaactcgtggtgtagttaatcaggattttcctgtttgaatagacatggcaaatggttttagttagtcattactaatgcaagagggtccttaggcaagagcaggaagttaatggtgagtcaccttcagtgttatgacatggagtatttctttttaaaatatcacagggagttggtttttgctatagtagctaagttgtcaatcaagtaatactagtagtaaatcttacataaaaactcgcttccctcaagtttaagtagttctaatttatgcattattttatatattgcctactactctctttttgcttatcctgaatcaaatttctcaccctctgtcaatctaattttgtgttgctataaaggaataactgaaactgagtaatttataaagaaaggtttaatttggctcacagttctgcaggctgtacaggaagcatggtgccagcgtctgcttctggtgaggacctcaggaagcttacaatcctagcaaaaggcaagtgggaaccagtgtgatacatggtgcaagaaagtgagtgggagaagtcccaggcttttaaacaaccagatctcaggtgaactgaatgagaactcacttatgaccaaggggatggtgcgaagccattcatgaggtaccccaccccccaccccgtgacccagtcaccccccaccaggccccacctccaactttgggaatcccatttcactatgaaatttggaggggacaaacatccaaaccatgtcaccctctttacgtctcattaaaatgctggcctgtttctctcttcctttttgctatagggcctacttttaatcttttcttcgaaagaagactttggtattggtggtcaggcatgatagcccagccttgaaaagcttccacatctttttcacgtctaagggcccagctttcgagtgtgtaaaagttatttggggtgaaaatgtgtattatccattctcaccaatctagaggttgtcatgagtttgggggattggaattactgtttaata

SEQ ID NO: 56864 - DNA, 465 bp, Homo sapiens
aaccaaaacatgcaaccatcccaaatacaaatacaaaacatggatttaaatgatttgtcacgtcgctatttttaaatgcagggcgaatcccattagaacctttctctctgtggataaaatacaaatccctgcctaataagcacaataagagaatgttggcaattctgttatttcatctctagcacgaattgacctcatttctccaactggctttgtgctttgaaaaactgaccaaaatgccacgcgtgtgtttgattagcacttcacaccttgtttacagtgcactagagaaactggctgttgttggcatccgtccagctgttcctgatgagttgccaggctgagaaatctccctggattgggataactggaacaaaggccaggctgactgaaaagtcagctgaggctgggcctggtggctcacgcctgtaatcccagcactttgggaggccgaggtgggtggat

SEQ ID NO: 56865 - DNA, 1558 bp, Homo sapiens
tgtcctggtcggatctccagagtcctacagaggacttcctccacacagggcgggtcagtttcaacccatgggaatgaaagggggggaaaacatggagagcagcttccagcgcagggggaggaaaacattccccaaggaaatactagattcctgaaatatgtccagcccttgtggaaaagatgtagttcgggctgcaattcgagcaaacttcggagaagcttcaaaagctccgacttggcaattcaactcaaagcgctcttccaagctcttcctattcaactgcaacttctaaggcaaagtcattgtttacagcctggcggagttggaagagtctccaaaaacacaacttgccgtgacagttggagtttataaccaccctcggactttaatgacaggcaagtctgagaagcttccagcaccacggcctgactgacttctgcggggctggagggaacggtgggtcccagatttgggaccacccttctgcagtgaacacctcccccacattctcgtttgccacgcctctaggccacctggagctgaagtttcgctgttttccacggcatttccggaatgccagggcatgccctgtcaatcctgcacgccctgcggccgcgctgctttctccaccggggcagcgctgagtaggcggggcatgcgggtggggcggggctccagccagggtgggtggggcctctgcacgaacacctgcctgtacttgggcccggagcttggatctctgcccagagagctccggcagccccagtcatccccggcaatcaggaggcagcgccgctcggctgctgcagagggcgttgcccgacttagcgacaattttgtcctacctcctctatacaccttgctcaagtgactggactctcgagattcaatttccttattcacaaaatggggttgattatcgttaaatttcacagctgtttgaggattaaaagaatgacgtatctatattgtttatgtgccaagcactgacacttattcattagtgctcgtttctttcctttttctttccaaattcagtctgattcagcaaatagctaccgagggtctacttgtttccagtcactggggatttaatggcaaaataaccctcaagaagcttattgtctagtggaaaagaccaacaggtaaacgggcagtgggaagtgctgtgagggtggaattgctgggtgttggacaggtagagggggctgtggaggaagagcacgttgcagctagttagagaggtaggatgagagcaaggacagggagaagctggaagtagtacagaccctctggaaaggtgaagctggatcatggggccagatcatgaaagaattcctaaattataaattctagtggctacagatttttatgttgaagcagagaggaaacatggaagtatcttaagcaagagactatgatgtgatttggattttagaaagattcctctgggtagagatcacatcgatgcaaggcacaatttagctcctaagctcattattagcagcttcatttgagggtcacataaagaattcccctagggtctaaataaagtatt

SEQ ID NO: 56866 - DNA, 651 bp, Homo sapiens
agaagcctaaatattgaaggtaaaaagtgatttcctcattaatttacattccctctgagatttattgcacagtaaattagttaattgcaaaccttctaacaatgttttactccattatagattactttggaaaaacaaatttgatttttccctcttgaacaatgagtggtttattttaaagtaggtgaaaggtaatgtgaaggaaaaaaaaacccagcttcacagatgtatagtttaaagtttgccaagtacttagcaaagggttacactaacttcaaacggttggaaagtataatgtaatgtgagaactcgaaggtcttgtttctctttcagctcccattctcactcagtcccctgcaaaccatcggcataaagagcaaagtttcagagatcacatcctctagtggagagcaaatgaacaaaaggggaaagagagacgcgatgaattgcacgtgcgctattatatttgcaagcgggttacattgtccttggataagaattttatattccccgtgagtcggagactctgtgctctgaattatgttgctcaattcaagcgatgatccaaggccaatgacagtataccaagctatcatttcttggcaggtcgaatagtcatgtgtatattttatgttccttataaaagttagg

SEQ ID NO: 56867 - DNA, 1741 bp, Homo sapiens
tgtattaagtgtctactaagtggcaggcactattttatgttctgaggatacaaagtccttgctcttatcagacttatcttctagtgggtacaaattctagatgaataaaagataactatgatgccagatgtttacactgaaatacacctagctatactgtaccagcaaatactaagaaggaaaataaataagtctcagtgtagaaatatggactaaagacataaatttataagcatccagcttataattttcttcagatgctgagtataaatggcaatgagaaaagccccagggcactccactatcaatattcggggcaatgtagggggactagaaaagcagccagacagctgcaaattccaacttccatttctgtcctctagagtagaaatgcttcttcagcaaaaaatcagttttttcctttgaagatcaccattccgcgttgcatagtggaaactgagcacttcttaactgtggtgggatcagttaagcacttccttcttacaacttaagtgtgataaagtggcagtgggactgaggatctgctggagctttcccaggtagaagtggcagcaacagcaacaacctgcaggcactggcagggcagagactacaaggcagcaacgccagatcagtgctagtggcagatgagaccagaaacatacacccgattgccatgacaaacattgtaatgctgtattagctactggagctaatttctgtatcactgtgtggacataaacagcaacagaagttggaagagaatggaacctgccccctgttggctgagtcccaccccaaatgaatggtgaaattagtaatcatcccagctggtataatactgaattgtttgaatgctgaaacaattgtttcaaatccaactcaaactgttcactgagagccactcagtgtgccctggggaaaggggggaggagtggggggagggagtgggaagaggtagatggccagtaatggaactgtacgcactctgtactccgcgtaccctgccccaccccaagctggtatgacttcaggtaaacacaaattatactatgaatcacatctctgcaattctattcttgagctatttgatgccctgatgagatgcatttaaaccacaaatctcaactgttgggatctgcttgaattctgagactattatccaatttactggctatgaagcccagatttctgctacctataaaaatgatgcccagtgtcctcagccaatctactcttaatcatattactaaacattaaggagagatttgatatcaggccctgaggcatcacgtcttcagagacattgtccaaatcttctgcagggagaaaagaatctgtttaacaaatatcaagttggattgaacatcagatgcaatgtgatactatcattcaacgtgtttgtgtctattttaccacaaaaatattgtgagagacttgccaagtgttttaatgaaattcaaacatctgcagccttaccaccagtctcatcggcttatcaaaacaggaagtgggtgtgtcgggcccaaattatttcatttgaatgcaagttatcacctggcaatccctacttcgttatctaaaagttcacatggcactctgacaaattcatactaggatcttgcttaagatggttatcaaatgcattcagtctaaattgtctgcagaatcttctttcttctcctttttgaaaattagaatattggctcattttcagttcttccactatcttgtgggattt

SEQ ID NO: 56868 - DNA, 2327 bp, Homo sapiens
tatatttatacagtggaatactactatgcaataaaaagaacaaattactgatacatgttacaatattgatgaaactaagaaatatgttgagtgaaggaagccagtatgagtacacatcatatgatttcatttgtatgaagttcaaggacaaacaaatgagatctagggtgataaatcataatagtgattgtgggagggggaggggtggtgggggcattatagcttggtactgactgcaaaagagcatgaaagaattttctgaggtaatggaaggtgttcttgatcttgatctggttgatagttaactgagtacattcatttgtcaaaatcataaagctatacgcttttaatatctgtgtactttacatgatataaattatattttattagagtactatcagtataaaataaagtaagccaccatttatgaggggtaaacttcattatcttgactaaagctttacattagaggaggtttctttgtaaatttgatcttcgttagcacttattcaaggctggtgtaattgtattttatttgcaagatgttagaaagttatcaacagaccaggaaattgtcaacatttacaaggactctcagatttgctttggaattagaacagtatgttccctgtaagatttcactttcactttcagttctagattcctgggtttctttatacataaaaatctaaaaacttacagtgaaaaagcattaggctacaactaaagttgttacaacattatgcgaaattccctccagagaaaaaatatttttaataataattcccccaagggaaaaatacttttaaattgattatttgataataggatattgagagcataccgctctcaggaattgtcagagttctgagccaggaatgggatgaaaaactctgtcattcataccttgctcatacactgacagtagaaaaaaactggaaaaccaagaggccaagtgtggtggctcatgtctataatcccagcactttgggaggtcaaggcagatagatgacttgagcccaagaggccagccagggcaacatcgcaaggctctgtctctataaaaaatacaaaaattagccaagcatggtagcccgtgactgtagtcagaactactcaggaggctgagatgggaggattgattgagcccagtaggttgaggttatagtgagctgagattgtgccaccgcatttcagcctgggtgacatttcagcctgagaacaaggctctgtctcaaaaaaataaaaatgagaaaacaacaacaaaaaaaccacaaacaaacctagaaaactgaagatagtaatggctatacagtttgtgtctagctttcactttcctcaaaggtttccttgtgtatttctgtcgtgaaaagagtatttggagcttggaattcactggcttggaagaaaataagagtatttggagagaaaatatatttaggctgtgcttgctttggcagcacatatactaaaattggaaccctaccaagaagattagcatgccccctgcacaaggataacagctggatgttgaaaggaaaagaggagtttttttaataaagtatgtgagatatacaaagagttagaaagaaaatgcaaggtaggttacaccattaaagatgtggatgcaggtttagaatagagaaagcccaagtggatagtttggatagattggctctatttttgttagtcagtaaacaaaggtttactgagcacctttgagcagacactctactagtactagaataatgcagtgaacaaatatatacagtgcttgcccatacacatttatctagggaaaccattttttttttaattgtgcaaaatgttgcaaagcagacatgttaatttgcttccaacctactaggcctgaccctagctctcatgaccagtttgaaaaacgcgagactcagtcaattcagggatttcttaagccatggtctttatttatttttatttatttacttttttggcaatggattcttgctctctctcccaggctggagtgcagtagcgagatctcagctcactgtaacctctgcctccccgggttcaagcaattctcctgcctcagcctcccaagtagctgggattacaggcacctgccaccatgacccgcttatctttgtatttttagtagaaatggggttttgccatgttgaccaggctggtctcgaactcctgacctccggtgatccacacacctcagcctcccaaagtgctgggattacaggtgtgagccaatgtgcctggccagccatagtttttaaactggggtaagtgtgcccctgggtgtttacaaagacttaccaacagggaggtgggag

SEQ ID NO: 56869 - DNA, 3121 bp, Homo sapiens
gtatttgtttcagagatatgtgacagagagatgataaaagatgttcagtacaaacatgtattaacattctgtaggggaattggaatgttcaatgacaaaaggcaatgataaaatattttcagttattaaagatgacctgataattgcttcatggatgatcatgtatgtcaaattactatggtattaggatccatcaaatacatttaaaagagtgctctatcaattttttctgaaaatatctatgtttacattttgtagattcttgacatgtacaagagctttatgttttaatgttaagttaaaaatgggcaagggaatgcagagcttttcaaaattcttctggtgagtacataatcaaaaatgtgtaaggcctgcaaattattttcaataatctcaggagtgagttgaaaatggcttagaaagtcttgattgaagcagactcaaatgtggattaaaatctccatatgataaatacacttagtctttctgaaataattccaactggaacttcagctgctatggacagccaagtccacctaaacaagaggatgcctcagctcagtccaattgcgtgcagaatgcactggatgctgtttccacagaacgatgaagtctccaataatctttatgggctctgtctctggttggtaattgtctttgatctactggaagatagaaaatcagatgagctctccaaatccatctgttaccctggtacggatggctctcagataaagttgcttaaatttactgcttagagaacgttgagggaaatatggcagtgcaattagactcaaagatgtcaggtttccctgagaatggcactgcaactcagaaacctgccctgtgagatcaaaggctataaaggagggatttttttaagtagccaactccaccctacttattaaaaaaaaaaaaaaaacaactcaccaaaccaaacaaaagtatttccatacagaaaatttaccaagccatttcaatctttaaaatggtaaaataaactgcaaaggagaactgcatgatttttttcacatacccctacatttcctttcacctcttactttcttgatcagaacaaaaagtaaaaataaatagaaatatttcacaaagtttcgatttttttttttttaaatgctggacttctgcagctatagtagaagattgaaaaacctaacctttttacgtgtaaagtgtatggcggatggagggtggagaacagggcatattgaccttttccaggcaggctaagcaatgatcgtcctctctatatgggttgttatcaagatttcctctgacccacgagcaatgaagcaaatgtctttcagtaaatgccgcgaagatatgccacggttaagagtcatgcttttgggtcatggaaatccccgagtgggtttgccaggccactgattaagaggaagtgtgtgtggttattaccgctggagttcccctaagtcctaaaaggaaagcaccagtgcacatgcaaaccactgggaggagtgcggaacgcctggtacagataggggtggggatttgggtgacgcatttaaaagacagcgtgagactcgcgccctccggcacggaaaaggccaggcgacaggtgtcgcttgaaaagactgggcttgtccttgctggtgcatgcgtcgtcggcctctgggcagcaggtgggcaaggaaggctggtgtgtgtgtgtgtgtgtgtgcgtgtgtgtgtgtgtatgtgtgcgcgcgcgcgcgcctcccctggtgtaagagatgtgccagcggctggccgaggggcgcttagggctagagcccggggcgctgcagaggttgagagtcagtgggtggggcgcagttatcaaacaccagggcccaaaagcaggctctagataggttccaggtgctcaatttctatttcacgtttggagtgagccagtggaattgtgaagttgtggcattttgattcggttgccaagagttatcactgggcctttgcaggtgccaaataaatttcaggacagagcctaaggcagagctctggcacaggaaggaagtaaaacgtttaatgagcaaatggacgcatgtttccaagcggtggtaggaagacagcagtttttggttgtcttcctggtgatcagcatggaaacctagtagtgctcttactctgatcaatacattgtcgaaggcatgtacctgatgctaacgtaacaataatattaaatattgactttatttgctattatttattgctaacattaagtactgctacctgctatgtgctaggtttgtctctgaagactttacatgtatttttcacgtttaattatcataatcttaagaagcaggtaccataattatctccatttgacaatgaggaaactgaggctcttggagatttacttgtgcaaggtcatgcttctggttaccggactgcttggtattgggcacccccgatgtctgactccaaagcctgatactaatcaatcactgagctgactctgtggtcattaatataaaattgatagaagtactgtggtcactcaggtctcagtcatttacttcttcaacgggaagtcttcgtgtctaccccatataccaagctctgcagatgctatgagtgggagggcaggtacagagatgaaacatattaatagttgccattctaaaagagcttactgtctagcgggaggcagaaagaaaaggcacacttgccctccagtgtcagaaaaatggatgtgctgcatgcccaaagggtagggatgcccaacagccctgggactggggaggttgccttcttggtaggttaaatgaatgagtcagaagaggagaggctggggactgagccaatctgagaaggaaccactagaaatgaaagaagaatcccaagagcttggtatcagagaagcccagggaatgggacatttctaagaggaagtgtgtcccagtgtcagatgcaaacatttccattggttttagcaaaaaagccattggtgttattaacaccgaaagcagttttaagtgatgctgacttaatgagtaaatgggagagggaaaatggagacattaaccatacacacatgtccagtttgcttggctgtgaagagaaggggtgatacagggtagttgctagagtggaaagtgtg

SEQ ID NO: 56870 - DNA, 3506 bp, Homo sapiens
tccctggattcataatgatggctgtttacttttgagggtttttaaaaaaaatccggcagagatttttaaatagtatatggtagtgatctaattttattttccattagaataaccattcattcagcattacttattgagtaattaatcattttctcattaatacataatgccagtatatcaaattcccaaatacatagatatgggtctcttcttggggctctgtatctccttcctttaattgtccatcttagggcgtttaataatacaagactgtctcaattactatggctttattgtaactcattacctggtaggacaagaccttccaatcttacttttcttcttcaaaattgttttaaatactgtaaattttttttctacataaatgtgaaaaacgttagaagggcaactgcagcagacatacatagcttatttttttaagattaacagcaactttatactagcaaaatgaaaaaaaattaactgaataaacaggtaactgaattaactagctgtaacactagactacaaagttatacaagattaaaagttatgaggtactatttattatatgtaaatattacaaatattttttgttaaaaatatctaaggcttttgagtttttgaaatgcaagctttcccctatacttaagtatattcattatcttactgctttggtcaggacaagaactgaaaaagagaaataatcttgagttcagaatgaacaattcttgctatatatattttcccacatgtgttaggaatgttctgtaaaccttccgagaaatagtgacttgaactaaatactaaactactaccaagccccaggtgcatttttggaagtttttagtcattgggagccatggcatttcttttctctgtattacaaactgttacactcactttctttgactattaacattggaacagtagacctcctgttctgtgactgactggcaggcagaaatgacacagacaggaaatgggaaatggttcagggtcttggaattcccccggctccctaattaagtggcttgctatttggaagttttttaaatatttgccccttggagttccccagagagaagcaagcatcggattcaacgggcaaagagcgtcaacttcaaaagtcgttcgttggttgtcataccacaaacatttactgcacgacactgtgtctatggcactattgggggagtatggcggggggatacaaaaggtccatgactagcaaaagccaagggtttttatttacaaattttctattacctaagcattaaaaaaaattgggctcctctctggtttatgtacaattatatgtgcatgtacaccaatacacaggcagacgtatatatttcattttattgaaacattcagaaaatactgggagtgaagcctgacttgcaatacagttctctttgctggcaatgagcatctgaaataatgacacttttttctttagtgcatatgaactgtttgtctccagaacagaaaaccaaaagtttaaaaacaagatactcccgttgacatcaagtcttcagaattattcatctgatgcttcctagtttccaaagtttcgcttttttcgatttgcacaggcagctgttgaacgctgatgctacacaaacggttacaattgtttacttaagcaaaaaatgccaccagactgactccatcctcaaaatgcagtcatctggacggggggaggcatcacacttggggagccttgccaggggccagatcataaccctgaggtgacacagggtaggacgcgcaaaaccaccggcgccagggcgtttccgcagggtttcccaaaactcaaacgcagcggctcacggtttgccacgtcccccaggagaatggtagacacagagaggaaatgtggagagggcacaaaccgcaaggtgaagaaaacgaacaaacaccgagttgatacggatagtccccgttcccctgagggccgaccccgtgactcccgatgagcgtccagttgcgccgggcatcctggcctcccagcgtctttcccggaggttcatcgccgcacggcggaaagcgctctcggttccgctttccggccccagcctcccgggcgccctcgcgcggcggctaacgctggtcctcggccgggcgcgctgacgtcatcgtgcgtcagagtgagcccggatggggcggcgggcttcgggagcgcccgggctgatccgagccgagcgggccgtatctccttgtcggcgccgctgattcccggctctgcggaggcctctaggcagccgcgcagcttccgtgtttgctgcgcccgcactgcggtgagtgctgctccttccgggctcgggcggcgtggggcgggtggggacgcgagggcccgcgggggcccacttccctgatgtggcggcgaacgaggaaggacggggcctgaggcccttcggccaagggtcgagggtcgccgggggctctctgctttctactctcgccaaggttttattggattcggaagccccaacttcgagacttgcagtcaaagcgatttttaaaatgacttgttttcaagcctctggccgccgcccactcttctggcccttggactttgaccaagatgttttctcgcagtttttgcaaggttttaaacttagccctcggcgttcttttaatgtaatacattgaaacgaagatatttcggtggcggcgatatttcatatttcatagttgccactgcgctctgtcattccagtagtcgtctgttgtgtattgtgagaagcaactctgggaaattattgggtaaatcccatagtttctattcttttcccttccatcctatcccctgcccagctgcaatttgcgtaaagagaatgcagcagtgcggtgcacgtagataaaaatctttcatttaaagataggatataagaccgggtgtaattaaagcaatcatgccagtggtcgtagtgccggagccactgtttcacaggccactgtgttaggttttgttttcgagttgctttctgtggtcgttgctttgaaattgtaagggaatggcagagtttaagagtttatattaatgaactcgtggtgcattttactgcagttttcctagtcgtggagagacttgatattacaaactaacgttgctgtcttaattcctgctgtactgctgctgacagggtgtagtggagtgtctgtctgtctttttaaccaatgtgcctttgcctccagcagagtgccagagttacctttaggccagaaaaggggaggagagcaaggacaaaatgtttcctgtgtgaaaatttccatctgtctctgaagttgtgcgttttaaagacacgtatagttagtgctatggggagtatgttgcatttacttattttaattaatagctttttcatttagaaagttgtgacaaattgctggaattaagatgtattatctaaagtgtgaattattcttagactttactgaataaattgaagagtatgtaagttctatttggcatgcacatacagttttctaaaatactt

SEQ ID NO: 56871 - DNA, 2718 bp, Homo sapiens
agcatttcaagttttgcaaatgggactaacctctagtaagacattaagtaataaacagaacaaacagtgctaaaatagggcaaaaaaaatctgtgttatcagggcaaaagaaagaaaagcatggtcactcacagtttctctaatcggtaattcattgaaacagtaaggcttatcttcacaaacacagcaacaaatttttaaaaatggagacctcacctcatgagataattggtataaaattaggaccaagatacacgatggacatgattttaccactttttttcttaaatgatctcaaaattaggtctgcgaagccagtttgtcacacgcacaattaagcaaacaaaaaaacttcagcaaaacaaagaaaaattgttaattcacccaggttattccagaaaaagcaagtgttgtgcctgaaccttccagatttacaaactgcctttttcttttgctggataaaacgaacctaaggctaacatatacagtggatggatagaacttaaaaccatgaaaaccttgggttacttaacttatcctagtttactgaccattacctagggacctgacttctctaacagttgacaaaggaaaacagtatttacacaacaaatcccaacttcctggtttcatccaaaaagggctgtttgaagtctccaaagggccaagggcctaaaacgaaacaaattccgccctacacagaaaagcaaagtcaacatcatcctgttacgaccttactagcgacgacaagggccaccggcgaccgtgcagctgtgcccttaacgctgcgcagctgccgcgcgcctcggccgggtgtttatggcacacgaggggtggagagcgccccgccatgggggcggccgcctcaactaccgcgagggcggggcgcgctccccaaaagctcccaactagctccaagagccccgaagtctaacttcgagcgtcagggggacctaaagattgtaattcatctggataatactgcataatattagacgctgaaatgcctgggggacgcttgaaaagctccccgactaactgggagacgtttccgcgggcctaggtagacatatttttcaactcagctaatcttgtttacaaacggaagccttagaaactctaacctcggcaaacattaacttcagggaaaggctgtaaaaaccaacttgcggtaactcaacaggttatgcgcacccgtcccggcctgcgaccgccgcatccaaaaagcgagaggggaagcaccaggcaatttcctcagcaggcggccccggggccagcgggtgactggtccaaacctcagtttcccccaccccgcccggtcacctctgggtccgccccgagcgttcggccagacacacgcggaactttctgtaccagagcccaacttgggaacccaagcctcggcagcgcgctgcctcccacgaacggggctgacgacccccgcagccacttacccgccatggctgcgctttcatgggcggcccccagcagcgctagcacctgcagcgtccccaggagcagcgcggcccaagcacctcgcgcgccgagtcccattgttccgagggcaggatgcggcagcctcgtgggctcccagccgaggtggcggcggcgagagcggctcctctgcgcagccggcgccggctccgcttccccttcggccgcgcacgtttcccctcccgccgcttgccccccgaatgaccaaatagggcgcaggagcggggcctggagggggcgtcgcgtgcgcagccggggcggcggggccgggctgggtggcgcgggggcgggctcggggttctgggcgtggcgactcggctcgcggcctccctcgcaggcgcgcgcttgggaaccccagaaaccgcgagccgtttcctttctcttcggaaatggcagttttgttgtcctggatgaaggcgagcgccgctgcctccctgaatgctgagcacgctggcttcgcggtgcccggaaggaagcctttgaagagtagttttgcgggcagggaggggacaggggtgcgtgcgactcagagtgagagggaggagttgcagggcaaaggcgggaggagggggagattctggagaggaacttgaggggatgggattcactctaaggagtcctgggcggtcggagctttcccctcgcgtgacccagcctaagggggaagtggagaaaaacagctcgacagatttgttgcttaaattcaaacgtaaaacacctacgatcttcttatcccagttgtacttcatcttctccacgggttccctgtatctctgattaagacacgagattagtggagtgggcgggtgggggcgcgcgcaggagttggtagcaactctcagtgaaatacagtagagccatggaaagcgggggctgcattaatccaaccagccttttctctccttgtgccctgctgtcccagttcagatgaaatggccagttttgaacagtttttggctgagttccttttaaacccttggagccaatgctaatcacttgtcttgacttgaagtgcttgtaaagtctgcattttcatcgtgctcagaactctgaagtgacatagctacctgtggctaatgcatgagaataacaaaggctgagtcctggcttgggtgggaaccctcagctgaagtagaagactgaaggatccaaggaacctaaaatcacagtgaatccccacctgcaaaggtcttaatgttgcagatctttggcacctgagccaga

SEQ ID NO: 56872 - DNA, 599 bp, Homo sapiens
cctgaagtaaagtgatccacctgccttggcctttcaaagtgttgggattacaggtgtgagcgaccgcacccagcctactttcttttatttagaactcagtttcccagcctccattacaactgggttcaagaatataacctaggctttgccagtcaggctcatccatatcaaacttaaattcaggtataagcaaccagaggaaagtggctcattatggagctccttgccttgctggtatgaattgccctaatagccaggcggctgccttagttggcagcactagcagtgacgttagtttctcagtggttgcaacatggagtttctgatgtaatagtggtattgacagagagctgcaatggtgatagttttcttgctgggctagttctgcagtggttttgtgcattattcccagaggaatggccccagtcctgaatctctacaccttccaacacacctgagaactacccaatatcttcaatataatccttttctgctatatcagcaagagtcagcagcttttctttcgtacagctaaggatcctgactttgtatgattgtgggtctttttccccacagtgggctacagtctccattagatg

SEQ ID NO: 56873 - DNA, 610 bp, Homo sapiens
taaagcaaacaggccaggcatggtggctgacgcctataatcctagcactttgggattctgagtcaagaggattacttgagaggattacaagagcccaggagtttaagagcagcctgggcaacatagcaagatctcatctctacaaaaaataaaaaattagccgggcatggtggtgtgtgcctgtggtcccaactactcaggaggctgaggtgggaggatcacttgagcctgggaggtcaagcctgcagtgagcagtattgcgccactgtactccagcctgagtgatgatgatattctgtctccaaaagcaagcaaacaaacaaaacaaaaaaataagcagagaacaatgaactctgatgcaattggattttcctcttgaaacgagatcagaaagagagagttctgtgtggactgaagtttgtaagggtgacttctcagaaagggagtgggggagctttgtctgaatctgaaggatttggccagatgagaggtggtgatgtgagttttcagtgtcagttctaggcaggattatgttgtgctctgaggacagtaggaagaggagagatgtgagttcagaggttttgtagggagcatgtagggaagcctcatg

SEQ ID NO: 56874 - DNA, 2462 bp, Homo sapiens
gttcaagcaattctcctgcctcagcctcctgagtagctgggactgcaggcccgccaccatgcccagctaatttttatatttttagtagagactggttttcaccatgttgaccaggatggtcttgatctcttgacctcatgatctgcccacctcggcctcccaaagtgctgggattacaggtgtgagccaccacgcctggcctgaaacctcttatttctatgagagacaaaaggatgtactgtgtgatgtctcattacacccatcgttgtaccgatgagaaacctcagcaaaatcccagaggtaagtgttgacagtttcaaaggtcagaaggcccatgaccttgcatgtaaaatcaaaaggtcagaactattatgttgtcagggtgacaccctaaagaggggaggatgggtaggcagtgttctccctcctcaaagaaaattttgtcattttacccttataattgccacatattttttccagatacctttcatgtagcccacccccaataagtaaatatattagaatttcactgtgtaatgagaataaaagaaaggactttagatgataagcttttgtgatcttctcctctctcctcccttcagccctgactccagtgtctccagctgagaggctgagcttgccagctccatttctgactgctcatggagcagaatcagtgaccaaggagaaaagggctgagtgaagaaacaagtgtgagtgccaagatgatgccaagggctgtgatttcctggtgggaagaaagaaggaatagaagccaaaggaagggggatgaaaagcaaaaccaagaatcacaaggaatcaagttcggagagaattttggcagagattttgagaggggggctttaagtcagccatggacatactgaagcaagaggaatgaagggaaaaaagaaaaggggggaaaaaaagaagaagaatggggccaaggaggatttaagactaccattataggttacaagttgaattctttttaatattcttcaagcaatgacagtaaagattcaaataacttttaaattacctttgatttctaaaccaagtttcttggaatgtgaaagtcgccaagactgggccctgcagggcctgggttgggctactactgcctatggagattctgagggtattaaccttaataatggcatgaaatcaataaaaatcatccaaaagcttttttctgagcatctattgtatgtgcagcattgtataaggcatggaagaaaaagcaaaatagtataatgtgtggccatgtccctgcaggtgttatatttaagtaaatgacccatttccacgtgggcaagtaagtaatagcactccaccaaaactgtcaccagactgtgagggctgtaagttggtaggaagaagtactaactaaatgtagaacttaatatctatttttccttatttgatttttaaacttcaccccaaaacgtaataattgccgtaagctttaagattttataattccaataatatataccaaacaaaaataccattcctagaaaaaaaaagtctggaaaaaaggtaaagattaatagtcatatttctggttgaccattctctgagtgatcttttttttttcctttctacttttctgagtttttcagcttttctgaaataatatgtatgacatttcaaggaattttttaagctgttattttagaattatagttctaataatgataaaagacattttctgactatcctacaataagatacgaggctaaaaacaaatatgatctaatctacttttagagcctaggcctgaggaagaaaagggtaaaagaaaaccatattccatgatggagaaaaaagtctagaacttactcaaattctttcttctaaacatatcaagtgatctatttgtagcgaccaggtctttgcgtaaacattccagccatttgcctaatcatctggtttaaattttaatggatttaaccttggaaagagggctgtgtctacactgagagtcaagatacctggtttctgatgtcagctgtgcattgcagctgacttcctgtgtctatgattgagctgtctcactggcgttgcccatgggttcttcgtcttaaaaatgagcattttacatacattgatgatgggaatgtaaaatgtacagtcactatgaaaacagtttggttgttcctcaaaaagttaaatatagaattacccagtatacattacccagtaatacccagtatacccagtataccctgcccagtaattctcgtaggtatagaatcaaaagcagagattcaaacacatacttgtacacaaatgttttaagcgtgacccacaatctccaaaaggtaaaaacaactcaattgtccatcagaagatgaacggataaagaaaatgtgggccggtcgcagtggctcacgtctgtaatcccagcactttgggaggctgaggcgggtggatcatgaggtcaggagatcgagacc

SEQ ID NO: 56875 - DNA, 939 bp, Homo sapiens
gactaagaatgccttaacttactgggaatgtaggctagcaggtcttagcgttatcttatcaagcccctatttaagatacaattgctcaggttcaagcacctctgacagtacctctgtcataggagtgcctcgcggtcagaacaaatttatagacaaaaatgtaatgtgatgtacagaaattggaagtgaggtacagaaacagctggattggttacagttcagcatttgccttatttgaacacagtttgaacactcagcagtaaacgactggttgagccatggctgctgggattggccaagactcagcgattgttacaggaacataactcctaagttaggttttcaatcttgcctacctattaagttaggtagcagttcatccacaaggactcaaatatagaggtatggagtccttctcaggccacgtttagtttgctttaacacactaaataaagaagacatttttgaaatgaaaacagtgaaattccagatgaacagtaaatagaactaccagtcagtgagtcatttttcttggctgaccccacagtgaaaatgcataaaaacactggagaaagtataatataaaatgacatttaatgaagaagacttcagtaaatcgatgaggaagttaggatttttcagaggctaaaaagtaagtgaaagcagaaacacaaaaaggtcaaagaggttggcttttaccatggagacatttaccaaagcaaactctggttttcttccttgagaagcacaaatgacctggagccaaggcttgttacagtaggtaactaggcagacatgaacagggccggagaggccccccttcatcaggaatgtctggcaaccatcaggttgatggtcaggcggttgttaaactgcctctgcaaaataacaatttgttgcagccagcgccagggaaaggcagtctcccaataggtagaa

SEQ ID NO: 56876 - DNA, 1959 bp, Homo sapiens
aaaggaatgtaactgctcacccttttgaagtgtttaaatgtcttcactaaaaatttgacattttctacttgatttggtttactttttcctgaaaaaagtgaacacagtgaaaggaagtgataaatagggatgcaaatgggttatcctttcttgttctaaaaaattagtcttaagtttatttttctctctataggagataaaagatgtatgacatggaccacttatggtttaagctgaattgcctctgtcttataatttttactgagattcagtttatgtttgacctaaaaaatttaagtatcatacaaagagtttatataagaacttaatataattttctatagctcttttaacaagttgtaaactattttattaaccctttctttaaaaggctaccaagaagctgataattcatgagaaacagataaaatgactataaattattcctctcaaataggacatttggccctctttctaaaataatttcatcatctctttagagagaataaatagtctttggcagggagctagatcttgcagatctaacagggggttttccgtgttgcatcagaataagaattcaaatagaataagataattaacttgaaattccaggcttgggtccactcctgactatctactggaccaggagcctgtcttgtgccttgctctgatgagtaattaacttcagtttcttcatttgtgaagtaaagggcttagactagatcatctttagggattccctgagctctgaaatgtttacactgttagaataggcctaaggctatcagtttcaattatgttgtactcatctgtttcacagctcttcttgaatattttgttcaatatcagaaggatgttgagaacagggcatgtaaggagatggtgaaaggtctaggaacatgttagtaagaattggaggaacggagcttggaaaagtggttcagggtgggagaagtatgagatctttttctctgaaaaatatggaatctctcatgtgaagaaggcaaacatgtattccaagaacaatgggtgaaacttgcaaggagacaatttcagttcctatatacccctttatctccaacttccagtccctgatcctccagaagatcttttgatctctgggccactggcttaaactctcctccaaatccagtcccacctcctccacaaatttttatgtaagttctaaaactccagcttccctagaaaatcctttaaacatcaactgcctgctttatctttcctttccttgcaaaattttcagagagcactccagcctgatctctaggctcagagtatacaggtcacttgtgtcaatgctgacagccagaaaataaacctggcacaggccctggtacgtgcagctagtcttgctttgctgtaccttacaactcctcctacttcctggtgttctgtaatcagactcctcagccacagaccttcctatacaatgcctcctgtgaatatatcctggatccctactgcaaagaattcatgtcccttggacagaaacagatcttctaaattacaaagcccttttgtctccacttttgaaagagcctatcaaatttagagaggagttagaaagattagtggccatttataaccccattcataggaacctccactggctactaaggggtgttctttacacccatgattatactgtggttatcagacattccagaaagcccccaaatgaatgtcttacctctagagggaataagtggccagaacttctcccaggtcctcctacaattgaccaggaaatggctgagttatggggcctgatagggacaatattagaggccttttcctctaaggtgaagtggtctagggttgaattatgtactcagaagaaaggggaacatcttaaggcctatatggaatgatttatacaaacttttgaaaggttcactgcattaaattctgaagccctaggacatgaacaatttt

SEQ ID NO: 56877 - DNA, 1896 bp, Homo sapiens
gactcctatatcaggtattctgcagcagttctgctcctacagactaacagggacataggaagatggggatgtgcagatgccaacatgacatgtgtcaaaacataacaaaccccagactggtgggtcacaagttccactctaacctcatccatgaacaacactggtctttttatcttatgtggcaacaaagtatatatggtattcccatctatatggtcaggatgatgcagactcgaatatccgatgcctcccattgccagatactccactttaaatgccagtcagattacaagtgtgggctcagctgttgacaaagtagtgccacacaaatgtaccagaagtgacattatggaaaactcatttgtatatcacaattctaagttctcttcagtattgagatcttgttcctgggctttggaacttactttttggaaaaggccattctaagtctttctatagtaatgcacaagagttcagtattactatgcaaacattggaagcactccaatcagaagttaaatttatgctagagcccaggagttcaaggctgcagtgagctgtgatcatgctatttcactccaaaattgtcagggactagattcactaacagtcagactaggaggagcttgcttgatcattggtgaagaaagctgcttctatgtaaagaacttaggacaaatagtgtttaattggcaccatttaaagggcaagataaatattaattctccccatcagataaatgaggctcacgattttaatggactgacctatttctagggatgggagactggcttaatgggatatgatgaaatgtccttagatttgttctttcctgatgattcatacttgtaatctatgttcttctctccctttgcagatctcttgccactcagctactaacccagtttttctctccaccgccacctgctcagcttttaatgtatgaaacttctagggaagtttcagatgggagaaataaaggagttaaaaacatgctgcctcaaaatatgctcctctggcatattgactattatgaaataaaggtacttgaaaaacagcaggtgcaagatcactctttctttctatctcttgaaagcaggagatgaaattcccatgtgaaaggtgttttccctataccagaaggaaacgttattcttatcattgaggaagggaagttgaagcaaaatatagggagggaaatctgtacaatcaaaccttgttaaactaacccttatcttcctagtttcttttctaccccgttaactaccctagatcaagccctttaactttgtcacattttcataagtttttgaattttttttgttaaattcagaatataagtgttcaactctaactgtgactttgggtgctcatttcctcatgaagactcctgtgctacataacacttgtattaaacaaatttgcgtgcttttcttctgttgatctgtcttatgtcaacttaattctcagacccagctgaaaaaccccagggagtagagataaaattttgctcccttatagttctatgactctagtttgattctaatttagtatggacaaaaatgggaccccatggtcacttggcgtatataagtatctatatactttaagaagggatcccaggatgtggtaaggtttactgatcatacatattcatttattcataaattttttcaacagtcattgaggatatattatgtgtatattcaactacactgactaggttatagagacaaattagaccaagtgtttgtcctcaatgagagtctagcctaatggaggaaaacagacacaatgaactaggtataatagtgtcacaggtgctcagatagatattttcataggggcattgaggctactaagactaaatgaggagaaaagatgggagattatgag

SEQ ID NO: 56878 - DNA, 2335 bp, Homo sapiens
ggcttcccaaagtgttgggattacaggcgtgagccactgcgcctggggaggcaattaaaaagactttggaaacatacaaatatagcttcaaatgcaagtgctgtcacatcccagccgtgagaatttcctaatttatgaaatgaataaaataatacctacttttcagggttgctgtagtgatcagaatgtaggtatgtagggtggattagggatggctgcacattctttgttatgtactcacattgagaaatggagtttaataattaagtgccttattcaacaggtatttaacgggtgcttactctgtgtcatgtgcccttcttgctgctgaacaaagtggataaattccttgcctgaaagtaattaaggtaataccttttaatcattgttggtgatgtaatggttattaagataaccagaatatcggggtttacctaaaaagacctaattgtctgatatggacacgtaagaaatgaagttcaaaggaaatctgtcctaagtaaattataattaacatctaagtattaatcgttaacaagctgaatagacaccatatagctatttcaaatttaaattagcctctatcttacctattatttttaatttctaccactaccttctggaagctgtgtaaatgaaaatcctaactgagtaagttaacacaaataaataccacttatccattcattcattcaaccgatcattcaacaaatattttattttatttatttattttttgaggcagagtctcactctgtcgccggtgtgcatcaccacacccagttaattttttgtatttttagtagagatggggtttcgctatgttggccaggctggtctcaaactcccggttttaagtgatccacccaccttgaccaaagtgctggaattacaggcgtgagtcacagcgcctggcttcaacaaatatttgttggacaacttttatgtgctaaactgtgctaaccattgtttctctgaatgattcagacatagactctgctttttctgccaagaactccacttttcatatcaaaattatggtagaggaggaaaaacttgaaaaaaaagtgctaggttaatcatatcttttataactgaatgatttcttagattaagatattttaatctatttactttgaggtagattgatccctgaatgacatagtctagttactgataactaaaaaagtacaattaggtgttaagtttgaatagaatttcaatccattatttagggttcctaaatttttctatatactgtagttgcttggttttattcagggctagggaaatttgctaatttgagaggcaagacaaaaaagcctgtcaaatgcatttgtattatgccaaagtagttctcaaggtatctttcaagtgaatgtttagcacatatgcgtgcacacaaaacaaacttgatgttcaccattatcaacgactaggatggcaaatccactcttgctttgtaaccaaggaaagtcactgctgcatggtcgtaacgtgcttagtctttatgaagatgcctcagcaaaagatgacagggatataagactgagttattcctttgaagtttaactcattatcctttggtaatcataactccatgttttttacctccccagttaaagttccaaaaggcaacagtaggtcacagcagccccttagtcggaggttaggctcaggtgcaatttactctcctctgtatgcttgctagtaaccaaaggagtaacagtttcgcacaccaaaaatgatcagagtcagtggccagggtttacgtttcatgacagccttctatacttgtaggaaatacagactttaccgttaaagaaactaatgtggtcaccagggtcatggtctttagattcacgtcatctggagtgtaaagcactagatctgaattccctttttgttgattggggcattgacaattgaactgtaatgacaaaagagggtataaactagaacgtatgtttgctgatccatacagcatttttgtggtagcaagtattcttttggttagaattaatacatctcttctggtttgaatgatagtctcctgaagttgatgaaacttagtggtttcataagagaaagggtgccctcatgtggcgatttagaaacataacagcaaattctttggcattcccggcttcaaggaggaggtgtatattgcctcattttaactctggttgtgtttctgattacttttatcagaagagtatggcagaagtgaggttatatgacttctatggctagatcttaaaagtcatacagcctccatggtggagaagatgccatgagcaggcagtatggttgacagtcccagctgagcccagat

SEQ ID NO: 56879 - DNA, 466 bp, Homo sapiens
caaaggcggaaatctggagacgcttgagctaaaatgtaacgctataagctggctcagataagtgtccaccaaaaagtaaggccaggccctgtcttggatctcaaagagggtgattgagtttcccagggttttcttccctcaggggaggtccaagtgttttaagaggggaaaaccgatgatctgtacacagaaacactccatttgtgggttgtggaaggtgggtagacagccagaggttcagggcatccttccaggagtttaccttaggtctgcaaggcgaggcttatcaaagagactgccggcattttaagaggaattcccatcagagtggtgacaagcaccagcggaatgaggaagaaaggaaaaaatcacactcagaaacaataaacagcaaaagaaggagttccaaggagagacaactgagtagtgttctcccttgggaaaggtgaaatatctggaaaaatca

SEQ ID NO: 56880 - DNA, 2570 bp, Homo sapiens
gatatttagctgcactgtttatcttcatgtacccactatcttatgctatgctggcacatagtcagggttcaatacacatttgttggctaaatgaacgggtgccagagagatgattggaacttacctgatcaacaagtttcatattctttaaaattttcattcacttttaccaaagaacagtaactaactcatcaaatttgagatttggtctctgataactttcacctggcctcttgcagctctttgctagttccttgaattcctcctccagcatcatgtattattcatctttttatccttgggcttagcatgctgcctggtgcatccagggacttgatgcatgttgttgagccttaaaggtcttcttttgttttacccagtcatcattctccacctacctaagctgaccccatcagactttcattttcaggagatgccttcaccctttatttgctggacaatcaaggcaactcagcacaagctgaatgagtggcccaattttcatcgtctttagtctcacactctcttagattctgatctctgtcatcttctttcctatttgtgggaaggggtgtctttcttctatcttttttttttttttttttgagatggagtcttgctttggtgcctaggctggagtgcagcggcgcaatctcagctcactgcaacctctgcctcctgggttcaaacgattctcctgcctcagcctcccaagtagcagggactacaagcacgtgtcaccacacctgcccagctaatttttgtatttttttcagtagagatggggtttgaccatgttggccaggctggtcttgaattcctgacctcaagtgatctgcctgcctcggcttcccaaagtgctgggattacaggcatgagccaccatgccggcctctatctttttgattctctgtttaattactgctcactcccctgagatcaggtgatgtggtgcagtgaacagaacaagaaatgcttgaaaccttgttttataactggctgtgtgacctcgtgtgagtcattcaatttttctgagactcaatttcctactgtcaaataagagtgagaataatatctgcacaaacacttaaaaggatcaattgaaataatgcatatgaaagtgttttataaattcaggactattcttatttgtagacactttaaaaagacatgtttttactccacaaatttattaatagatgatatgcagaatataaacttagagtttatcaatatagccaagtttccttcttagtttgcttcactggaaactttgaagtacaaactgtcatgtcattggctgagaagccattcattctatgggactcattaaccagggctgcttagttcatgatgagtcagaagccaagaaatcaaccatgaatcatccacctcactgaacccaagaaaaatatagttcatacaactaaaaacccatctgtagccagtgctgtggattaatgatagtcaaagctgtgcatagtgcccttaaattaagaatgtttgtacccatctgaagagcccgtgaaaatccatattcataagccataacctgtgaacatgtaaagggcccctcctctctcagaatcaggtggttcagaagaaatgacaatgagtcagggatgttacttcacctctgcttctttatctgaattcttaatagatcacagagaaccgctctaagtaaacacaatgccatttgttggctttcagggaagtaatcttacagccagaaaagacacattcccagggagaatgcgaaggaggaagacttcctcctgttccatggtgggcttacctcaagcccatggcatcctgggaattcccaatttcaaatctactctccagaaatagtggttactgttattgttttccttcctgtagcatcttgtatttctttttctccactgtcttcaaacatgaacagttccctctttgaaatcctgtcttggccctgctgccactgccaactattatcttaacttcttttgttattaacaagcttctcaaatgaatgatctatctcaactcttttgtttccccccatttgctttttattatttatttatttattttaagatagggtctcgctctgtcacccaggctggagtgcagtggtgcaatctcagctcactgcaacctctgcctccagggttcaagtgattctcccacctcagcctcctgagaagctgggattacaaggcactgccaccacatctggctaattttttttgtatttttagtagagacagggtttcaccatgtttcccaggctggtcttgaactcctgacctccagtgatccactcgccgcctctcccaaagtgctgggattacaggtgtgagccattgcgcctggccccatttgctctttaacccctttccatgatctggctttcttcctcactgctctgctgtgactatattccaaactatcctggccactcagtcccttttcttcagtcctcagtctggtgaccttggcaacattttccactgttgatcacttaaaaaaaatacacccttttttcccagatttatttgggatttcaccacaggggttttgtctct

SEQ ID NO: 56881 - DNA, 569 bp, Homo sapiens
ttataaaaagtaagtgtatgttcattaagtatatctagctatatatatgcctctcaacttattatagctaacacttatttctcttcacacagaacatttgaatgtacgtttatacactatggagaatatctgacaaatctcacggtgactttaaaaggtactgcattccatcttgctttggaaacaaaccatgtggttattatgcccacagcttgaaatgtcccatcaacagatcattgttggtgacggggaattccaggctgttgagtgggagagaagagactgggagcgctttcataatcagtggctccctggttgccattagaactgtggcttgaaagaattctttgttctttgtccaggcttagcaagcactctgggacttttagcggcagctggtaggggatcagagctatagagtcatgggattccagctctggacagcaccttaggaggcagggtagttaggggcacggattctgaagtttgctagtttgggtttgaattccagctccaccccttactagctatgtactcttgaacaagttgcttatcctttctatgacttg

SEQ ID NO: 56882 - DNA, 1238 bp, Homo sapiens
aagtgaaaagtactgaataaatgattgttattatgtatacatacataacacaattatattttaatttcttatgtagtcattattataatcgtaagatataatttatctgcaaagcacttctcaacatcattcccttttgacttgaactccttcaaacgtgcttagaactgtgaagcaaatggctacagcttaatgagtggttataagagtactctgtttttcttctctttcatacttttctccttcccaaacttttaaacatatcctaaatttatctcctttacccctgcccaaccacccaccccacaattaaaaggaattgtctttaaggacacagggctcactgtggattccctcccttcccctcccctccctcccttcctcctttcctttctcttttccccgttaccctcacagttcctggaacattgcttaggaggtttttgccagcagaagttgaataaatgtctgaatgaaagtttacaaatatcccagttatttattcacttaacgaagggccacatgcctggatccaatgctgttgtagtaaacattgacccagccctgtccaggtcactaggtgatccgagagacagtcgttcaaaagtgcaattacaaaacaggggtcaagggtcattgttatgggattactgggacgtgagagaagacttcctgagcatgagaggatgggcagccctgaagcaggcaaaggaaaagtggcacggcaggaagcaagtcagatgagggggcctggtttgtgcgagaacatgacaaaccagtgttcctgaagcctaaagggaaggtgagacaaggcagaggaggctggcggggccaggtcacggagtctcctgtgccacactgagagtctgggcttgagcttgtggaggtgagagataagcattgagtggttttgacttttcttgcatttttcactttaacttcttgactttttcctgttggtattgacttccctctattgcctccagtgtcaagaatagaatcttggctctccctgaaaatgtgtattcctgagaaattggagtccacagggaacagaaagaagctatcggtgtatttgctactgggctttccctggggacgtgtgtgtttcttttcagttcagagcttattttcactttttaaatgatctatcgtcaactttatttttctctaatcaggtggaaagtttctagattttattctcatgtttcatattccttattgctgttttaaaagaa

SEQ ID NO: 56883 - DNA, 1146 bp, Homo sapiens
aatatattcaaatgttataaaattattttcttttaatatttacacttatttcaaactaattttattttttgttactttaacattttatttagttggtttttgcatttatttaatgtataaatgtatttattgaatcaccaataggggactgaataagctgcgtatttcttcctttgagcgcagctggtgcaataaacaggagctcgcagagtcccgtggccgcggaggggcgccagactccggggaagagccagagcgaggtccgacgaatcgggctctgctggcgaccagcccccttcctttcctccctggtggggctggcggtgggtgaccacggccgcatctgggaggcgactcttcggattcaagatgaccaacaaaaaaccctcttccccaaagggttagactgagcgaaacttcaaacggatggcaggagatgaatgaattctaaaatggaaacaatatgaaacacatgcgcaagctttggaggcaagaacgctgacctcaacctcagtgaaaactaaagcaaaagcagcaagagtctgcgcggggcaaacgtccttgcgatgcgactagcagacaagaggcaggagatgcgaggcgtcctacccgaatttagtacctccagcaaatctgtggcccagcgtggcccgatcaacaatggtagaccgagccatcaacctgttttcctaaaaatgaaaggtgatctggccctgactgaagacaaacgggaacaagcccaaaatgaacagagtgcctggaagtttacgcctggtaggtaaactctccagtcatattctcagtcaaggcttccctgacagtcccactactagaaagtcactggggggacagccaaggactcgtttctacaccaacactcagactttttgagaggaaaggaaaaaagccgcatttttatactccccagctcctaatggttaatgtgaaacttaccaatgaaccttgcacttcagttctttccctccccatccgctttgcttcagaagcctggtagacttgcactatcccaaagaagcggccacctctgaagaattcctctttgggaacatgtggatacttgagaaatgtttctgtttgaagaaaatagagggagaaacaaggtcctaaggcacacaatgtctttgg

SEQ ID NO: 56884 - DNA, 635 bp, Homo sapiens
ttagtaagcactcttctccagtcagtaaaattgatagagcgcaattttatcattggtaacagaatagaggggtccccgcctatcttgctcattcaactaggcttaaggacaacctaggggatactcaaatgtttgcccactgaaatagcagtgtcttagagtcacactagactaggggtctatacgcttcatcaccctctccttctcaatcctctggattgtattacatttactggaactggagcttcatggcaaaacagattttccaaaatggttaataaattacatatattaccacatgaaaggcaaggaaggctgtgagtgagtaataatgtctaggttactaattaaacatgtgcttgctttaaagcttttctctgtaataaggtttattacagtataattgattttcctttcccacaagttaatcattttaaaaccacaaatgaactacaagattcagcttgttccagggctgtattttccctgtctagtttgtactggcttagacatcatgtaatgacagaagtctttttctaaatttattggtacaacaccttaaagatcctaattccaaagtcaaaaggttttgaagaaacagattttaaagaactaccaaaaactgaagaaaggga

SEQ ID NO: 56885 - DNA, 692 bp, Homo sapiens
atgcatttcacatattcatcgcagtattgatgttaacactatttgaaattactgaataacgtcatagatgcaataaagtgatttgccatgcctatcttattagaatgttgtaacaaccctggaaattatccaggcaaaacacctggtttctaatccagagctctttccactgctaataaacaagggttatgagaaggcaaagagcacagtgaactctcagttattaacaggaaaactttctggttttctggaagccagtcttatccagtttgacttttggaaggccaagcaaccccacaaaatggatgtacaaattcccttgttatatttatctcatccactataaaaacacgggacagaccatcctcctaggagtgtctagaattttatatttaaaataagtagttactgattaaaatattgattctgctgagctcgcatttactttaagatattattgagatttttttgaccatttctattttttaagtgattgagtaattttctaaatttgcatattaggtaattgaaggttgtgtcgtggctggaatctggttcatgacaaattcctctttctagttgtcattctttccatttagttactctctgggacttcaggagaatgcacaattttccagtaaagccacgtgataagtatttgtttacacttatgaagtacttcctgttttgtt

SEQ ID NO: 56886 - DNA, 1788 bp, Homo sapiens
ctgggaccttccgggttaggccactccaaatactaaatatggaggccaattatagcatacaagttttcctttctaccattcccaagacagttgtcaagattccttatgttctgctttcttcacactctacaaagaaattctagaagtgacccttctgcggatatgtactcacttctaagtctagaaaaaggcagaggagcgatacgggagtaggggatcgagggtcggttgtggggtgggggtgggggtggggggaagcgcaatttacatatgcatctgttccccaccctgcagggcacgtagactcttaacgtgggcggctcttctagtctctccataaacgccagcgtgcacacactcgaacacgaggtcgggtcgggcgcggagactcgcggtgttcggcacctacagcctagctcgatcaaaggggcctcacctgtctccagccccagcccggcaggccgggcccgactccttttcctccagttgtccagcaaaggagggaggagggaagcttgaagggtggggggagatggtacctggagattttacactttttgaggcctccgtcttccgctactgctgctgccaccccaggggattttctcttcttcttcaccggcatcttccgccctccccggcagggtgggcaggggagccggggaagggggtccctgtccgctggaagcccctcagcgctggcacccagttcccagagacagcagcaagcggaggagcagagtcgccagcccgcaccggcgcggcccagcccggccgccgcccgctcccaggtatcctcgtcgtctttctctgaccgggacagggctggctcctcgccggtggacactgcggttcgttctcaccgggaggagataacgcggacagcgcggcagctccaccagtcacagcaagcaagaggctcagcctaacccggaggcgaatcgctgaggcccggaagtgacgcaatcgcggagccggtcccgggaaggggcgtggttccggttagcctctgccactcgtaggtaggccaggcagagcgaagctgtctgacccgtcgactgcggcagtccgcggaattcttgtatcctgtccagggtatcctgacctttctcatgaagcttctaccgcgctctgatgctggcagtcaccgccaaaaagtgaaactactaatactttgcagttgacgttaaaaacaacctggtaaagtagaccaagttccacttctgagctcttccacacgataacctcacctgaagtgttcccaccccgtaaatgcattgtcaccctgtgtcttgcgtgttttttttatgggcctgtgatcagccacccactcccccttctccctacctttgcatatcactttgtcctgtattgaaacttagctctgccattatttccacagagctcacctctccgataagagacagtaggtgactgcgactcagtagagagaaatttgggggacagttctaaggaacctccccctagacccaaaacacactgtaatctattcatctccacttaggtggaaatactgtttttaaataatggttattgtatgtaaagacatagtagaaagtcgttagtaattctgttggtaaaataatctctgcaaaccaactgtgatgggagaagactaaaagtctttgagtaatagttgaagtggttcctgtgaaactaccctcacaatggcaccctaatctggtcaatccgaatatcatatttccttagtgttattaattggttcaggatggacacatactcaggccaggccaatgagtgccaatg

SEQ ID NO: 56887 - DNA, 929 bp, Homo sapiens
aatgcagcagcacagaaaggagcagagggcgactgagaaagtaaattaacattgtattgaattcctagtctttataagcttctctaaaaagcgatttttaaatagtaatcttttacaatccgcactacacccctggttgtgagatagtatttccccttcttaacagatgtgtaccttgacgctgacagactggtttgctaccaggtgcacgtggagagcgagcactggaacccagctctcctaaatctagatcacgctgctgtacttgaaggctagatgtctctcttctgattatgcgtgataagaaatcagtaagaagaataaaagacatgtttgagagccaacataaacttgtccgaaccccttacaatcgatgaccgcagggagccgctgaagagctccgaggcggtcgatagcctccgcgagctttgcgtgcgcgtgccccgagagggcaacgcccaccgcgcgccgccagcgacgccgccgtagtgctccgtcgccatagcgactacccctggcaaccgcgaagctctgcggtcccgcggtcgggctacgggtttgagcaaagctcctctcttcccttcacttccctccggactggtttcttcttccttcccccttcccccaacttccctccaccccttccaatcatggcgaacgggactgcggacgttcggaagctcttcatcttcactactacccagaattacttcgggttgatgtctgaactctgggatcagccactgttgtgcaactgtcttgaaatcaacaacttcttggatgacggcaaccagatgctcctcagggtgcagcgatccgacgcaggaatctccttttccaacacggtacggttccttgcactcctgcctgacccctgaccactcttcaagtccccaggcccagccagagggacgtcgggtcacactctt

SEQ ID NO: 56888 - DNA, 594 bp, Homo sapiens
taaaacatatattaacctctcttatatggaaaatggaagataataagtaattgactcaaataatgtaaaagaacaccgagtatatagtaactgggaacaagaattgaaatctaggggttcagaatccagagcccccattcttaattcatcaaactacattacctgacagttggtgaagagcttcttaaaagaatgtagacaagatatttaaggggctcagaaaacattagtgcattccaacaggtgagatcacaaaggcttctgagaagaggtagcaaaaatgttagtcttgcaacatcaggtacagatgttgcaacacagtgtgatttgcaaacagtacacagattagtgtgtgggatatccaaactacctgagttctgggcttctgttttatttatttgtgtgctcagtaaactaatatagtgttgactgaataaatgatatgtgaagaaatataataagcaataaaattgaagagtttttaacaaaaaaagtcacatatgacaaacacacagctaacatcatactcaatggtgaaaagttgaaaaccctttctctaagatcaggaagaagacaaagatattcacatttacc

SEQ ID NO: 56889 - DNA, 2092 bp, Homo sapiens
caactttcctaatagaacaaacctatgtcaagtcagtttcataagaattatgtgacgatcttcaaaggtaataaatgcctgcagggtatttaagattgagctattcgcggtgaggaagggggtagtcatctgactttttttatatgactacagattgctgcgatatgttataaggtttagaattcactgatctagtccaatttcttccttttcctgtgaggagaatgaagccaaagaagcgttatgacctgctggaatactagctgcctaagtaactctatcccttaggctttttcagcttctgtgtataagacaggtgacctaaaagttgtgtgcagaatggattggagagttaagtcctggagggaaggataccagttaaaaacaataacaacggcaaaacaaaacaactgtgatattaacccatgaaatattatattaaagtagtcagtatcaggaccaacgagaaagaggaaaaaattgaatcactttaaacagaccaagaatgtaattcacaataagagatgtcgaagaagataacaattcagaggctctcagatctgattctgcgaaaaaggtttgtgatctgggcaattaatttggaatcaaaagaaagatttcagagtgcatttcgaaacttctagaattgtctcacacaaataacttcctctggctttctttaccctccctttgattaccagaagctgaaagaaaggaattaacttctttctggctcaaagacatctggaaaacatatgacctccgtcaatatctctaacaccaggtcccatgattcaaactacacacaatcagtaagaaaaggaattcaacatgtgtgctatcggctcacttcctttcttgtgtttatttcagagcaataaatcaagtgttttctaagttcctactcccaaactcctagtcagaaaaggactcacctgccatagggaacagcctctgtccttttttacagcgttggaaagagcctcagagtcaaaaatgaaagtaaactatgtatttccttattgcaaagggcggaaacgtgtaattacagattgtgaaactgctgctcagaattccagactcattatcaggaagtgccttgtcatcagcaaattggcatccaattactggaatttagtttctgacttgggggaaaaaaatgaaaatgacaaaatattatcctgtgggttgacacctcagcttgtttcttttcttgtttcctgtggccacccaaacttcttctatccatctgtctcttctcttcctgatctctcagtttttctttctctgattacaaagaacgacaatgactgaagaagtttaatctaacaactctttttcatttcctgataagaattaacccaatagttcatatttccagctttttgggcaggcactgagctgcaggagtttttacatagtccagcagctcccggaactctagtgaggcaggagtcccgtccactcccatggaaagggggctgaagccagggagcaaaatggccttgcagcaggtccattctcacagaagcctgcaagcttagatccgctggattagaatccccactagccagcatagcagcctggagtacgccagagatgaccgagttccccaggggaggggcgactgccattactgcagctctagtcagcggtttttccctaccagtgctagggaggctgggcagattggactgggcagcagtcttcacagtgcagcacagccgctgtggcagatcatggccagactgcttctttaggtgggaccgggatccatccctcctctcccggcaagaaatgcttgcaggaatttcagcaactccacctagagtttacagacagagctctcatttccctggtacagagcacctgcggagaggggcagctgcggtctcaggttcagccaacttaatctttcctgcctgctggctctgaagagtatcagcgatccagacaagggggattcccccagcccagtgcaccatctctgctaagggatagccagactctttccttaagtgagttcctgatcctgggcctcctgactgggttagaccattcaacaggggttgccagacacctcatacaggag

SEQ ID NO: 56890 - DNA, 920 bp, Homo sapiens
gtttctcttcatttttaataatattttaaagtaaatgtcttgctaaagagtatgataaaagcgtgagttctgggaatgcaataagttctaagtgtgtaaggaaaccataccttctaagcatctcttttttcatagattaaacagtgacagatgctttttcttctcatttcagaaaagtctgccaatgtgaagacatctagggtcctgggatattactggtctgagggtatgttttcctgtttaaaggtttggagaacttccaacttaacagtcatctcctaagacttttatgtgtctgtgtgtagaacaggtgttttccagtaaaattagaaattagacagaaattctatcttatatccagtagtagaattagtacaaaaatattattttattacaaaataataaatattatagtgcagtctccttccaaagagagtttctattagcctggcagtgcaacaggaagtaatgtggaaatcaggagtttagataaaaatttcaatttgagtcttatctattatctaatgaaacaggaatctctcaggaatctgctcaggaatctcttaacattgacacaacaagaaagggagtagtggagtggtacaggatcagtaaagcaatttcccacagcacatagggacttaggtggttatctcctgactaaatcagatcatcggtatatagtgtgtatatatatatgtgtgtgtgtgtgtgtgtgtgtgtgtgtgtgtgtgtgtgtaaacagttaaataacaaatgaatagctaggattcttcttatcctgcactccagaatccaatgctttgttggaaaccctcataattataaccatatccaaaggcctagccaaggcctgtacctcttctaatagcccagcccacccagcttcctggtctgctgtgccagtgtactcaaagtat

SEQ ID NO: 56891 - DNA, 893 bp, Homo sapiens
tttcaacatgtaagtaagagtttaattaagattgcaaaatgacatcaggcttcccctaaagcctcagttcctttctgggcttgcctttcctttctaaagtctgcaagaatcttctagttccttctctcctccctctccccccttttccttgcttctactcaagtaaacttccacagatgctaattatggcttccagaagagccagccccttccaaaactctttcttcccagggacctgttcttggaacagtaaaagactcaccggccatggcttttctctcctcccttcttgtgtgactgaaactgaaagtatgcttcgccttcctttttggcagggcctgtacatgtattgggaaatactcactgtgcatgcatatgcatgtctttatttttcttcccattaaagaatcagaactgtagcctgcatcaggtagtgtatccatgggaaattttcttcaccagcccttggatagatcagggtaggaggggaatggggcttggagagtaagacaggattgaaaaagtatgtgtacaattaaattcacacagtgaagagtttctcaatcattagaaagcttgacggagaaaagtaacacaacctttggagtatgtgaaccactgttcccctgaccccacctcatagctcttgggaaagttgtgggtaatgtatgtccctgtgaaacatttttgctttaagaaatagaaacatttttcaccagaattaaagcttttcttatttaatgtccttcttttcacattgcttttttctttctgtttttttttttttctgatacagggtatcattctgtcgtgcaggccggaatgcagttatttgaccttggctcactgcagcctccacttcccaggctcagatgattcttccaactcagcct

SEQ ID NO: 56892 - DNA, 680 bp, Homo sapiens
ttttcatggtgtttttatctttactctgccaatgacctaatccgattgcagcaaaatcttgagctccttgccgctggaaggatttgtagcatggaagaaagcagaaattgtctgtgcaccacttctctttagtttatttacttttaaatttatgtactgactcatttattttttctgctgcttaagggtttcacatgagggtttctccccaccagccagagccaagaaccacggagtttatgcatgccaaagtggcatccaggacacagaaacaatgattagaccatgtgtctggggatgtagaatcatgagctttgagtcatgtcctgggaatgtaaacactgagccattagagtgcaaaggctcgctatttcctcaaaaaggaagatgtcaaaaactggaaacaactcaaattccaattcaggagcataagtaaacaatttgtgctagacacatacactgaaatactattcagtcataaaaggaaaaaattactaatatatgcaataacatggatgaaaaacttatactttcattatgagtggaagaagccatataggaaggagcacataccctgtgattccaattatataaagttctagattagaaaaatctaatgtgtagtggtagaaattcaatcactgcttatcagaggaggaaatggaaggaaattgagaaca

SEQ ID NO: 56893 - DNA, 1675 bp, Homo sapiens
attttctaaaatcccatttcacaatcgttcttcactagttggaaacaggaatgagatgtagttcacttacgtaatccttgtgaagatgatgtactgccaatggcataatataaccaggcaactttttacaagcactaaaacttgagaatgaagttcctagatacttcatgataagtcagaattaagaagtctgagaaaaaccagacggcaagttccggatcaaaaaaatttgagggtaaattagttaagcagttcaagaagaaaagcatcacaaatctacaatatcaaaccctacccaaattctctttaaagtgtggctttcccctcccctatattcttataggggattcacttccctgccaaaaagtatgttcttctctaaaactcgtggtaggtgcataacaagtatacttatgggtcgacggttatcaaagtatctttcacctccctcccgctgcctcctttgggaccgtccaaaaagagcccctgggaagaatcgagttagactgggctcccggaaggccacccaggggagcaggggcgcgcacctgcctcggccacaatgatgaggttgctgctggtaggagtcccggtgggagtcggggcaacctggaagatctcctctctctgggtattaaatgagagtcccgactgagtgcccagaaacttctgcagtcttgtttccgtggcctgggccctccccagcctccccggtcaggcgacagacgcgcgtggcacttctcccgagcgtgcagtcccgctacgtcgcagcccttggaccaaacccggcagcaagcgttgcgccaattgccgctgacccctccgggaccctacccactgcgagggcacccactggtcacggagccgccgcttccctggccgcctcctccagcatagaaccgctcacctgcgaccccggcggcacctccccacggtcgccccaaggggggtaggaaaaaagatgcttcattgatcccccgcccactaactgggcccgcccatctcccgccaccccaatggctcatatggctgccgctcatttgatgagtctcatccattggttagaatggtgtagccattctggctgagagcccgccctaggcctggcctcacaatgggaatcaagtcccaaaccggttccgggttagtgccctggaattccgccccctcgtgattcacctccctgtctgtgccccgtctgtggcgcgcagctctgtcagtcaagtggactctaggaagggattggcccctagagatccgcttgctgcgctgttccaactgattggggcactggccgctgcatctccaaactcgtctcttgtccttgaccctcacctgttaaaagggcaaagaagaagtaggaaacttgtgctgctccagtcgggttcttaggccagcatcaccttctcctcgaccagctgcgacctaattggcctcagccattcctctaaggctgcccgtgccaaaggtcgctggtgacttccttatggctaaatctaggagtcacttcttagtccttatcatactatatacttcccagaagacatttgaatttttttttttttttttttttttttttaccattcttcactgtttccccaaatatgtgcttctgctttcttctctcccagtcctcctctatattcaagtttgcagttgcttattttctgccgtc

SEQ ID NO: 56894 - DNA, 2456 bp, Homo sapiens
ggagaagtgagttatgatcattgctgatatgggtattagtatcacttacgtatctttacactgtctcttattgtactttttatgcgtatgatttatttgccttaccagattgtaagctccctgcagctggtaagcagattttcaacatggcagctgacacaggcttttggttagctaagatgatatattaagccaataattcgttttactgtcctttggggatctgaatttgtgtgtgtgtgtgctcagaatcccatctactttcgagggattcggggggcttatgatatcacgaaaagttaatgaagacaagtatagataaaaacataatagaacccatcttaaataggacagaaatcataggcaggtaattgtgttaattactaccgctggcctttggctgatatttccgggcagtcagaggaagaaggaaatcggctgaatcccgcagtaccgcactttaatcgacctccaggtagtcatttacagtcatctgcagagaccaacttttccctggaccaaaacctgcagggcacttggatcgcgtgggctttcatacgagagtcaacaacagcctacacggaacaactaaggaaacagacatacatcaatatgacccttcgcaaagtctgagaaaataactgagcaaagttatttacttgtttctgttgctgttagagcaaggacctctgtcatgatggaaacactgatacctcaacaatggaatcctgttttctcgctagtgctctagcccaggcttggcaatagcaaaacagcacctgggtcgcttcatcgccccaaataaacagccagcattagctcagctgctcgctggcagcctcggatccaggcggggtcagtgttgcgcactggggatagtgcctctgctcggccttcggagggagggtttcaggtaggctgctgctaagggtcgggagcgtactgtgtgagggtgggtcttaggctgatgcggatgggggcagggaaagaaggaactcagggctgatgcgttgcacaactgcagggggcaccactgcagaccccctcctagagatggaaacctctcgtgccccgtacacgaagcagctgaagccaaggacattctcttctctgtgggtcacaggggccaactcagaccctgagaataagggctaccatcccactcctccctcagaccccggagctcacccacctgcaactgcagtctccgaagtctccaccccagtctccctgcctccagaggactggttgcgattggcctgcaccgctgtcccgttaactcttccgcaagtgtgagtggcgtaactgtcgggctcttggccttggtcccgcccttcgctcgcctccgaagcctcgcctacttgacgtcatacaatgccgcaaagcgcagggctgatctccgtctccgcccccagctgctttctccgagaggaggtggctgagtcgggggcgggctgggagggctgtcggtgggccagtctgcgtagcgacggcccgtcccctgcgcacggacgccgggaagaagggggtggggccacgtttgcgtccgcgccatcaggcccgagatagcggcgaggtccgctttcagtgtatggttttccctgccaaacggttctgcttggtgccatccatggagggcgtgcgctgggccttttcctgcggcacttggctgccgagccgagccgaatggctgctggcagtgcgatcgattcagcccgaggagaaggagcgcattggccagttcgtctttgcccgggacgctaaggcagccatggtactacaggtcttttttggtatttagagcctaggaagcagatcttgggggaggcgggccgggctgtggagacccgacactcccgcgctggccgcgaccctctcgctgtggagcctgtggccggcccgggcgacagcagccggcgctgcggagttgtgggcgacgcacggcctggtttccacggcctttgtaaccgccttggaggccgcgatggctgtaaacattatctctttccccttgttatttcaaatggagaccctcctaaaccatgaaataagtgtagggaaggccgacaaaattgggtttttctgtaatgaatgtttttatgtctttatctttaaatgttatttttttttgtttgtgtgcgttcatagcctatgcttattctgcctgttaaatatcccatcattctccaaggactccctgcacgtggtaggccctagaaattattgacagtatgatttagtttgtagccctgcgctccccgggattgaagccaatgaaattgaagccagagaggataccttcctcactagatgccatgggaaacagtattttacgtagatttatttattttagctatgtattttgaagcaacaaatggaaaactggatttcaaaacaagtaatctgtacaatatggtgcaatttgaaacaaccgtgaattaccatcatttaaaaga

SEQ ID NO: 56895 - DNA, 924 bp, Homo sapiens
tctttctccaaacaactcaaacccccagttcccatcgcattccatttgggtgagatgcaactaacagtccccttccaggataaaggagtcaaagaataaagcttgcctagaggcaaaaaataataataaaaacaacagcaaaacctgacaaatagaaccagggaaggtcatgaagagaagaattctcatgaacaaatgcctgataacaaaaactatcacaaaagcctaggcaaaaactgcaaccttgcacaaaaaacacttctgcaaggtcatctgcccagcaactgcctgttcaactttggactagtgtcacacttattattgatccttgtagccaagagtaatgatctcaaaacaattgtgtaaccctcctcattttttccttaaaaaccttgtctttctttacctccctgaatatgcacatagtttactatgacttatatattcctattgcaatgcccttattcccaaataaatattattttcttttagataccttatctctctgtttgctatctaagctgacactgtaccccagtttggggaaattttaaaaatcagaaagcaaagattacaaacagaaatctgtaattgcctggggcaataagcagacagattaaccaagataaagatttagaaataggcaaaggtctctttgctcaatcccctagtggggatccaaagccttatgtacgcaagtgaatgaaatggtcaggaagtggtgaagaaaaattcctgggaatccttgatatgggagccccatgcactgtggttccaagattcattggtgaagcccttgttggaactacaattagattgagagaacataacaatgtaaaagttgataggattatgaaagttggaatatttaaacaggccttgtttaaagaagtcgtgtctcctttacctaaatgctttatggga

SEQ ID NO: 56896 - DNA, 1012 bp, Homo sapiens
tgcatttcttaaggatggcagtttctctttatactctagtttcaagaataaaactttttgcaagattggattacttgggatcgaataatctgataacatttcagactgtttaatgtaaaattaggctctacatcatatgtacaaagctcagtgcattaattataagaatagtgtgtgtctctggccctgacataggaactcatggaaagagagggcaggatgagagggagaataataactcacatactctctcacacacgcaaacacacaaccagagagctgctagagtagtcctggactgaggtcaaaatgtatggggtgtccagtagggaaagcagagacactaacacaaccctgagtcatagaactgatcaaacaaaaggatcaagaatacaaagttcatcttagtccaaacaaatcaagccctgggaagctactctggaggctacaggacaagcccatcctagaggaagctttgagaaaaggaaattaaccaatatgtggtattggcttactatgttttacccattgtgctgggcagtaccacatactggagaaatttaccactaagccctccacaaccccctttgtcagctgtctttctactgccttctaagcatcccccaaccaccaacagttggggcccccaggcagtttcctgatggattccacttgctctccccagaaaagtttacccaggaagctttcctgatcttttcctccttccctcctccaatgtcctttccctcaaggtcttgctaggtgacagctaatctcagcaagaatctgatggattttaatgtattattgagtttcccttcccagactacccttgaaaacaccttgacctgccaggaggtttcagggcctttacttctaagagaatttttgtcctaataataaatcaagaattagaagaatgtagctgctcaaataaatctaaatcacctaggattaaaacctgggaggccctgaggtgtttttggttgtttgctaatttcaacttttattt

SEQ ID NO: 56897 - DNA, 1385 bp, Homo sapiens
catttaaacttgtttaaaactcttccaacttaaataaaaacaaaaaccctcactgaattctctgttgctctccaactgcaacttttctctttcattgccacacttcttacatattgaatagattgtcagataattcagaagcttactttctccattctttgtatgttacctctatgtatctgaagtttagtgagaaatacaatgtttcgcgatcttttgtgacaggctaaatatactgagattggtgttaacttttgtttggattggtaagagcttacagtaagtctggaattgataccaatagagacaggaggaggaaatgtcaaactgagtctattcaagtgtgacttgaatgtgtttccgaaaaaggaaaatctcatttcagatacagcagtagcaatgactgaggctgcgagacatgctggcagagtccttacaagccgcaggggacctacaaagtgtgcagtccgagtgatagaaatgtaaagaatgggtaacttaaaaggtaaagaaacttggagaaaaagcgacagatctgcctgaaaagagaattagcaactggcacctgccagaacatctaaaaaatcggtagctacaaaagggtttaccggcattgcaaagggagaactcacccaaattaaggtgagattcagtactgacgaggtaagggaaggggtgagtgggctagcttacgggaaccctcaactcccacaacaataaataactacaaaagccccaaaacagaggtacctggcgcaacacctcggccctggcattccgggtctgttctttccgctcttcgatactcttcgcactttcaaatctaccactagcagccgccatacttgttgccatcgtaaagctaagaagccgcaagaaaattctagtttacgacggtcgtaatttaacaaacaaaccgggacttccggacccgaggaaggaggagcacggctccaccaacagggcatgcgcacatctgaggtcgcttagggctcggattaccgcagcccagattttaaagacccgaagggtgttggagggtttaattctttcaggtgttgggtgcgattgtgagcaggattaatacccgtatatatttattatgcactttttactatattaacagctttctcaccaatttcgtcttaaaatcaccggagtaagttacaagctcttggaagttaagttggtacctctcaaaagttttctgcggaagtaccctttgtcgccagagcatcatttccctgtgctggaggaatgggataaagggaggctgccagaaaggtagtggcagctggcaggaaggacagaattgccttgaagattcagtgttttgttttggtggattttacttaatatatgaaacactcatgtgaattttgcat

SEQ ID NO: 56898 - DNA, 909 bp, Homo sapiens
cttattcttcatctgtaaaaatgaagatattaccctctacttctcagagtttttgaagggattgaatcaggtaacatacggaaaaagttcatcaaaattcagaacacacattttaatttgtttcctttttctatggcatgaagctactatcttttgccactagatggcaatgctgcaccagtaggtcagaaatgggccacattgtaccaaggaaagtctagatcttatttaactgctaaaagtttcgtgtaaaaaattaaatttcaagttgttttcctggcatctgatgaggtgacagataaaattttggatatttaaaagaagaggacatttaaaagaaaccaaagtgctaatggtgcccttatttttcatttttaaatcttaattcattttcattaagaatgtggataatctttgaaaagggcattgtacaaggtaagatatatgatgatagctaataaaaatgaccatttacctctgaccccaaactgagagaaacgatctcatcctcaaaagcggaatgtgtatcaatatgagcgggaattcctgagatggaaaacaggacaacacgtcacttcattttttcctttagtagatttaagatggctataaatgtagccttatgctattaaggtgaaaacattgcttggtaatcaggaaggtactataattttggttaaaaggaaacatttagggtgaatgtgactaaaacatactaaaataaactaaaaatatcttaacttcaagttaaagtgccattggggtttgatctaaaatcaaggctcaggagtcactgattaactaggacacttaactcaattccagcccaagaggaaaatgtgaaagacaaatacaaaagtcatttttaccttcaaacactggattcccaagtacttgcagaacaaaagc

SEQ ID NO: 56899 - DNA, 1457 bp, Homo sapiens
ctcaataaccatttgtcgaataaacctaaatcgactttgctgtcttacctcctaaacctcccctcctccagaattctgagtttggtggccttcttcaacgttttcattaacacctagcatggacctctatctctagagttctcacatggtattataattgcctgtttgtgttgggcttcggccagaaaactgtcatctatttaagggcacagacttggtgcctgacatacaactgacaataaatattcaatgaaatctatcaaaataacaggctgacgctaccagaggtccaggagtcgcagggattgctcaaataagagcacaggaagactcagctgcgcaagggatcagatcatcagcactgcctttgcatcgatgcaatcagaccgattgtcaccggtcagaaaagccccagaagcgccacactaacacgccccatgttgcaaccgtcctctccaaccccaaagaaaacagaagattgacacaggcaccacgtgagcgcccgaaccaaacacaaacacatgcaccctaaacactgagagaaccacccaacgcagacaccctactgcccacactgcaccaagggcgcctctgggatccatcccctttccctaggttctcagccctagctggcaaggcggatagagaagaccggaagaggctgaaaagaggaagcggtgatttgctgcccgtatgcccgccagtaagaagtgccacacacctccgcttcggctcaggccggattctcaccatgcgtgtgccttcttctttgccagcctctccactctagcaccagaacaccgcagcggatacttgcacgccatctcccctgggcgcggccatgttggagaaaactgcactacatttcccatgagcccgcgggacaacgaacagcgctcccacagtcctcttcgcctcccagagcccgggagtgaccctttttcgaccaagtgtctttgtaaagtgctgtctgttacactgaaaattcagttgtctttttggggggagtagtaataattggtagtgcagctatatttttatctgttgctctccaaatggacaaggtcaaacaggtttgggccctttggtctttcagcaatgtcccctggcaccttctattcttcgtgcatatttcctcctgaatcttattagaggtgagaaaggaaaataaatcttggtgccacaaaatcactaagctaaagggaaaagtcaagctaggaactgcttgggcaaacctgcctcccattctattcaaagtcatccctctgagtcatccctctgctcactgagataaatgcatatctgattgcctcctttggaaaggctcatcagaaactcaaaagaatgcaaccatttgtctctcagctgtaatacgtgcgacctggaagccccctcctcactttgagttggcccgcctctgcttcaatttgtccctcctttctggacggaaccaatgt

SEQ ID NO: 56900 - DNA, 1027 bp, Homo sapiens
tctcatctagggatttcaagattttaaagaaaggagttccgtcccttctagttgagtctctaattcattccctggggtgcttaatagagagatcgacttctaagagttagggttaccccgtagcactttacaaagagcctcagggggcttcttgctcaaaggaagcaaggctggtttcttgatgccgggcgagaggatgagttttcagaagtagcagaccacactcattactgccccttttctctcagctggaaaagaaaaaaagacaagaggcagataacctcatagcttagcactgaagtatcaactgatctctaggggcgtttgatatgacaagcacaatcatttgatccttccctttggatgagttcaggccaatgtccctgtatacattgagaaaaattactacaaatcaggggaacaggttagtaaacccaggattataatcatattctttattttagttaaaaataaatctacagatttgttttcttccaattgggagatttgcagtttgttttattagtactgtgattgagtaatgctggtaaaaaagtacttttctaaaaaagtacaaagttcattttgacaagtatatattaagcaagcagtgtgtcaggcattgtacccgtccatgggtgtcctagaaaagcatacagtccagagcagaaggagacatgaaacagataattttggaacaatattagcgatttattagtaacacagagcaggtaattctaatgtctcgcttgaaaaacacctctagagaggaagtctttgggaaggttcagcacagagaatgatttttatgttcatcttgatttttgtgaagcaggtggcattaaagtttatgtatgaacaaaaagggtgaatttttctatatgtaactaataactgagtaaagctgaattacacaaataaaacgtcaatatctgggccaggcctggtggtaaagtgatcacagtactttgggaggccaaggtgggcagatcacttgaggccgggagttcgagaccagcctggccaa

SEQ ID NO: 56901 - DNA, 649 bp, Homo sapiens
cacaggctccgagagcagagagagtttgctctgggacctggaatgagtgatggagaaatgttttaaacaaacaaacaaacaggccaggcacagtggttcacatctgtaatcctagcactttcggaggccgaggtgggcagatcgctttagctcaggaatttgagattagcctgggcaacatggcgaaaccccatctctctacaaaaacaaacaaaacaggcctggcacggtggctcaagcctgtaatcccagcactttgggaggtcggggcaggcagatcacttgaggtcgggaggtcaagaccagcctgggcaacatggtgaaaccccatgtctactaaaaatacaaaacttagctgggcgtggggccacatgcttttgtaatcccagctactaacacttgaatccaggaggcagaggttacagtaagctgagcttgcaccactgcactctagactctgcatctcaaacaaacaaaaaaacaattgtgggaaggttcctaggtttactgcactccagtttaatgcttgtatagtactcacacttatatctcaagacttttcaagggctgacccacccgttttctgccacatgcagtcagccccaaggcctcatctgtacccaaaggcctgtggacaataactgcctca

SEQ ID NO: 56902 - DNA, 1641 bp, Homo sapiens
gggtgttgaactggcctcaagtgatcctcccccttcggcctcccaaagcactgaacaatattttatctaagtgccaagcattcctgaatagaaatattaagagtcatcacgcttgtgcagtcaacacatatttactgggcgcattctatgcacgagttattgaagacagctgttgtaagcatttcaggacaatgcacctcccttaacaccgagtccgggatttggggcggggtgccggaaaacgccaggtcccgccagcagagggcacggtcccggcctcgctgcagcctcgggacccaccgaggcttccaggctcccacgctcgctcccgagcgcgtccccgccctcgcgtcacgtgacgtggccgcggaacctgagctgcggggcctaagccgagctaaattcgttgcaggtggccgcggcgggtgcaaccacaaaggctaatccgaaggagtcggggaggctcgtggagtcgatgcttcctcttccaagtcaggtcggctcccgttaccttctcagcattcgccgttccggtcttcctgagcgcgtgcatgaggtctttcgcgtggggaagctccggtgaccatgtaggggagaagagtgaggaagctcctggtgcttgggacgaggtcagcgctgtcggcgcgctgctccagcgcccaccacaccctggtgcgggccgacgggccctgggccctggtgggagctccggcctccggtcaaggcctggccgggagcgccacgaattctcgcgtcgtctcgcgagagtccaagttaaagaacatggcgacgtctaatctgttaaaggtaagaccctcactccagcttgggttttactgtgtggccgccgggttcggctctttgggaaaggcacggctcaggttcagctgcgaagtgtgggagtgttcaggggttgtccactggcagggaagccgcggtggcagccggcgagtaccggaacgcgggtctgtggccttggggtcgacaggctctggtggtcgctcccgccgactggccgctgggagaaaagcctggctgagcgctggcgaggagcgatgctttcaagggaccagctctggccgggagcgggagatgaatggtcgtgcggtgtcctgaccagctgggccgttagtactgttaggtctcagtttcttgtaaagcaatgtctaagacgcatcaaaggaaaaaccaagaaaatgctgcctaacaggtttcagtgactcgaccccccacttcttccatttctgttctcgttctgtctgcacgaaattccgagtcagaccagcagtgcctcccactccaccccccttcctcccttttctgcgtgttacaccttccctcctaattctcccattcttgagttcatctttttccttaggaaactgctttctaacccccacccagttacaggacacaaccagatgacaactgatgaagcgataccatcgttttagggcgcaggaaagttaccttgtcaaagacagtatttaaagttagttttatatagcaagggagatctaggcccacaggggcagattctccaccagttaaaaagtttggagaagaatgaggaagacttagaactagtctgttctgtgtatgtgtctgtagtagttaatcatttgccttaaaagtacggac

SEQ ID NO: 56903 - DNA, 459 bp, Homo sapiens
ggtaaactagtatagcatatccatcttcaataatcctatagttaaggtaagtgaaatctactttcagtataattttttttttgttgaacaatattgttttattttgtgagttagaatagatttgtgctatacagcttatagtagccttgactaatttttgatatatttcagctcatggaatgctgtgtaaatgccctggtgacatcatttaaagagactatcttagctgagtgccaaggcatgatcaagagaaatgaaactgaaagtaggtaaaacatcacataaagttatcataatcttctaagagggtatctttgaaacaaatcacttactaagttgctcttagttaattcttttccacataggtatatgtggaactgttagagtgaactatacttaaggaaatagataaaatatttaacacagaggcactgctaagagtatataaacttaaatttt

SEQ ID NO: 56904 - DNA, 1171 bp, Homo sapiens
gtgggccccttaggaaatgaggccacgagggctctgccctcatggatggattggtgccttacaaaagggctggaaggaaccgcttaggtgcccttttgcccatctgctcttctgctacatgaggatgtagcaagaaggccctcaccagacatgtaatgctggcaccttgatcatggacttccaagcctccagaactgtgagtagtaaatttctattacttataaattacccagtaataatcagatgtctgttacagcagcacaaagggactgcgatgaggcaagcacaggacagacatttccattatgaaagaatttgcaaggaattaaaggggtcactgtctcacacaggttttaacacaaaagggaaaactacattcattttcaaggccttaatgaccctttgactcgatccagcctctgggcccagggggtgcagttggcctgggcctctggacctatagcttcgtcctctctggcctctgtatccatggctctgccctgggagtcagtcattttcccttcaatttgttctgtctctgtccctttctatccaggctgggagtatttctgctggtataaaattctcaaaaatcttgtcagttttctgttgatgtcacggggatgcacaccattagaactctcaagttctccacggatctttcctggataaccccaactctattcctggcttcgctgacacggttgagtggatccatgagtcacacaactctctttagcaaattattgtccagacacactcttcaggccagaacttctcctccttggcagtatagttaggctgagaattttccaaatcatcaagtcctggttcctttttgcttaacaattctgaggcaggagaatagggaattcaggccatcaagggttaaggcagaaacaaaagaacagcaggtgcagccaggtctaggcaaaactgggcagcacacaggccacatccttgctcctgtgataatgagacagaagtttccacatcagcctctgattgtgtgccaagcctccacgtcagcctctggtcacaggccaatccttcatgggctgtggccaattggagtcctctaaagggcactgaggggagttgcttggttcctttagcttaataaaaaccccagttgaagaggctcttgaaccacttgctcaagcctgctccc

SEQ ID NO: 56905 - DNA, 3717 bp, Homo sapiens
atggcctaaaataacaaccatttgttttctctcgtttctgtggaccatgaattcagacagcatggtgggtatggcttgtctctgctccatgatgtctggggtctcagctggagtggttgaaggttggggactggaatcacctgaggcctttttacccatatttgtatctggactgagcctggaatttgattgcttcaaaatattttcacggctgggtgtgatggctcacgcctgtaatcccagcactttgagaggctgagtctggccgtctgcttgagcccaggagtcagcaaccagcctaggcaacatagggagacctagtctctacaaaaaaaaaaaaatacaacaatttgctgggcgtggtcgcctgcgcctgtaatcccagcactttgggaggccgaggagggaggctcacttgagtccaggagttcaagaccagtctggccaacatggtgaaaccccgtctccacaaaaaatacaaaaattatctggttgtggaggctttcgcctgtagtctcagctactgggatggctggggagggaggatcgcttgagccctgatggtcgagattacagtgagctgtggtcacgtcactgcactccagcttgggtgacagagtgagaccttgtctcaaaaaaaaaaaaaaaaatcctaaaatattttcatgagtttgtgctgggtaggcctaagggaaacatgctcagtaaatcgaaaaatctcggattacacataaaccaccggccccggcaggttagacttggtggacacgggagccagcagcgtgtcaggtgctcgttgaccccagcgccagtgtctccatccacgtccttcactcgtcaacctttcctggcccaggctgcggtgtcccagcgccaggctccgccccgcccttggctgccggccaatcgccgccgactgagaggcgactattggaggaagcgggatgggcggtgcccgcgccgggccgctaggggtgcggggttggggaggaggccgctagtctacgcctgtggagccgatactcagccctctgcgaccatggctgtgctggcggcacttctgcgcagcggcgcccgcagccgcagccccctgctccggaggctggtgcaggtgagcggggttcgtccccacagcactcagacccgggatgcgaggagtccccgcctcggaagcttccagcccgcggccgttgcggctcccgcggcccgggcgcgcggcttaggccccaggacagtcacgcgacgggttctggtccaaaaaccgcctaagtgctccgataacacccagggactcgcctatttttacagcgcgtttctacttccaaggtctcggcgtaatcatcttaatgagcgttactggtgtgtcaaacaagggcacgtgtctgggcgggcaggaccgccaggattggcgctggcccggcctgagcggtgggatcggggagagtctctttgcaggcctgtgcagctgctcccgagattttctttaaaacatatttgtgtgcgttattgtcaggagaggttccttttcttttttaatacaatagataatcattgggcatacaaggggagagggcaccatgtgatcataacagatgttttttggagcagcctgaaatttatcagggaaaacaaatgactactcagataatacaataaattatacttgacatatgagcaaagctcacatactgagggcgttccaagggctgtcgctcttctgaccgttgtgtttagggaacacagcaggggcagagtctcaaagaatttattctccacatgcgtaagcaagggagtacgcaccacagattgtcaggcaaagcctcaggaataggtagagaccttcagggtgtggttggtgaagcttgagttttctaggtcgatgggggcaataagcttggagatccagttatgttgtgagtatggacttgaccctagttaagtagggattgttgatatgtttgtttttgttgcaatggtaggtcactctagttcttacgtctgggcgtagaataacattacttgcacaagggtgctggcggtaggagctttgcaagagattgtaaaagaaccagtctaggacttgacaattagggagtgagggtgcgaagccaagggaaaagaaagagtctaaaattgatcctgggtgactgagataatagaaaagtcacaaggcgtaggtttccagggaagatgagtttttagcctatttgttagtctcatgggatgagtgaagaaatcacaagaaagtaattaggttatcttgggtttcagtcagtattgactaggtgacataggtgaactaggtactctagagatgtaaaaaaaaaaagttcagaaccttcttaatttatggtttaattaagatcttacaatcaggttggttgaggtggcttatgccagtaatcccagcactttgggaggccggggtgggtagatcatttgaggtcaagagttcaagaccagcctggccaacgtggtgaagccccacctctattaaaaatacacacacacacaaaaattagctgggtgtggtggcaggcgcctgtaatcccagctacttgggaggctgaggcaggagaatcgcttgaacccgggaggaggggaaggttgcagtgagctgagatcatgccactgcactccagcctgggcaacagagtgagactccgtcttaaaaaaaaagatcttaaaatgaaacacaaatactcctcatgaaaaaaataagcctgtacatgctgtaatgtatgatatgtgacattcatattactgaactctaggaagcagttgtattggacacttgaattaaatggtcatttactgaactataaacaggatttccagttttctgtgctattttgtagaatggaatttgacctctcattacattggctcttttccctttgcttaccaggtctcttttatggtcaacaaatctttatggactttattggagcacattgcctttctagctctaatcacttttctctctctggtcaaaggagtggtctttactcattacctcccatgtattctgcatctatttctccttaactctctgcagttaaatttctttgccactgaagctgaaaaatacagtgatttcctttttctttgttttttaattatttttttaaatctattttaattttagtttttgtagacacggggtctggttctgttggccaggctggtcttgaactcctggcctgccaaagtgctgggattacaggtgtgagccattgtgctcagcccaagttttttcttcttgacctttatcctatatttgacactattgaccactcccttcttgaaactgttttgtgttttgatccagttttattcagcttcttttaatactcagacttaaaaaaaaattcctgtattgtgccagtcttgggcttatttgctcccagattcatttatcttccctcccctagtctgtctgcattactgtaggctgaccaatatcagctggcttctggctgggtgtagccactggaaggcaccagtggaagattggaagataggaggaagggagaagccagaataatttgtctgtctgtctgtatctggcagtgtctgtctctcttgtggttcccgcttctgctgggatcctgaccccttggctttggtaaccttgcttcttccctttgacctaacagcctgtatgctacttccttcctgttgctaatttctttctttcttttttattttttgaga

SEQ ID NO: 56906 - DNA, 1024 bp, Homo sapiens
cacacccgctactttttgtatttttagtagggacgggctttcaccatgttggtcaggatgggctcgaactcctgaccagctcaccaggtgatccacctctgatgatctgcccaccacagcctcctaaagtgattacaggtgtgagccaccacacctggcccccttccctttttctaatcttaccctagtacactcagttcccccgcagccagagtggtctttttataacataaaagctttcagtggcttgtcattgcccataggccagaatctagacccttatgatctgctgggccctacttagttctgtggcctcagctgctgccgtgctcactctgcttttgccacaggacccttctttctatacttagtatgtgtgccaattttgttccgaattcgtggccttagtcctacgtgttcctgatgcctcaaatgttcttttcctggatctttccaaggatgactctttaacattcatttctcagctccattaacattgctagaaggccttttttgactctcccatgtaaagtaggccgtcagttactctctagttcatgatcaattttgctggtttcataacatttactgtagctgaaattttgtttctctgagttattggtaactttcagactgtcttcaaatatttgttttgtgtctgctgccatcactgggatagaaaataaataaaatcagtctcttcttggaattcacagtctagtgaggagaaaagccacctgagggttacaaaattatatattctggaacaattagaatgtgcacgggcgttgtggaagctgagataggagtgctgacctctgcctggcatggctgagccctccctgaaagataattgtgttatgtagataaaacttaatgggttgtgttcattcagcatgtattattatacactatatggttcagtgtcctgaccatactataattttgtcattcgtttctgatattgaaggagcgctaggcactgtgctaagtcatagggatgtaacagtgagcaagagacacc

SEQ ID NO: 56907 - DNA, 2789 bp, Homo sapiens
cgctgggcatttaaaagaggcacaagacaaatgggttttccgaacaataaaataatagtagtaatggctgtgaatactatgggaggtttcatcacagatgcttgccatttacttttagggacgtcgcatacgacgtccgtaaattactggctcgggttttgagctttacctggctctcgtcccctgtagtacaatcctctttattctttcaggggacaaacaacaacaaaacccgtctctcacacagacaatacaccctgacagacaagtgacccacaaacaatccctcctcaaatgaaggtaaaactagggctagaaaacgttcaactaatttaaggcaattaaccctctgaaatttttcgctgatcaaaggaacaggaattgctgttttaaaatatgcaactggcatttcacacctctacactggacgacgtattgcgtggaggatggagaaggaagatcacccctactcccaaattcgtagttataagggcgggttattagaagggcgccaggaaggtctctctacaaagatggggggccggggaactccctatttgccctattttggtcccaacactgaaccaaggaaattgcgcccaaggttgaagcacacgcaatccgtccgtcatgcagacaaatgctctttcaggggtcctaattaagtgtggaggcctgactttccttccgaatccgccccaggtgttccaccccgagcttcccctcgggcttcccctcgccacgcagcctctgaagagaggagcatctacatacaaagaggcttaaactgcccagaacctccgaatgacgaagaatcaccgccagtctcaactcgtaagctgggaggcaaaaccccaaagcttccctaccaagggaaaacctttggcctcaaaggtccttctgtccagcatagccgggtccaataaccctccatcccgcgtccgcgcttacccaatacaagccgggctacgtccgagggtaacaacatgatcaaaaccacagcaggaaccacaataaggaacaagactcaggttaaagcaaacacagcgacagctcctgcgccgcatctcctggttccagtggcggcactgaactcgcggcaatttgtcccgcctctttcgcttcacggcagccaatcgcttccgccagagaaagaaaggcgccgaaatgaaacccgcctccgttcgccttcggaactgtcgtcacttccgtcctcagacttggaggggcggggatgaggagggcggggaggacgacgagggcgaagagggtgggtgagagccccggagcccgagccgaagggcgagccgcaaacgctaagtcgctggccattggtggacatggcgcaggcgcgtttgctccgacgggccgaatgttttggggcagtgttttgagcgcggagaccgcgtgatactggatgcgcatgggcataccgtgctctgcggctgcttggcgttgcttcttcctccagaagtgggcgctgggcagtcacgcagggtttgaaccggaagcgggagtaggtagctgcgtggctaacggagaaaagaagccgtggccgcgggaggaggcgagaggagtcgggatctgcgctgcagccaccgccgcggttgatactactttgaccttccgagtgcagtggtaggggcgcggaggcaacgcagcggcttctgcgctgggaaattcagtcgtgtgcgacccagtctgtcctctccccagaccgccaatctcatgcacccctccagagtggcccttgactcctccctctcctcactccatctttcctggcctctctccgggtgcttagcggacttggccaataacctcctccttttaaacgccctgaattgaaccctgcctcctgcgcatcctctttttgtgtcaccttagggttcagatttaactacgcgacttgactagtcatcttttgatctctctctcgtatttagtacttttagtcagcgagcatttattgatatttcaacttcagcctcgcggttaagagcttgggctctggaatcatacggctggaattggaattctgtcagtcgtgtggccgctctctactgtcttgtgaagataagtgagataatcttgacctgtggtgagcactcgtgagcgttagctgctgtatttaccaggtacagataagacaactacagtggatgataatgtatgtggtgataggggagtactctgatggtagaggagtgactttggttctctgcaaactcagcctgagactatcaattcagtttgtggtgagacctcgcagtgttaccttggcagatggtagaagccttccagatggaaggaaaaatgcgtgtaaaggcacaaagtgtagaaggaccctgaagctccagcgtgaggcctggcattgaatgaaatatattttgtgggttttcagctgctgaagtcataggaatggatgagaccaagaaaacaaagctgtttttgaggtatgagcggaagaagagatatcaggagactttcgaaacagtcataacggaagttaatatgatcattgctaacatttgctgtgtttcaggcactgtaagcatgtatatgggtccttaaagggactcatagaggtaggtactagtattgtttttccttttatcattgagaaactgaggtttgaagagattagtgaacttgctctagattatacagtttgtaagtggctgaaccaggatttgaactaatacaatctgactacagaggccacactccttagcactagaaaagaatggcatgccaagggcagagttatttctaggaagatgggatat

SEQ ID NO: 56908 - DNA, 492 bp, Homo sapiens
aaaaaaaaaaaaaaaaaaaaagtctctgcaggcaacttagttgtacttttaagaaagatttgatcccagaagtttgagaccaacctgggcaacatagggagaccccatctttaaaaaaactaaaaaaattagctgagtgtagtggtgcttgcctgtagtcctagctacctgggaggctgacatgggtagatcccttaagtccaggaggtcaaggctgcagtgagtcataatggggccactgcactccagcttgggtgacagagcgagatattctgtctcaaaaacaagcaaaactatgaaaaaaaagtcaacatttcttgaaatacttctcatatttggtagaggagggagatatattgggataaaggacataggaagataggattttattataatattaatttctgtagttattcaacacaaattaatttttattgagcatttgctattagggcagtcactgggcttttacgtcagaatatagagattaat

SEQ ID NO: 56909 - DNA, 1696 bp, Homo sapiens
caatatggtgaaaccctgtctctagtaaaaatacaaaaataaactgggtgtggtggcgcacacttgcagtcacagctactcggaaggctgaggcaggagaataacttgaacccaggaggcagaggttgcagtgaactgagatcacgccactgcactcagcctgggcaacacagcgagatgccttctcaaaaacaaacaacaacaaaaaactaaccaaataaaatgtactatcaaacaactgctcaggcaatgaagtattttactacacccatgtgccacttgtagattcacagataagtattttccaagcttattatatccctaatcaataaaattttttatcataatagatgatgttttcacttatttatttttacgcttcgtggaaaaaagcccacaagacgtgtttggattcttggtttcacttttaaagcagcaaacaatctttactttgcttgaattggaacctgtatacgtcctattttgtttcctctactaaatttattgaataaacaaatgattcgcgtggcctttataagtttcgtaatttcgcttttcctttttacctgtggtccttgatgctaggggcaggagaagaaaaactaacctattctttaaaaacgcgtttcccttttccatctctaaaaaaactgaaaagacgtaaaacaaatgggagggggcaaaggaaagaaatgaggaaaaatctaaggaagattaatgtgtacttcccggtcagcgggaaggtggacggagtaatatctttgcggaggattggggtgtggggatctgtgaaggcgcagtatgagcagtaaggacttgtcaaccagcccgacgcaacttcaccgagggcgaggaaaggagctctgaggaaggggttactcccgggcaggactgtaaaccagctggaggcctcgctgggagggctttagaggaatgaaacgtccttaagaggggcggatggggaatggtatcaagggtatgggttctttagggccttgaaacaacgaaggctcaaaccagtgggcacaaaggctaccggaacagtagtacgcgctgagagaagggacactattcccttcacctaccaatcgctgctggcccgggcgccgctggactcctaggtaacgtcgcaggcggaaatgacgtaactcaatccgttctgtcccgccccattgccctcctagccccgccttctaggccccgcctttcctctattcgcgctctgacaaagtgcaggggatatagaccaaccgcttgtgaaggctgctggttctgttagaagcccgctttcgattgtcagtggctttgaggcaaaggattttggaagggaaagcaaagtgattgtctacgaagttgggcttagtatataataaagcccagtcatttcaaccaagaaccttaaagatgttgagaaatataatgaaatattttctattaatttttgtaaaatttttcttgagatagggtctcaatctgtggccgaggctggagtgcagtggcgcgatctcggctcactgcagcctggaactcccctggctcaggtgattctcccacgtcagcctcccgagtagctgggaccgtaggagtgcaccaccacgccaggctcatttttctatttttattaatagtggcgacagggtttctccatgttgtccaggctggtcttgaactcctgggctccagcgatcccccccta

SEQ ID NO: 56910 - DNA, 986 bp, Homo sapiens
aagccaccgggagaactagtccacttggtgcagtcttctatactgtccttcacagcttagattcaatctttccttaaagtgtagccgggatacacaggagtgtgattctgggctgactcaaagttcttctcttgaaggctttttcctgtggcactggcagatggctgtgctatcttctggctgaggaacaagttccattccatcacgtacttcgggtttgctggactggcgctcggcatatttctgaaacgtgggtttaaagggaactgaaaggttagttcacactgcattctgttgactcccccacccactcccatccgcagtcacgccatcttttctagttgctgtgtgtctgcagactaaaaccaaaggtctggtttattccagtcctaaagttacattttaactttagctatcacaggcactagttataattcataatctagcaagaaaccccaatccacaattttatgtgttggttggaagcctctacaaaagggatgccaagccagacgtccctacctgaaacaaacagcagctctcagcatttattttccacttgttattgaataattaactttgttgaatactcaagccagcaaacaaacaagataaccatctgaaaagttggcagtctcacacattctttcttttaggcctatagtcacacgcatttttgaatggcaacaggtctgtgtaatgttcctccactgtggccctgagtgaaatatttctataaatggagttttttttgtttttgtttttttttttttttgagacacggtcttactctgtcactgaggctggagtgcagtggcgtgatcttggctcactgcagcctccaacatcctaggctcaagtgatccttacacctcagtctcctaagtagctgggactacaggcgcgtaccaccatgcccagctaatttttttcattttttgtagagatggcgtttcaccatgttgcacagcctggtcttcaactcc

SEQ ID NO: 56911 - DNA, 2109 bp, Homo sapiens
gccatggcgtccttctatatgcctgcccagcaaaccttctcatccttcaagtctctgctcctgaaatcttcctggatttctccagtctctggcagtgcttcaatgttgccactgcactctgtacataccttcaattatcttgtacagtgatcagttatttgcatgtctttgaccaacagactgtaagttccttgatggtcaggcattgtcttttcatccttagattcccagcagaattaccaaacacagaagtagacatcaaagaagtatttcttgaatgaatgaaattttaaaaatcattaaatctaaaagtgaattatgtttggttcctaaattctctgctttgcccagctgtcaagacccccttacccctttcccaagttgggacacacttctggcagctatgttcccagctggactagcaggggcagaggcactggtttattctaattgtctcttcgctgatacaacaaggtgctagttggccagagccccaaattatacattagcaaatcctgactgacaacagcgtgaaaccagcaggacaagttttaagaagttgcaaaggttaagacgtgaaggacaacgtgggaggaggaccgggcagaaagggattcaggacgagatccatctcaccctccgtggagggaaaaccgaatgatttctactgagtttccctagttcctgtaatctgctttcaaaaactcagaactaaaaaggaaacaaaaaactaacacgtaaacccctcctccttcctacggctctgacatttcctctgcgtaggatttcgttgctccaaacccaccaggcctaagccatgtaatccgacgcgatccgtcggcttgatgactcaccactggaaagcgctccctgcaatccctcacagttcagacaactaagtccgagatggaaggcaacgtgtgactcacggcacactccttgtaacgcccgggcgccgtccattcgcaacatcagtccctgcacattaaatgcggaagggcccttcaagttcattcattcattcattccacaaactttcgtggtgatttttgcccgctttgagtatgggcgggaggagggaagaggagctgaccagacccaaaaaggggcgacacacgccggggagggacgccacgcaggccgcgggcggactcccgggcggcggggacgcgcggggacccggccgcgggacgagggaggccggcggctggacactacctgcgggagagcgagtgaggttctggccctccgagttgaccgcctgcaggtagaaatagcggaccggcaggacgacggccgcctgcagcccgggcccccacaccaggctccgcggcgcgctgaccagcacctccggggcccccgcggccaccagcagggcgaggcgcagctgcagcagcagggcccgcgggaggcggcgcatggtcggcggggcacaactgcggtccagctccgcggcggcgaggaggggccggcagcgccgcggaccgggcggggactggggcccaccgcggggcgggtctttcgggcgggaaagattgcggcgcaggctccctttcccgcccgctgtcccgcctcgtctccctcgggcgggaacgcgagccagtgccgcaatcacccactgcgcgccctgtaggggtcgacgatgggtgcgccccttcctccccgcagccccataggccccgtggaggaaaggggtggagaggcccgcccagagaccgaggctgcgagtgtgcgctggctgttgattgccaaggcttcaggcacgcctggcctccacttccagtggtctttccctttctttttcttccttcctttccttctttcttctcttttctttctctgtttttatacagacaagggggctggctctgtcgcctaggctggagtgcaatggcgcgaccacagctcactgcagcctggaactcgtgggctcaggagatcctcccgcctcagcctcccgagtagctgggactgactgtaggcacacgacaccacgctggctaatttaatttattattattattattattattattattattattattattactattactatttgtagagacggggtctccctatgttgcccaaggtggtcttgaactc

SEQ ID NO: 56912 - DNA, 797 bp, Homo sapiens
agcgttaggaaatgtttcagtctccacttgaggtgattctataagtaaattagtattttgtgtatactgttgaaggaggttacagaattttttgctgggtttcctcggtagagtgtaatatattgagaccacctccagacattttacattatcttcatcaccagaaacagaaaacgtactagtcgtcttaactttatgtaatgttttcccacgttcttttcctgacaagtctgagcaaaaaggtaaagggtcttcatttgaaagagcaaatacacttctcctggaggcagccattttaccctctttctcagtgtattcttggaagttttccttttggtgttgtcttttggttaaagaacaatctctaacagatgagtcactttccacagggctaatgattctctcccaagcccttggtgttagctcagaagcatccatgcctgaggtcaatggcttttttcttccttctcttccagttgaggcatgtggctcccctgagggacatgacatagccctgttgatgaggaatggaagtggtccttttctaacggaagtagatccactgctttttacatttgtcattctctctgtggcttcaggtgcttccagggctgagtctgaaaggactttggaacattcattcgctgactcaggagaactgggactaaatttgtttaacatatagttccccattgcatcttccacattatttttgatttggaagggaggtggcccattcctcaatgaagcagccattattttacttcctgactgcctgccatgtatgagaaaactgc

SEQ ID NO: 56913 - DNA, 1370 bp, Homo sapiens
ctaataattttagctccaatccatctttctcttctccaaaaccctacctcactgctgtccatgccaccccttaagtacttagtcatgcgtagccttatattcttgtttgaattctcatgtcctgtcctcccaaacagattatacatttcttgggtcccatactttgcatttaccatagcagatttcatagcccatacaaacattaggccttcaaaatatttgtcaagtatttcttcaataaaaatgaaaacatcccaaatcttgatcccctaaatgttaaatgggacttagttaagcaaactaacatcatgatatactggaaacaggtatctctttcctttacccttgtgcctgctgaagatcttattctcagccttgctgttttaaactcaggggtgtgtgtacaacatatttaagcaaattctggaataccaaagccaagcagtcttccaggggcttcatcctggcacacagcagcttacctggtgggtgttgggtagcacacagtagaatggccgctttgtctctcttgagtgactctggacaagcttcaaaaccaaaatccacagtgccctatcctggtgggcagaatacactgaagacagggggtttccgactcgctgaagacaaaacacccttctgctgaccccgtaccaaaggggagggtgccggtgaaagccagcttgttactgcttcagggaggagaagcagttactgaaataaagtgtcttactttttttgggagggggggagggcgtctcaataatcagttggccttaattatttttgcttagaataggagagataaagctcctgactgaagtccaaagctgcaggggaggaaatgaccaggcacgcgggttcctctggctcgctgggcacctgctgcctggcaggctgctcaccatggctggccggcgtggtggttcctgagaaccaatcggttcccccctctactgtcaggtggctgctctcagcttctctcccagaagtccttcaccaggccatctggagccgaggaacaagttccaagttctcttggccagaattctgctttgaaatctgtccacacctccccccaacccccagtcttggtcacaggcctaaaatttgacctcaatcgctgagaaataatgtacaacaagagatctgcctttaaatatttcaaagttgatggaagagttgatgtcctttagtattcagatatattaccttaccctggaatcacaaagtatagagtccacttggacccactcgtttcagcagtaggtcaaatgccataaactcatcaaagccagaaacctgagttcatatgagctctcctttctccttcctcctgcagccagtcagccaccaagccctgctaattc

SEQ ID NO: 56914 - DNA, 1812 bp, Homo sapiens
ggaacctggaactcgcattagcaagcagttgatcataaaacaaaatgacttgctaaattccaatcaatggcacacagtgtggtctgagagtgatgtcctgaattcccttccacagttatctagagaaggacttagatggatatattccaatattggcgagagagtccctttaattcattccagcacttatcccacacttccccagcagaaaaactggttaatgtacatcctgggtaattatctgtgtctctggatttcattctttagtaactaatccctcacctacaacagtgtatagtaaggtcaaggatgaaatttctcagaaactcgctccccacagcaccacgcacaagaagacccacccattccagccaaccccgtgtgtccaagtcccattcgcccacataagcctctatttgacaaattcctcgagctcctacccttggggtggggacctttcgcctcccgtgaggtgccggctctcccgtgcttcgctgactgcccgcattgggtggggagattcgcctctggtgccgagggaaaactgcgttaggcgagggtggaagctctgtcggacccgtgcgagcacgtgggtgcgcgcgggccgcggagtgagcagcagccaggattcctctccagatcgcgcccccgccgcatttcattgcctgaaacggcccacgccccgcgatggcccagcagacacccggcacagcacagcgtcactgcgcggcccccgcagcgcacggacccccccaccctgcccgaccccagacccgcagccgagcccgtctggtatgtggtgggtggagagggtaccaactaagcatcccaaagtccttcagggagcaactccgcgcagttttctcttcccgacccgcagcctccgcagcagccgctcggagcacccccgggcaggtgccccgcgcgagctcagcgccttccccgcggatccccggcccctgcgggacccaggcccaggacaaaagaaatgaatttgctctgtacctgatcctgtccttctcggccctctgtaactcctcattcctttccagcacctgaaggatcttcctggcctcttcgtcatttaagaaactgaaatcaaacgccggaggaactttcgtcattttctttactgtgtgtgagttacacttaagctccttggcgcctcctgttaggaaggcatttttcaacctgtacaagaccagtttcacgaacttgatcccacagccaataataagtccgcccctttgaaagtctaaaaccacaaacctagggaacgcccacacctgaagggctcatattgacaataccttaatgacatgtttctctcaacctgtccaaccgagatgcaaagtgaacggctaaagggagagagggaaccaatcccgttccaagggggcgggccctcccttgtcccctccctcgtcccctccctcgtctcgtcccgtccctcgtcccctccctcgtcccctccggtcaccctccccgccccctatctgagttgttaagcaaacaagcctacataattctgcctcttaagtgaggcaaggctaagtgttggcgccaaagtatttgcttttgctgttgctgtttgctcgcagaacttgagcttgattagtaaaggagtgaaaaaggagattcatgactaatcctccctttcaataattaagagcccatagaaaatagaattgcaagtagggtttgtaactggcaaaagggttacttatctgaaagaccaggaagaactaaactcaattacactactgactgtggatgaacctggctgaagggcggaaattagtgtatccttgg

SEQ ID NO: 56915 - DNA, 1947 bp, Homo sapiens
tacctagctttctcttcatttgtttttctaaatatacattactccaaatattttaacaattaatgaaggtatgactggacattcatctttttcacttgatatatggaaatataaaaccattatcattttgatttcattcaatcactatatctggttataattcagctgtgtttttaatcactaatatactccaggaagttccatggtgacactgaatgtattacactatcaatttattaaagatgctttccttaccaaaatacttgttccaaaagtttgttaaaaagtcaattatttataaaggtgaatatggggggaggaggcagagcaaggtggtcagatagaaccctccagcaaatgaacaattattcatgtaagaaagcacattcataaggcagtacctgtttaacattatatcaaggaaagaggaattgaagaggataggaaagacagcctcgcattgcctataccaccctcctcgatcccttggcagtactacactgagcgtggagagagaacatgtgctcttgtgggagggagagcaaagtgagtgtgggactttgctgcctgtcacagtggaaaacaacacagagaagaattctgctggcacccacagagagattatctagaccaaaggggaatcctctgccccagcggtagtatcctgagttcccgtccagctccaccaccggtggctgaggcccagaataaatttgggaggcagtcaggtcacaaggactgtagcccttgggcaaaccacagtgctgggctaggctcagagccagtagacttgggatgcatgtgacccagtgagacaccagttgtggtggccaaggtagtgcctgacttatccctccccttaatccagatagtgcagcttggggagagattcctctacttggagaaaggagaggaaagaacatagaggactttgtcttgcaacttgggtgccagctcagccacagtaaaatgaagcgtcatgcagattcctgaggcccctagtttgaagccttagctaccatcacatgatggtatttccagacccagcctgggccagaaaaggaagaacctggcagaatccaccacctgctgactaaagagccctaggaccttgaataaacaaacatcagcagttgccaggcagtagtcctaagggccttgggtgagacccagcactgtactggcttcagatgtgacccaatacagtgccaactgtggtggccatgggaatgcgtgtgtcacctctccccaaatccaggtggcgcagcgcaaagagagactcctgatgggggaaaaagaggaaagaaagcaagagtctttgcctggtaaactagggattatactttattttacccaagcccatcaaggcagtgcttctaggagtctgcagcagttgcagcgttactgggcttaaggcgcctcctagtgctgatatggcttcagtgaccacaggcttagatcacaatactaaattccttttcagtacagccttcccaagaacaggcacagacaagcccaggctgctaagattggaataaatacctaactcttcaatggccagacattaatgaacatttacaagcattaagaacatccaggaaaacatgacttcaccaaatgaactaaataagacaccagtcaccaaaattggaatgatggaggtatatgatctttcaaacagaattcaaaatagctgtcttgacgaagctcggtgaacttcaagataacttatacacacaaggaattcagaattccattggacaaatttaacaaagagaatgaaataattttaaaaatcaagcagaaattcaggagctgaaaaattcaattgacaaactgaaaaatgcatgagtctctcaacagcagaattgatcaagaagaattggtgagcttgaaacaggttatatgaaaatacatagaggagaaaaaaaataaaaagaatgaagc

SEQ ID NO: 56916 - DNA, 1380 bp, Homo sapiens
ccgttccagtttccttgctgttgcagctagagtctgaggggcccagaggaaaaggaaaacccagaggggcataagaagaatatagaatattcatttttattcctgaggaagtacaaccaccatggatggaaatcagaagtcactaactagctgtttacttctgggcaaatcttttggctcgttggcccgaaaagtgcaaaacgagggtcacaattttcattcacagattgtatgtgtttacacacatactcacgaacgcttagcaaagttgaacctggagcaaatgtgttaatagcccttaaagggtcagtgtatgacgtcaccatagtaacaacaacagtgcgcatgcgtttttttttaaagagccggcgtgctcccggctcggctcagctcgcccccttccgtggagtgctgcgcccccgtttccccaggctgcccctcccagcaggagccaattcgccaatcacagccctccttttcctgacgtcattggcgcgtgccccggtttcaaaagctcgggggcgggcttctgagttcgcgcatgcgcctctgtgcgtttgtcccatgctggttccgtgagtctggccttaggtgtctcgtgtctggggttgatccgagctgtcgccgccgccgccgcaatgggcaaaacggccaactctccgggttcgggagcccgacccgacccggtgcggagcttcaatcgctggaagaaaaaacacagccataggcagaacaaaaagaagcagttgaggaagcaactgaagaaacccgaatggcaggtcgagcgcgagagtatcagccgcctcatgcagaactatgaaaaggtgaggccggcgctggggagggggctcgggccggccagcagcggggcagcgtctcactgcggcgaggagttgcagagtggaggcggcggatctgtcaccgggacccggccgggaatgagaggtcacgccgggtgccacagctcaaacctctgcaccgttctggccactcttctgcttgccacactgttcctaaaaaaataatagaaatgcggccgtacctaagggtagggagactaatgctgtaatagctacagtcatattcatattaataatactgatgacaatagtggtaataatgacacctacatttttaagcactcaccatgtgcttacagtaattgtttgacttgatctgaggtatggatattaataatcctatttaacagatgagataattgaggttctaagaggaatgaaacttgtccgaatctttcacgcttagtaggtggtgtggaattggaagctagatccatgtctttctaatcccaaagcctttgcttttaaccatgaagccagactgcatccctcaacatcatctatgctccttcctgtggcc

SEQ ID NO: 56917 - DNA, 422 bp, Homo sapiens
aatgtgtcaggtttacattgacagaaagatctatgaagactttgaccttcacaaggaaacacacagttatttgacaattgagtgaatgtattaaaaaaaaatgagtgatatacccgtctgttcaatttgggagttggtgatgagctaactgaaaagagtggaaaggaagaatttatgctaagccttggtatctgagtcaagttatggagacctatgtgtctgtttgattaattgcatcatctcaaagcaatgcctaactatgctggttagctcaggtagcatgtgagaacagggaatgcattgactttctcactttgcttcctaaatactatttaaaatttagatatagctatgatattaaaaaatgtgacttcagatacttattctctatttttgtttttgttactttctcaatataaatc

SEQ ID NO: 56918 - DNA, 873 bp, Homo sapiens
atccagtttcagctctctacatatggctagccctatactggcaattttcaagatgagaaggcacacctatagaggcttagcccaggagctttgatggagacctcagtggcaatgaccaaaaaaaaacaaaaacaaaacaaaaaaaaaaccaaaacgggtgcaaaattaggcccaagtgcctgtatctcagcctcaaacctcttgtccttttgatcccataggtttttaactgactttacagggatttttttttttttttgccttgtccattgaaattctggaaacctctatcaggaaaggaaactgacatttcccagcagacattttccacagctttgactgtggcctatgccaggcatggcctgagacatattactgcaagcattgtacaggagaaattgttgggacttgattttctttttcatgtctctcaactttttttaactttctcataggcttttgactcgttattttctgacttgggatagacatattctaatccaccacgtggctcagttaggactttttgctttcgattttcttgatgacctcattctttggccacgatgtcttcttgctgagtatctggatctgctctttgggctttctgatgccagattgcttgtttggtttcacagtcctaactccatctgcagttttggcttctgggcccctctggcctctggccctataacctgaaccatgttttattttcagttttgttatgttttcctgtcttttatctgacaactcttactgaccattgttcatgtagaggagaagttattttgtaaatttatagcagaaaaaattatcaaaatactaattgatgaggttaaaacaaatctttttggttaaactcctcagtttatt

SEQ ID NO: 56919 - DNA, 1427 bp, Homo sapiens
aaacaagaaataaaatagaaacctacttcatggttgttacgaggattaaacaaggcttagaatgtatttccattgggaaatacttaatttcacagaaaaatgttaacagtctgatactagatcacagatcttgatggaggcaataggtttgtattcataatatatataggatgggctgcactcaggagaatcgagaagttttgtggcacagggaagtttttttaataatgaaagtgaggctgagatgtcaaaggcaaatgagtacctcacaattttgcatctgggtggctgtctaccaatcataacctaggtcccgtcttggagcccatggaagttggcttgttttacaaatcttgaaaattcacctatgaacatcagaggttgctagttatggcctgaactaagaaaagggtctattttcttgagccttaatttgtggaattacaagacatgcttttgcttcattcggtagcgcaggctccgaccactagagggaactgctccatcagttgtatgagactccaggcttccgcattcctctggctgtgactgtggagtattgtttcgtagcaatttcctcagaaacgtaattggtcattgacccaatcatctctccttcatgacttgcaaaatatactctcctggcctcagagttgtaaggatggaaacaaacacttctgtttctgaaccagagtgggttctcagagtcttggctttctttctgcagcctgtctgcctcctaagcagctgagattgtttccccactacagatgagtgataagctgactgcaccctcacggataattctatcagtaagtaggtcagaaggataacccccttcccctctctccccaaaatattcatttccaaaatactcactgagtgctggattacataaaataggagcctggggagggtatcatcccagtcacttaccattgggtcaagcggctgcttggaccctgtgccaactaagaccctaatctcaagtacgtgcagagtaggaagtaatttatgaaactggcatccccaaagagtaaggaagagcaaaagtgaataaaatttatttagaacaattaaaatgttccgactggcttgtgtgagcagtttgtactctcaggaattctctgctttcttcagttcttcaaagctctgtccacaaacttagaagaataaaccaatattatgggggagagaggaggagactttaaaacacctacagatcatggaagagaaagagtatctacctctcctggaagttgcttttattattattattattatactttaagttttagggtacatgtgcacaatgtgcaggttagttacatatgcatacatgtgccatgctggtgtgctgcacccattaactcgtcatttagcattaggtatatctcctaatgctatccctccctcctcctcccacc

SEQ ID NO: 56920 - DNA, 2679 bp, Homo sapiens
ccagtgaaacaaatgcgtcctttagatgtaacagacctgaatacctcacattcaagctgtgtaactgcaggtaaattttctaacctcgattttctgatggataaaggggtttctaatacccagctcacatggctgtggtgacaaacgggacagtggatttaaagcaggctatttggcccgtggcatatggtaggggcacaacccattcagtgtccctccctctcactccagaagcagactcatcctgccctaggctgctcgtaatgattccaaggacaggcgaataaggttatttgaacatttctgaaacattgacttagtttgtgctgggtgttgtacgattcacagaagtagaaaggctctctgctcccggtgcttttcagcctgcgattcaggcgcccacctctgtgcaaagggctgtttccttccgatctcctgaaagagatctggatgtatcttgggttcaacctcgattttgacacgattgccatttccatcaaagccaatttccttgctgaaagaagtcctatccctgggtgaaatcccaacagcttcatttgtttaaattcttttattggccttgctaatgcagggtgtggtttttcctcatcacggaatattgataagtaaacaactacggggaacctgccctaagaaggcggcccgtcgatctccttgactgcccgggacatgatcagtgttactgctgggtggagaaggtgtcgccgagcggaaaggcgccgtcctgcaccaggtcgggggagaggcgcggggaggtcgggaccgctgggttgggccggggcagggaataggcgcgaggggaggcggcgcgggaacctcgggcagccccagcggctgggtcgagcccgacaggttccagcagctcccctcacccctctccacgcctctcgggttttccccttggctcagggtttcctgtttcagttctcggcgttctccagcagcaggtgctggtttgccaacctcggctccagaggcggcgacggaggagaaggaaaagagggaaggggaggaggaagcggcgcggctgcggtggctgcgggcgggcgggcgggcgaggagcgcggagcgaggtggcggagccgggttcgctctcgcccgcggagcagcggcacggacgaagggcagggccgagccgagcccagcgctcgggcgcgcccgagccggggccctggcgtgcggccagctgtccgggcgggaggcatgagggagcctcgcgctcgccccgcgccctagcggcggccgcggcagcccagggctgaggcgagaggcggccgcctgccggagggccccggggctgccccagctccagggcatgtagtgatggctgcggagaagagaatgcaagtaggttgagcaacagattcgagtgcgcgcgcgttggggctgtgagttgtgcaacccagggagggggcgccggggctgcggcccgcggagagggcgcgcgggcgggcgcggcttggcgcgggagggccgcggtggccgcttctccgcgggccccgccgcccgctcgccgctttctcgcggggctggctatgccgggtggcggctcccaggtttgtcctcgggaagggggtgggggacgcggaccgcggcgagagtggtcctggggtagccggtcgtggggagggccgcggggccgcgcccgggcgccaggcggagggcgccggggccgcagcgacctcgccgtgtgatctccaggcccaggcgggtcgggctccggaggtcgagtcaccgagctccggtcgctcaggtggggccgagcggaaagcccagcgcatcctcccctcgggcaacgccgtccccgccgggatttcgggcgaggtgaggccgggcttcccggccccgcggcctaaggcaccggtccccgcccgcccgggggcatagatcgcgaacatggaggcgggctcgggcgccgcggatggaaacggacacactgcgctgccccagcggctcagactcgcgcgcgctcgtggggcgagacatctcttggcatctcggatccagccctggccattcgcttaactatccatccctccatccagatcgccagcaaccccaggccgagcgtcacgaaagcccctcactcccccctcgtccctccttcacccccaggctccagtccagatcccttttacacgctgcgttcattttagctcggctgttcacatttttaactccgtattaagaagtgttacaaatataacttggagaaatgaatcccgcatttcttccctaagctgtctcatttcaagtccttaaaaacagccctaacatccaagtactgattactctgtctggggttcttgccatttggttatccgttaacaatctcggtttgtgttcggtgttttgtgataaagagatgaaagacgaatccagatttaggaaaagttttcctattggttgacaagactgtattggagtatcccaggcccatcaggcgcttattgattcagactttttttaaaccattttagaatagatgcagagataattggagctaagtattgtatgtttaggaatttggcaacgttgttcagtttttcacttgttacgtgcttgagtttttccacttttaaaatgcatattataaacggaaaacgagataaacctcaaacacaatttttgacttttcaagaaccacaagaagtcata

SEQ ID NO: 56921 - DNA, 620 bp, Homo sapiens
caggcgtgagccaccatggccagcctctctaatgtgtttaatgtccttctgtactgggtgtctgatgttctgtccacctagcattttcctgctctgcttctgttactatcaccccacctaaggaatgccccgccaccatctccttacggcctgacagggcagcccatcatggccccacatacatctggccacagtactagggcaaacaggtgagtaacatgacttcagctgtgctcatcagattctctgtctcaggaatttgaaccttgaatggagaacacaaggtcagagaacatagtgctgaatcatcagagagatagtctagaagctctgcaaatgaaacccggggtttagtcctcatctctgacctgaaggcttgaatgttgagatctctttctgaccctgagagctccttcgtgttcttccagtaaatgtcccaagccctttctcaaaagtcctgtttttcttgctgatgaatagtaaattgatatgcatctattatttttatttacctattggtagttgcttagtatttttaggagcaaatatgatttacaaaaaaacatgagttctgatacaatttcttttaggatttgaataggaaaagtagttgttgtttt

SEQ ID NO: 56922 - DNA, 2933 bp, Homo sapiens
ggccaggtccgaagtaactgaaatcagagaagatgggaacctgagatggggcaggcaagcaatattcaccgcctaccaccaggatgcagaatcaagtgcgcagtaaggctcaggctgatgttagaatatatttattgctacatttatatacaattatacaaacagcccagacaggaaagaaatgttgcatcgatttctgcagattccaccaacatgtgcacagaaatggagctgttcaccactgagtttgctcttggattgaagccaaatataagtcacatacattttttgaaaaagtgggaaattcttggaaatcctgtccatagattcttccttacaagctagtcatgcagaaaaaagtgggttctcataagctgatgccttccagcatgtttgggggatagagtcctgaagatggggtgcagtagatgctggcttgggactgcagggtgctgtgcgaagtcccaagtcctggcccatcttgctaaggtctgtctttaggaaaggcaattgagaggggtctggagagaaagagaatagcaagaaagggaaatccaacagtaaactgagaagaggagagaaccatgagccagggccctgggtaatggaatactggtccatccagttccagctgagattgcagactttgggggatatacacattcagaacaccaggtatgtccttatcctaaagcttcccataagtcagtagccaggggcctgcatgaagacacagaaagtgaataggaaagtcaggcaagaaagaagaaaactcaacttgaacactcgtattatcaacattcagttgaaaaggcatgaccctgaatgtctttgcacattttgtaagttaacatttagtcatggttagttgatggttgagtgatgaaggggaatggaatgccagtgaggaaatgtaatgatgtacagattgtatcaaaataaaggtgcgtccacaaactctacactctgacctcagcctggttagaattacttttggcctcaaaaggagtctcacatatagattttgcaatgttctgatccagaattatgatgtggatataagatgacggtataaacactctctctttcatgtcacagtcacatacaccttagtgacgtgaatcccaagagaaattgttgagcagccacagggcgtgtgtgcttagggaatgagttcaccttatttacaccagctccgtctgacccacctcaggccccttcccaactcaggaatccaggagggaggacctgcagattgggtttactctggcctcctcagctaaaatcagctcagagcctcagagaaaggtctgaaggttgagaaaaaaggcccatgactctaaatacaccagactgtgccaggctttggggttgattagtaatttgggtacagtctggtcccaaggctgtaggggtcctattcatgtggaaaccagtcagttctatcttgttcatggcttattttatttttgagacagggtcgcgctctgccacccaggctggagtgcaggggtgtgatcttggctcactgcagcctcgacctcctgggcttaagcaattctcccacctcagcctcccgagtagctgggatcacaggcatgtgccactatgctcagataactttttgtattttttggagagccagggttttgccatgttgcccaggctggtctcaaactcctgagttcattcaacccacctgtctcagcctccaaatgtgctgggattacaggcacgagccatagcgcctggcctgtgcatggctttagatgtcacgtttaattccttaatgtcaccataatcctacaggcccctagtcacgaggaagataggatgacagtgctgtggagaagccctgggggcagtgggagacggaccagaacatcactcaagagtccctgttctttctcttgggtcaataattttataatcaactatggagaggcccagcagttcttccaagggtgccaactatgtgacacctcaagctggaggatgtggcaatcaccaactctgtggatcccttcataaattcatgtctagataattcaaaatctctttctgtcatttgatcttgacttttcatgcagaaactttcttttcctacttctgacgacaatagctcagagtcaaactcactcaaaggatttgctctaaaaagaacattaacagatgaaaatcaaggaggaaaaatcataaaagatcaggtagattttactttggggagttttacgagttgacaaaatggaaagagttacatgaatgaatttctgcactggaagaaatggctaaagataaatagctaagaagagtattgtttgcggcaatctatggcacattaagaatgtgctttaacccaggattttagctcaaatatcagaaataagaccagctggattctcagctagacccgtttcaaagagagtgagagcaaatgatgatggatgtgtcgtagcatttcaagtggactttgaaacaatgaaagtgttttggtagtgtcatgaaatatcagagagaatcttgcacgaccttaaactcatttcagggcaggccaaattcaaggccaaagaagcaaattgcttctaaaagttccccaccttaaatgaacacatgtgaccatttttttgtcacataaataagtctaaaacataatatttctataaagaacattggttctacatctttaaatattatctcaaatatattgacctttagctagaaggaggtttagagaactttgggaggcttaatcagcaagttgggggaactcaagatttacaacataaacaacattgttgtggttttattcacaaatgggatgagtcaaatagtctctgccaaaaaaaaaaagaatttaaaaacctgttatcatggtaatcatattgaaaaatgatttttaaatattaccaaattcaggtcagtacataatacta

SEQ ID NO: 56923 - DNA, 664 bp, Homo sapiens
ccaataatttaagagcttcaaaaactacatggaataaccactcatagtgtataaggtcattttcattgccaaaaaacccctaggttataaaaattatagggagtaaatatagccaaatataccaaagtattgtagggaaagaggtctctttgctactctttcccaactactgttcttgcccaagagagtctagcagcacaggcagcatacctctgggcattctcccaggtatatctgctggctactttgccaatgggcttaatcaaaattgtttccacacatacagctgccatttctctctctctgacctgtaaagcagggaataaatgactcagcatgccatttctgaaagactgccaattcctaggtgactagaataatatatctcctaggcattcaaactgaataaaagttactgaattccaactgagtataaagcagtcaataaatgcttactaatgaagagctctaacatttatccaggagaactacggattattgtgccaaaaaagaaacttaagtcttccacttccatctaagccttagagtaactaaaatatagcaccattaccaaatgatactaagtaaacatactacctgtactagaagcaatacagtatttctctataagccatgaaataaaggatatatagataaatatagt

SEQ ID NO: 56924 - DNA, 3766 bp, Homo sapiens
ttattaatctctggaagataaagcacactggggaaagcaaagaaattctgaaaataaaaaactgcaatcctgaatattagtctcctttctcaaatccagtgatgctgttttggcaaatggatcaagccattatttatccagcaacatgaacggggtaattgttccttcttagctccatcagtcatataaaagagtatttagtgttctaaaaaaaaaaaaaaaaaaagaagtatgctccttaaacaatagattacaatgtctatgtcaaagtactcgtttatcaaataaacccttattatcttagacttttatatttacatcctgccagtcttagtgccacaagaatgccatcgagttcctcagcaacgtgtcttccaccaaaatctcaaatgtattttaaaatatatttttatgaagttgacttttaacacatttccaacctagtaactactctttaaggaaaaaaaaaaaccaccaaatattgggaatgtctgaagaaacatgacatctgtctaggaagtgatgtagtctgtttaaactgaaaaaaaaaaaaaaacaaaaatgcactgccccctttcaaagttagtccgggaattgagtttagaatcctttaaaggaaaagagggatatcatgtactgaacttgtctggtggggtctgagacactaaaactgagcggcctcaagggcccgagaaagttacagggctccgagagctgcaacagcagcaggtagagctgcggccgggaaccgcggccctggcctggcgggtgcgagcggcgggagcgactggcgccccaaagcctgtcatgcaacatcccctttgccactggggcggaacgcacgctctctagtaatttaacacccctcctttcaaactggaggccggggaacaagttctaataaatgtaaaatcgaattctacctacgctgaatatctggattttcaaacaacccttgggaccatgccagcccgggcccggggcccagtccaggcagcgggagcccaccgtccccagggcgctgggggtccgacaccggcgctgaaggcagactccgcgccccgaggaaaggagaatcccgcggcggcgaaggtcgactttggcccggccaggcacgttcgggccgcggctcagccacgactcgggcagggcctcgcggcccctaccagccccgggaggagcctggccggccgggccgttaccacagtggcgcctcggccagctgggcgcgagcggaggcgcgccaagccctggcggcggcgccacggccgggcagcacgggccccgcaacttcgcgccgccaccttagcgtctccggaggaaccgggagcggggagtgggggaagggagggcgccgcgccttacccggagagcgggcggcttctgcccgccggcgtgtggctggggcgctgcgcggcggcgcggctgcgacagggagggagaagcggtggtgcgagcgctggcccgcgggagacgagaggcgccgccgccaccgcagacagctccgcaatatggccgctcggcgcctccgcgggaaaaggcggggctgcccggcgcccccccgcctccccctgccggccggccgtcctcgcgccgcggactgagcgccaacgccgccgctgggggccgcccccgccccgcccctcccgcaggctcgcagccgcaggcctggctccgggcgtggccgggggtcgcggtctggggccggccaacgcgaggtgggtggctgcgggctcgggagcgcccagggaaatagggcgaatgcgccggagggtcgagcccttccagagagcgctgggctccagctaaacctgcggtcgagggaagcggagccgcccagcccaaagctcggagtgtgcccgccgcctccccaacgagtggaaacttgaaactcccgctggtgccagcaaactcactgagggcgttgccgtcgcccccagaggaggaattcttcccagagggagccggggaccaaatgaagcgtgagacttggctgttaggtttgaagatcctggactgggaaggagaaaagggcctacctgagcggaatttagatttgcaacaaagaacgtttacattattttggcaggttttagccaactagaaaaacttaatttttcagcgacaattttcaaacttcaccaaaacctcaatggataagaccccaaatcaggagtgcaaattttaatccaagcaaggatgtgtgataattttttattaccaacgacatgctttggcagttggaaggagttggttagcaagaaaaagttggaagtagggccccaaagagccgccaaacctacataattctagatttagagaaagttaggcattcgatcttaagactaagtctagcccactcactttagttagtggctgggatgagacaggaagctcctgacttctggatcagtcttctgtcatctaatccatgctgagtcccctcagtattgtctgctgggatgattcagggagcaaaacttgctatgagtatacaaacagcaagcgcacaaaatcagattcgcctggcttgccctgtttgcaatactttttttagcttatcttttgtgaacaaactttagattcaaataacaaaacgcctgagtatacttacttttataggacaaataactcctatacttcctgccttagcatttaccttaggtgagacagtagcttttccaggaaatatctgcaaatcactttcactagcctgcctcttcagtgagtttccactattgccctttgagacctctccgaacaattaaaagcccccaagagactcaagggttaaactcaagggcctttagatagcaaattcctcaaggatgggaaccaggtgtgtgacttgcgaccaaataggttcttgtggttcttagggaccaccaaaagatcactccttacctctccctagggtgcaagaattatcctggttattgttcagcctaccacatcaggttgcaggcatagtcaaagtattacgtaatacttcccatgaagtaggtaagaaaaaaaagtattatgtaaattcctacatagtacactaatcaaatgaaattatataacacacttttgcaactgaaagtgaaggattcactgttgttggtcaggtgccagacactggtgtgaaattcttttacatgactgtctcttttaatggttacaaaaaccctctgggataaatactattattgaccctttaaaaaaaatcgatgaataagacagcttaaaaagaggtaagtaatttccccaatgtaacaaaactaggaagtggcagagcagtgaccaaacccaaatatatgtttgactccaaaagccttgattttatcctatcttctgcaacagcaaacagaccaaaaattgcaacattttagttgggtatcctattagtaaatatttaagtgaaagataacagtcaaggctggtgagataaaaagggtactctcagacatggtgagtgggagtgtaaactgaaataatctctttataaagctatttggcactgtgattcaacccctaagaactttcatggcagggcatggtggctcatgcctgtaatccccgcacttcctgggaggctgaggcgggcagagcatgaggtcaggagaccgagactatcctggccaacatggtgaaaccccgtctctactgaaaatacaaacctcagctgggtgtggtggcacacgcctgtaatcccagctacttgggaggctgaggcaggagaatgacttgaacccgggaggcagagattgcagtgagccgagat

SEQ ID NO: 56925 - DNA, 1860 bp, Homo sapiens
ccattctatgaagatctgtttctatcagtctccccagcttgtattgtaaattttatggaagtaaggatgtctcttttagtcatcattttatcttgatttttttgtctcagtgcctggcacatagcaaacgctccataattatttgtggaatattccattctgttcagataatttcaaaggaattgattgtgaggatttctcttgaggttgtagagtgaggattcagtggtgattttaaggggatgggaaagtgatttataacatcatcaaagaaccactcttctattttatcttgagaaatattcacttttaacatttcaaattttaaaattttggtgtaagtgtttcaaggcaatgtcagcatgtacaagaaacatctgaaatgtctgggcgccgtggctgttgcctgtaatcacagcacattgggagcccgaggccagtggatcacctgaggtcgggagtttgagaccagcctggccaacatggtgaaaccccatctctactaataatagaaaaattagctggctgtggtggcacacacctgtaatcccagctacttgggaggctgaggcaggagaatggttgaaccagggaggcagaggtttcagtgagccaaggttgcaccattgcactccagcctgggcaacagagtgagactgtctccaaaaaaaaaaaaaaaaaaagaagtgagggaccggtcatagaacagaagaggaggtctgagtggataaactgctcctttcaaccaaccctcctattttcagcccagtcttatacccctgtcttcaaaggtgttttctcaaaaaaaaatcttatatttggtaacctgagatttagaaatacatgcatgttataactattacttggtgtgtaaagaattaactttgagagaagccatgagaaggaaatagaatttccccttaggttgttttcttgagagaggaaaccaaaatgtgtcagtgtttcaagagctggtcctgtacgtttgagtatgtttcctgtgcatgctcactgaattaggtaatagtattgattttaggaaaggtaagagctaagattactcatttgttcacattaggtcagattctccctttgcctaacttcctggaagcgcattcaatatcgtgaaaaacatggcaattttttcacagatcattaaggaacatttggtaaattactgctttagtgcataaaatagcctgcactatcccaaaagttttaatgtagttttccggtggtacgtaatttgctctgagtatgtggattgaaaatctggctcagtgaacagaaaagtagactgagtagccacatgcccagtggaatcataattaaaattaggccaaccagacacagagatgattggaatatactcaggaggaaatagggacatttgaagaggtcacaggacttctgtcatgttaaatacactcctgacaatgacagaggataaaaattggcttcctgaggaaagggagaaacataattgagaaacaaaaaagaataatgaacatttctcagaattctgagaaacaggttttggtggcttagagttggctgctatttcttcttcttcttcttcttcttcttcttcttcttcttcttcttcttcttcttcttcttcttcttctcctcctcctcctcctcttcctcctcctcctcctccttcttcttcttttcttctttcttcttcttcttcctctttctttttttttttttaaacagtcttgctctgtctcccaggctggagtgcagtggcacaatctcagctcactgcaacctccacctcccaggttcaagctattctcctgtcccatcttcctgaagagctgggattacatgcgcaccaccacacctgcctaa

SEQ ID NO: 56926 - DNA, 4003 bp, Homo sapiens
ttcaagtgcttttggagctagtgagttggctgcattgttatgtctgtttcgggaactctagaatgatatgtaaaaccctcttccctcccttctttactttcttccttccttccttccttccttccttccttccttccttccttccttccttccttttatccacatttttttcagcaaacatttaagagtgctaacgatgtgtcagcttatgcttggctccaagagattcaaaaataaaaatgtcaaggtctcctaatctctaggatagggagagtcaaatttgcatgaggacttttgagaaaaatcaaggatgcctgaggggatttgagtcctacaggctcagcacttatgaaaaaggataaagtccttcccagcctggcaggagaaggaaaagcctgtggtgggggaagggagtgaaggcgtgtgcctcctcatggaacacagggtcggagtcggctaggagggataagagtacaatagagggttgtgtgacacagacaggctgccagccctcagcatggacccggcacatggaatctgtgatcttaaaagagtcaagtgactacctttggcaaccaaaagagacactgccttttagaaggcatatcatctgaaactggctgaaagagctgtcttacttaggaagaaaaatctctcctttggaaagagctggaacttttagtaaaactgaacagtgaggtggcggaaggtgagttaatgtagtgctgggtagggaggtcgtgtgggcaggtgtaaagagcagagccagaagacgtgggtttcaattttgcctccacatactagctgagcagtcttgagcaaataattgctataattgtttctgggctgtaaaataccaagtgagaacaatgactggtctcatttatagaattatatgaattactttttaattctcataaccaacttatgaaataattctcattactattccctttatttatttatttagagacagagtctcactctgtcacccaggctagagtgcacacctcactgcaacctcaacctcctgggctcaagagatcctcctgcctgagcgtctccccctccctactccccagtagctgggatgttaggtgtgtgccacccactcttggctaattttaaattttttttagagttgggggtctcactatgttgcccaggctggtctcgaactcctgggctcaaatggtcctctggcctcagcctgccaaagtcctgggattataggcatgagccaccacgcccagcctactattccctttatatattgaggacactgaggcttcaggaggttgaatatattttcaaaatttacatagctagtaaatggcagagctagaattgaacccatgtttgtttgattttaaacactgtgttctttgccatttacattcttctgccccgcttctaaggatctgtattagggactaaattaaaccaagttatactaaaatgttggtaattaatttgactattaaatgcctaattgttctagtacttaatcttagtttcagccaggcacagtggctcacgcctgtaatcccagcactttgggaggccgaggtgggtagatcacttgaggtcaggagttcgagaccagcctggctaacatgatgaaaaccctgtctctactaaaaatacaaaagttagccaggcgtggtggtgggtgcctgtagtcccagctactcgggaggctgaggcaggagaatcgcttgaacccaggaggcggaggttgcagtgagccgagatcacaccactgcactccagcctgggcaacagagcgagactccatcccccacaaaaaaaaaaaaaatcttagtttcatttaaagaatagatatgagtgtgtatattattttttcaagtgttattactttttaatttaaaaagtttttcctttatttttacatttttgttgtgtaattcctttttgaggaaagaaaaatcttttgaaagttataaaaatggttagaatgattagtgtaatcttgtcagggcagtatacacctcaattaactaagcttatccacaaatggccattattttcttgcttcagcagtgacgtaggaaaggtctgtatgcctgggaatgtggagatctaggttttaatctaagatctgagttcattgtcctgtatttatctaaggccagtcaccctctttcggctgctattgcttcatgtttaaaacaaggggattagatgaaatgattggcaaagtcccttgcagcattaatagcctatgagtctataaaattttagaaacagacataattcagaaggatataattttaaatcaatttgtgtcacaacagtaataataaacatagtggctctaagcaagtaacagactgagagaaagaaactatgaattagataagtttgactagataaggtctaagttctttccaactttgaaatccatgatcacatattacaacactgtaattttatagtagtttgtagggtttcaaagaactttcattcgatttatcctctctgatcctcacagggacaatatgaagcggtgagaagagttgttttatccacactctacaaatgaaggaactaaagattaagtgggtggcattgggtcacttggctagttggggacacagctgggacagcaaggctttctgactcacaccctgccctctatgccatagcattcctgggctcaataaacagtaactgtgaaagaaggtcgcctcacacaaaactacattttattctagtttgacagatgagtaatcctcagtgataaattccttttctgaaaagtctcaaagtcccttgggcagttttgagtcatttgtaatgtcaaaaagtttaggacagacagtatttgcaactttcctcaaatccaaaaatcagaaaagctggggagaggtttttactttttctttctttctcttttttcttttttttttgtagactaagtcacaagaaggaagggttttactttttcttttcaacttaaaaaagagagtaattaatatcctaaattctctttgtcctaagacacctttcctaagaaccatgagcttttagctaagtatggaggacgtttagtagccatgactaagcaactcatctttcagttacagaatagcctatgttggccgggcgcagtggctcaccctccgtaatctcagcactttgggaggccgaggtgggtgaatcacctgaggtcaggagttcgagactagcctggccaacatggtgaaaccccgtctctactaaaaatacaaaaattagctgggcatggtggtgggctcctgtagtcccagctacatgggaggctgagtcaggagaatcacttgaacccaagagttggaggtcgcagtgagccgagatggtgccattgcactccagcctgggtgatgagcaaaactccctctcaataaataaataaataaatattattgttatatttgtggaaaagataatttggcatcttttcactcaatgaaaatatttatttaaatactgtatacaaatctatatatacttacatataatataaatttatacgtaaatatatattattgttgttattttatgttattttatagaagttatacatgcacataataagaaaaaatcttatcagtagaaaaagaagggtgtaaaatgaatatgacctccatccattccagcctaggcccatgctctagaaacaagcactgtcatcggctattgttagatggtgtggcggttgccattataatttaaaattccatgcttacagctctgtttttccctttgtcaactttagaaagtacctactgacttcaaaaaagatgggaaatttcttgtgtttacacttcctcccaatctttctgttcttctccatctccaatttgtgttagttgtattataaaatttttaattttttttcttttttttttttttgagacagagtctctctctgtcacccaggctggagtgcaatggcatgatttcagctcactgcaaactcctcctctctcccctgggt

SEQ ID NO: 56927 - DNA, 1426 bp, Homo sapiens
aaaaccacatttttataggtattagatttctcagagttaacttctacatattttaattttctctcatattttctgtcattttactttatctttcaggtaatcaaattgatcttcggttgtgtctgtattattgtttagtcatccctttgaaacgtttatttttagttcctaataactcttttgtgttctctgattgctacttgtcatagcaaactgtaattaagattgtagtacgctataaattcctgattatcctaattagcattgttactagtattgttttaaatactaattttattaatttgttaatttaggtgtttggaatatgattgatttcgtgtgtgtgttaattaggttttttttttttttaattattttcccctgcttggattatctttttcctttgggtcagttgttttgttttctaaagctttcacttttgtattgtttttcctgagaagtgtggtgttctctattgtctattcatttgaatgaattcagaaccaaacaaatgccttaatttagcacaaccagcttgtgtgggtttcctcttcaattgtttaggtttgtttctccaggaaggttttccctgaatagaatgactggcacgagttctgtgtaagtaggcaggacttttggacaggaaggcttccctgtaggtttcctgtgggcagagtaggcaagaaggctggggaacctgagcttccccaggaggaggtagagacgcattttgagtttgattgtttcccctctgagtttataaatgtagagattcaaagtttcttcagttatctccttttaagctacaagaccctccggaggaacactctctctgccctttctttctaaaaagcagtgccctggcttgtagcccgaggccaaaagtctcagctgcctagctttgtttacacaggtcacaggaaaggggcccagctgtcccaaggcactgaatccagttctttaatgaggccactgttgattgcccgcacggcccatcattgtattgttgaccaagtgaggagtttctctgggcccccttgggaagacacatacttatttcctgtgccctggcctgcagtttctcatcagttcatccatctgctttgtatcttttagaaatttcccaaaactcttgtgtgctgatgacactctttcttgtttcctattgctgttattcactcattttctttaaagaatattttctgtcacttttatgggaatgtggaagatagaagaggtaaatacatgtgctcatccaccattttgtgtacaagcgcacacacacagtacacatacatgcacaagcacacgcacacacacacgcaatacacatacacgtgaaaagcaaatacagtaatgcatccagttaatcctttgggggaaaggcagattcctattaatataaattatcagaatacaatcacta

SEQ ID NO: 56928 - DNA, 1308 bp, Homo sapiens
ggggttttgccatgttggccaggctggtcttgaattcctgacctcaagtgatccgcccatctcggcctcccaaagtgctgggagtacagacatgagccaccatgcccggttgccaattttaaaatattttgtcttttctccctggatatgaaataaaagtgattaggtcttaagataaaaaaattaaaacacatttattttcctgtaacatgcaaaaatgcaaaaaaaaaaaaaaagaaagtaaaataaaatagatataattttggagaaattgcctttgctcactgtggattctggagggtgtgagtgatggacaggtccatctgtgcatggagaatggaaagccccttctccaggatcaccctttaccttaggagaacacctcagctccaggcaccaagcaggagtatcataggcacttagctttactcctatagacaaataagagtggggagactatgtggtaaggaatgatacccttacactctttccagcccttcccagtcttacaaggagtgacacacttggtggccttcaagcctgtcactgcaattcatgcagtgggtggtaagaggacaaagcacgctaggtccctgatccgacctcccagggatgacaggtctggctactcctcaaactgaacctgaaagaatgcaaatggttcaagttttcaccctgattctggcacaccccgaggcaaaaatagccatttgccttcatacgagcttctgtgtaggctgtgaataaggaggtttctatctcagctttctttttgctcatttaaagacaactgagagtacgacagggtaattgttttgttttaaagcactgtaatttagttcctttctggaccttctatgtatgagtcattttctgtagcagtactaagagatgcaaatagaaaaacattatttctgaaagcttgagatttcaagctgggccttttattcacattctcttgctagttttagttttacttgtgacattcatgttattagaagaatgacacaatttcaatcacatttttgtcccatgtactaatgtagcaaacaatttcacaaccttccctttcttttacatgtgagtcattatcatttggttttgttctcctttactcctgaactcactatctcctgatcacatgtatacacatttctctgatatcctagatctttatgggtgatcaagatttttgtatattctgttttgttgctttcatacccgctagtatcctttttaagtttgactcttttatactttgggagatgccaaacaaatacttcaggagaaaggaggcagtgtgttgaa

SEQ ID NO: 56929 - DNA, 1529 bp, Homo sapiens
cctcaaatacatacacaccataaaatcacagccttatggctttaattttaatatacttgttaaccttttatttctaatccaatgagtatcacaaatccacctccaacccaccttaattcctaaagttttgtatgtttgcaaaaacaaactcttggcattcggattaaaatcaaatctgttgttctttccatggcacattgctttgtcctgctggttactttattagttcatttcagggtccttccgctgggagttctcactcagactggctggggagaactctggcaggctgcctaatggactcttagggtgtggaatccacagtgaattccccgttcaaatcttcctctgagaaattttgatacttgccagactgtttcctttctactagggctccatctactggacaaaaatgaccagtagtgcctgcgcttctccattatggctttgaaattttcaaattaggtggaaatctaatacaccttctctttgttaaaagaaacactttagacaaattaaatttaacagtgtttgagcagagaatgatacaatagttgggctgcccccagaaccagaacaggttcagagcaaacccggggctactacgtggttgaataacatttatggagaaaggaaagtgacggactaaagacagaagtgaggtacagaaacagctggattggtgacagctgggtgtttgccttatacaaacagttggccacctgtgattggctgaaactcagctgctgtgattggctgagcctcagctgcttgtcacaagagcaggtcatagtctgtttgcacattcagttaggttacagttcactatgtatggagaaacctttaggctgaacttaaaatatgtaaggaagtagctttaggctaaacttaatttaacatttaaatttaattttacacattaaaattattgtcctaggttgttcatgctgttgcaacaaaataccgtaaactgggtagctaatacacaacagaaacttatttctcacagttttgaagtctgagaagtccaagatcaaggtgccagcagatctggtgtctggtgagagccagctttctcatagagcatgacttcttgctgtgtcctcacttggtggaaggggcagaggcccttttaaaagggcacttagttgattcataggactctgccctcatgccctaggcctccaaaggcctgctttctaaataccatcctcaccttgggggttagaatttcaacatacgaattagcgggggacacaaacattcagaccacagcaattatacttaattctgccttttcaaggtctctgctctattcctggacacaaagagtttaaatgttttttggtcctacctcctggatacattttcttttctttttttgagacaagttctcactctgttggccaggctggtgtgcaatggtgtgatcttgacttactgtgacctctgcctcccaggctcaagtgatcctcccacttcagcctcccagtagctgcaactactgccaccatgcctggataattttt

SEQ ID NO: 56930 - DNA, 2756 bp, Homo sapiens
tgctatttctgaccttaaagcccatgcatttcccacaacatatgaaccatgataaggtgtattttaaagttcatcttttctgttttttgtgaaagtcttttagagatctcagctcatcacaaagtttccggttcagtctcgtgggtttcatgtactcagccagcatttacttgccagtcaaggtctaggatggctacctgtcctctgcaggagccccaagcctattcattaatttcatttacaattttatagtcataattatttctttgtataatagcattctgagattttccaaaatttcccactgtttttgttttacagtgggcagaattcactttgctctaacttgactccaagatgacacaatttcccagttttttttttaacggctaggggatgggggtatgcggaacagaacacagtggtctagctaaccgatttccgctagacgtccagctatctttcaaaatattttgtttctgcacggcaacttcagccgctaaaaaagcatccagcttacaacggaacctggagggttggtaaaggccccctgcgctggccccgccccatgggaccgggcggcgtgggcgtgagaggcggggcggggccgcgctctgcttgccaatgtctttataggtcacccggaaggcacgcggaacctcggcgcggtgcttccagcagggtctctccgccactccagccccgcgcccctcgccgcggccctcgggcgtctgcgccgcagctgccgcccccgcctctttggagtctctcgcggcctcaaagcgcggcctgcgtcgcttccggcagttcccgaccgcgggcgatggctgccgctgggggcgcccggctgctgcgcgccgcttctgctgtcctcggcggcccggccggccggtggctgcaccacgctgggtcccgcgctggatccagcggcctgctgaggaaccgggggccgggcgggagcgcggaggcgagccggtcgctgagcgtgtcggcgcgggcccggagcaggtagggcgccgtgcgggcgcgatcgccggcgcgggccggggtccccggtgggtggcgcctggctctctgggccgagtctctggttccagtgccttctgcgcgccgggcccacaccccggaggcctgcctctcgcccccctcttctggggtgctctcgcggctccgtctcgctgctcggtggcgtcgctgcctcccttccgtcgcaccgcagagttcctttccgcatcacccactcccggcgggaatcggggaccctggacgcccagctccctttcccagcgcttcccgtgccctgaggaaagccgggactttgctgctgcttgttctccgtgtgatttgtctgggatctgacctttgctctgcccgaaactggcagtgaccttcgcgacaggcttccctcctgctgtcctggcctgacacacctgccagctgtttttttcagggccttgccctgctttgagaggacacccaggtcccaggtctttgtcagggggtgtccaggtagaatacacccagcccataccctctgctgccctgtaggccctttgctagttgctcaagtgttgaaagcccctgcgttgaagtaatctgccgggacttgaaacttggctttggcactgattgtctgacgtgcctaacttggtcagtccttaggaacccagtttctccatttgcaagttggatataataacagtgtagacctcctatggttaattgaagaatcaatgagttaatacagcgatacaggtagtcttgtgcctagcacgtaatgagggctcagtagatgccacttggtagcagcagcagcagcagcagcagcagcagcagcagcttcttaggttcacaatgttaagagagttttgtattaaatattgaaagaaatgtgacaatttatcccaaatgtgttgaagttttaggttcttgggcatatttgtttttcaaagacactccttagatatactagagatacaatttacacataatttttaccaacatggtggcgatttatataatgcagatctctcgacagctctttgaccgcatgatgtagggtagcaggaatcgagaactagagggagagtgtgttggatttgtacgctgctttgtctagtttctttttgaggtctctgagagcagggtctaagactttcagtcatcttttccccactaatcccgttatctagtgggtgctccatacatttttgttgtgtgaactttgggggaaatcagggagaaggcaagccagatttatttgttcctgtttcctctgcacttccccccctgtctttgaccagtgtgggtaccttgctttctgttatacaatggatgagttttggacaactgaatcaattgggacagatattgaacatgcttgtgtaactggtataagggaacatgaatgtttttgtagtaattgggagttatctttctcagatttgttttttggatttggatatgtcaggttgttttaaaggggagcacgtctatttcctcataatcctgctgccctctttattggcacaatttctattcatggtcttatcattcctcttacagactttggagctacaactggattttccagttcttactgtgttaatgagacttgtgctgtaactaccgtaactactaatcacatgtggctattgaagtttaacataattaaaggtaaataaaattaaagattcaatctcgtagttacactagccacatttcgagttctcagtagccacatgtggctagtggct

SEQ ID NO: 56931 - DNA, 2128 bp, Homo sapiens
tcatccacagtcgcccctcaaactgtgacccccacctgggagacccggaatcatccaggaccctggtgtggggggcagtactccccatatctgccccccgaaaactgctatggagcagccgcgcctcggcgggcaggtgagggggccgagcccaccagcgccgcagccccgctgcctaccttcttcagcgccggctgccgctcccgggcagacatcgccggccctgactttggggctgacaccgccaaagggcagtcagtgctcgcccaggccacttcgggaggcccaggggcacggcgaggggtcggggaaaggcgatcgcccactacagcccgcgcgcctagactgagggaggagccgggctgcagaaccggcggcggatggagacgggagggaggctgcgaggtcgctcgaggagagactaaggctctagaaacggagaagcgggcgctctgcgggaggcggcggcgctgccgctggccgtcaagggcgggaagtgttctgggactctcattaggggccgcgagcctcgagcgtcaaattcccgcggcgtccgcctagcgcgctgctgtggcgggcgcggagggcgcgcgccggcagtgggggctgcggcggcggagggcacgggcccccgctcagcgtcctcaccttcttggtgcagctgcctcccgcgagccgagacactcctgtcagggaagaggagcgccccggctgtccccctagagtctcctgctggggggacatcgcttccatgaagaaaatcttcaaacaaatcccagcccaggaggaggctacacgatcatgtccgcgggctgccggccggaggggcgaggacgcgcgggcggaggcgcggctgccgtgctcaggcagggagccgagctccgggtgctcgccgcgcgcctcccgtcggggccatgtacctccgcctgcgctcgacaccgcgggctggaggcgagtgcagcggcgacagcccgtcagcgccgcggcccgccccgcctcgggcccgccccctccgctccgggcgccctgcgccggggcccgcccccgcagccctcctcagccctcctccagcctgggccctcctagcctcgtcccagcctgcggcgcgcctggcgggcgtctctctatatatgttagcacaccggccaccggctgaccttttcggtctgtgactccgcgtgggtgcagcccgcaggagctcatcggcctgtgtcacgcacgggggcctctagtgcacggacacgcgcctctcccgccacctgcccactcccaccagaccccatcccttcccgcgccgtgcccgcggcggaaggcgcccctgcagcgcgtgcatccgcggagcggtggcgacctcagcctgagcagaggagttgcagtgattcctgcctcgctttcagcggactgcggagggaatcccccaccccaccccactggggatagggtggcacgtcgcagagtgtcgcagctgtacaaatttggaagcccacagcatcgcctgacctcttgtgcaatcccgaacgctagcctgttcgggtaaccctgagtgggcttctgcagccggtcatgtcagcggcccctgcacatttgcacccgcggtttccgctgtctgcaggctgcagagacgggggcattccaaacgtgaaagagcaatgaaggaaaatgcagacagagcgaggacgccgaaatttggctaagctattgagaaggctacaatatgtggaagtgtttatcagatatctgcgccgagagcataacttcctgtcagcccaaatagaggcaaaaatattttaaaggccaaagaataatcagagggagaggatttggagctgacccgcgttgagctgagtgttgctgcactttgcggggctggttgactggtacggatgattcggtagatggcattcttcccttggagtcaggactagagaagcagtggcggattagtgaggaaggacaccacgctatgatattaggttgtggaaggggtttggtttgcttttgtggtaagaagaaaaaaatcgaggttcctgccaggttaggctgttattaggacaggttgtagaagaatagggctctggccggctctgttccaaggaagggatgctgtccaacacacactcgcgcgcgc

SEQ ID NO: 56932 - DNA, 1205 bp, Homo sapiens
gctctttctcattatatatcttattttggtacatcactctttgcagtggcttcattttgtgctatctggaggggaccacggataattattttactttgaatttttaaaataggaaccccttattcggctcccctaaaactcaggcagcaggcagctctggcagtcccccagagcaaataatgacttggtatttcaatattcattctgagcattgtctattcccctgggaggtcaggcacatggccctctagaaatcaaatagcaataaaatccagtttgagctggtcaaagttaagacatttcggggaatgtgggattgttttttctacaggcataaatctgaccacaccactgtctgtagcttcttctcaaggacaacaagtaaagttgctatattcaggaatgaatctgacttgggcaaaagggctcaaattaactagttccttgcttgccaaccaaatatttcccagagccaaagtcacagtgaggatgtctaatgaggaaagaagaggtaacaattcttatttgcctgcagcctgatttcagctgggaaaagtttaatttagtgcttgtgtgggcgggcatgtgcaaatttgcagaataacttgcattaactgtttatttacttgtcctttggaatttggcatgcagcctggcagccagtcactggccaacacagcaaaagtggggagtaaggaaagtttattttagacaaccctgctgcctctttctgctcctttccacatctgtggcattccctcccccaggtgtcctgagctattatgttctctctctctctctctctctcttgctgtcttgctctctatctctcagatttgctctggaaaatatgaataagtcatttgttctaagttatgagacatcatcccaagggaacaataacatcttttttattcagcagtattagaaaatgaggtattctacaaaaataaaatttctagatcaataaaaatgataattttaagtgccaattaaaaaattaattggcttggatagacacatttaaaaatgcattatttgtattactgtcttccttcacagagtgctaaaaattataatgaaccaattatgtagcatttggcacattacaaagtgctttcatatacattttctcattgatttttcacaaatttaaaaggaaatgtattaattcgttttcacgctgctgataaagacacacctga

SEQ ID NO: 56933 - DNA, 459 bp, Homo sapiens
tgaacaagttaaaataaactaagagtcccaaggaccaggaaatgttgatattcatatactagccaattataaggaaaagtcatcagctccaggtttcctggaggataccagatattcccattttttcctcctatctgatatttacactcttaacatggtgttctgcttgccacactgctggccagttgtaaacttctgttggacacagcaatccagacaaacagatagaagtgcttcttacatcatcaggcccttcttgtgtcagctttgatttctcaggttgccacattcatgacatctgccaagatttcctaatcagccatctgcaaaccagcttcatgctgaaaatgaaaatccaaatgaaagcaggcttactcaacacctcagtgatttaagaaaatcaggcaatctttctagtccatctgtgttatctttacttgtagtttttgtaaatggaag

SEQ ID NO: 56934 - DNA, 802 bp, Homo sapiens
atttcaggttgatgtccgcgattttcaggaagaaaagagtaccttccttccaggtcactgcagttcccaaaaaaatcctcgctcttgcccagctgccggggcaagcccttttggcgagctgcggatagggttgaggcaccacctagtggcttaaactgaaaatactcccaaatgaatgtccctggtgaaaggaggcaagaggggaaatcgtgatcgcccaaggcaggaaaagggaatcgaaagcaaaaactactcatgctcaaagcctcctttctgcattcccctctagcctacagctacgcatcattaaaagatgtcctttttatgccagcctggtcaagaactattatgttgttgttcgggtttttttgtttttgtttgtttgttttgttttgagacggagtttcgctcttgttgccaaggctggagtgcaatggcccgatctgggctcactgcaacctccgcctcccgggttcaagcgattctcctgcctcagcttcccgagtagctgggactataggctcgtgccaccacatctgaccaatgtttgtatttttagtagagacggggtttcgccatgttggccaggggtctcgaactcccgacctcaggtgatccgcccacctcagcctttcaaagtgctgagattacaggcgtcagccaccgcgcccggccagggtcaagaacttttatgtgagggaggttagtaggtcaggtcaatggatttcaacacccccaaaagaactgtagtctagattaggcatgtgaataaggagagttagggaaaggagggcagatagga

SEQ ID NO: 56935 - DNA, 1577 bp, Homo sapiens
tccgggtgtgtttccacggcttttcctgcatagaacagagaggcacaaagtcaaggcatgcgagtaagggccggggatccggagaggacgcgagccacgctgtggccgctcccactcagcgcctgtcccggagggcagaggcccagaggccgagttggccgctccggacgtccgcgtaccccaggcccccgcccgccctcccacgtatccactgttgtgtcctgagacacgcggtgcggaccctgcgcgcccagaagctgctacggggggagctagaggctcacagtgagcctgggacgggggcagagcgcaccgactgcactgagccgagctgtggcggtccctgcgcggaccccgaggggcgcccgctgcccgcggagtccggagccgatcggggaacggggtggtggggctgcggtaggctggagcgcggagagggcgcggcgcctgggccctgcgggcggggcacgggattccctgggtccgggctaggaagagcgcaatctcctttcctggggagaccctaactcctggaacccggcttgagggggatccctgctgtccagctgcggtccccgcagtgaccaggcgaggcgctggcatcctggcactatctccaggcgtccaggctgaacgcgcggtcaccctcggccgccgcacccagcgcacttcccggcgcgattcctggacgcacactgcagggtagtggtcagggccggagccgccccggactcctgcggccacctccaccttgaaagctcgcccggctcggcttggcctaacagccagtccccaacctactcactgcggcttttcggggcccggggctgaggctgcccctgctcccagcgctcaggggtccctcccagcgaacccctcttgagcgcgcccgccacctcccgcgagccggggcagtccgaccgggccccgccagccccggggcggcccctaccgaagggcggcctcccggcggagtgcagggtcatcgggagccccggacggctttccccagctcgcgctgcgcggactcgccccggagcctcagtgcgcctcggagaaacgcctgccccagaaagggagggggtagggagagaggggaagaaggggagagtaggagcgggggcgaaggagggaggagggcaagatggagcgcggaaaaggcggagaaaagggacgagggagagcgggcagaaggcaaagacagaagggagcgagggagggagttcctcgggcctggcccctttactaggtcagtctggcaggtacctcgccggcccaggacggggctggccaaacctcaccgcttgctcccgggctggcttccagaccaagggcacgcagaggtcggagcctgcccagaagccacacctggccaggcggagaaggaagggactcgggacttccatgctagtgggaacatcacagtggggtgggctacgtcagccgccataatcagagaaagccccctgccccaggcctggcccctccccaggtccataataccctctctctcggctgtctgggtctgaaagccaaggttcccccgacctaatcagagtggtgggctccgctgcact

SEQ ID NO: 56936 - DNA, 871 bp, Homo sapiens
aattgcttgggggttggtttgggtgtgaacataggatctgacagctggggctcatattgcctctgttaggattggtccttctccagcccattggcatctgccccacaacagtttttgtgcctgatgctgttcatgtgcaatgtgtgacttcatgaaataggcctttgacagcgggacttcttgaaatgggagggggcaaatgatgtaggggaggtaaacacaggttccagaaccagatggactgggctcagatctcagttcctccatggtgtgtatcctcaagcaaattacccaattcctcttgcctctgtttattcgtcttcaaattggggatgataggattttgtgagggttaatcgagttattgcatacaaagccgttagaagaatgctttccacatagtgagtgctcaataaatgttagttgtcattatttgagaaataataatattatctggggaaagcaactaatattccaaccaaggattgaaagccagctatttggtaatgtttgttcacaccctttgctcagagtttagagttcagatgcgagccagctgcaatttggcatatacagcacatgcagctggaaaagtaaggacctccatgtgcagaatttcaggtaacgcattaacactcccttacatttctagaggacttcacagtggttcttcttttaaagcacttttgcacagccactatttcatttagtttttataacaaccagcggaggtaagtagatcagagatctgtacctcgattacaggcaaaattcaaaaccttgaagttgctcatggcaacgctaaaagtaggactaaggtctttttcttagtgtaatataaaaacccttctgttggctctttatgctctaa

SEQ ID NO: 56937 - DNA, 625 bp, Homo sapiens
ttacctttctttttttaaatcattaattttttaaacagccttgatgtgtttttataaattgtagactgtgaatttttgtgctgtttgaaatctaagagagagttgcctttctttgtattcttggagcaaagtagaaagtgaacccatgactagaaagataatatcaagtaggatattgtaaacacacctcagggagataacatggggtggaggcagacaaacaggccaatccgggggaggaatggagttaaggaaagctctacaatgaggcagattttttaatacccactccttccaagtccttcagctcaagctgcagccaaatatttgcataaagagctggtaaaggattccagcttcctggttcatgacattacagcatggatcgttttcaaaattaatactgcctcctgtttcagcagtggctgcctgcacagctctccctgtggctcagagtatgggagtgagtatgccctgtaacccaaaagaggtgtggtgagctcggcttcccagcacagaatcacagagcaatacgggtacctttaaactttaaagccacacctgaaatttaaaaaaaaaaaaaaaatcctaaattactcagtataattattaattcaactgaaaa

SEQ ID NO: 56938 - DNA, 1035 bp, Homo sapiens
ggcaatttattgtttggaaagaaataggtaactatagattgtggtgtcatgaaatcatgtagtcagcaaataaaattacttctgcagacttgggttgggtgttgtttcgtttgatttggttttttacccctcattttctcactctgcattggtaaacccacactgttcagttctttgatcctgtctaagttattaagctctttgtttcttggttgtcatttctctagatcccaggatcaccttcaaattcctccattctctctggctccttagactacagttactcgccagtgcagctgccttcatatgctccagagaattacaattcccctgcttctctggacaccagaacctgtggctaccccccagaagaccattcctaccaacacttgtcctcacacgcccagtacagctgcttctcctcggccaccacctccatctgctactgcgcatcgtgtgaggcagaggacttggatgctctccaggcagcagagtacttctacccgagcacagactgtgtggactttgccccctcagcagccgccaccagtgatttctataagagggaaacaaactgtgacatctgctatagttaatagaaattacagtaattcagaacatggcatgggtatatctatttttctaccacgtctagatgacactgcaaaatatgcaacttggtaacacaatatcccaagcacagtttacatgtcactatttccaattttctgatgctaagcattcatatgaagtcctcagacccggtcacagcgccactcctactttgtatgctcatagtttaaatttttgtaggaaactttcaattgttttactttttgtataacgaacaaatgctgtctccttttttactaataaataattttgtattactaactgttggattttttttaatttccagtagtcatttttaattgatttgaacattatccattaattctggaaattgctaattactctcaagtggtttaatcttatggattcatgaatttaaaattatttttatttgggccaggc

SEQ ID NO: 56939 - DNA, 798 bp, Homo sapiens
tagcgcctaagctcaactggctttcctcctctgcctctgttcctgggacttgctcacggctcacaaggtagcttcccactgtcagtccatcagcaacagccagttagagtcgattgggtgtgagaagcgagactattcataagcagcctgtcccctgtgccactggcttattaagcagagctaggcatagacagctgggaactctgggcagctcctttaaatttctctttgaagaatgttaagtattcaccagcagtgaaggttacaaaggctgaagttttctctccacccccagcatttcccaggggagtaaaaggaaggatcaaagctacaatgggcttggctgcccttctccaggaatggccagaggacaacttctgcttggtgagcagccatttatgccaccccggtgctggcaggtcacctctcctgggctggggagcaggagttcaatgattaactagaggaggccatctctggaggacagaaagagtcttctgatctggttagccatgcagacctgagcctggattttccttcccactccacttcaagagaggggtgggttcatttccacagttctccttcctgcagcaggaagggagagtagaaacccaacttcccagacaccaactccatttccacacaaagcagtagagcccagacctaagggttctggagccacacagacctggtttgagtcctggttccatcacttatctgttctgggacattgggcaagtgccttaaccttcccgggctacaacttagtggcggaaatcagtggagtaaaacctc

SEQ ID NO: 56940 - DNA, 1419 bp, Homo sapiens
ccatcctgtcaccagtgcagcagagcccaggaatcccctcagatctgagggcagatcagccctagggaaaccaaatccctaggatgagtcattgggaaatagaaaggggcaagaccccggcttggctgagcctgctgagcgctggctgagcagagaaggtagacagagcagcaggggcaataagaaagggcctgggaacatccaattcagaaaacgggggtttttcccaaagagtaagggctagagctcccacctttgtcccttacagccaagcacagacacaaagcaccagcattgctgtgaaagatgcaggagcctgggaggtgctatccagcatggcatattcatccaaattcctgggattgactgtgggataaataactatgtcatgttgcccttacagcacgggccaggggcctaacactttccttggcactcctccagagtctgcaaacacaggcctgagtgctgcctttacagagccgaatcctgtgcatcttgattaaatattgacaatagctctacctgccttatcttgatccagtggaaacccagtccccggggagctgtgcagggcaggatttacctcccacaccagagccacagatgtcctcctgaaccagctcagcaaacacactgctctgaggcacaaaatccgcatctgtgctcctcagcaaaatacgttttatgactagttagaccctaaaataaaagtcttctttagtcatctgggtttgggttgggaggtgatattcctgtggaacttaataaatcaatcattaactttctgccagtgggctaacttgtaagtgggaaagtagggactgggagtgggtagaaggctggatcatcaggcttcccggtgtctgaggctgccgacaaaatccaagcctatcagcccagagatcagtggggccagcccagaggtcagagggagtctaagagtcccaggcctctagcaaaagacaggcttgaagtgaagttacaaaggggcaaaggttatcctcagcttccagctggtgcctttggacctttcagtgacatccaggacctgggcctcttcgctgtgctttccctgagagcattccagatccctgaatattcaagggaaaacacagtgaatgggtttaggatggtcaagactcctgtcctcccttcctctaaaggggcaggattggaataggagtttctccctggagatgcggcgaggagtccctatatcctaggctgccttattaacagagagcttcgagatcttcttcacaaagagggcttctcatggtagagagcactccagctaaggaggggcaaatgttcagaaaggtgatgagctttggcccttttaactccctctgcaggcataagccaaggtttctgctgcacctggcaaagaagtgaatcagatcagaagcacaaatg

SEQ ID NO: 56941 - DNA, 2448 bp, Homo sapiens
tctgtgttctctacgtgttcctgcgtgtctcacctcctcatctgtggttgaggttttccgtggtcagaattccctctcacttcttccaacctcttgattcttgctgacacaagacaaatgcaaccctcctgcctgacccctgcagcctgagtaatttccacattctacagcttctcaaacatttccagatctgattagtattcatcataggtggcagtagaggacagccataagagcagggactctgagccagatagcacaggcctcaaatcctgcccctgccaccaccttcctgtgtgatcctgggcaagttactaaacctctctgtgcctcttaatcttcagtttctttatcaaaggaatattgagagaagtcacttgatgtgggaaattggtagaacagtatatgcctcaaataaattcaggtacagggtaggcattcaaaaaaattcagtctattatgtaatagttattctttttgatggaagtgtcttatacccacaactagattataaacgtctcaaggtgagttattgtaccttatttctctatgtcttcccagtggcatgcccatgcgttttaagctcagttgatacttattgattaatcgattgggtgattctttaagacatgctgccatttgtcttcccttcacctctcctacacctttaggattgaggcaagtggctcccaggttctcagtgactttcagggcatgggacaattacccaagggtgatccttgtaccctggggccagacagtgtccacctgctgctgagggaaggtttccttcccctcttgccatcaaagccaggaaaccaaagcattgacccaaataagagccagtgcatagggcccttcctggcctgggagagcaactgaaaagcagccgtggctgggaagcaacaagctgcccacctagacagcctgtggcctagggatcctgggctctcagagagcaggcctgggtcagccaagaaacactagaccttaggacttccacagggagcccattattatccaccgataagggccccagggacctgggctctgaatcaaagtcccggaagcctaggtatctgttaaacccggatctgcagcactgccctggttgaactttgctcagtaaatacccagctgataaggtcccatgcctgactcggcaccagacctccctccaggctccagccacgagcaaggcctggccttgaagcccagaaggcagagagaagcttgggcagaggcaacaggaagtgggaaatgagtcccaggggcagatgttgggggtcaggaatcccagtatctcaggtggactttagacccatcctccaaggtccctcagctggccaggtagcaaatcaaccaggaaatgatgcaatatacaggtacaggtcctgctccaggaaagtctgattctagggggctgatataggcctaggaatctgtatgtataaaaatctctcttgggaggctgaggtgagtggatcacaaggtcaggagattaagaccatcctgaccaacatggtgaaagcccatatttactgaaatacaaaaaattagccagatgtggtggcaggcacctgtaatcccagttacttgggaggctgactcaggggaatggcttgaacctgggaggtggaggttgcagtgagctgagatcacaccattgcactccagcctggcaacagagagagactctgtctcaaaaaaaaaaaaaaaaaatctgtccagtatttctgaaaatatactgggattacaactgctgataatccattcctaatttaacataagaatctcccgataacatcccaataggagattcattatccttattttaacttcccctgtctgaacaagagatctctactggtattcattcattttttcaaatatttctagtgcctaggagtacagcactgcacaggacccatggagcccccgcccacgtggatcttgcagtctaacggggaagacaagcaacaaaagttaccagcagatgaatgtgtcacaacttgtgaaattcaggctgctataggagtgtctagcaggggaaccagcctggttctgtgccccggggccacctgtgcgcctccacctttgctctgaacaccaatgacagtagacttgagaaccacacatacctgtattcaaatctgggctgtcacttactggtggaaagttcttagatttatttaatgtctctgggcttcaatttcctcatttgtaaaacgggaataataattcttctctcacacagtggttgtgaggattaaccaaaataatacatggggagctccaaaggccatgtctggcatagggtagatgctcaatacatgtggttttaattatcttccttctggccatttccaccttcctttcggggggatattatcatgtcagacagctcttcctcctactgaggctaacttatggtaacacatgccatat

SEQ ID NO: 56942 - DNA, 395 bp, Homo sapiens
gtatgtatgttgtagggtaatttaagatttgcatgtgaagtgcttggaatagagtttggcacagagcatttaatacatgtgagctccgattatcatgagtattagtagtaatattcccttccgaaatctgaggacagataccaggtgtccccctaggtctgaagggacttctcattccttcagctatttctaaatgacatggttttagtctccccaccttccttctgggtgagtcactcttgcacaagttccatttgccactttccctactgctgggtggtgcccagcgatgaccacaggccccaggtacaatctgacgtgtcagcgaacagggcacctgccctgccacactcaactcactctttctcagggtcaccccatggccacgtcagcat

SEQ ID NO: 56943 - DNA, 746 bp, Homo sapiens
cttaggcataaagtacagtctgaggcattgtgtactcaagagaaatttgggaaatggggttacttgggggggtctgagcactgtggtcaccctcttaattcagctgaggaacaagaagggctcaatcccatatgcacatatctcagaccatctcagagacaggtgtatggctcagccccctcttgtttgcatgtacacttctgaggaagggctcagaggcctcctggtcccagtccctcccaggaagtggacacaccacacacttggctggaaagggaccagctggccacttccaggatcttgtcaagagagggcttcccgcctcctactgtttctaagtcgatgaacaaagagcgcttggtggaggtgctgtggacagagagtatcaccctctaatgtctggacttccttggaactcagtgtcaacaggtgtgccctggcacaacagaccatatgtggggcaatctctaagtccccacctcttcctattgacgttgcaggactcccacagctcccacgggtctcctgactgcccggcacgtgtccacagccagctgccaaggaattctgtaactgactccagctgagcaggtaagaaggagggtgcttctcatagtgactttgcaaagtgctcatgaaatatcagaatctgaagcttcaagacgattccaaaggagcccaacggccaagtgtttttgcaagttgaaacttgcagttggtacctttcacaccaacctatgtgcagc

SEQ ID NO: 56944 - DNA, 3692 bp, Homo sapiens
tctataagcgactgcactgctgtcagaatgactcctcggagacatcaaaacgtggagggttttattatatatagcaacgagaagagaaaaggacacaaagaaaggagcctgtgagcaacgcattgctcagccacagttctttgccggtgccaaatttaggacgcgctgtacttgtaggtgagaggttttggcgggaaggaccccgggtgggcggagaacgccggggcggggaaggagatcgcaggccgcatccaggtctctgcacccctccgcacggtccgccagggctcgctcttgcccttcgcctggaaggccgaggaacggagcgggccgagcagcgaccccgcccctggcagcggtgaggcggaggggcgaggggagggcgtctgagcccggaaggagcgcgccggccaggctcgcgcccctccccgtgcgccgtcccccactctccagcagccgacgtcggcggtgcttcggtcgccatggtgaccaatccaggctcgggcccgcccccgcccccctgccccggccccctgacgtcggcgcacgtcagcggcggcgcgcgcctggctgggccctggggagcgggagggaaggagcgaaggagcgaaggagcaagcggagcggccgtcgcccaagccaagccgcgctgccaaccctcccgcccgcccgcgctcctgtccgccgtgtctagcagcggggcccagcatggtcatggcggatggcccgaggcacttgcagcgcgggccggtccgggtggggttctacgacatcgagggcacgctgggcaagggcaacttcgctgtggtgaagctggggcggcaccggatcaccaagacggaggtgcggcccggggctcggcgggagcgtccgaggcgagggttcgggagaggagctgcttaccgagaggggcggccgcagtggtgggaccggggagacccgagaggccgcctcactggcggaggcgagcgggcctgggactgtgaggacccaggaggtgcagggggtcggtgagcagcgaagggatcgggcccgggcacccggacccgagtgtcgtccgactggaaacgcaaccagccggggctttgctttcccctacgccacccccggtggccacccggaatttcgcccagagccccccacccgggccgtgacctggtctgtggcctccgctccggagcccaagttccgcgtcttccctgctttcggctgggggtggggtgggaggggaagtctcggtgttcccaggctgcgccgtgagagacgtcgccggcccgaggaggggaccgcctgcgcttgggctccgcggatgggggatcgtgcggcccccgtgaccccggcgcccctcccctgcccgacgaggaagggccccatggctgggaatacccccacggccactgtccatctcctctccttccttttggcccagggtgtctctgatttggtgtctggctagcttgatctcttgcctggggcatttccatttaatgccccagacaatagaactggttaaaatggtcatctctgcatttgcacggtgggtggattggtcttctacttgtctagggttgtcactgtaccaggtgtgcattctggctgtaatacgcattctttaaaccatatcagattctgcctctactcataaagccctcaactgcttcctgacggtgaatcctgcaccctcttcattgcacattctaatgcaccgcacatactctctcacaagtctctgttcttacctaacccgccccccttccttccactgcctcaagctgctctcctcagggtctctattttaagacgtgcaaattaaataccttagaagaacggtagaaacaaaaccattctttagaataaaacctagtggttttgacgtactctactctgccttattgtagttcctcctggagtttcatccttttcctgtttgtttgccctccagttttggtcctattctgctttttcccttgttagtacgaatgtactggagtttgagtgtagaataaagtaggacttcttttcagaatgacttatgtaaggcgaagggcacttgcaaacgtgagtgatttttggagttgcagttgtacttagaagttttgcttaatcccgtttccaaaaggaaggggtatatgtcattctgtcttctttactttttgccttcccctgctggtcctgaaccagtccaaatctgacttatcttttagaatcaggaccaaggtcagatattttcttctcacagatttaccagttagcaatttagattgtttgtaatgataatgataacttgactatagtgatattgttaaatcttaatctgatcccagcattttttaaaatgaagaaattggttccattcctctgaagagccatggcctatgccatgccatttccctttaagttacataaaagaaggcattttaaatgcatgttttatgagtccttgcttaatgactttctaaaaacaaacaaattgtgagttatagagaggttctacaaaacttttgaactgtagtatatcgtgtggttgaattccaaatccatcagttcttaatatttttttctcatcagctcttactgggattaatagcaagatttaattaagtcatctattatttatcaggtcaaatttagttaatacagtaagagctgcttaagtggagtgattgacactttgaggttgacaattcaaatggtgtccgttttaaactaatatatcttaaagagctagggggcactatggagtaataccgtggtttggctatcagagtgagatcaatgcattcatttgtaattggaacaagcaccggtcagatcgtgaaagaggacttagatcctaaatcgtgtgtgtagtatatatgtgtaaaatgatttacgttaaaagctaaatgtttagtccgcagaacccatttccctgtgcttttctaaagaagctgttattaacatataaaaagaaatagtgtgaatttgagatgggtgagggtatctgtggtaatttggtgggtgtgattggagatattaaggtagagagggataagtgaaatgtcaaagcaatctttgaacagaaaagttctctggatctctaggttgtaaagttgctctgaattttttttttttttttttgagacggagcctcgctcttgttgcccaggctggctggagtgcagtggtgcgatctcggctcactgcaacctctgcctcctgggttcgagcgattctcctgcctcaccctcccaagtagctgggattacaggcgctcaccaccatgcccggctaatttgtgtgtttttagtagagacggggtttcacagtgttggccaggctggtttcgaactcctgacctcaagtgatccacacgccttggccccacaaagtgctgggattacaggcgtgagccaccgcgcctggcccaattgtttcttaaagtattccatgggagtaacaattccattgttaatgatgttttttacagcagttatttatccttattcgttcattcactggataaatgtttgtgtgtttttgataaatacaactaccttaaaaactataagatgtttaattaaaacttttgttttaaattcagttttcatggcagaacatactacagtagttatagtggaacaatgaatatggtataaaaataatatcagcaaaatatcacaattatacttattgacgataaaagtttcttt

SEQ ID NO: 56945 - DNA, 1133 bp, Homo sapiens
tctacttaatattataacctaggcgttttgtttattatatataactttataaaaacatttttgttagctgcatggtgttctaccttgtggatgaatatcgttttacctaacaattcccttattaatgaatattatgcaattttcagtttttgtttatagtaaataatacgcagtgaatatttttgtgcctataactgagtgtgcattttacattttttttagggaggagaaatggctggtaaagtcctaaaaggaaatttcctaagtaacaaggtattatttttacattaaagagtagtgtatttttattaccaaatctgtcgtgtttattattgagaaatttaaaagtataaataggaggccaggctagatggctgacacctgtaatcccagcacagtgggaggccaatgcagatgggttgcttgaggccaggagttggagaccagcctggtcaatatagcaagacccagtctcattaaaaagaaaaaaaaaaaaacttataaataaatgaaaagaattccccataaaatcacaaccccaaagataaccataactagttattttcagaccttttctataatagataacttgagttttcctcaacaccatatacctctcatattgcttagctaaagagcatgtaaatgtatagtctgtggaatcataaagatatttcatagaggttctaaaaatgaccttattaaaatggcatgtgggtgtcaggctgcttacttacccttaagagaacttggaatgcaaaactgataacaaggacattttgaaaactgtatttgtttgctaaaaagctttccatgtgcattttggggattttatagttaggcctaattctttaccaccttaaaatgtaagatttttaaaaggttttcagaattgttaaggtattaaaattgcatttttatagcaaagtcagaaacaagagaaaggcatattacaccctgattatgatgtttcttgaagagaactcattttaaaaatacatttgaattttctattttgctttaaaattttaagactcctttcagtagtcttggtattaatcttgtactgtgaaatattccagatttcaagaagcaactgtactatgtgcaacagaaggacttgttaccaaata

SEQ ID NO: 56946 - DNA, 760 bp, Homo sapiens
ctcctcagttttggttacattttcctatttcattacatgtctggtagtctttgattggatgctagacattgccaattttaccttgagcaccacatatttttgtgttactttaggttttcttgaactttgttctgggatgcagttaagcctacttggaaacagtttgatccatttgggtcttgccttcataattgaaacagtgctcagtctgggtctagttacttcccacttctgagtactctactcaatgccccatgaatgctgaggttttttggcctgacaagtaggaacaggcaccattcctggctttgtgtaagcaccaggcagtgttctctctcagcctctcagatggttttttctctggcctctggtggttttccctcacacgtgagccaatcagcactctcctgagtgctcaagggacggatccctctgcagacctttggacttctttctgtgtgtagctcactcttatctgggactctcagcattgtctactcaactcaaagacattgctgggccacacctgggtttcccctccctgtgctgtggcgtagagattctctcaaggcattagttggaacattcatggtctcgcctcatttgtcacctgttgctcagggttcactttcctttgcctgatgtccagtgtcttataaaccattctctcatgtattttgtatttttgttgttgaagatgggaaggttgtttcaggctggaggacaaatctatcttagccaaaagcagaattatttagtc

SEQ ID NO: 56947 - DNA, 633 bp, Homo sapiens
cctaaagccctttgctctctgcctattgaaatactgcctatttaaaagttctaactgaagttccagctcttcagtcaagtttttctcaattaattctatccacattgatttcttattaggagaacactgtagttctctttcctgcacaactcattttagaatttatctacacactgcctttcactgttatttaaagtctgcatgtgtatcttttatctcttaatagattgtaagcttctgttgaggactttagcacaatacaaagtgttttacaaatacctgttgaatgaatggtgtaatagtctgttttggccttgtagaccttatttaccgagtgaagccaacaggagaacactgccaggttaagtagtctgaggtacttctttgttcagtttttgaaaggagttttctgttggtttactcttcacgagataaacatgaacgaggaaatactaactgaatcaagggagaaaattggcttcctccagtatactgagcagtttttgagtgcttactggtagttaccaccatacaattactttttcttctaactcccacacctcccttcacataaccttttcagaatataatggtaaataagaacatatgcatttaacctgggtaacttgttct

SEQ ID NO: 56948 - DNA, 2179 bp, Homo sapiens
attctgttttatcttctttgagaaatctccaaactgcttcccaccgcagctgaactagtttttattcccaccagcagtatataagcattcccatttctccacagccttgccagcatctcttctttatggactttctaataacaaccactctgactgttgtgagatggtctctcattgtggttttgatttgcatttctctaaggattagtgatgttgagcacatttctgaatgaaccatccagcttggcttcattgtttttttattgtttcacctgaagaacttaaagaaagaagtaaaagagatatatttgccctttgatttatgaatgaatgatgatgtcttagatctcaaatatttgctaaaaatgtagatacctttagagtacttctatacagaaaccaaaatattaaaattaacaaatctgcttccttcattagtatctcattctccaagtttgacatttgaatcctaattcctaaaaattgaatgttttggtaaatcatagtctgttctttagactacatttctttccttcttaagaaataattgcatatcaatatagctatctggatgtatttatctgtgtaaagaatgtgttagaagtgtaaccagattgcatttataaatattattataacactaccataaatagagtaaatagcacacaatatcagtagttcagcttagagtgactcatttgtcagtccagtcatagtcatcacttagaaataattcacaacagactttgaggtcctggagcgatgataaaaataggtgggatgaaagtacctatttggggaattgtctggaatgtttaataccatccagatgacatcatcataacctggtagtattaaatgtgactctggcactttcccaggctattcagtttttgtttttgtttttaattattgcctaaaaaaacagctctgggacagttaatgaaatgttactacatatattgaaatcagtaagaaaacccagctattgttctggaattatattaagagagttctgatgtttcagacagtatctcatcttgtctgtaagccagtattgcctcatgacatctcttctattattgtcttgaagtactgattaaagttgttttttgttttttgttttttttggagatggagtcttactctgccacccaggctggagtgcagtggcatggtctcagctcactgcaacctccgcctcccaggttcatgcgattctcctacttctgcctcctgagtagctgagattacaggcgtgtgccacaatgcccagctaaaattttttttttttttttttttttggtatttttggtagagacagggtttcgccaggctagtctcgaacccctgacctccagtgttctgcccacctcagcctcccaaagtgctgggattacaggcttgagccaccacgcccagcctaaagtttttattatttaatcttcttatatgtacttgtttgcattggggactgaattttatttccttgtggttcccacattagcatttaggaccattgtcatagaggtgcttaaattttttgttttaatttctgcttaatgggactgtacagattattaacctgagtttacagtttcacattatttttcagtgctttttacaaatgtaaattagatcaagtctctcatctacttaaagtccttaagtggctatcaatattttaagatacagacccccttgttaggcctagaaatcctcgcttagtttgactttgacttcttcagtttcatcgtacgccttcctccttccctgttctttatgtgttagcctcattggtctcctttcagttttgtgaacgtgctgcacctttttttagaatgcttttctcccagttgaaatagtatcttcaaaaagaagcctttcatgatcaccctgtctacagtggcctcacccagatactttccagttgatcatccctgtacctctaacatttattgccccctgaaattgtaatgtttgtctccttattcattgtctttttctccactcaaatagaagtttcatgaggccaaagtgccaagcatcgtgagagacacaaataagtcactcaaatatttgtcaaatggagtttattcttcaaactcaagtagtgtaactttctttcttaatttgattccatgagggagaaagcactgtgctttgagattgacctgaa

SEQ ID NO: 56949 - DNA, 1401 bp, Homo sapiens
tggagggcagtggtgcgatctcggctcactgcaagctccacctcctgggttcacaccattctcctgcctcagcctctccagtagctaggactacaggcacccgccaccatgcctggctaattttttgtatttttagtagagacggggtttcaccgtgttagccaggatggtctcgatctcctgacctcgtgatctgcccacctcagcctcccaaagtgctgggactacaggcatgagccactgctcctggccagaaaaaaaactttttgaggaaaaaaatttcctgactactaatagtggagttattttattttggtgactaattcttaatcctctcttcatttacagactatcttgctaatcatggccggttaaatgagtctgaagccaggcgaaaattctggcaaatcctgtctgctgttgattattgtcatggtcggaagattgtgcaccgtgacctcaaagctgaaaatctcctgctggataacaacatgaatatcaaaatagcaggtaactgggacacaactggctctaataagatccgaagtgagccactgcactcagtgtgtggaaacagacctgcaggcgcagattcagcagcatttctacctgatgacatcaggctatctcaaagtccattttattcatttccttagttctgtgtgtaattaaaagtaagggaatgagttcattattaatatacacaggtcagagctacatctggggtctgatgtgtccagattccattggcagggtttcggggtgctctgctggaagaggtacatttatctgagtgtcagagtgactggagaaaagacagggctggaggagtaatgctggttgctggtactctggcctgctctcctaattatgactgatggctacagccagaagcagagaaaaggcaaaagaagtgatggaggtagaatgagaaatagttgagacagaaaagcacctttccttgatctgatacgatagggttttgatttataacatgaaaattaagttgggtagagattagtttgcctgtttttctccttgccttttcacagttgtaaaatgttttattttatattctcagtctctttatttacatagtcaaaactctcattcactcaataaatatgtatcaggtactgtgctatgttaagtacaatatgatatgtggaaatcatttcacaacatatccatatataaaaatagcatgtacaccttgaatatacacaatttttgtcaattacattttaataaaactgaaaaaatacagtatgatagttgcaattttaaaagtatatacaaactgcatgggagtataggtgagggaacaagcagtctacctgaagagtcagggaagcttcacaaagaaggaattatttgaacttagacttgagagagaagtta

SEQ ID NO: 56950 - DNA, 690 bp, Homo sapiens
agaccctaacctggcgccggcggctcctcagctccaggaccttgctagcagctgccctcaggtgggtaccttgggcccttccctcaatggctctgtgaggatgaggtgtgagtttgtcctgaagatggtcattttcacttagaggatttcctccagtcctggagcaaacaggctgtttgggaaaacccacagcttctttgccttgttgctgccacctgccactgacgggttcaacccatccacgctgcttccaagtgatcaataccagatggaggcctggacactctcaagctgtttttggctcacagggcagagtacagatgagtgacctcttacagtcgcccttgaactccccttctcctgccacacacacacccaaatgaaaaatacacaaatgaactacacccaaatgagaagcttctcaccactacttttgatgtggtatcactttagtaaatactacaagtggattattcatactaaaaatacaataaatactgctacttacctgattttattttgagcctattttcagtgcatccaagaggattatagttcgaggcccacatgaaggccatagcctcctggtgacaccaagagtctttgctctagtactgactaggtaattgttaactagagataatacatgcataaatgttctgcagagtaatgagccctcagcctactggc

SEQ ID NO: 56951 - DNA, 2434 bp, Homo sapiens
ggaaagggcagtgtggggactgtcatttttgtgatttaataacacacagtgaaaatccaggaagaatgaattaagcttcttctgggagttgtttattcctgctcgtgcttaagattgatgatttcgtgaaataaagaacatcatttcatttaagagatcatttcattaagatctctaatctgttttgagtctttacaaaatagccagttataaaatggggcttgatttgtttagactgaaggaagacgttttcccaaaatatactacagaagtgctacaatatttgcgatattaaaatgcctgcagattgaaaatgggggccactcatttcagaactgcaggaatggtgtagttacagatcgacataaactcctgccccccaacaatgccatgagctgcttagcccaggagacctgggagctatggcaggacggttaggccagccgatgagggactgcagagaggctactggaaggttaaggacccagagagaaatcgagaggtgccctacagcagccaggcctatcaggatccgtcacacacggcagcggcgtggacaccggcctgatgcagagcgtgacccctcctgctgggacctgtgttgtaagctcctatttgcttatcttgtttatttcaagcagaaatcaataaattccataaccctctgtattgactgcaatgtaagctgctgaggagactggttctgttggtcagtcaggtgtttgctcagccctgtctgatcacctgtgctgctctgtccctaactagtgacccatggaagcttccaagcagttttctcttcatcactactaacaaacaaaacactaagaaggcttagtatcgctctttttctgcggggctactctgaagtactgacttgctttccagtctgattcacgttagcagtgtgtacactactgtatcatcatcagcttcatcaccctgtaaaccaggctcctctgaagagactttggtgagatgaacgtgaggtaaaaatttcgttcggcaaaaagtgcaatatgtgtggtactttattttttatgttctttttttaaatctggggtattagtctgtgctttgggagaaatgcactagctctgcaattcccagctgggcaagtgtgtctctagtatctccacgcaactgatacactggtccctgtaaggcaaacagcatgttagcccgacaggaagagggggcccactttcacattcccggtgacactgaccgtccccagctgccccctcgccacctctgcctgcactgccttctgtcaccgtgggaaaaggaggctgatggttctctacaccatccaccttgagaatccctgcgtgggagagcatcagggcccaccaggggagtggggatggggctcaggggctgttcatgcccatctgagcaaaccccttctctcttccatccacttttgcctcctaggaaagaaaaagtcagtggccctttcttcctcagatatcaagaactcccaagtgtttaaaccgtatgctggagtcagtggttgggacagacaggagcccaagactgaagccagcccttgcctcttgtgtcccttcccaactctggtgctggagtaatggggtgctctgcattttgatggggagcaaggggggaccccccctgtaggagtatcggcctctcccctgccccctaccctctctcgtggaccaaagtctccagcagaagagactcatcataagactgacgactcccccacctccacccacacaccgagtgtcatcagtcctaaaggcagggaaacgctcacagaattctgcccacgggttagatgtggggagaaggatattctcagctccagagtgattaggtgatcagccagaaactaaggcaaggtgacaagcagcagcctggagtcacagttggtcccaggcgtgtgggcactaagcagcctctggagacatgcgggcagttgaggatgcaaggacacagtgagtgagtggcgctcctttttggggtcctccagcctctagtcaagccccaggttcgtaaatatgtttgtattacattttaaaacctgtatcaacagtcacatttaagctccctattggtttaaagaaaattcatactccaggtaactttttcccattcgacctcctatagagacaatatgcagtgtgtcatttcacagtctcagtccctgtgaacagtggctgacaccggtgccagggctgacctgctacactcaaactcctaaactgggctgcctctaactgcctcctgggaagccacccgagccactcggtctctttgtgcctaaacatgaaaggtgaaaattggagaacagggaagctcgtaagttggagtcattgtacaggcagggatctttgatcattttgttgcttctggaatttatttaattttttttttttttgagacagagtctcgctctgtcacccag

SEQ ID NO: 56952 - DNA, 11036 bp, Homo sapiens
aaaaaaaagacaagagcagtatcatctgcctctgtttctaaactggacaaagagattttcttaaagtttctatcatctcccttctgacaggttctacagtgtggtctgaagcacctgtaatgtcagagcccttgtctggcccttggtggcaggtgaacgaaagcagtggagcctctcaccttccagtagcctctcacattcttattttaccatttttgtcctaattaaggtagcctagctgattctagaagacagccatcctacgtgcacccccaccttgtgtccacatcttctccaggcaggtttcaacctatcagcagactcaggcacacactggggcacagatagagaaccaggcggcagcagtgctcgcagacccacccagggagagctgtgatgggttctgcccagatactctgctcgcccacccacaagggagcaatagcttatatttgtacattagttttaccaagcactttctcttctaaccctcacaacaattctatgaaattagctggggagatactgtccttatttttcacagctgaagaaaccaaagctttgggaagtttgtgacttctctgagatcacagctggtgatagaaggagctgggacacgcgcttgggttgactggcttctggttttggttctctggcttctagtgctggaagaagccctctctttcccttctctttcctcagtagcatctgactcttttcataagcaaacagctgtataaacaaagcccccattttggtcaagcacagggtgaatgtgatattgttcccacaaccttattctccactcaacagccgcctggctttggggaagaggccgccttcaggtgacagtgcagctgtccaggtggccgtgcactgaaccaggctgagggagacaaaaaccccgcagacccgcctgcctttcagcgtccagttaactgcagaagtttaggctcacctcaaagatgtctagtttttccaagttacaatacagcagtttcctacagaacacccccttcctcaattgccaaggggccgcatcgcacggcatcaggccaccactgcaggccagcagattccaccccaggaacggtcatgaactcagcctttgtctcaacgaggggcgtaacatttccttacagtcaagccccatcaactagaagtgcttattacttttaggattaaaaaagtaataacagactttgacttaatactctgtcttttcagaggcaaagtgggtgggtagaggggagctttaaaaatagaagtacaaaacaacatcctggaaacatatgaccccagatggaataatgtcacattccccagtgcagataatgggctgctgctggctctgtggtgtctgtctgcagaagatttgctcagtcaaggaaattcaagtggtgagacctttccaccatgggtggtaagagaaacctgccttcaccaaaatctctgaaggggaaagaagtggagagaaaggtttgcttcacttcggggactgcagtttgagaaataaaagggatacagagatatctgcactttgtagaaagggcaagattatttgcttatatctgaagggaggtgggtggttttgctggatgtttggtctgaaagagttacttttgataaagttaatctaactgtagttatattttctgtgtgcttttttttaattactaagaaaaaaattggtgagttcagtagctttggtattatgagtgcaaatcataatagctccaatgtgaaaaaaaaaatcaaaagtataacttgtcacttaatgttagaaaattgcctaaaatgcagtgtaataaataatctctgtaccaaatagtaatttaaatggggtaattttctgcaaggaaaatgtactgtttttatgtttccaaccctcttgaattaaaataaaaacaacttcttttctaagagcccgggtgatgtgaatgtcaggttaatgcgatagggtttttgcctcatcgggccttgggtggaatttttagagtatggaaggtggctgtgttctctgagttctggtgctcatttcaggctgcagaaaaggacagtggataatatgttctcattgacgtcagcagggtaaataataccttgctctgaatcgcccgagtacacgttagccgctgcagatcgctgacggaagcactgctaaccgcagcctgcacaaggacagggccctgctgggcactgcttaattactgctccttgattctcagagtcccagggcaaagcgcatcagcccaggtagcctgggcaagggcctcatgccgcggtaggaggaggggaggcagatgcaggggtccccgaggacaggcagctacagggcaggggctggaaatgggaggggaggtgctgcgagctgccaggcaaaagacactgctacttagtcacgatgtcacatcttctctggggtctgccaaaggcctcgacactgcacgtgcgctcacacagtgcattccctcacatgggcggggcacccttttgaggcccagctccacgccctcagggtgctggaggcaccatgtgccaagctgctctcctgcatcctggacctgtttcagtgccaggccctgagtgaaaggccactgttatatccagcttgctggcagcaggatctcgactgaaatttggtttcactcaaaccattccaattaagcccatgctatagaacattgacagttccctccctgcggggtgagccgctggtctctgggtagcggtgggaaggtgcagtcggcagggcccacactggcagaggctggaaggagcggagccctctccaccaacgtccactgctgcctgactctgctgacaatagctcagttctgccttaaactggtggttaccccttggctacccaaaatttcagtattgctgagtttcatttcttttttaaggaaagcactaaatttcagtaacaatgttttccctttcccaccagatttctccatcattcttattctgtgttgccaaaaacaactccaatgccccaggacgcaggcaaaataacagaccagtggccagctaggccccaaccccgcactccccaggacactcttcagttctgcagcctttgtgagtcgaaggctccagcagggtggggaaggagagcagcagggaggcctgcaccccaaacccagggcctctgcccagtggatggaaccagacagcagtgcctgcacttcccaagttctccatcaagacgcaggacaggtgggaacagggcccaaggttctgttcctggcgagcagctgctttctgccccactagatcttaaatcgaggactcagagatccccttgacatgcaagctatggactattcccaaagagcatgtacacagacccagaacttcggacacagaatttcaggacaggagttggttcctgggcccccgaggcccccctccccaccagggaccaaagttaggaacccctgactcagcctctgctctctcaaaagttcttggccaggtgctgtggctgacacctgtaatcccaacaccttgggaggcagaggcaggtggatcatctgaggtcaggagttcaagaccagcctggccaacatggtgaaaccccatctccactaaaaatacaaaaattagccaggtgtggtggcgggcgcctgtaatcctagctactctggagactgaggcaggagaatcacttgaacctggtaggcagaggttgcagtgagctgagatcgcaccactgcactccagcctgagcgacacagcaagacttcatctcaaaaaacaaataaacaaacaaacaaagctcagagggaccctccctgctgatgggttctcatccctccctgggtggatccaggtgacagggagcctcctgcttgccagcagcccgtgggcaccatgggaggaagttctgggctttgtgcactaaatcctgggtgctatgtggctacaaaggaaatgtcacctgcacagaacatggctgctctgcccttctcatttcagccccaccagtgacttcaaaagctgagcagcccttgagcgatggattatcgcacaggaatcatcctggacaacgtcccttaggaggcagatgtgggtcctgactgaggcgaaggggctgggccctccctcagacacaggggccactggcacacctgcctccccccaggtatgaagctgtgcccacaaatcactcaggccaaacccaaggtcaggcagggcagagagcttgccaggcgcctcggccactgttctttccagcaagccttcctgctgctgcctccctttgtccgtgtttctggggggatttcctagggcagactgactcagagctgctctgaaattggcaaagagagattccaagcccagggaaagcatgagctgggctgagcccccgagccagcacagtgtctgggagggtggagacaggagggagccacagcatgggaagcggacttcccctggagccgagcccccaaaagctggataagcagaaaagctcagaaaatgtgggcccagaggaaaatgaggcattagggattgagcttctcaaagggagaactgagtcactctctcctcaggtcggctgggacagttctggctccagctcctcactccccaaaagtgaaatgccccgagtggggctgactgacaaatcagaccctgaggagactgttcattgtcaccccagggccacccacatagttgggggtgggacacaatggaatggaggaaaagcccaccaagccctttcctccaagcacgccacacatagctcccggagcgcacagccttgcctgtctcttctgtctgggatccgccagaactgccttccagtcgctacagagcccaaatgcttagcagtgcccctgtgccagcaaagtgagggctgaagggcaggcaggcagtggaagggaaccagggatgagagggccaggcaaggagggctaggcacagagcaagcctgggagagcaaggcccggctcccacccagcccgggagccaccacctggccaccctccaggcagggacattctgggaggcagcaaagaacctctgacagaggcctcggcccctggcgccctctcagccctgccactaacccaggcaaatcattgtaaaggctggtgtctccagtggtaacttggagcacaggctggctggtttcaccccagggtttactgcgaggggcaaatgcagcctggcctggcactcctggaagacccccactcccctggagggctgtcacagagtcccactctgcctatcttactttaactcttgcctgccccaacactaggtacagaaaatggctgcttcttgcctgtgagctctgtcttcactgacttaagggtggttgtgctgttctgagcatctgcttcaggctaagaactgggaactctgccccaggatttctgaattttcggaaatgagttctaggcatcagacatgggtaccacaaacataagaacatccctgagaatctatgtcacaggtaggaggacttttttatctccaactgttaggtcaagctccagtgtggaaaagacttggaaggcctgggggagtctttttgtgcggacagctcggcccctaggccccacagtggagagggcactgacaggaggtcagcctaaggacctgctcccgtgtgccctgtcaccagcctacgtctgacttccccatggacttcaaggtccaattgccttagctggaagccactggggatgggactgaacatccctgggctttggtctttgtcatcagtcctcagtttgactggactcacatctcctgtagtctttctgggttcaagagaacaaaatccgctggccaagaggttggcccttaaggagctcctccccttcacacactcccagcagagctcctcagagctgcccttgagaccccccagggcagcgcgaaggccctgccagcctaactctgtgggaggaacaggacatgcagctagatgctagaggctggctctaggacaagtgaggttcctgagctgcagaatggctccagcctcaggcccagaacagcctggttcaccagcaggtgctgattaaatccagagaagagacccgcatcgaaaggcacaagtcagagaccctcagggcccaagggactctctgagtttggggaaaataaggcaggcaggaaaaaaccagaaacaagagtagaaggggcatggaaggcagaagatggtcttagctgggacgtggcgcaggggctggtctcgggtcagtgtgtgtacaggacagactgtgtgcagagaaaaggaagaggaggagggtgggcgcagtcaggcagtgtctgtagccattatttatggatgcttcacttgattttagtctccaaacctgggctcggcatggagactgaatgtccctcacagctgctccttcctgcaataacaagactgacatcactgttgtcagggaaatggtgttttgattaaaatcatgtgacagctacttggtgattcaataaacaaatcccctgttaacccctgcctgacaaggcccgtcagcagcttcagcgggggcaccctgtgtcccgtccaggagtgagccgctgccggacccgcggcagcaaggtgtgggaggtgaccctcgctgctccctggcagatcctgcctgggtggacacatgtgacatccaacacagaggcacctccacagacttcaagggtgccaaggaggcgctcttcaccaagggagactggctctcgccctttcccttttctcttcaagtggcgggcccagccccagggatgtccaatggctccctgagggccctgaggctggctgagaactgacagttcccagggctctcaacagcagcgcgctcacgctcaccccattcggacagattggcaagtccactacgcaccctagacagtgaggggttaagaacaatttctggttgcaattggatgacttcctggatcactcacttggctgctggcccctgacacacagggctctgcctggcaacagccaattccctttccatctcaccctcgggtcattttccttaagtgaaacaaatgcatggaaggctccctgagtcatggggcgggggatttttctgagttaaatgaactgaagcctcagaggcctagcaccactgggcctcctttcctggaaaaaagattcccaaatagacatgccaggggttggaggagattcatgagggaccaaaaaacaatgatagcacctaccacctagggtgggtgaggatgacatgagatttgaagtgcctgacaaggtgctgcagtgaccaaggctcgagtaacggcaacttattctcagtaactcctcggctagcagaggcagcccgggccctgtcagagctgagcaggtcagccatgggagggccgcctcaatgatccacactcagatcgggtcataccacgcattcatggcatgagcagctggctctgaatttgtaggaagacgtaacccctttcttcccaaagaagtctgtggtttaggcctaaaaaatgtgtaactgtcactcccactccttcagccaagctctcctccctgaggcccagttctgtgaagacgacatggactccaagggctggccacccctggaatccaactggacagtggtcacccagcccttcctctcactgtgcggccactgcaggaacggctggagctgcccacggacaagtgtgcagcccctcaggaaggcaagaatgttctaagatgagtgactgcgattctggacctcaacaaaaggcaaaaaacgttttcatggtttcggttcacataaaatgaaaagccatgtgacttaaaaggcagcctttttgatgttacttcattgaattttcactaagcgaacctactagaatgggtgtgagaatgtcagatttttccccatgaactaaacgcagtctggcatccgcacgaggcagccaagccctgctgctctccttttctgaatgtatctgtaagccacaaatcgccctcctaatgaatggccctggggcagtggctggcacccactgactgctgaactggggcttttcacaccatttccacacagagtggcatccaatggggcttgtagaacatctgagctgttacagagaaacttgcaactatttttatcttgaatggaaataactgagaggaattatggcaagtcacttctatattatgtgaggaaagtgggaacagcccctttttacaagcaattcttcaccaaaccccactggtgtcctctgtatgggcctcgctgttggactgggaggtgataggagatgggcctcaagctacaagagtgacagctctggccggcgacccacctctcagaaagcattcccagaatgaagtaagccagcaacaggctttaaccatctactcccggcccttaaaattggactcttcccctggggacaaagtgagaggtgctgcttctccgcctaccctgtggcagctccctgcacaccatgccaccctggctgcccgcagccctgagggcaggacttgaccccaggcttccgggcacttaccttccccatgtcctctccaggcactgtgggtcttgggaagtggttcttgtcagcccgagggacactgggttctccactgtccttcacaggaaattctagcttcctcagcctttgtgccaccactagagacacagacagtggcgctgtaactgtccctgaccagggcacatccctcccaagcccacctgtgcttcccagccaggatgccctcagttgtgccagcagagttgggtgtccagcagcagcctacaagtatatggggcactgggcagagaaagctggggcagcccagggtcgtgctgaggtgcctttccctcggggccctggaaagcgccaccccatcgggccttttggtgtccacctggctgttccccacatcctggtcactgatggtctccagagccccaaccacaggaaagacctggctcctttcagaactcatatcagtttaagagaacaactctggagacagaaatggcttggctttccgacgcaatgagtaattaaactctattcgtcctccggaagatttccatcccaactgaacgttatgtaatttcctggaaacagcaggctcgtggaggcaaacgggggacagtgagactattctaggtacagaggactggagggagacatgcgagggaagaggaaagaggagagtaaggaactggatggaaacaggaatactggagaatcaaagggaaacagttacatcacatcagactgcagtcacctcagctgctaaaccaggagaacactgggcaacagggcctctccctctacagtttcatatccaagcagtggagaaaaataagaagctttacgataagagtgtcaccatttttaaaagtcagaggaatttaagtaaaaggcaagaggacagaacaagcacctgacctgtttggccaccctgccctgccatcgccacagggacagagccaatgtgacgtctaagggcaagccccagcctttcagtttagtgacaacacaacagttaacaaaggaacaaaagtgcaccaggttaaccgccgggtcaggaaggacaggcttgcttccctggaagtctacgcaagcaacctgaatgcctggacaagccagctcaaaggtcaggctgccgtctctgttgagtcaggacaagttgtctggcaaagacccctggggctctgcatcacagtggctgagctgtggtatttctgtgagctgagggcagcccgttatttcaacaagacctcgttagaaaccacatattcacctgccttccttcttatgaaacaagatgcatcctcaggttcacatcttcttggtagcacagagagagaaacaagacctggtctcttaaacctgtgaggggtaaaccccacacaaattacagagagaaacaccaaggtgaattccactgttgctgagacatttttattggcataggttatatgtttgtgtgtgtgtgtgtgtgtgtgtgtgtgtgtgtgtgtgtgtgtctgcttcatttttctaatcaaacaaacaactgatgtaagctgccaaggatgaaaaacaacattacatgtctgaagcaatcagacaaatccacacagaactgtagtctaagccaggggaccagaaaagggccacataaagcttgtttcctgaaagcaggaaaatctttctgtcagtgggagaataagacacagtctggttcttttgattatttgttccatgcacacattggaggatattttagaaattcatccattgaacacatttttattgagcacctattatgtgcaccagacactgttccaggcactggcgatacagtagaagataaaacagacaaaaataccagccttacagagctcctaaagcctatattccagtgaaatcaagataggagaacttttcccttaagtttaaggtagttaaaaaaaaaaataggagaactaattcatggagaacatggccaagttatgagccaaagcacaattcctctgaagagtaccaaaacaaattctctctctattgcttaagtcagaaggaaacaatgaaacccctgaggggtcaccacaaaagacagaggccccgctgaacccccgacccatgcttgagaaagccagggcccactctccctctctcaaacagttttagggtagagaagtcaatgcttagggctcctcactgggagacacaagggcattttaaaagtctgtccccaaaacaatggcatttccaaccagagtaaagcaatggttccagtgcaaatctgcttcatgaagacaaatgtctctcaaatatgaaattcaatgaagaagaacataacttgcaggtaacaaaaaataaagactcatgaaactaaaattaaaatgtttacagaataatagcataagatattaaaatgagaatatagaaaaagatttgtgcttaggaaaatacttaattcttggcccaaagtcataaaatagaaacttactataaggtaatttggcagtttaaaatgcagacagataacctctgatttacaatttctatttttcgaatgtagg

SEQ ID NO: 56953 - DNA, 768 bp, Homo sapiens
attacaggcatgagccaccatgctcagcaaattactattttttttaacacgctttagatttttatcataatgccattaccataggaagggatctctactgccagaaaaaccagagactggggaacacacatgcatagccttgaccaagaccttaactgcactgaactctacttggccagatgcctactatgttcttggttcctctgactgttttcagaagaatgcaaaccattccagagttctgcctgttttcttttgtctatttctgtctctttctctctccccatctcctctcaaggcctggctgacctgcaaggtttctttgaatgtctatctatgctcaataactgataccttctcctttctcctataataaataaataaatttcccttctacattcctccctctgatcaaaactgtctactcaaccacaggaatataggtgagtgatactttcttccttatacttctctggaattttcacaatgttcttttagtagttacctaactaggggaaaagtttcaaaaactctaactgatccagtgatcattatataacacttatctgaaatgcaaaagcaaaaaagctcctgtgattaagtacaaaacaatttcagagctgttatttcattggttcatggaactcttgcagtccccacttcagcatgctgctgcagtgaaataaacaagggtttctcctgctcccaaactgaaagagaaaatccgaaaagaggaaggagtaatcaagttgcatagagaagacaatc

SEQ ID NO: 56954 - DNA, 2600 bp, Homo sapiens
agtcaggacctcccactaggccagtgaaatttcccagctgctcagcaagagctaatagtacctcatcttcatcataaattgtatctggaagtgacaacaacaggactcatcaacatggatagctctcccacagctggacactgacacaaaactaggaacagattcactatgcgaccaggaaggtgacccagtcaaaatcctaacagcattttctttcttctcaaccgtcttcctgtatctgctttgcacaacgaattagaaattcatactcccgtatcaattactttcaatagctaaatggttgatgtttgaatatatctagccacaactaacaatatactctgttctgtttcttttgcacaaaaaacacctggctcattttaatgtgggtaataaactctaaaaaagtcagtgttgaaagctactggaaaatggaatgtccctacctttctttaaacaaagattcacatacctgtaagaaatggcaacaattcacttcgggtcctttctactccaagtgctagggcaattgttgataacttcttaatactgttgagtcggagcttcagaaaagaaagtagaaagaagaacaatgtaaagaaacggctgaatttagatcaaaagacaaaaggtgctaacaggtgaaattatgacacaggggtaagaatgaagataacctttcatttagattttactgttaaggaagctcataaggacttccaaaaagaagtgtaactcggcctcactagccggcggaggatttcccaggagaaacactcagaagggaccggaagagaaatgaaggaaagacaatacaacacctaggaagtaagataattttaaaaagagagcactttggcagtggtgaagcaggtgaaacggttgaatacaacacctgtggtttcaaagaaaagttcccacagagcggatacactactcgtccagattaatcggccatcccacccccgctttctacccaacaagccgagccagttccaagccgagatgaagggatccaggggcacttcaaagggcttctgggcatcctgcgcccctcagccgctccagccccgtctcggcctggcaccgcgcttctcctgctccctcgcccaagagacgcggccacctcacggcccggatggggcgcccaggcgggaagcgggttccccgacaaccgcccgggaagggcaaggctccgggcggacgcctcagggggtccgaagcaaggttactagagaggtacccgggagggtcggggcgtgtcaccacagcccctcgcggagcattccccgcctccccttcaagtttctgctacgagtccgactcattcagtacctcggccacccccaccgcgacgcaggccttcccccttctctaccacgcgaccagccggtctcgcctcgggtccccggcctcagtccagtacctgcacgtcttcattgcggagctcgtcgattaaaaccgcgatcgggtatagcgaatcatctccatctccacccgctgctcctgggccggtcccgagctctgatgcgcccgccatgttctttctcctcctgctgctggtcaccgcctcccgccccgcgcccaggccccgccccgcgcccaggcagtagggacgaaggccgccacgctggtttagccgaagttggggagccgcgtttctgtcccgatgattaaggctcccttctgacccccactgcaggagttgtaggtctgaactcaagaagacgggtgggctaagaaagcgaatggaacccctgcgtcctttccccagccgaaagaaacagggacagggattcatccagctcgttgtagtctgaaggagccaggaacctacctgaatgatctgcgctgtgccctcttaagactcaggcggaccaaagagagtgcccgaggccaggaggaaaaaggctttagcacctcccctgacttcttcctggccctgagccactggatctccagccctaatttctccgctcagactcaaacttccacagaacccctccacctcttcccgcggctctttctccagaatggtatctggctcctgctccgtaagacaaataacgcgggcggtgagagaaaatgaacagtgctgtccaaactccccagtcaatattttttccacgcaagctgttaaaaacatgctgctctcttgtttttgtgtttcttttcagtttggtactggaatggtgccttctgttgtattttcttcctcccattttttagctctttagcatgctagaagtacaacaatgaagcaaaactaggacaagctttaatccttccaaattgggtggggtggctactttcttgagcaagaaaacccaaactggcctccctagacctccaagagtcctcagaggcagcaaggggaagaggtggaggtctgggagctcgttcttacaaacctgaatggaaagttttcacttacccctgtcagggtagcacagaataattagaatgttttgtttgttttagactggaatttaagcagcttggagtgataactacatatggtgatcacaagctccgaaatggtaattctatgtgcctgattaataaaactataaatgcagtgtaggagacaaactttttta

SEQ ID NO: 56955 - DNA, 1010 bp, Homo sapiens
tcctgtggcatccatagatgtgtatgataagtaactcctgcccagctattccctgtgtatctctgctatatccacagggtagagtccagatttctttattgtctctcatttttgtaggcctcttatcaccatgtcgttttttaaaagaaaaaaaataaagagacagggtctcaccatgttgcccaggttggtcttgaactcctgggctcaggcagtcctctccactcagcctctcaaagtgctgggattacaggcatgagccaccacgcccggccacttatcatcatgtcttgtactagacctggccaacataaatagtagatttcagcagctaggcacactgcccccaggatccaactagacagaggtttgatttagcaacagcagggccaacttaaaatattcctgttcccctgaaagcttttgcccttggtctcccctgaagatggtattcttccccacttccttttctgatctactcagcagaactggtaggagaaaagtcacaggagtaagaagggaccagtgccaagatcccctggacacgaaagtcacatttcggcagaaatccagctgggactgtaatcagaaactggaatttccactaacttctaggatttcaggaaatcaactccctctctgatttagctatgtggttaaaattagctggaggcccccagtgttctagaaaagcccctacaaacacttcatgtaccagctgcatactgttctactaggacactctccaggctgtggttactggaagtggactaagaaggtgataaaaaactgaaacaagtgcctgtagtcccagctactcaggaggctgaggcgggaggatcacttaagcccgggagtttgaggccagcctgggcaacatagtgagaccccatctctaaataaataaataacttatttttcataaagtgaaacaactttgactacatcctgttctcatctctgcctactgactccgtctaggttcccccaacatatcatccaaaaaagac

SEQ ID NO: 56956 - DNA, 2070 bp, Homo sapiens
ttaacaatcatgaagaatagaatccccttctatatctggcagagctgaccttgttcgttcctcaaggcccaaatctggtctaggtggttaccctacactttcaaaatgcaaattctacttccttctgtaaatgtgtgcttttcaacccatggcctaggcatggggagtaaaggtattctaaggcctttcactttactgggctcaggccctgctaaatgcttctactttcccttgagttactgtgccatggataatgaattagcatctgaaggacagaaccttggactttgaaaaatcttttgagttgcttttggcactatcaataaattaccagaggtaaagttaggactttgtatgtgatgtggtttgctcatatttggaaccctgaaaatgggcagatggctggtaattgccactaagagtagctgcttcctcctcccaactaaacacattttatgttacctatgaacaccatcatagtcatgccaaacagaactgaaattagctgagaattgacttaagaatcctcgaccagtagggagtcactgctgtgatggacaattcaccccttggttagttacggacataattttctccaggaaatttttgcaattatagcaatacaagagtgcaatgcagaaatacagattctaaagaaatgcaatgaagatatttcaacttacactggaattacatcaaaaactgacatgaactaaattgctggagggaaaggagggctgagattttagtgagaataggatgccctctgctggacattagggaagacttatgacagcatggcagacaaggttgccttaagctgtcagagacagtgatacttgggagtaaaacaaaaacaaaacaagaaaactttggcaataaatttacactttggtgctgttttctagaatattcccagtaatcacagactatgagaacacaaatataaaaaaaaaatgcaaggaaaggggtgagttttaaagaatccataacattctttcatacatgtagcactgaaaaaacagccttcttttctacatacctccacaaatatttcactggcaaggaaaaaatgggagcacattataggaaataccagggaggcttagagacacagtaacagggagacaagaaagaggtgagaccaactcctgaatggtacatggtatcttgttgttggttgagtgaacacatttcacgtcatttctccccaaatgagattaacctttgctctcgtgtctgagggcagtggcagcagctcaagagaagctctctctgcaaagaccagaagcagactaacaaaggtaaaatagggtctttactgtgcttctgtcaaataaacagagctacttatattttaaagccaaacaaagcaggcttccccagtgcgttgagtagaagggcttaatattcacaccttcttttttttttacacccattgttctactcaaggcagccataggtccttacctgagcaggccaagtagtgtcaagcaataaggttgaatctgaaggccaggcagtattcctgaagggcaagtcggcctgctcaagcctcttctaccacctgatcaatcattcaatcaaatgacactgaataggtctgcaattgccaaaattatagtcattcattctttttttccagatgagttgtcattcagtgtactgagatgagaggatcaatgggaagagaactacagttaattattaacatccattagcgtacttcagtatcatattagttaattgtttcccagaaagcagggcccagagggaatgggagagagggcaggtaaggtttgatgggctggagtagacagagaaataggtctgtggtggggaagaggcctagatgaaggcctgggtaaccaggagtcacaattagaaaaggacaccaaatatgttgcctgtttaattacctttgattttttggtgtgattgttagtctctcagtctttatccagagcagtggtgttcaactctagctacctgttagctagatcacctggagagtttaaaaaaaaacataatggatgcctgggcccaccctcgaccacaaactcagaattc

SEQ ID NO: 56957 - DNA, 823 bp, Homo sapiens
tcacctttttcctgagatagctccaggacagggtcctagtcctgtgaagtgctttaaagaagcttagtcttgctggaggtgaaaaggacatgtgggttggcaactaggctgtgttcattttcagcatgaggatttcaataagaaggtctgctaggagctgccaaacagctttggtggagaagcccatatggcctaagagaggcttgctagttctcagatgccaggccagagtgtggagaacagcttatcacagccatccagtaccaggattttcaattcttcctgtaagttggttctgctcttctccggtctagtaaataattgaacagaggaaaaacaatgagatgtggagcaatatatctatctgtgctttagggcctttctctgcctagctgcaaaaagtttacatgcagaacagagacacacacagggagcaaatgtgactttgattagactttgaaatagactttgactagcccagagcacccagattccagtattcatgtcagaagacctttattacaaatgttacaggcgatgacttgcagggagtcaggtcactggaatcaatagttaacaagatggttgtcctttggggccacaggtgtgttgctaacctccacttttcttcctgatttgctttgctttccggggtttgaggatggtgtagtttacgtacactgtatactgatctgacaggaaggggacatagaatgcccgcagcagctttgaagatctgaaaaacaagggataaaaaaaagaattttatcacttgggagaatttactaatggtactaaatgtgattaaaataaataaactaat

SEQ ID NO: 56958 - DNA, 895 bp, Homo sapiens
gattccagagtctgtactcttaaccattatggtttatcatgcatcccaggaatagactaacaggatttatcatttcctagaaaaagttgtagtgatagttttaaattctgtatggagtattacttcctgactctgatttctgagtctgaaaatcaaaagttggcctagttactgccatcctgaatgaggtagctgaaggtgctccactggcagtccttttccaaattctaaacttgtaaatgtcatgtcaacgtggcatttgtactggcagcctaaccttgggtttggcagactcctacaatgcctgcacacaatgacactgtgcttggcatgcacacctcttagagattcttcccaactaggacgctggcagtgccctgtgctctgtaagattcacttcacttcaacagtgaactctatcaagggctttgatagagaaaggaggtttggagaagagacatgagacaaagcagggctcctataaataaaatgaacaggaagaggaagcacctaccccagtcaaggagaagttaatggccaggcacggtggctcaggcctgtaatcccaatattttgagaggctgaggtgggaggattgcttgagcccaggagtttgagcccagcctgggcaacaaattgagacctgtgtttacaaaaaatgtttaaaaattagcctggcagggtggcacacacccgcagtcccagctattctgaagtctgagctggtagtatggcatgagaccataagcccaggaggttgaggctgcagtgagctgtgatcatgccactacactccagcctgggtgacagagtgagacattgtcccaaaaaaaaaaaagttactcttttcatctacactgcacaaataaggtgaagggtaaagggtagaacagaa

SEQ ID NO: 56959 - DNA, 662 bp, Homo sapiens
cttggtctgcactggggatatattatcatcaaaaacactaactagcagccgggcgcggtggctcacttgaggtcaggagctcaagaccagcctggccaacatggtgaaaccctgtctctactaaaaatacaaaaattagctgggcatggtggcgggtgcctttaatctcagctactcaggtggctgaggcaggagaattgaacttggagatggagcttgtagtaaaccaagattgcgccactgcactccagcctgggtgatgaggcaagactctgtctcaaaaacaaagcaaaacaaaataaaacacagactaggcaggtgttgtggtatgttcctgtaatcctgggtacatgaaagaattgcttgggcccaggagttcaagggcaacctgggcaaacacagcaaaaccgcatttctgaaaaataaaaaaatttaaaaaataagtggctggactgaaatagaagaaggactactatgcattattgttgagttcaaaaggcaagctaaaacaaaggtaaaaaataaaagagattgggagaaaatgcaatatatgtaccagaagatttgcatctagactatataaactgttcctgcgatcagtaagacaattccacaggaaaaaatgacaaaagatatgattacagaagagaaatgcaaatggt

SEQ ID NO: 56960 - DNA, 4523 bp, Homo sapiens
gagccgagatcgcgccactgcactccagcctgggtgacagagtgagagtccagctcaaaaaaaaaaaaaaaaaaggaaagagcagttgtgcactggaatgacatgtgcctgcacacatttatacacatggaaacaaagatcagactgattcacagacaacactaatgcctatcaaaactcatacaataatgtctgtaataaagtgaaatgccaaagtactgccctagggcagcacaggcagcgtgattcagggagacataaatatgtgcctctatcatggaaactgaaatacttcccctcccagtgagaaagtcactcaagtgattcaaggatgaaacagatctgggcaaagcaattgcctgcacagcataattagctcacggctcagaatgttttctaattcaattactggccctatctatcagggctgaggagcattcggcggtggagatttaaatctgctcttgctgacgtcaatgaatgactggctgccagtccctgatgtcaccagttcagcaggcacaaatggaaatgctgggtcaattttttattttaaaaagaaaacatcctagtatccaggttttctttctcttttaaaagacaggatcttgctctgttgcccaggctggagtgcagtggcatgatcacaagtcactgcagcctcgacctcctgggttcaagtgatcctccctgatctgtctccagagtaatgggactacaggtatgtgccaccacacccagctaatttattatcattattattatttatagagacagagtctcactatgttgcccaggatggtcttaaagcttcaagcaatcctgtggcctcagcctcccaaatagtgggactgcaggcatgagccaccatgcctggcccacatcttgtcctgtcttccttctcctctcttctcttctcctctcctctctttctgtttttctcttctctctctacctatctatctatccatccatccatccacccatccatccaagcattaatatcccctgtaagcctgtaatctaagcccactgccagttatctttccagccgcagctttttcaagctagtttctttctctcttgcattgtagctcacctttcagtgagagattttctacaacctttagtgcagaacttggcttttgcagctatcttcagttctgaagagaatctcagaattccttcaagacttagtgatagtcaacctatagttccatatcaagcaatttaagcacatctcaaaaagctggtatggagcaaaaatgtgactgttatttaatagtttttaacaggaaatgcggtgagagacattattctaatggtaactaatgcaaaggtgacttacaaccctgttatccaaaagaggagttccatgctgtatgttatactccaccagtcccttgaggatggaattttatctaactgctctatctctagtttttaggaaagtgccacagaaagtcctcaataaatagtctgtgaatgaatgagcgcctatgctctgactcttaaaccagagcatctggtttacctcccacccttcttacaatattcatcttccacaaggaaaaggaaatatcaaaaataatctaaagttttttttctgttctcttcctaagcaattcaatcctaaagccattacgtggggcagagcaaagcagaagtctagagtggggagctggggggctgtggtggcccatgggatgtcagagtgcaagggggcatggaaggcgtgttgctaaagaaaatatactgcaaaaggtcccataattgtataatggcaatataccccgcaggtggccgtttacacagaatttgctgaatcagcattatccatgtgaccagtatgatattttactttcagcaggcatgttcaatagacccttgatgttcaataaatattcatgattttgactatatggagcaacctccaaaaatacattatgtgtaatgactaggaagtttactgaggcacaaactggaatcgtggcatcgtgagactggtatacagagtggatcattccactgatttgtggccttggccaacatctggcataacatcataaccttttgatcagtcatctttagcaaatattcagagtgaggaactggggaaaaatgctattaggcaactggccattttctgacctcagtcccatcaaggttgctggagaaatgctcttcaccagtcttttttcccatctcacagctacttagatataaaggtactctatgtcccattcatcagtcctgtggagaggatgccaatgttcgagagagttttcgtccctgctcttcggaccctcatttgggcttcttttatgtgacaaatagaaggattaggggtcacatcagcaaatgattctggtaagctttacagagatgaaataaacaatgagtatgtcttaaaataattcaataatctttattttaccaaataagggcatcagaagcttctgaagaaaaccttataccatcttttttctatttagtataaatccagttttaagaatgtgaaatacacaatcaatacatattttctaagactctataatgtgctaggagttgtagagaatcaacatgtaatgtggttctaactctcaaggaacttggaacaaagacctctgatgatgctgcctgcttaggctaagccagctaaaagcagtggtggtcctaaaacatgttacatgctcttcaaacctgagagcttctatggcatggacttagagaacagatggtctgtaaatggtttctttctagagaactcatttcacaacaatggaaagcagactctctaagcttcagaaaaatgaaaaaaggtttattcttcttaaaatgtcagcagatcttaatgattaagcagctgaataatggcaaaacaccatgtgttttgaagccaaatctggcctggggtagctctgccagacgaagggtctcaagaaagtattctgggagaatatgaggaggaaaagccaaaaactgatagacagtgaaacagaaagtataagagaataaaagttgataaataccaaagtatagaaactctgatctcttcttcctgtttctcagtattcttggcatcgctgaggaagctaagggcaccaccatgattgacatacagggaaaaaacaaaaaactccaattactgcttaggagggagaactaattctacccaaaggagggaagcaccatctgaagcatgtcaaacttggcctgcaaccaaattctgccatcgggtggagtctctccttccatctgggtaataagaagttgcagatggaaaaagcctgctggactactgcatgtactatatgcctcttctgtaagaaatcacctttaaaaagaaaagtttcaaagtttatccaatttggatggagaacggcattgcaagataagtagtggctttaaagcatgtccatacttctttgacactcctcccatcaacaggggaagtctacttcttttccccttgagcatgagctattcaactggcttgctgccaacaaacagaatgaggaggaagtgatactgtgtgacttccaaggctaggtcataaaaaattatgcaggtcttgagatgcttactcttggaagtcagccaccatgctataaggaagcccaagccacataaagaagacacataggtgttctggctgacagccccagctgagatctagccaagagccagcatccagacatatgagtgagaaagccactcagctgcctccagccccagccactatctgatggctaatgcattacagatcctgagtaagaactggccagttgagcccatcaactcccagaaccacgagaagaaacaataatcaactattgttgttttacgccactaagtatggatgactgttacacagcaatagctggaacaaatgcttctggctaatttgccctttacagtaatcactccagtcgtcttatcttccatagagaaatagttctgcttatgctggagctaagggctggctcccttcaaccagattactctctacaacataggacaaaaatgaatataagtgcaatggactctgtaggcctcagagctgctgggttcacctcttagagggtaaaaggagagccatggtcttagtaaagtccccagaacagctaaagttcagtggccactgagaatcctacgtaggcactgaaagaacataataagcgtatatgatatcagcacagtccccaacttgccctttgactagaaaaggcccctctcctgccataccagctaaaggttcaacatctaactccttatttgtatttactcttcatctataattgcctggccaacatggtgaaaccctgtctctacaaaaaacacaaaaatcagttaggtgtggtagtccgtgcctgcagtcccacctacttgggagactgagatgggaggatggcttgagtccaggaggtggaggttgcagtgaacagagattgtgtcactgcactctagcctgggcaacagagcgagaccctgtcttaaaaagaaaaaaatagagaaaaata

SEQ ID NO: 56961 - DNA, 2757 bp, Homo sapiens
agtgattctcctgcttcagcctcccgagtagctgggactacaggcatgcaccaccacgcccagctaatttttgtatttttagtagagatggggtttcactatggccaggatggtctcaatctcttcacctatgatccgctcgccttggcctcccaaagtcctgggattacaggcatgagccaccgtgcccggctgattcctttttttttttttttttaaacaaacaaacaaacatgctggtactgccttcaaactaccctgattgcttctctttcagacagctgaggcccaatctaggccacaataataagaattgtcagcaagttaaatcaaataagtaaaccatgggcaaatccacatagtaaatggactatggaacaaagaaaatatatctatgtatcttctttctcccatcctgctttttggaacaagtctctttgctcgggtcacattaaagcaagatgaccatatatttcaatttatccaggacaggaccccttttactttcaaaagacttctgatgtggatgatacattatagattaccttacataaaagcaaattcaaaccagccaaagaggtaaatagaactttttgatgctgactaatgggcccctcatccaacaggcattttatatctttccacttttactcatgattgcttcttgaattaaataagtggttcttccctccttaccaccagtacttatttaatcctacttttcttcagctcaagcaccccctccttctggaagccttctaagtgtactctaatctccacaggtccctcctttctttaaagttctagcacatgatttggtgcctctatggtcttaacactattttcaagttgttttcatatgtgtaggtcttcctgcaaaagttgtaagttattcaagggaaaagcctgtgtctaatcacttcctttatgtgccttaaagaatctaactctaggccgggtgtggtggctcacacctgtaatcccagcactttgggaggctgaggcaggcggatcatgaggtcaggagattgagaccatcctggctaacatggtaaaaccctgtctctactaaaaaatacaaaaaatcagccaggcatggtggcacgcgcctgtagtcccagctactcgggaggctgaggcaggagaatcacttgaacccaggaggcagaggttgcagtgagccaaggtcatgccactgcactccagcctgggtgacagagcgagactccgtctcaaaaaataaaaaataaaataaaataaaaaagaatctaactctataacaagggcataccagatattcagtaaatactttctgatctccaaacctgcctaaccagctgacttaagaacataccaggaaaactccaggtgtctccccactgctcactcctcttgcaacaccctgtactttcctcttacaacacataacacattttgtaattacctattgatttgtgtggctatttgtttaaggtcagcctcaccattgtatcgtaaggtccaagaggacagcgacctggtatgtactgttatttatccctgtctacctatgatttatcatagtgcctggcaatgttcaataaatatttgctaactggagatgagtgatgggtggacagacagacaatggaagaaagaacaaatgatctgagaaaaaccataaaaaaagcagggttagattttaggaacttaaacatttgagaaattaacctacttacatttctaaacaaatcatgtggctatgtgtcataggcctattaaaacctttttcttttctcagaaagagctagagaatagtgaggtgtgcagccccatcttatctagggtctaagacgtaaatgaccattatatatgaatggaccattatttctcattaatatataaattgctaaagtacaaaaaccattgtttcaagatgacagaggaactttaattgctccagtaaataagtgtgaaggcatttcaagattatgctcacaaaagcatttcatgcatcacctcagctctgaggcacacaggctctgacagtacagtctaccttaattggcccaaagtcagcaacatcatatgtcatggtgctgacagacagaaactgctgtggcaaaattggctgtggcatcctgctgtttttgcagttagaccaatatatactagaaaatgctgaggaagataaatgtaaagaaaatcagcataattctggaaccctagacagcctgctgattaattaaaaggcttaacgtttctataatgttttagaatgtaaacggactttcatatattcaatctcatttaattcttataacaatcccagaaaatacataaaatagttactgttttactgatatagaaattttggaatcagaatggtatgaacagcaagtggccaggattaaattcacaggtctgcaaacctcatgctgtcttcactatactttacacatgaactgtacctcttcagctctttacccaaatgattctttccttctcaacaggtggttgtgaaaatcatgccctgaacacaatttatgggaaatgaaaattctctgaaggcattcccctgttaccaggaaggttgtttgagatctgctgtcccctcagagctggggaactttccaggcccaggtctcatgttgtcacagttttctcaaataaaaaatgaaggcacaatagagccctacccccaaatactataacaaacaacaagccaggtaccaaagaacacgtgtgattctgagaacttcctaccatcactgttgc

SEQ ID NO: 56962 - DNA, 509 bp, Homo sapiens
tccctacacccccacccacttcacccaaattgcctttaccagttgccaattctaatggacagttgttattcttcattttacttgatttatcaacagcttctgacacaggtgaccactccttcctcctgaaaacattttcttgccttagcttcgagggtactctcctctcctgggtttcctactactttactgatgattgccctcagtcacctttgctggttcctcctcttctccctaatctctacacactggagtttccctggcctcatctcgtccctaacttcattctctcctttggtgatctcatccagtctcatgtttttaaaaaatatcatctaaatgccaatagttctaaatgagtctgagtctctagctcagacttcccccttgaactctagactgtatatctagctgcctgttcaataattctatttgcctggcaactgaacagttaagtttgactgatatcaaacttaacaaagcttatctctcactctacccctaaaact

SEQ ID NO: 56963 - DNA, 728 bp, Homo sapiens
agtctatgtcttgcttttagtactgaacacagttacatttgtgactgaacgtgtcacaaatggcaaaggcaaaataagatcattcaattctctcaatttgttgatgtcaaggagctatttaaagccaatgttaaatatggaaaggttacagaaattttgtgggcttacatgcctgaaaaattctgaatttttacagtgcttcttcatctctaagagctttagcaatataaaaagtctgacttgggaaaaggtcacatgtcttatctacagagcctagatcaccacacagatctatcctgaagttaggtgatggtaaataaagaaagctccaatggttgtttcccttcccactgttcacattccacatcaccaatcaattgtggcactcttccactgagcttggattcaatgtcatcatgctctttcatcccaggctccagtaagccactaccaattgatgagaggtgttatgtgaattgcaactatttgtcccccttgtgaaatcagtacataagggtgaacacccaggatggtggtactgcaactcagtgaagcccaactggatgatatctcttagttctcaacaacatatctcaaaataaacaaactactttatacaaaaatgcagatttagaaatctgagaaatcatgggagatcgcttgatttcttctgttttacaataacaaattctgggtttctttcataaatcggacttttaaaatatcag

SEQ ID NO: 56964 - DNA, 965 bp, Homo sapiens
ataggaaatgttcagaataggcaaatctataagaacagaaagtagattaatggttacttagggctggtgagagatgagaaagggaatgggggaacaatagctaaagggtacagggtttttgatctaaaactgactgtggtgacaactgcacacatctgtgaatagactaaaaaccactgaatcataccctttaaataggtaaactgtatggtttgtgaattatatctcaaaaaacctgttaagaaaaaaacctatcatcctaattattttttttctgccaactgcaaatggtagcagagggcaatacagggttctgaggctactgaagccgtaagtacagagatattcaaacagagttaagatgagctctgccagagaattgacctgggcaggttttcaaccaggattacaaagtgccccatactgtgaactgcctgctgtgatcccaaactcttgagcaagttttgttatgatctagcagttcaaagagcagacattccattacttctgccacagaatggaattctgcaattggattcctgttggtaacagaggcaaagtaacacacaaattaacactgcaaacatgtaatcagcaaatacaagtatggtaaacagctaagcaatcaatataagaaggtttaataatatgatctatatcaggtttaatgttatggataaaatatcttaggtggaagcattctgtaatttgcacttaagtttgtgagcaattatttaataagtaaaaaagaatgaggcagatacacttctccctgaaactcacctgaagtgcagagagagccacagcgccacagagacatataagtggatacacagggaaaagaaatctctcctctttgtgaggctggatgaagaaaattataaaccaaatatacattggagccaaggtaagccaatacgggtggcctaaattctgaactgcaagacacagaaaaatacccatct

SEQ ID NO: 56965 - DNA, 1457 bp, Homo sapiens
actcaatcactccttccacttcctgcttttaaggcataaattaactcatacactttagctcaatgcatttatgtcactccatttatcccaagccaactaatcactcacttgaaggccacaaagctgtcattctccttttctttcttttcttaacaaggtcattgcttttgatggctttattcattcccccttatgttcagatagaagcctaggtgcaaggtacatagcctactccaattccatatgttgacagctcccttaatgcagttctaacctgcagcctccagggtttgggaagaggtgatggcgggttggatgggcccagtaaagggtcgggacttgagggagaataaaaggagctgtgaggaacagccgtaaaaggtatactctttgatcctgtctacatctcccacagaggctgtgcccactctaggcctggcccaggagcatcacagatccgcactccaaggcagttttacagcgcagtggagggatctaaggtgggcgaagactgaatgctgacccgcccaggaagaccaataggacctagctgaagagggagctcgggcctcccgcggtgaggccaggccggactgagccccgcgcgccacagctaagaccctcccgggggcagccccgaaccgccccgccggccggccacgcccctgccgcgccgcacacgtactcggtccggtgctccgcgccgcccgcctctcggctgcccagcagctcccgcagcttgtccgcagccggggcgcgtatccccactgctggccccgctgcccttcaggcgctgccgagcccctcgactagccatggcaagcctggggaaaaaagaattcggcaccctatgaagtcggtgagcgcgcagacatagctttggctggcaaacggtgtccgccgagggacaaaagaccttgacatgcgcagaaaatactaaattatagcgttactgggccaattggggcagatccccgagtagcgaagaaatagaacctgaggagtttcttcatcagggctgtcccatccacctgcttctaactctagccattcctacctccctccaaccctcttttccgtcacttttcagcattctccattctcaaaaaaaaaaaaaaccacctctcagctcccctatttaaatgaaaaaacaaatagaaagtgattaaagaaatctacatagtgagatgtgaagtattcagttaaatatcacagcacagctatctactaaaaggtccttaaaatgtcatttttaacaccttgccttctctgtattttggtaagagtgacagaggcagcctgtagctaaaaactgcttcagagagacaaaccggtaatggcagagtgtagactgatgaaattctgtgcggcaaattgaaccagatgtccatcactgtcatcgctactacggcattgtggtaggcattttacatattttatcctttttaaacttaata

SEQ ID NO: 56966 - DNA, 2221 bp, Homo sapiens
ctcccagctacttgggaggctgaggcaggagaatggcgtgaacccagtaggcggagcttgcagtgagccgagattgcaccacaccactgcactccagcctgggcgacagggcgagactctgtctcaaaaaataaaaataaataaaaataaaaaaataacaactgttaagtggtgggctgggatttgaatccaggcagtctggcttctaagtgcacgttcttagccattagactatatggctctcattattttgcactgtcaaaaataaatgatcctcttttacacacccaagagtacattatttgtactttcatttagcatttagggtttatatatctgtctttccaactaaacttggggttcctttggggctttatagtctcttctaaacatatcatagtagcttgcacgtgtgccttatgtttgggtacagtaactatgttatggacatcttaaacattttccttgtgagggcgctcctttcctcacctttggaaaaatttggcaagcagttccctgttcttagctacgccagctttgcgtccacaatgcgggaagatgaaataaatttgatcaaattctctctcgtgcagttcaaagacatctgccagctgggtgcagtccacaccgaaacgtacatcgatacctggcaaagatagtttgggggcgcaaaatatagacaggaggatgcctcaagacatggaacagaaaaactcttcctaacttaaaccgtgcagaccagcccaagtctgggcacaaagccggctttatgtgaatatccgtgggacgatcaagaacaatctccacgtgggttacatccccacgcccccaccctttccactttgggacgcgccggccgctgggcggggtttcgcagaggggcgggctcgctacctcgctcgcgcaggcactgcagattctcccaggccagtggatcccgagccaactcggccgggcgctggaggcaggtggcggtaagttgagtgctctgatccagggtttcgctcagagcggcggcgaaggagaaattcccctccccaaccaacaggaggcgccgaggggccatggcctccacggactcccggctcgcgttctctgtggcgctcgttttacgtcacttccttcacggatctctctccgccccgtcttctcccgtcactagttgatgacgcacccatggcgcctggttgtctagacgagccggtgtaccgactccccggtggatgataactatgagtgcaaaagcaagacgcgcactttcctgtcacctcgccctttcaccccctcgggaagatcaaagtgtctttagcccaagcatggccttgagcgacttcatcacacctgcatgaggtcacaagcagtcactagcgcaggggggtgaggcgagttctgggtgaaagaaacggggcggggctgaggccaaggaagaggttggactgtgtctcgcatgctcctgacgcagaaggttttgaaccttttttcacctcgtctgaaatggctgcctcccagtgtctctgctgctcaaaatttctcttccaggtgcttaaatctcctatcttctattcgttcaagaaagagtattgagtgtctattgcgtgccaggccactgtgagggtggttacgatatgtggatgaacaaaatgtggcctatgatttcaatgagcctgcagtctggtggggaatgcacagagcaaaacaggcaactctgatatggcagggtgtgtgctctgggagcacacagaagaacgttaccaagtttgggggcgaagagggtcagagagtccttggatgaagtaaacccgagttgaaagctaacagggtaaaagtgcatcttaactgagtcaagaggcgtgaagaggcagaaggaacaatatatgcaaaagcttgatggagaaacagaatagttgagtttggctgaaacacaattggagggagagtaacagatgagactgaagagttaggcaggggccaggtcatagggagcgttgtaagcctttaaaaaaaatcaacttttattttacaaatgggggtacaggtacaggtttgttacgtggatatattgcacccaggtaggttgcaggtttgctacatgggtatattgcacctaatagtttttcaacccacaccacccgccctccccactctagttagtagcctggagtgtgtgttgtttccatgtttaggtccatgtttgctcaatgtttagctcccacttataagt

SEQ ID NO: 56967 - DNA, 966 bp, Homo sapiens
ggaaggagggtggccgaaggtagaagggactcagggaagtagacgtcgggaaaagatcagactccaacaggtgctctccgaagaactggtcaaagaggcggctgggggagtggaaaggaaagaaggggcggcggatccaggggtggtggatggcgatgtccatggtggctaggtgagtgtgaggggtcagctggctggtcagctccttcagctgcagctacagccagccccttatatatgcagtcttgtgaagcttctggaatggtgatgtcaggggttttattatcctagctcaccagcagttcatggagacttgtgatccgggatttggcaatgtgacacatacccagtactcactgagctaagaaaagagagacacaaacacgtctgagccggccagtgacttgtcatggtcttgtttcactagctttctgtccacacccaatggcacccacccccacccctgttctctgaagctggtacagagtcaggaatcccaagcaggcacgcggggtggggggaggatgggagccggcgtagtgtgcccctcctcctcctttccagtcctgaatgccaggggaatcaggccagcaactatcttgggcctgggcagggactggaatcttcctaggctgagccccagggacattaactctttgtgagtccttggaagagagcagtgatggtcaacatgtcagcaccagccatctgcctcgtgccctgggttgacctgggtttaggagaggatcccacatctgggcagaaagaccccaccccctgaaaaaagagcaaacagatttcttgcatctttcgttctatgtggctctcagaacattaaatccaggagtgctttaggaattgggtgcacagtgcctgccaccgaagaggagaaaatgaggtgtggaaacgtgcaaaccgtttgtgagggtctcagcgaggcctcttcatgccccaggcaccaccagc

SEQ ID NO: 56968 - DNA, 1107 bp, Homo sapiens
tcacagccctagaaacttaggccctataaaggttaagtgatttgcccacatcgatttcaaatagcaagggagaatatatgaggaacccatttccccaaacttaagtttccaagagactccagtatcccaacccagattctgtacaaaaataataagaaactggtaccaattgcctcgaaagtgaaactcagttaaacctgagtggtgctgagcaaactactacattaggcactcatctattatagaggatatatttcaaagacagagtgatgtaatggagaagcatttcgtaaggaaaccaagagcccttttctatctcaggtttctttttattgaagcttgaagctcaagttcatggcttcatcaaaagacgcttcaaatcctgaagttgagatagctctcacctggagcccgtgtgttgttctaccctttggctgggaacacagtcacctgggaatcattccagcaggtggcttcaaaagtccaacctgctaggttgaaatctgacactgacacagactccgggagctgccgcggaaagctcaaccaggaacccggaaatgcacaagcctcttgatgcataaaaacagctgggctcccttggagacagagcgccatgggaaaccgggtctgctgcggaggaagctggtgagtaggctggaagggcaaaggggaacatctatctctgttggtggatgtagaggccccgaaaatcagaggacctggagatagttgtctgccagcctcccactgccaccttcctctgcctggtacctccttgttccaacaccagagcagcacctcctttcaggaggccttagaagacagagccaagtggctgggcgcggtggctcacgcctctactcccagcactttgggaggccgaggccggcggatcacgaggtcagtagatcgagaccatcctagccaacatggtgaaaccccgtctctactgaaaatacaaaaattagctgggcatggtggcgcgcacctgtagtcccagctactcgggaggctgaggcaggagaatcgcttgaatccggaaggcggaggttgcagtgagccgagatcgcgccactgcactccagcctggcaacagagcgagac

SEQ ID NO: 56969 - DNA, 1177 bp, Homo sapiens
gcagccgtccccatgcccgggaagtgaaacacgtgcatttagaaaacgctacagagtatgcgacccttcgcttcccccaggccacacctcgctatgacagcaagaacgggaccctggtgtgagcgcttgggaggaaggcccagtccatcgttaaccactacacctgtgggggagaacctactgctttggggaattgggtggcaacccagggatgttgtccacgttttaagcttaaagaactccaaagcccctggaattgtgggcgtcccattttctcccctggcctcttacttgccactgttaggttggagttaatagttggtttagctatgggtggatagctaaacttagctatccacatgaggttaggtggagtgtgcagggaggtaggtcttcgaccccaccattgttgctcctgctcttgcaaagtgcagaaagagcaggtaaaaagttagcccataagcacgtgggctgatcttgttggactttaattaatggtatcctttttcacacaccttaaactccaaagctgaaggggaggtgctccggaaaagcattctgagcttttacattcagacactagggctggcttgggccatttcctcagtggctgagtcaggttccagaccttaacagacaaatgggggaagggggctgaggcgtggaggaaacgctttcaggacctcaagtcagtgataaccgacagcacagtgaggcctggaaacttccctcggagggactgttggctctcgcaggtgcggggccgctaggatcaataaacggcctgagaaacatgcctggcgcgttttctggggcggggccccgaagctccttgcgaggacagcggatcccgcccagttttaagggcggttcgaaagtccagccagtagacaggccttccggccccacccccaggccgcggctggaggcggagctggaggggggtggggtttaggagaaagggggcgggctaccattggcagagggcgcagttcctggggcggtgtgtccatgccgtgattggttgtttgtcggatgctcctggtgaggcggatccggaacggcagttgggggggatctgggtccagggggcgcggtctgggcctgcaggaggcgggatccggcgggccagaggcgggaccaaggccggcaggggctggctctggctggctggagt

SEQ ID NO: 56970 - DNA, 352 bp, Homo sapiens
catcacacccagctaattttttgtatttttagtagagatggggtttcactgtgttagtaaatttttaacatgcgatcatatgctgcacaaactttttaacttgctttgtttcacttaacgttaacataaaattgttaaaatgtttgttttaatgtgggcacgtttggtaaacattataatggctgtaattttcttaaccacttctctgttgttggacttttaggttcgctcacccctgccccccacattgtaaataattaatttccttatttaggactatgtcaggccaggtgaggtagtggcttatgcctgtaatcccaggactttgggaggctgatgccaggattgcttg

SEQ ID NO: 56971 - DNA, 711 bp, Homo sapiens
gggaatagtgcaatattggaccatatgccttataatacattttaaaaaatcaattcactacaattctctcttaattcctccagcatgctgtgatgggcagtgcaaagagcacaggatcagacctcagagccctctggttcagatcttagtttccatactgacttgctgagtgactgtgagcacctctcctagccttggttgctttttctatgatataagggacttgggccaagtaaggaagttgggccaaaatgttttggagctttaaaattcagtgatttcataagtctttttccagaaacactgagctcacagatcctactttgatcaaagacttgtttgagaaacgctgacctctggcatagataactgtcagcaggatctccctctgatgtctcaatattttctgctctgtgtacaaagcatgaggggctctcaaccaatcaggatcctctacccagggatccaccaagtaggtactttggttttgcatcattatgcacgtagatgtattgcatgcaagtctgtgctgttggaaatttcatgcttctctttataaaggaacttgttgaattgacatgggttagtgactctccgggggtgttacaccacgaagtgtggtagtgtcaaagggagttcttggcagttaaattcctcagctagattatgaaggacagtggtctttggacttgtgggctgctcaggtttaga

SEQ ID NO: 56972 - DNA, 1235 bp, Homo sapiens
aaataggaaaattttggaaaaggcttggtcatccttgatgtttctgttgcgatcctgcgtgatgtttagcactgttctattgaatgtgttctgataccatcaataactaaagttctttttatcctcttttccccctttcttcctctgctctttctctttcttatttctttcccttctgcttcctcttctttagcttgacctcactgtccagggcccatgtggaaaaaggttgctgttttcggttagtctgggggaaaatcctatgattcactccctttcccacccaccttctggtgggccgtttgtggccttaagttagcagtgtgtgtgtgtgtgtgtgtgtgtgtgtgtgtgtgttgcgcaccctccccacgggcacacccgcctgcaagcctggtgtgtgtgtgcgcgcgcgcggctgcaagcgcatgcatacgccagccgggccgcctgtttgtcaacgtgtgtgtgtgtatgtgtgtatgtgtgtatgtgtgtgtgtgtgtgtatgcacacagcgcgcacatacagcagcacgtttgcctaaaagccgtgtgagtgtgtgtgtgtgtagcgcacgcacacacgcccgtgctgcggcccgggcggggggggggtgtgcgcgtgcgtgcgggcgtgcagcgcgcgccctcgccagcccgcctggccgtgcggctttcccgcaggaaagcggggctgggggcagcccggcagcgccgctcaacctagtgcgcgcccagttgtttccataggaaccgcgaccgcgccgggcccctccagcggaggcccccgtgcgagcatgcccagtgcaagccgctagtttggctccagtctaggtttccagtaagtggcatgcgggactccggagggatcccaatgagctgagccgagagcctttgtgtgcagagggaggaggaggaggcggcggcggccgccgggctggagaccccgcccggggagcccccagcaggaacaatgctagcctgcctgacccgagggaacttactggacgtcctgcaggagggcttcaatgaggtaactgtcctgctcctcccactcctcagctcccctcccccagcgtctcccgcccagtctccggaaggggtcctcctcctcctccatcctttggggaccccagagcaaatcgcccccagaaccccaaaggggctaaggtggtacttacggtgcagatgggtgaaccaggagaaatcagaagggctgcctgcccacagcta

SEQ ID NO: 56973 - DNA, 2055 bp, Homo sapiens
tttggccgggcgcagtggctcacgcctgtaatcccagcactttgggaggccgaggtgggtggttcacaaagtcaggagttcgagaccagcctggctaacatggtgaaaccccatctctactaaaaatacagaaattaggtgggcatggtggctggcgcctgtaatcccagcttctcgggaggctgaggcaggagaattgcttgaacccgggaggcggaggttgcagtgagccgagatcatgccactgcactccagcctgggagacaagagtgaaactctgtcttaaaaaaaaaaaaaaagaaaagaaaaagaaaaacagtaatacttttaactattttatgtaaggaatagttaaccttggctcacatctctgcatgttactaggagcacttgaggaatactgatataccttggtcccactctcagaaattctgactgctctatggtgggcctagacattagtattttttgaaaagctttccaggtgattctggttgttaaccaagggggctgggaaccccttggttaagggaactggactgtttcgctgggaaaagactcaaatcagctttacaagaatcatatgggaaagcttgggaagataaatctttctgagttcctaccctctggagacaactggtagatttaggatgacgtctgcttatgaaaaacttcccttgtgaccttgacgtgcagccaggtatggcaacagcgggctgggtcagtgcttctcatgctttcatgtgcatatgaatcaccaggagagcttgttaagatataggctctgattcagtaggctggggaggagcccaggagtttgcaggaggctcccaggtgttgccgatgctactgatctgggaagcacactttagtagacagccgcttagtatagtttattacacaagagattcatggattggatgtggtggagggagtggtttgactcaggtacatcctgaaagttttagggaagtcatttaagcctcagcagtgcatttatttaggcagcagtgtggtagagtggaaagagcattggcttgggagtcatatctggattccatattcatgatttactgtttgggtaaccatgaacaagttatttcaccgttttgtgtctctgttttcaatgaggaaaataaatacaaaaacatctccctgccagattagcattagataaaatgtgtttaaagaacctagcatagctcttgatacaaagtaggtgttctgaaaagtgactattactgtttatgctgtggaatcctcttttgttggaagaccagactgtgagtaatgtgcatgaaaagtactcaacagtactaatcagttttgcatcagagacaacttctacgggcaagaaaaagctaaggttacttaagtagaaattatcttgacctcaagaaaaatacttgttcttgtttgtccccccgcaattaacttttgcagtcatcttagttattggcctgataaaatgtgacaaatgattaactgattcaaacaaatatttgttgagcacctgctactctaagagtcaaataattctgaactattgtgactctccacataaagcatatttcaggccttagctcctttgagctcactgtcctctttgcttcttttcctccttcaggagaccctctgaagcttggggttcaggttgggctaatactctgttagcaccctatgtaccccgtcatagctttgtttctaccagcctgcaagctggggcttgttgtagcctcataactgggtacagtgcctcaaattattgttgaactgattgtgtgacataggaagccctcagggagatcagagtctgtggtatctgagaggtcagggaaagctttctgaaaaaagtgatacttgagctgagacttaagaagaggcaggttggccgggtgcggtggctcatatctgtaatcccagcactttgggaggcctaggtgggtggatcacctgaggtcaggagttcaagaccagcctgaccaatatggtgaaaccccatctctattacaaatacaaaaattagcccggcgtggtggcaggcacccgtagtcc

SEQ ID NO: 56974 - DNA, 1164 bp, Homo sapiens
caagcaaaatgatccttagttggttaaaaagaacacacgaaacgccagaggggaaggtgggaggggataggtgctcggcgaattttcctggggagcgtcagagtctccaccccgaggagcggccagagccccatgcgggcctgacctgtccgaccgacccctcgtccaccaagggagggctcagagtggagaaggcaaggtttttggtgcggggctccccagcactcagaccactagagccctcctcgtgattctgccgatacgcggctcttcccctgcctatcctgaggctcccaatctcctctcctcgcatcccccaacccctcgtcgacgtccccacccccacctccaccccgcccagccccgcccctggcccgcaccctcaacctccgtccagagcggtcggttggccagcggagctggcttgggtcggagcccggctgcctcgccgcgtgtgacagcccagggagggagcagagggtggggcggggagggatccggaaggtggcacggagtgggatcgccgctggggactcgaggcgcagcctgcgccgccgggagcctccctcccagtgggagatgggttgagatgcccccgccaggggggatgcccggcaccgtgcgtccgcggaggccaagatgcagcggccaggggccggcagcctgcgaggggaggcagcttccgccggggccgggctgctgcacagtctgagcggccgggactgcgcgcttcagagcctggagcatcccagtcgctggggccgagacgccgccgccgccgccgttcccgctttctcccgcgagccgggccagtagctttgctaggctggccttcccgtggaggcgttttccagccccagcgcggggagacatgcctgaatttgggagcgatgtgactctcagcctcccacttcacccggggacgcaggcttgctgaagcccgagacaggagggggaccatgggagggacgcaagtcaaatggtgagctgaagccactctggctttggaagtggggggcctgggtgggaacaggggcagggctggaggatgctgttggccggagacaggcggggtggtgggagcattatgttgggaggaccggctgctgaccaggggttatcactataaaatacggtgggcgtaggaagtggagccagcatggg

SEQ ID NO: 56975 - DNA, 1876 bp, Homo sapiens
agtgctgaaaggaatattgaattgaagtctcccctctaaagcttcagagtaaccagtaagattttgttttcattgcatctgacagctcctctttttgtacctggcaaagtcaggctcttggaatgccagttctaagaattaagggtgaagtctgtgtggcgcataccaaggctcccgtggagggaatcttaatacttcctaagagttttaaaagaggatagattgttctagcaccaagtgagcctgaggcctgagctcacagccaattctttaggcctcacaaccccacctggtggagagtccagtctgtgctatgagaacaggttcagaacgcaggtgacctgaacctgtgaacgctaccctgtgaacgctgtctgctggaaatcagttttcttcaacatgaactgtactccctcttttcattttttagaagggacagattctccattatctcgagactggcggccagggagcctggaacctatctggagacctcatgggaagaacagctgttggaacaacaagaatatttagaaaaagaaatggaggaagcaaagaaaatgatatcaggactacaggtagctctctcccttgtagtttgcccttgttataccaattgattattaagtcagtattatcaatggaaaataaactgattttagttttctaggaggtcagaactgaatgaggagtttagatatagggaatagcacagaaagagcagaaaattccttatatttgaatactttaaatggactttgtgggctaccgttcatagcacagcgcttaagatttcagcaagcccaggagccattactgacccttatcaagtccttattgttgactctgtgctacataggtgggcttctaccctgtatgtggctgcagacctgcaattgcagctttcaccaaagaatggcactgtgaatagtctgggattttcttctaggaattctctagcaggaagagtgtaagagccagtaatgctgccaggtttccatttgaatttagctaagggatttagctcactcctaatacatgtgcaaatggatgccaaggcataatggtcaggtagaagaggtttactttgagcaacaaagcccttcagtttttcctatacctgtagtgccagctcggcaaatctacccgagactgacccacttgacatagttcccaccctgagtgaccccctcattcttgtctttgtgtgtctgtctctgtttgggggagcgcttatagtgtgctgatgaccctgaaattgcctaggaatattcctttctgtttgtgctgggaactgcagtgcttctgaattgtcaaatatttatggacacgtaaacaaagcccacattatgtgtgtggctctggcagccggcaggcggtggagggcgtgctcccagctagcctgcaacagggtggggacacaaaagattcctaaagaagaaaggagattggtgctgtggcaaagcaatttgcataacgtatgccccaggaactgagaagtgtgggaggaatgttgcctgcgtaaacattcccaaagaaagttgttggttttccttcatttgctctgtatttttaaaatggctggcttatgaggccttttagatctcttttctgccactccattaacaaataccttaatggaatgtttttgtgtgtgttttacttgcataggaagtatgtcatggagaactttgagattatacccaaccaggttgttcccaggataatttgcattatatgaacatagatattcatcagtttggctcaaagtttgtttgcattttcttagtctgggagaaattcgatggcagattagacagaaaaagaagagaaatgacaggcagaaagtcagcatcttaatatttcctgcaaacag

SEQ ID NO: 56976 - DNA, 1871 bp, Homo sapiens
tgagccactgtgcctggccgacatgaatttttaatagagcaacttttatttatttgttttgttttgtttgtttgttttttgagacagagtctcactctgtcacccaggctgagtgccatggcacgatcatggctaactgcagcttcgaccccccagtctcaagcgatcctcccacctcagcctccctagtagctggggcttcaggaacacaccaccatacctggctaatttttgtgttttttgtatagattgctctcgccttgttgcctaggctggtcttgaactcctggacccaagtgattctcccatcttggcctcccaaagtgctgggattataggcatgaaccactgtgcccagcctaatagagcaacttttgagcccatctgtggagtccaagttacagatccccattttagatatgttaattgcaaaatcttgatgtgatacaataggaagagaagagattggggtctgtgttatggttgttccccttctaaaatctatttcctagtgacaatcgtatacatatattttatctattgtaagggaatgttaattactcagtatttcattattaggctaaatgtgtttttgtttggcccacaaagaacaataccctcttggatcagaaacactccaaccctttgctaaacattaaaaatagggataattatttaatgacattgggggtaggcatatttagatatgatcatatattcagtgagaaggatttagattattataattaggttttcctgttggtgaagattgctaaatatagaaatgagagcctatgggaattatggggtatcttctttcttggcaactcttctctacctgagcagttaagcctgggtgccaacagggaagaacggaatggttctcttcttgtttctgtggatcagcctgtactgctcactgaaccagagctgttttctgccttagtagagggttaatttttcacggaatgatcaactgggttttgtcctcttgccgacagaatgaggtaatgcattctgaagcaacccagatgtcaccatctgatctaactatatttggtttgcagaaggaactgctgaaatgtaaacaagaagccagaaacttacaggggataaaggtaaaaaagaagacatttaattctttaaataaagtctctgcaatgtaaagtagtctgttggtgagtggtgagagttggaattttctgtggacctttaatagctctgtgctattggtaaagaaagggctttgtgggagggaagtgagacatgtcgaggaatatacctttgttttgctgaggcttatttctagtagttatgattcatgttgctaccatttccatctgttccaccctgattgtctctatatgtaaaagaatcctcttcagtgtgaaagaatgtcctctagggccgggcgcggtggctcacgcctgtaatcccagcactttgggaggccgaggcaggcggatcacgaggtcaggagttcgagaccagcctggccaacatggtgaaaccccatctctactaaaaatacaaaaaattagtcgggcgtggtggcaggcacctgtaatcccagctacttgggaggctgaggcaggagaatcgcttgaacccaggaggcagaggttgcagtgagctgagatcatgccattgcactccagcctaggtgacagggtgagactccgtctcggaaaaaaaaaaaaaaaaggaatgtcctttaaaaaaattgttatttactttgtttttgaatagttaactaacattcaaatcattttaaaggtataaaaagataaaccatgaagtgtctgcctgccagccctgtcccatcagtcatctagttctctttcctagaggcatcttttttttttttttga

SEQ ID NO: 56977 - DNA, 1379 bp, Homo sapiens
aagcaaaatataaaacaacaaaaacacatacatacgtaaatttttctacactcccaaacagcacaaaaaaaatttccacttcttccttgaagcaaggcgtttaatttctttggagatattcttaaaactttgagtgctcaggccgggcgcggtggctcacgcctgtaatcccagcactttgggaggctgaggtgggtggatcacctgaggtcaggagttcaagaccagcctggccaacatggtgaaccccatctctattaaaaatacaaaaattagccaggtgtggtggcacacgcctgtaatcccagctactcatgaggctgaggcaagagaatcacttgaacccaggaggtggaggttgtggtgaacccagattgcgccattgcactccagcgtgggtgacagagtaagactccatctcaaaataaaataaaaactttgagtgcttaaggcgtttagtttaagtcctgcaaaatgtttgcaccatctaatggccatggctaggaagtgtattttaacctgctccgtgcccactctatattttttcccatttgttcaaacttgttggaaagctaccctgcctggtaatttctattttagtttgtattttgccttttgtggcttagtaatgttcatgttttcttatcttttaatcaggcctaatcaaaaggtatctaataatttataaaaaccaaatagtaaaaagctgactagaaacagttttgtatgttacatataaatttttaaaagcacattaagaaacctaaagtaaaaatctgaaaatacttgcaaaaatatgaaatgtaaaatttttttgtggagtaaataaaatagcatttcaaacctctgatcccagatatcttttcctcttggatgaggttatctatgctgggaatgaaacaaattttttttttttagcggcgggggatggagtttcactcttgttgcccaggctggagtgcagtggcgcaatctctgttcactgcaacctctgtctcccgggttcaagcaattcttctgcctcaggctccccagtagctgggattacagacgtgcactaccacgcctggctaatttttgtatttttagtagagatggggtttcgccatgttggcaatgaattattttattaccagaattagtttcagtttccttttctagcagtgtttcaaaatagtcatttctattgtttgtagaggattattattattattttattcattgatttcttcagattagtgtaaactgccaatataaataggtgtaaatacttagaaatttcttttttaagtacaataaattcccccccaaaaaattactttgtgcatatatagtatttatttaaagtactacaaataaatctatagctgcttgaaaac

SEQ ID NO: 56978 - DNA, 703 bp, Homo sapiens
atatacacaaggatatgtttctgagccacttatcctgcatgagtttttttgtacgtgttttttatagtaatgccataatactgtaataactatcattttgtcatacggctttatgttgggtgagacaagttctccctcattactcttattttgcttttttacttgaaaagtctatgcaatccaactcattcttcattagtcatctgaatcgacttttcactagtatcatcaatgatatttttaccaaagcagtctttgcctattagacccctgtgtagcatttgacatcatgattactctctctttgacattctccccaaatgtgtacataacatttgtattagtcagcttgggctgccattgcaaaataccttcaactctcttaaacgacgtaaattaattttctcacagttctggaggctagaagtacaagatcaggttgccagcatggccaggttttggtgagggctccttgcctggcttgtagaaggcacgttgtctctgtgtcctcacatgggggagagaaagctctggtatctcttataaggactagttctgttggatcagggctccacccgtatgacctcatttaatcttaattacctccttaaaggccctatctccaaaacagtcaaatagcagataagggcttcaacatatgaagttgacgggtcggggggtgggggtggggtgggggggggga

SEQ ID NO: 56979 - DNA, 3687 bp, Homo sapiens
gagcgagaccctgtctttttttttttttttttttttttgcggcagggacagagtctcactctgtcacccaggctggagtgcagtgtcacgatctcggctcactgcaacctccacctcccgggttcaagcagttctttgcctcagcctccccaagtaactgggattacaggcatgtgccaccacgcccagctaatttttgtatttttagtagagatggggtttcaccatgttggccaggctgttcttgaactcctgacctcgtgatccacccccctcggcctcccaaagtgttgggaaatacaggcgtgagccaccgcgcccggcgagaccctgtcttaaaaaaaaaaaaaagtttatcaacaaacctgtgttaaagaccatggcatcaacactatagatcttaagttgctaaggttctgtaccttttagactgggagcataagccccttgggatctgagtttctaaggttgctttgcttctgtggttcttgttcctatcggtttttctttctatgagtcacatgagtattctctactacggacctccaaaacctaaatattggcagagtctacagcttctgctgtgtgtctaccctgcctggctgaaatcttcccatgcttctctgtccttttttgatctttaacaatgatacctgtcatatcagttgctgttcccctactatgagtgaggagtgatgagtcctcgcgatcgtgtccatgtctgaagcaagtcttgtcctcgtggtcctaggcaaccatagcatatggacattgtgtttggcaagggtgtgagagctgtgggctgtgacctcaggcagctttgttctcccgggacactttgaataactgcagatggctggtttagagcaaatgaatgttctaaccacagtctctttctgattgtagagttgcctcactcacagagctctccaactgtcagcagcacctgtactaaagtgctctatttcactgaccggtcacttacgcccttcatggtcaatataccaaagaggtgagattctgggatcattgtatttcactgtaaagaaggaaaggaaggcagaacctcattagttactgcccacatgagcagctgaaaggtgtttgagaagcagtatagtgagatctcactatagtgagataagccagagagacagattctagtttcagctttgccactattcagtggtattataaaggacaagtcatgatctactactagatacaggtacaataatagtacttccaatcctgataactatgcaaatatggctctgcatttgggaaaatctttttttttttttttaagtgttcaaaatagctcctgctgatacaatggattgcagcctggcactcactccaggactatgactaattgatctttgttactattcaatgactgcagctaatccctattgagaaattatgtcaaaaaccttccagaaagttaatgtgcttccttttaagggaaatggttttgaaatagaaatatttaaactctgcaaccaactattgagagaggttataggatttttcttacttagtctgcttatttagtctgggttagaagccagcttcctaaagatagagggataaagatcatgatacttgatttgattctaccatcctagagaattgggatattgtagcaaagaagaaaatcaagagaactttgatatatttatggttattcaacaaattttatttcagggactttatatcttatttccagagaaaagtgatttggcttctgaagcaataagtcaattttaaattctcacatcaccccatatttaatactgttttcattccctagtgatgactggttctccagcctctgctgttttagtcatctgggttatcggggcagtgacctaacaaggggctatttctgcttattgactttggcagggggctgtgtttaaagttaacatcttatctttccagctattgatcaacagtctattttagtgctctctccttgtgttgcaggttggaggaggtgacgttaaaggattttaaagcagctattgatcgggaaggaaatcaccggtatcacttcaaagcactggatcctgagtttggcactgtcaaagaggaggtaaagaatctgtggggagtctgtatggtattattggtcctttctgaaccctgaagcctcctgttcaagcactagtgtccagaagtacatgagttccctgactaggtcagaagaatttgccagagcctcagaccatggtctgattactctagacaagtggtcatagaatagtccaagatgctgataggttctttagttgtaggacttcatcatttgactgagaacttggatataatttttattttaaattattttgttagggaaaataaagaacctaagacaataaataattttccatctgcagccaaatcttagaaaacttcttgcttcctatgtagagcaaaataaacacgcatggatatatggaactgtgtatttctcataatgaaatcaaggaacttctagggagttatgtatgcttatgcccaactccttgagtaagtattttcttagcctacgcgtctctttataatccatttgtcaaagatagacttttgggggaatacagttctgggttatatagtattacaagtggattcactgcagttacagaatgaaaaaagttattatagagaaagtaaaattttattttgtaaacatttcctcagtgaaatgttttagtaaccctgttttattagtggcttaggaaatgagttgaatgaattaatgaaaataactgcatctgagaaatgtgttaaaatgagtcttttttccccaccctttctttacattgcctggtaactaaattttccactttctcatttttaaaatacttaacactacatctttcctctaagaagcccaaagtactttgtgattggtaatttattaattcttacaaatctctatgagcaaagtagtatcaggcattttttaaaaccatttcatagatgtggatctaagaaaaaaataaaatatcagttgcagttctagggacaagaccaaaaggacatagactcttaactcaaggctttcttctacatggttgaggtcttatttttattagcagcaattgtttagtgaatcagattccctgttttttcactgtggctttttgtttttttctctagattttccatgatgatgatgccatccctggatgggaagggaaaattgtagcttgggtggaagaagaccatggagagaattaatgccaagtatcagattgagggcttatggaacctggtcactccctggctgcttcactcaggaaagggaactaaaaccagaatacactaagaagtttctagtttgtgtgccaaaacagaagcttctccaagcatgatggccacaggtcagtcctctttctgtgcctggcatatctggtacttaaaattctgtccaaatgtagaccatgggttcatctggagttccttgtccgtgggaacacagtgttctattctactctgaggacaacaaaccgaaggccttaaacgatggggatggatgatcccgcctctgtaggggcatggctgctattatctggaaattaggaattggatgcatcattcctgtgtgttacagtattattttaattggcctcaatggttgcagcaatcagagtcccagcgtttgtactcacagac

SEQ ID NO: 56980 - DNA, 2452 bp, Homo sapiens
atgaaatagtacatccaatctgttttagttttccaaattaattgttagcaagattagcccccatttttttttttttttaacagatgggagtctcattatgttgcccaggctggtctcaaactcttgggctcaagtgattcccccacctcagcctctcaagcattgctgggactacaggcatgcaccaccgctcctggctaaaatcttgttttaagtttcttccctccaacttcctcttgcgttcttggtgttctctaaccatctctacaggggggaggtggtgatacacagcacatgcttcctccttatctaatgtcaccttcagttcagaaacgatatgttttctaattaaaagacaactttacaagagaagcgtgcctaacaaaatgtgtagatgactttttattcattgattcaaaagacatacattcagcccccgctatttactggatattaagctctggggctacatggaaggaccacgcagacactcttcatgccttcaacggcttacagttaagtttttcaaacatttgaaacataacgaagcttttggttacttaaaagaattctatggtattagggagcaacacctgttttgtaaacctatatcttcatacagggaatatgcttaatcttgctacagtatacatgaatgcgggaatgtatcttcctctgggctgcctttcgttaccacttggctgggtggaacacctgttcactccactttccacttgggctacaaacctgaaacgaaatctttgcaaccagtacagcctgcgcggggcgcggcccagtccatcccccttcggatgcgcagaagcagaggtcaccacgccggacccctcgattccctcgcgggcgattcctggctccttcaccaccccagcactccaagacccccgccctttggcctgaggctcccactgccctagccagttcccgggctcacttccagcttttccagaaagcttggccacgcccctcggcccagactctcaggccactcggccgcaattaacccgcgtctctgcgcctttttaggcccctccccctcggtcgtgcccttgtcatctcttaggccccgtctcaccctttcggatgcctcccctagaaccctaccactttccacccctttccgtctgttatttctcccaaacttgcgcccgcacaggcccctctggaacactcctgccccgtagtgcccctcgtccccgctccgtagagaaagagcgtgcgtgccgcgcatttctggcctggggagcgggtggagtaaacctgcgggaaccattttacgacaacgtgcggctgtgcggtgtggctgacggcaacgccgctgctcttggagaggtcactccggagacggcgttggttttggggtgtggggggttggtggcactatgtggcgcgtctgtgcgcgacgggctcagaatgtagccccatgggcgggactcgaggctcggtggacggccttgcaggaggtacccggaactccacgagtgacctcgcgatctggcccggctcccgctcgtcgcaacagcgtgactacagggtatggcggggtccgggcactgtgcggctggacccccagttctggggccacgccgcggaaccgcttactgctgcagcttttggggtcgcccggccgccgctattacagtcttcccccgcatcagaaggtgagccctagaccccccttctcgggaccccgttgtccttcagagctgactggatgcctgcaagatcctccttgagaggcctcactgatcctccacccattcccagtatctgctttggccctttgtccaatagttggctttgctgtagctccttagtgtccctctcatgatctatttcattgaaaggagagcttcaagactggggctgtatgcagaatatctgccgaggttcatgctttgtcagacccacaggactgtggaggagaaagcctgtcactggaaattactaacttctcatggacaggaactcccttggcatccctagttcccaatgtgcaatggaactgtatacactttgcatgaaattgaattgaatgaaatcttaagccagactgagagttaggtagtccttaaaaattttaatgtttcttcttttccttttccaggttccattgccttctctttcccccacaatgcaggcaggcaccatagcccgttgggaaaaaaaagagggggacaaaatcaatgaaggtgacctaattgcagaggtaagtttttttttttttttttaattaatttatttattttttttattgatcattcttgggtgtttctcgcagagggggatttggcagggtcataggacaatagtggagggaaggtcagcagataaacaagtgaacaaaggtctctggttttcctaggcagaggatcctgcggccttccgcagtgtttgtgtccctgggtacttgagattagggagtggtgatgac

SEQ ID NO: 56981 - DNA, 1568 bp, Homo sapiens
agctaatagagaggctgggacacttctctacgtcttcagataaatctccttagcctcttctcccattggagaggtgtcccacagcatctttagaatgaggaaaagaggtttagattcttcaattactgtgtaagggttatgctaaacgggaaacttaactaacggataatcattccataggtctgcaaacccacctcttctctcagttctaacgggtaatcattctataggttggcaaacccacctcttctctcagttccttgacaaaccgcgacgcctgttaccagggtaaccagcctgggtacaacatctaattgggtccggggaacttcagggagaaaagtctcttcatatctagttccggaatgtcccccttctggtgccaggcttgcttttcagttgggcctgacccacttctcttccaggaaagcgcccgccttccttctgcacccgtcaacctctggagtgtcctgaaaaccctcccttgtgggagtctctgggctgcctgttggtgggacgatttctcaggagcacgacttccggcctgaaaaggaagtctcctcctttttctcccaaaccacttcttcccccctaccccccgccacgcgaggctgcggcgcacggtatgggtgtgtttgtgtgtatttgtgtggggagggcgtttggagggaaggttaccgggagctccgaggccgctggggaacagggatcccggtgacaaagatggggatatttcctctgtcttccacttggaaacctcaacccccgcttcaggctccctagatactttctggggcccaaccgaaggccgtagccatccaaagcgttcccagcctttctggggagtgaaacttacccccggggttcgtcctagaggagcgtgagcggggaatgcccaggtcaaccgggctgtccgaattccgccccggctcagcctccggcctcagtccgggagagagatctgcctgtcggtctgggctgggggaaacgcggcagtggcctgggccacaggtgagggcagagtaaccagtgggaaggctgcgttttcacgaaggactcgggtgaagctgcagagctgcctttgagccctgactccttggcttcctgggtcggaggagatcttgtaatggagtggttcttcgtctcactagcaagatgcctgatttcctcaggatcaaggggtgagtgagcgttggggtggttgcacaaagctcctgctagctacacacgaaaatattcttgtcatctagtttttggaagcttccgtagcaagtaggaaataaaatgcccccaaatggagaaatttaggacatctttgcatttgatgttttgagtaatcagtttctgttactgttgacacccgtggttcctgacactctcaaatctacgtatttgcttcagtgcaaactatattgggattggaggtttgatttttaatttagacagtgacatacatcatttgcctgggactatgtggcttgggacgttacagctttaagggaacttcatctacaaaatagggatggagatacttgcctcatataaaaagtagttatgaggattaaata

SEQ ID NO: 56982 - DNA, 2173 bp, Homo sapiens
ctcttctctttcttcatttcctaattagtcaccaatattgatccagatcctcgtccctacagattgtacattctcaggtaggactaataaccttttatattccccaaagtagctagcaccattgtgaaccaactagggaaccaattaattttcccaaactattgcactcattttattccaaacctatcccctagacaaggtaattcttccattaaccttttgggggttatggatccactccccagaaaaatgcacatacaggcacagaaattatgtgcactgtcattagaatgttcagggcccaaagatttctagccagggttcttgctggtcatccgagcaccctcttcctcccacccaaaaggaaaaaaccattttaccaagagcttactatttgtgaggctgggtactaagaaatcagttctctctaaggtcctcaaggatagctgtcatcacctcccatttaagaggcgtgattatgtagtccaaggtcatgtagccagcaagaagtcaggccgcgttagaaccatgtccgaagggctccaaacccttgttctacatccatagtctacagcgactacttcagagtccaccttcctccgataatgttctagtcgttttcaaatacattgtcgcatatgatcctcacaatccagtgaggcagtggggtgacggcgacaccaaaacccacagtggatgagtatcttttctacgggcacgtggcctgcaaggagcagagggaggatgagaacccagatctttcgaatgccagcccagtcatgtcgccggctaactagtctcccgtacccttgcgtcgcccaaatcttccctgttttacaccttttcttttctccacgctacgcttatatacctggcacctgagcactaccggtcaccagggacaggagagccataactttgtctttcgtgaggggaatgggatgcagccgggatcgagcaccagtgagccgccagtgtacagacctccgagcgtgcccaggaccaccaaggaaggtgaaacttcctttcccttcaccctccccgtccccgcacctgtgcagtaaactgcgccttctgctgctcggcggccaccaggcgctgcaactccgcttcatcggcttcgcccagctccgccattgttcgcctcaggctcgccaccttccgacagctgtgtttgcgcatgcgcgacgggtgtgcaccgcctctcgacttccggttcacccagcatttcctcttccctgttttctttcgtcgtcgtgggtgggaattgtcgcctaagtggttccgggttggtggatgaccttgagccctcaggaacgagatggcggttctctggaggctgagtgccgtttgcggtgccctaggaggccgaggtgaggggtcttcccaccctgaggtgcttagcgtagcctccagccagggaaggggatggaagtgaggactcatctgccgggtgggagatctcttgaggagaagaaaataccgaaatcacagcaatgaccactgtagtctaggggtccagatgtttacccgaaggtatatttcacttgctgtgagctgacgagttgagggaataatcagaaagagagctccctctggaagtcgcagtcctgatgaggctaatccacatagcagttctgttttctccccgttcactgtccctagaatgctccccactcgctcccaccctgagtcgggaaagagggttaggagcttgcccatttcttctggagttggtgtgtttggatgtgggagtggaggggggatcagttcgaaaatcatttaacctgggcatttgtgttacctcaggtactgtagtaatgctaggatacaaatgtgaagaaaacgtagttcccgccctcaacgagctttcattctgatgaggaaaacactgtcatagtagtccgggcaagatgaggtcctgaactaggaaagtagcacaaagaaaagaagattgtctcaagaactgttaaagagatacgccaataggatttggcgattgaatttaggggaaaagtctctcatgatttccagattactgagttaggttaaagaatgcctgaggtgtcattaaataaagtagggaacatgcagatgttccctggtcttaacttcacagtaaccccagtgaaatagatgctatcttcattttacaaataagatgttatcccct

SEQ ID NO: 56983 - DNA, 568 bp, Homo sapiens
tatctgaaaaagcagagagcagagcaatgtgtgtatcttgccttggctcaggttggaggaaagagtctcttctgagaatgtgtggctaagagccagtcctcatgccagtttggagtccgagttcaagttacctgcatatctaaaaaggttacatggggcaaatttaactttgacctaggtttgtagggcatggtagtcagcacaaatcctcaccagagagagaagggttaccccaacacaagcttcaaaaatccccataaagttccagtgaacgtgaactgtcagcaaaaatcacagtactggaatgtcctgagcaagagtcagcacaaataaacagaaccatacccacaaagaattcagaccctggaattttcagatacacattataaacataagatgagatataagtctaaatataagtcagctttctgctcagggatcagaaagcttttggagagagtggtatatacttgatgttatcgtctcaattcatagaatcttaaaaagtagatgtctacttaggagagttttctcctctggacacctgataatgagtgtcagggtcaat

SEQ ID NO: 56984 - DNA, 5517 bp, Homo sapiens
ttattatttaatgtgttggtaaaaaggcacatatatactgcattaaaatttgtttaaaaattaaatggtatgcaggagagtattcataaatctgtgctcaaaatttttctagcataatatgaggcctagcatgtatggtagagtaagcaggaatttaaaactcagtttaaaaaaaattaatctgaattaagctaaccccaaaatagttgttagttggtgttatacaactaactttgtataattttggcctcccaaagtgcttgagattacaggcatgagtcactgtacccaggccttatttgatagttttatctaggtttagttccttatgctcatctaagtgcgaacagttattaaatttatcttatttagataacattttttttttttgagatggagtctcactctgtcacccaggttggagtgcagtggcacgatctcagctcactgcaacatccaccccacccctctcacctgggttcaagcgattctcccatcttagcctgggactcccatctgggaccacagatgcgtgccaccacacccagataagttttcatatgtttggtagagacagggtttcaccacgttgcccagggtggtctcaaactcctgagctcaaatggtttgcctgacttggcctctcaaagttctgggattataggtgtcagccaccatgcctggccaacacatttaaataaaataaaaactgatgtacaaatgaatttaaataaacatttaaatattataaaatttaaatatttatcaaacatttaaatattataaatattaaattttataagctatttataatatttaaatttacaatttagaattatcacctagttttttaaaggaggggataaggaagactcttagagaaaaataatatagcaaaggatgaaaagatcactaagataagtctaaacatttttcaccaaaacccaaaccaacattaatattaaaaatcagaacaataatgactaggctgtgagctccacgagggcatgttctttattcacctttatggcttcattgctgaacaaggccctattatcagcatcagaaggtgtttgttaatgactgcattaactgagaaggcagacatttgttaacctgagaggcactctatgttttgattagttatcagttggtgaaataatgattagcatgatcttctgtacatactttaatattatgtaatacacacatatttatcaaactaattcacctgaaatgtaccaagcagtatgggcaggaattggattaaattactggtgtttactattttgagtacatagttagtcaatgagtgaatggatttagagaaggacaatatttgagctgattcaccagttaaggtttgagcattaactatgcatcaggaatgtggccagtagctgaccaaaccacacatgaatgagagttggctcctactctccagtgactcagagtctagtgggagagaagaatctataaagagttacaaaataatgtaatgaatgacgtaagagctgaatttacaagagattcattctttctgtttgatggtgctggagaaggttaccacagaaagtgatgactgtgctaccttgaaagagaagcaggcattttcaaggccagaggaagagcttccaccaagaagaagcaatgtgaacaaaggctaggcagcggggagaccgagaaaatatgggttgtttgaggcctcaacatttttaccataaataaggcaaatgtagtcacattttacagaaagaatgcatttctaaagatctcacatagttcaaggttaccttttcttttcttttgttttttggatacagagtttcgctcttgttgcccaggctggagtgcaatggcacgatctcggctcactgcaacctccactgcctgggttcaagtgattctctgccttagcctcctgagtagctgggattacagtcatgcaccaccacgcccggctaattttgtatttttagtagagacgggtttctccatggctggtctcgaactcctgacctcaggtgatcttcctgcttcggcctcccaaagtgctgggataacaggggtaagccactgtgcccggcctaattttgtattcttttagtagtgaggggggcgggtttctccatgttggtcaggctggtctcaaactcctgacctcaggtgatctgcccgccttggcctcccaaaggctgggactacaggcaagagccactgcgcccagccaaagttaacttttctttggaaaaaacgtaaaagtttgagaggagatattcttggagtacataaacctacaacaaccaaagcatattgttgctttctttcttttttcaactttctcagcattattactagtgttttgtagcctgctgtctccacacagcctattatggtggtactttggcctttttaatattgttttcttgcatataaacttggtttcaacatatttatttggagtttttttttttttgcacagcagtaacaatacatcccttagcacttggataacattatcatatataaaattatttaaaattatgtttaaaaagcacaataataacctgtatgtctgaagaacttctgagttatttaaagtctaatttacataataatgacatggaagcagataattctaccaagtataagagacacttgcatgtggcaatagtgttaacagtttataactcatttgacctgacagctttgaaattatgtcattctagataaactatttggaagagttaacattatttccattttgcccatataaactataatttttataccgttgcctaattcaattcacataaaatgcaacttgcagtatactttgatgaaagcttggaaagaagagtcagactacaaaggccttgtgtaagcagactaaagagtttgaactgttttttcctgaaaaaaaaaatactgacttaaataggagaaagatatggtcaaatttgtgttttaaaaactcaactcactctagaagcaacataaacaatggatctggtccgtgtgcagtggctcatgcctgtaatcccagcactttgggaggctgaggtgggtggattgcttgaggtcaggagtttgagaccagcctgaccaacatggtgaaaccctgtctctactgaaaacacaaaattagctgggtgtggtggcacatacctgtagtcccagctactcgggagggtgaactgcttaaacccaggaggctgtggttgcagtgaagtgctccactgcacttcagcctgggcagcaaaagcgaaactctgtcaacaccaccaccaccaccaagaacaaaagaatggacctgattgaacaagattggacagaggtcagacaacaactactgaagtaattttaacaattaagagttgatgaggctataaattaaggtaatgaattcaagagatactaaacagcgggatttctcagctgatctgttgtgggtcaaacagaagaaggaggaactgaggatgacttcgtagtttttggcttgggcaatttgttgagtggttacctcattcattaagaaaaaagaacgaaaatacagctcaagtgtaaaataattagttcagttttgtaaatctgagatgtgtcacagaagtcaaaagagaaagggtttcaggaggggctgctcgaaatcaaactgtagagctcctaatttacatataagcttaaacttgttcattgaatttggcaattaggaagttttgggcaaccgtagaacagtttgggtaaagtggaggcagcagatggtaggtggacaaatatctaggacagaatgggaggggaaaagtaaagacagtgactacaaactattcttttaggaagtctggctacaaagtagagagttagggaagtagttactggtggtggggggagagttatatacatgtacaaattttaatttggctccacatacatagttccaatggtaagagatctaatacattacttttcaaaacatgtcctagttacctgccccaaactgaaacctgggagtcattcttaactcctttgtctaatctttcccttgtctgataaatactgtagattctaactcagaaatgtctccagaatttggtatctcctctccatctccaacagcactgttttaaatcaagccctcattacccctggcatcttctattttaatactcttctacttggttttcttgcttccagactctcctccattgttgccacagttattctctctgccaggccagaacttccccttcccctgccttttttttttttttgcctgcaaaccctgcctcatctttcatcccgtaactcccagctttaatagttcctctaggaaaacttctctgctctttcattcctagctaattattctctcctcagagtcctacctccttcacacctgttcatgcttcttaaatagctcttactaccctaaattgagattactttgattaaaaataggtctgttcagctttcatctgagttttaagacaatgagttgtcttttttcccctgaattttcaacacctggaaagagcttaccacacagtaagaactcaataaatgttgtatgaataaaagtttgctatgataaaccttgttgccatgacaacagcgtagaaagggatgtgtagaatatatatattttttctatcttaaactttccctccacctgaaagccaatgagaaggaggaagaacaggagggaagcctgaaaacagaattttaaaaatagaataatttttctaatgtcttctccatttttccctagtagtttcttttttatttcatgtgttgattttgaattcttcattcttattttcttacaattcttcttgttagttctcaatacatctatgactgattacaagtagtgtgttctcatccccattcctcctctcctcaattttcctcttcctttctcatccgtgtttctttgctttaactctaatctatgaaaattatagtatccattggataaaaatgctttgactatttcatctaaaattctcagactactgactttttttttttttaagagttataaaccacctcagaaagatcctcccaggagtaagcagtgacaatttgttctttaaaacagacataaaaatttagttatgcaatactttgacaactagccagaggctagtgaatggtagaatttcatgatggaaattaggacacatgagttccagttttgtctggggcaagtcacttaattttaagggtctcagttccctcatttggacaaggaagttggctagtcagtctttaaggtctgttccagctctaccaacctgcaattctagactctagttaaagctgtaaggagagaaccattgatatgtggcaaacggcctagtaaccacttcttcataattctaagacagtaaatatttatggcatatttattatacaaccagcattgttaagccactaagagtttaaaaacatactattaggctgggcacggtggcttatgcctgtaataccagcactttgggaggccgaggcggctgg

SEQ ID NO: 56985 - DNA, 3387 bp, Homo sapiens
ccaggcatggtggcatgtgccttgtagtcccagctacttgggacactgaggcagaataactgattgaacccatgaggcagaggttgcagtgagccgagttcgtgccactgcactccagcctgggtgacacagcagggctccatctcaaacaacaacaacaacaacaaacatactactagattaaaagttaaaatgccttgaacttgaaaagcaactatgattatgtttatccttgctgtggaattccaatcctgttgaataggtatgggatgaaatgagggagcatgctacataattaattacctgagatcaggtaggtagtcatcttgacagcaacaagatcaaaacctaacttttcagttctataaatcattttatccttgaacattctgccatcttattatgaatgcgtgtatgtgagtgttgaagaggtgagagtagcagaaaacttaaaaaataagtttttaagtttttgtttttgagtctgtagactcaaagcaaaaaaatcaaaatggaactgatgtagtttaaatggcctagtttgaaaaggagaattgagttgaatctcaaagaatgcttaaagatttgaatagatagagaaggcaatggaccagcatttatgtgataatcaaaacaatgttgtggtgggggtgaactgaatagagcgatgtttttttcttttcttttctttttttttttttttttgagacatggtcttgctctatcacccaggctggagtgcagtgacacagcaaacatggctcactgtagccttgacctcctgggctcaagtgatcctcttgccttagccttttgagtagttgggactacaggcacatactaccacatctggctaatttttgtatgttttggagagacagggtttttgccatgttgcccaggctggtcttgaactcctgagctgaagcaatccacctgccttggccttccaaagtgttgggattacaggagtgagccactgcacccaacctgtgatttttggattgtagtggaacagtcctgctattttgcagtgaacacaaggtaaagtcggattagattatggagggctttggaaatcaggtaaaagagtaaatttaatctcacaggcaataggaaaacattgcagataaaaagttattttgaaggaagtttgtttgtttttttgtttgtttttttgagaaagtctcgctctgtttagtggctgaactcaccacagatttggctatcctgggctcaagcagtcctcagcatcctgagtagttctacaggcatgcaccaacacacccaggtaattttttatttttttgtagagactgtgttgccctggctggtctcaaattcctgggctcaggcctgcctgagattctaggcatgagctagtgcacctggcctgaaagaagatttaatagaacgtaaagtagctgaatataggcaaaaagacgaatttcaggagtcctaaaatttagggggtcctaatttttgttattcaacttcaaacagagatatttattcagccctttccttaattgtgaaagaaaattatctcggggaatgctatattatccaattgtagcccagtccaaaggtgtggcagatttcacaagatgactaaccatgggcaaattttttgtttgcttttaatgtaactgattctgtcttgagattccgtttaaagagaagcttatttattttaccactctaaagcagcaattctcagggagttcctaaagtgaaagctatttctaataattctaagacgtaatttgtctttttcactcattctctcatgagtgtacaacagagtttaccagaggctacattctgtgcaatattgcaatagtctgaatgcaaagcagatgagaatccagcagatctatatggcttctattaaaccagttaaaacacttgtaaaaataaaaaagtgtcactctttatgctttttttttgttgttaaaaaagtacatagttatttttaattaaaaatgttacttatgctaacatgtgatgtgcttagtgtaaagggaacatgagagcaaaaagtttgagaacctctcctctaaagtgatactctcccatatctgataaaagaaaaaaattctactctgactttgcttatatttcttatgttgatactgactgctcatcgtagtgatgctagatggtttatattcctctcaattgctttctagcttatttacctctaattgccatggctgactttccaaataaagaggaatgatatttcttacctgcgacaaatagtttgttgcgagaggaagcgatctggaaggtctgaggttcctttcctcttcccgaagctgtgtagactgcagcaggtggcagccgctttagcagccagagttggcagccaggagggcaaaatgcactgggagacaattccttgctgactgtccaggcagtcgccaggggagcaaagggctcagcaagctggggagagaatgaggaagaaggtggagggaggagactgctgtcggcactccttgggcccgccttcaaacaggctctttcctagggcaatggaagtcgaaataaagtggcagaggatacgagtacttcttttaatgtaatatcactattttcatgaaatcttttcttccgtaaaagttggggctctgtgccttccaaaacctgtacctctttctgagtatctctttctgactttaagaaagcacctccttagtccattagaagcatcttcttttgtcatctgtctctcttcattttcagacttcctggtcacacttcagcacaaaactttttcttattttacaatgcggaataatcagtcctattggggtaattcctacaatgttacaacacttaaaatatttctaaaatgtaacattttaaaaaaaggaacattttgcaaatattttcttttactttataacctcattcaggacttccccttcctcccaagctcaatatggtgtcaaaggatagttgatacaggccattaagatttacttttcagtggaacaggagtccattttcataaaacttctttatctgctgtatcagatgcaagccacacggataccatcattagaattttatttaataatttttacactttctgcaacagaaagtaagcttggggagagggataccaaaattcaggtaagagggcaaatatttacttgcagtttccagtgttaaaactttctattcctggaatgatagcaaagactgacctaaaatatttgaaatacaatttaaggatacatatatttagggcttatgttcaacatgttaaaaaatagtcttataaaatgtaacgtttgaagagcagagtgtaaatatcacagtcttgaaaataattagtggaaacaaaatttcttagccatttttttcttgaacatg

SEQ ID NO: 56986 - DNA, 1885 bp, Homo sapiens
gatgacagccctttgaatattttaaagctctagataacaatatcatctcacttattcctacccatttagcttatgcaatggaagttaatatttaaaaaataaaagaaaataaaatgtccatggtgttctcttaatctgatgaaagcatttatgcattaggtggaatcatttttcttggaaatattttaagaatcagatggacaaccacctgtttaaatatcatacagtgtgaaggctgtgagatgaattccatgagtatttcccagacccttgggtttaatgaaccattaaaaataataacagcaaccatgataataaggaggaggagataaacacagtggacaactctacattttaccaaggaaggacactaaaaatgtaagaatttttaatctttttatttcataaaacttatctcacctgtgccccccaaattaggaaggacatggtatcagaataaagcacagtcactttaaagtgaatatatttgacttgatgaaaactttatactgctgaagagtctgaaacaataaagataaaaattaaggcaaactaaaacttcattccttttcccttcattttaccacagagggtaaaaattcaacacagattgctattgttctgggacagtgtttgagactccttacttcgccatagttatctaggctagtattatgtggcctatatttcacaatattagcaactcagattaaacacattgagcgcttattttctaggaacttatttaaaacaaccggcttcttcacaaacagcaaataaatatacacacacagaatacttccaagacttaatgataactaacatttaatcaagcaaaaggaaaaaaaaaaccttagtaatgtatgtaaatgttaaatatagttctctaagatgtaagattttgtacctggagcttatggatgtgtgttattgacctttgtgttatgaggtaatttgcttttttttttcttccacatccactaactgggcgtaagcttggaatgtatatctttgaaattgcaggtcaaagcctccgcattaaagcacccgatgaggcaaagctacaattatgtgagccatgtgtgttatgcaacactttttgatagctgttgccaattagacttaacttattgacacacccggggaagaattttctaagaaggcgtgattctgaacgtttggttgcaccaaagaggaagagggggcagtaactgaggctctggatctaaaagccttgcttgtgggccaggggaacacgtgattaaagccttcctgcaaacagagcatctgcaaacgcagttttaaacccttcctgcaaacaaaccaagtaaattttactcgaaaagaggccgtggatgtgctattttgtgttcctttgctgagattctaagctgctgggacacacaccggccttgctttggcaagtcttccttgttctttcttgaccagtttcagattttttcctggttcaaacacacacagggtggcagggagagatttttgtttcacgagtattccaagtggaggggaaagagcgggagaaaaccgggaaaaagctgcctttccgtggggcctggctctgggaggctacggtggggaagttggggggggtggtggtgggagagctgtcacgtgactcgtgcaggggctgctgggagtgcggcgcgcttcccacctccacccccgaagtccgagcaccccgcgcccggggtcttcactccctcgcgttcgctgacgaggaaggtccccataccgcgaagtacattggccttggggtggggctggagggatgggcgcctgtgagaatgtgacggactgtgacacaaggaagggtgcgaggatggaaacttcctctgaggggctctagtggggcggaaacaacagt

SEQ ID NO: 56987 - DNA, 3314 bp, Homo sapiens
tgatatgttaatgttaaaagcaactctgtggcagtgctgtgggagttactagaagaccttttggtaagggagtcagagaggtagattttaaattggatttttgaaaaggaaaggggatatttcaggcaggggaaaagtttcttcagtggcacagaagaacaaacgtatcatggtatgttagtcactttgctgggatgataattcatgaaggggaatagtgtatggtctaaactggagagcagggacaatcttgtttcttggtattcttactttgtagcacagtatttgctacattggtgctaaaaatgttaataaagtcatatacattttaagggcatactttcactcatgctagattgtcagaaaatgttctgtaaaattaatgaatagaaaagaaaaggaaggatgaagtgatttaaaggcagagaaaaaggatgaaaggtaaattgttgccagattgtagcgtcctctagtggcagtctaaattcggactttattctgtgtcggaatcttccagaagaggagtggcataaaaaaattgatgctgtgcatcaggataaacggacttaactgtagtgtgagaacaggtttgaaaaagaaaagtttagggcgggggagaccactattggtggtctaattttaatatttcaaacagctgcgtattatagctagggtgtttggacggttgtcatggaaataagccccgccccttaagctgcgtcctctctttgacctgtcagtgagggagggacagtccaggcagttctgtgcgtgttcactgtttagtagtactcaaaactgccagtgtgagaggatttggaaatcactggatctgctcaatacaaaaatgttttttcgagtctttctccattttatcaggagtcattctgccactgcagtggatttccttcctgtgatggtgcaccggctcccaggtagagggtttgcccctttctcttcctcatcctcctcttcttgccagtctgcgcttagaattctgtgcctctttcctgaaggttgctgggagcttctgaagctttgtgtcctgtgtggctcagatgagatagcaattccgcagagtcctggaagttaaagaaggctgagttaggattgtttcctcatggtcagggaaacagccttcacatttgtatattttatgcaatatttaaggcaggattcagggacttggtattctttgggatttgcaataagaagaatattcaatatttaggcttttctaaattgaaaaatcactgccacacgttctaatgtaattgtttggtttctctatttgcattttgcggggactgccttaaaactcatttatgttttatagccttctattatagttaccattgttacatgattttatgtatagaaattggctgatctagagctttcagaaatcatactaatatgcactataaattttaaaattacttaatgtagtaatttaatgtttgcagtatgcaagggaatgtattacgtactggaaggagagaggagacaaacaccagaccctgtactcaaggagtactggtagtatcatttatcatacaagacagataagataaggtccatatgagagctataaacagatgctgtgagttcagactaaggagaatcagttcttgctgtaggtaaggggaatgctgtgtttataaagcaaatgacatggcaactggatcttgaaggatgagttaggtgagtaaatttcatctgaaggagttgggaaatatcctagatgaagaaaattgattggcgggggggggggaattaaacattctattttgacatgttgaaagtcacctgcaagaagtaattgatgaaattaagagactagatgagattgccaagggagagtgctgagattaaagatccaaggtaggaccttaggaacattcatgaagtggtaagggggataaggagcccataaagggaattaacatttggaaagcatccactatctttatatttgattatgacaacagacataaacaggaagtattaacctccttttatttccattttatcatggaaaaacctgaggctcagagacattaagtaacttgcccaaggttgtcagctaataagtaataaaactagcagaatgcagagagtagttatagggcagcaggaaagttagaataggacaatgtctcagaagctacgaatagaaaggagtttaagaaagtgttaatgtcaaattctatggaaactttgaagagcatgtagcagattaccagtagcatgcaatagagtatacaacatatagacatgtaaatattttctacaatgtaaaatgctttaaatttgtgtatctctacttagacaaatgcccaatcaggccattcaatttacttaaaaaagtaagatgagtaaaattacatacctgaccttagggaatttattttaatctgagaataagataaatggtgcataatgttaataaaagtagagtaacataaatacctgagagtttccttctctatcttttcaaagcatcctctttgtacttctgatactgtagttcccagattttagtatgcttaagaatacctgcttgtccttccccagagattctgatttattaggaccagaatggagtccaggaaactgcattttagcagtaacaccaggtatttctgttgcaagtagtcctcataccagactctgagaaacaatgctgaaataaaacacagtgtcagtgatctgtttactaggcagtcagttcttttatttcaggattctaatgctttttattctcagcagtaccaagtacttcgtcaactgaataaaataaaggagatattacaccttattggactgatcattaaaagctatgtaaatataataatagcattttttgagtattctgttctaaaagctttacataaactaactcatttattacttatagccttagaagtaatatgaattatcatcatcaccatcttagaaaagaggaaacagaccacagagaggtgataagtgcctttctcaagccttcttatttaggagagggcatatttgaaaccaaccagtctggagccaggtagagccccagctcacacccttaaatattacactgtgctgcctcttaagggaagtactgtaacactggagatagaccttgaccaattaatggaatttgcttttttttttttttttgagacgaagtttcgctcttgttgcccaggctggagtgcagtgctgcgatctcggctcactgcaacctttgtctcctgggttcaatgcgattctcctgcctcagctcctgagtagctgggattacaggggtcggccaacacacc

SEQ ID NO: 56988 - DNA, 853 bp, Homo sapiens
ctggatctaaattattgggacatactgttaccatatgaatgacaattttcatctctttcttcttcccaaacaggtccataattcagcagccaaatctttccctcgaaggtttgttttgcctttaaatgtcagtttgaatgcccctgagggagacaacctgagtccattgtcctatacttcagccagtgctgtgaaacaggctgatggaacggtatgctatgaacagacattagactaagactttgaactttaatggtgttactttattctttagctgttttccaaaatgtctggtacccaataacttttataacattcatccgagcaggttaaggttatgtaacatcgcttgcacaagaattgcagaaacagtgggaatgaacacagtgtttatctatccttcctgtgctttgaaacagagatatggaactgtctaatggttgtggaatgtctatccatttgagcttggcattagcaatccccaccttttattttttatttatttttattttttgagatggagtcttgctctggcgcccagactggagtgcagtggtgctatctcggctcactgcagcctctgcctcctgggttcaagcaattctcctgcctcagcctctcgagtagctgggactacaggcacctgtcaccacgcccggctaatgtatttgtatttttagttgagatggggttttgccatgttggccaggctagtctcgaactcctgacctcaggtaatccgcccgcctcagcctcccaaagtgctgggattacaggcttgagccaccgcgtccagctgcaatccccaccttttagataatatgtgcttagcacagacctatcattgtgtagc

SEQ ID NO: 56989 - DNA, 1036 bp, Homo sapiens
atcactcccaaccaggtaaatatatttccctatcaccagtcagaaagaaaagtagcactgagtcatctgataaatcaaggatgcacactcatctgtcgatagtttactttgattccttttcccttctcttcccctccttactatttacatacccttttatctcaatccatattttattgttttaaagttctgtttggaaggccataataacaatttgtatttgcaaaggaatttgttatttacgaactacttacacatatttagttatcaaaacaactttgtgggataccattttatacatgtggaatttgtaaagtaaacaagttgaagtagacttgcatcagatctcctggtggtaaagccagtatttaaatccaagtcttttgacttccagtctaatgtttatatcatcatgtgtgctgccaatttcaatgaactgacctccaagtccaatgtcatcagtcctggtccagtgtcccaataacactatgcactatctgacttcttgtctagggcaatcttatggcaaataggttcactttgagtatcaactttgattaattattagtggctgcctggggtgcagggctctgaggccttttaagggttcagtaagaaaggctgtgatcaattagcgatatctgccatgggctttaggaggactttgtcctcatgccatgcacttgccattcctggaattagatttggcagatctcaatctgccttgcaatgctggcctttaaacagctccaaagtaacacaaaatggaggcatttctaacttggaagaaagagtttctgtcttttagaagattggaaaggcacaagcaaaaatattaaactcaaagaaattctgtgaaggtgattgatagaaacaacttaatttctttgctgtaggtatgaacttctttagccatgatatcctttccagtccagttcagcaactgaggaaacaatttgtgagtgtataggtgaggcactgtgctaggttctggggagaggtatgaagatgtgtaagacatggtcttgctctttct

SEQ ID NO: 56990 - DNA, 1782 bp, Homo sapiens
ttataaatctctatcttaatacacagggaatgaagttcagacatatgaaggatagcagtataatcataagattttgacctaaggatacctgaattctgccttggctctgctctgctctctgtttcttgaaggagaacacaaaaaaggatcagtggcatgttataatctaggcatatatgcctggtaatccaagggagaaagttctggtaaaattgagtgagcatatgaccaaggcccaaagcataggctgggcctcttcctctgcctaagcccaactcttaccactagccagtgtctgaggattcaaggaaagggagtaagtggtgcacaattgaggggaaaaggaagaggcaaatgggcaggttgggtcctccacaggaggcaagcagtaggaaaacgtatgaaccagccagctaggcctccttggggcagggtgggagtaggggagagctttggcttgatttttttttttttcctctgagcatagctctggagagtaagcaacaccatgtgtggtacttctaacacattgtaggcctgcctgtgagtcaacaaggcccaaccagtgcctggaaatgtgatttaagcagatgaaaattccctttttgtggggagctacaagggagataagggggtgaaacctcctttcgtttatacttaaatgacattcaaggcctttcaataatttggtccccaatcaatgtttccagtcttacctctcacctatctccccattgtagccaagaactcttcaatatgcagtaaacaagctgtacttttccacatttcctttgcttacattctcttcctggaattcccttatctacctggtgaatcttaaaatccagctcaaaagtcatctcttctttgaagccttcttttacttcctgagggagaattagtgttttttttcttttttagtttgtcatgatttatttctgtgtttagctccctcactagcttgaactgtatgaggacaggaaacgtgtttattattcatactgcgcccctggcacttagcagtgcacttggcattcattagatgttaaataaacactttttttttaacttaataagtgaatgaggaccagaaggtgatagatatggggcctaccttgccaatatatgtccattggagtaccttatgggatcttttttttggtgggggggcttgggggtatttattaagtgatgctttagtctcagtctctgccagcaactggggtgtgggttgactccactcgccccaggatttcccagacttgctgttttagtggagagaggcaggaagccaactatcctctaagccccagcttgggaagctaggctagtactggggtgggggcagcagagctgagaccctccacccccacccccagcccccagcctcccagcctgagggggaggagctgaggcaattttggccgcagcctcccacacacagccctgcccttggtgcgccattcactgccctgagttattcatgatctctgctcccacatattcaccttgacactccaaaagccagccccacacccagccccttcaggtctttagtcctggggagagcaaaaggagggacaggggccctttgactgagcagcttcaaggggcctctcctttctgttacccactgaatgccagccccttgtcttcagccctcccttagataggaaggagggtggtggcctcagactgcaccccctttcttcttcttctcttcctggcatcccattctgtcccagcacagcagccaagagcacaaagcacagcacctgtgag

SEQ ID NO: 56991 - DNA, 1953 bp, Homo sapiens
atcacaaggacagaaaaccaaacactgcatgttctcacccataggtgggaatcaaacaatgagaacacatggacacagggtggggaacatcacacaccggtgcctgtcagggagtagggggctgggggagggatagcattaggagaaatacctaatgtaaatgacgagttgatgggtgcagcaaaccaacataacacatgaatacctatgtaacaaacctgcacgttgtgcacatgtaccctagaacttaaagtataataataattaaaaagaaaaaagaaaaagagaaacgagggtcttgctctattgcccaggttggactcctgggctgaagtgatccctctccttctcaatagctggggctacaggagtgcgtcaccacgcccgcctggctcaattcctgctccttttggtctataaagcggactgtggccctggggttcatccgattgagtcaccagtcactggagctttacaggagagagtgggagaggaggctcagagaggtcactcaggacccaaagtgtgcccagacgggccctaactacgtggcgtgacctcaggcggggcaaacagatcaaggacacagggtccccacccaccctgaccactccagggtatgcttaggtatcccaaatcttgctctccgaagagattcagatagcgagagacacccttaactgtctcccgaggccgggattggccagagcggaagcggagacgcacttcctaggggcgcgtctggcacgcactgcgcagccgcggtgggaggaggcaccggccgcgcggcgggaggaggtgccggccgagcaccgcagacagcgccgggaagatgagcacggaaggtggtggccgtcgctgccaggcacaagtgtcccgccgcatctccttcagcgcgagccaccgattgtacaggtagggtgtgcacacaggtacagcggcgggcggtgggcgccgggccccggaacgtcaccggggcggggccggcgggcgtgctgacgtcgggcccgggaggggcgcgggggctgctggggcgacgcgcgctggtcggcttcgtggggcttcggacggcctccagcatcctgatgggggctggagtgtccccagccctggaggggtgggggagcttgatggttaacggagccgactgcggagggcgatggcccacgtctgggtgcggggcccacacccggttctgcgactcgaagaaacgtctctgcccctaggagtcccttggtgtagaccacagggttgctgtgaaactcagcagtgttaaactcgcctatgttacacagtacctggcgcggcgtagacactcagtaaatgttagctaatcttgtatgccaggagcattggccaccatatctaatgtaattacaaggcaaattttagccccttttttaccaaagactggatgaacccagtccctggtggtctagtggctaggagaaaaaaaaaaaaaaatgagcccagacgttcagtttccgaagcagcatagttgggatttgaatcccgatcatacatactgcttgcatgcactgacgagttgattttgaggaattttaccacgcactaaccagctccaccctctggccctccgtatcgtcgtctgtgaaatgaggatgaccatcgctatctaacaggattcatccctccattcgctaaaccaggttttgtttcgtgcttgtcagggcttgtgctaggtaacggatgcatcagggatcttgtatggggtttccaatctggcctattttgtggagggtacactgagaaaattttgtgcaaaagactttagcactctaaatacaagaagtggctgagcaggagaaagtgggggtgtgttattccattttgcattgccacaaaggaatactgagactggtattttataaagaaaagaggtttatttggttctgcaggctgtacaagaagcatggcaccagcatctgcttc

SEQ ID NO: 56992 - DNA, 570 bp, Homo sapiens
aagggtttaaagtttgtaattcctagtaggaaaatattatctgaatgaataccctaatggcaaaccatggtaaatgcttcagctgcatttgggggagagggatatggattatcttcaaagcacccctgaggtacgctggtttgtattattgcaacatccataaggtgatctaggttgcttttccttcagcacggtctttatcagaaggacattactcttgacctccaaatttggctgacaatttactgataagattcataacctttgggttgccctggtattgtgacatatttgctgggttttgagccacatcctggaagaggccaccataactttgggatcctgcacggctgcaagaacctctggatcactaagaatttcattgagtccagttattccggccatcccaggcatgccccctctcattccaagcattcccccaggaagtccatctggaaaagagccatactgagctactgactgtcgtctggcttcttcctccctctgggctctctcttgctcttctcgagccttcttaactctttctattctttctttgatctctcgctc

SEQ ID NO: 56993 - DNA, 1068 bp, Homo sapiens
agaatcagtcatccccccaaaattggacatttatttcagtcacttttagggagagatcagtgttgagggcacttagtggtagagtgagagcaggggttggtgggtgagaaagtgaaactggacaagagaagttgggactcagagcttcccagtccccaaacagaagaggaactgggaaggtatttccagctgcggaagaggaaggtttggacactctctttacatggctagtgtggcttcttcctttgagaggaaagaattctctgcttgagaggaaacccactgcaggaacctgaagagaactaagcccacctaggtcagtaactggaaacaagtggctcttcctctgtcctgcatagctacacttagaaatttcatggaaaggtgtgacattttatcaagacatttggctgcattgctcctgctgtttaaccagaggattcagcagcaaacaaaataagacaaaacaaaacaaaaaaaccaggacggtttaatgagtgggacatgaattggaacaggcaggatgaactgtgggttcctgtggtggtctgacaaggatgtgacgaggacacctttccaggggcaaagtcaaggccatgtgctctcacaggaaattcccttcggttaagttcctgaagagtgtattgattttctgataccctgccttattcaggtaggacttaaagcagcttacaggaaaacaagatttaaaatgtaagaagttaaggatatagggaaaagaaaggtagagcagaatgataagagaaaggtggggtttgtgatcgtgggaatttccgtgctggcatctccgtgttggttctgttgttgcaggtactgggaggaggagatgaaccctgctcctgtggaggctatgaggtattgatgtcgtgtacacatccaaggggtggtctaattatttacaactaggctcctgaaaatcagccctgaatccagctttctaccttctcttttcaatatcatttaattaattgagtcacagaaacagcctttaattcatttaattcccttacattcttctaacttctgccatatatctcgtgatctgtg

SEQ ID NO: 56994 - DNA, 1441 bp, Homo sapiens
gtgcttgccaccacacctggctatttttttttttttttttttttttttgtagagacggggctttgctatgttgcctaggctgatctcaaactcctggcctcaagcaatcctcccaccttggcttcccaaagcactgggattacaggtgtgagccacggcagtgggcaggaactatatcttttggttttctctttttatactttatgtactattgcaatgtgtttggaatagcggaggtgcaaccaatccagattcattgtgctatctcgacctaacaggtggtcttttggttgagggtgggcacttggctctcagggattggctctgaaacctcagtggtaaggcgtcttccagagcagcggcgccccctggtggcacgcggtaggatgggcggcaaagaagcactcggcgtgggcggggcgggtgggggtcgcaaggccacttctctccttcctgcaggttctcagagatggaaggtgtcttagaggcggtgagaccaactgcccacacagtgtggtcgcccatctatgccacacccaaaaatggtcagtgtcagctggatccactccacaatttggtcagctgtgtttccaaggagcccttcttgtactgagtggtttctccttgtagctctcagccatgggtcctagttccgccatttgaagccgcgcatagcaaatgtggcccttctccgtattctctcagatgtttgagggcagcattagacatttcttcttccggctctctttcagccggcccctccagacgatggccattcctgttgccttggtccgcaggaacgatgggttatgcatgaactttgtagaacatggccttgtcttcaccaacgcggaggagagcccgttcggttccagagaggatgctgcctcatctcgtctctaaaagaggaggaaggggagcaggtcccttcacgttctctggtctcagctgagaactctccctggaagtagcgggccgtgaaatgtttcacaaggtagcatctccctctagtggccaccatggtctatttcaagatgctttcctcccttcccctggccctcgcttctcaaggttttttttttttttttttttcccccacctcaaaaagatccactgagatgtgacagggtgagctgtagattgcaaagtcccctatctggccttctgactaaaatgaactgattctgcaatggtgactggtgagacagaactcagattcaatttctatgtttctcatgattatcctaagccaaaatttgcaaatggttatacacatgttaattagtattattcccagaaactgtaaaataattgttcttcttttaggtggtttccttattgattggctttttttgtgtgtgtgactttctctgtccatctctacttgctaatggttgaactgaggtggtttttttttttttttttttttgagacagggtct

SEQ ID NO: 56995 - DNA, 2008 bp, Homo sapiens
ctacttaatacacagaacagtcaggtatttctttaggcctagggttactgtgaaaaaaagcattgagacattaagggcatgataaacagacaaggttagaaactcccgggctaggtgatgagctgtcatgaaatctttctcatttcaagcgcacaacttcatattgttgccttttcatagacccaggggtgtgtgtttctgtgcatttgtggataacctgaaaacgtcgtctagattttgtaactgggagggtccccaacctgcctgaccattaggatcacctgggggaactttgcaaaaatagttccctggcctctgcccaggggattctaattcagtgggtctgacatttgaatctgagttcaaagatctctgctccaactcgcattctttcaggcagccaggatggcccaagtggagccggcctgcccagatttgggggtcctagttgttatacgttgtgcctggggccaggctgtgtggctttttcggatccccaagactgggaaggggcgtggagcacgtgtccgttggaaccctgggggaggtcggtgctggaagcgctcatctccacctccagtctgggtgcgctgcgtgagtgacccgaaaggaagatgattcttgccgtaggaagcccctgccaggacagtcaccacctcccaggcccagtggactcggacccgagcgtcctccgggagggtttctggggcgtggcggctgagcgcggttcggggagacgcggccgggaggtggcagcagcggccctctggcagacacggtgcgtgccggggggcggggacgcgggcggctccgggcgggcgtggtccctcttgcgggcgcctgggctggtcgggcggatcccggagagggggagccgcggggacgcagcgacagactcggggtgctggcagcggcagcccacgcctcccagggattgcaggcctgggcgccggggttggaccagtctcccgggcatggcacgccctggttattctgtacccgtgatttgtggcggggcaagacgttaagttgggtgacaccgaggtgagccacggtcctcggcaccagatgaggaaccactgtctcaataaggtgtgacatggaaaatgtgtgtgtcttatgtgtgactgaaaaatacctcctttgctgacgtctaaaatttcactattagagatgcattcttttgtcctaaagattattctctattcaaggccctgggagggagcagtgcattagaacttgaactctttagggtgagaatgatttaatcttatctttgtcggcgagggaagggttagccctcagtgctcaagacacaaagaggactgaaggcgcattaattggtacttgctaatcaagccttagagaccagagcactccaggggaattttactttggagagaaatctcattggccctggagcagccctgtatccactttgtgaatgttttagagagggttaatggggtactagcacagtgtgattagttcagttcattggattatcattttgtaaaagaggcagcatctttactagtactctaataaattataaaattattatatccatttctgttccttgtaccttctttctttgaattaagaaaatggtgtggtaaggtacagtgaacttttgagccagaaattcctggcttggagacccctctctgccatctgttgactggctctgtaattctggaaaacaccctttctaaacttcagttttctcatctgtaaaatgggaaaaatgctgcctacttggatggtgattgtgagcattaaattaaattctggagggaaaatatctggtatttgtgtactgatttcaggtctcagtgctgtgtgtgtaatggttaccgtgagagcttccctgcaatccgaatttgtgtgtctcattctcagtgacaccagtgatgctgttaaacaaggacaatccggttcatggattgtgacaacgcacgctgacatcaagcagaccctgccgtcaggtacagagggcaccacagtg

SEQ ID NO: 56996 - DNA, 781 bp, Homo sapiens
catatataaatataaagacaaatataggtataaaacaaaattaacagaactttgtaggcatattggcaggattgtatcacttcttacatctggaacactatttgcttggttctcttcatattttggtctcatttagtacagtttagtcagttgttaagtacataaaatgttgaacaccacatctttgccactgtgtttactttcaagagtgacaatatttcagctgctgcctgatcgttccatctgattcattcttgtctttcagagcaaacagccccactggagctcagcactgccttctaaatttgatctgaacttaagctctgtctcctctatttaggctgaagatatgtggtattgctctgtgtgccccagcaattctaatttccactcaggaccaggcttttcttggtgaatgactcagcattttacaatctgacattttaagagaagcactttgctattaaactgaagccatatattaaagttaaaccccgaagcaagcatgggttcaacaaaggttagacaaagataagacaatttgtcacacctaccagcctgcagtgcacagcaggaatgaaatgagattcctaaacccgagcagactgggccctttcacttctaattctaatgtgaagaaactctcctctgaggtgactgtcactctggaatccaacagaccctctcttggctgcattgatagactttgcagaggggttctgtgctctagatctgaggccctggttaggacagagtattttaagtgtgtttaaaagttgag

SEQ ID NO: 56997 - DNA, 2216 bp, Homo sapiens
taaagaattaagcatccaaaaggcaagaataatgtgcacatcagccatgaacatgggtgggaataaactgtaatgtgccactgtggttcagggaaaggagtgctcggtagggctgaatggagtatgtcctgtccacattccacccaagccgcagggacgcacaggcctggcctagtgccaatactcagtcagcatgtgctgttgaatgaacaagctggggcagccagaagaagttttgtggaaaaggcaggacttgagctgggctttgaagatacgtaggtctgggagggcagagagggcagaaagagcatcccaggtcccgagaaacaggatagagcagattatgaaggtgggggcaaagaatggggttgcaaacccatggcagatcaactggaagcagcagcaaaggccgagtgacagcaagccctaaacatcagtaacagagcctggagaggaaaggatgaaggcattgattcgtgggaaagttgtgctgtctttaagtatgtagccacgaggaagatcccttgatttctgaaaatgaatgaagttagctaatccaatgaaataataataagagctattttactgtgtccttgccatgaccacagactttgctcagtgctttacgtacattacctgagctaatcctaacctctctttgtgaggtagattcattatccctgtttcaaaagatggagaaatggaggcttcgagaaactcagagaggtgaagaaacttgcccaagtcacacagccagcaaggacagagcaagaagttaaagccagttgtgtctgtctctgaagttctctcttaatggctaggtttgagtgcttcccacaacaggtacatttggctgatactgcaaaaatgacggtccctgggttaacgggaggcatgtctggctgctaggtcatccgagaggcagattggggcaggtttctaggaagtataggctcgccttgcggaggaccaggttggcacagtttgactgctgtgcactaaggcagggcacagagctgatgccctcaaggtcaattccagccacatttctctgtgattctatgactcaaaagcttggaaacaacctcaaaggattaaataaatgagggaacaaagtatttgctctcctctattaagccttggctgggagtctttcttccacactcctcacatgcaaaatgctgtttgtgggagcagattaacatttcaaaccacttcctgcaattagacgggaacacctggttttgcaataactctcattttctgtgtgtgctgagaggtttttgaaattcccatgctcagtggattaccctaatggctggtcaccagctgttacgttggcatgttgcacaacaatttattgcagctccccacaggcatttggcagaggccccagcaaaatcaggtagcaggttaatgctgacgccttcacttcctcctgtcacatggggcccaggatcctcttcagtgataagtggctcaggcttagggggagagtgtcaggagctggagaccatgtagggcagcaagaagaacccttcttgcctcagcatctgggttgattaatcaaagccgaaggtgtgggcagggggcaatttgaggatgggagtttgagagatgtatcgtctgtgaaaccgtacactgctctgtgaagccttagccacacatcattatttgtggactttataccaacattattgatggagacagcaagttttggagtctttttaaacagcaacaatcatcccctcgcccctgcaaacaaacaaacaaaaatctaggatctaggtagaaagatagcagacatttattggttttccttggatgtcctaacatcaagctgtcttccccattgcgtgtaatattgctgggaggcagggccctgcctctgtcctcagaaaccaacttgggggaggttctctgtgtcctggctcctgacctcaggacacaagcatgggacttgagccagtccaattacgcactcccacccaggactttgaatctgacgccaggacttcaaagatgcaaacagaaaggtgaaagaaaggataattagcattcatccatgggtgtcatcacagcatctggcggtggcagtgccctgacaaatgtctttactaaagtgtggccgtattacctgccctcagatgcttggctcatggcactttccaggactggagatcagttttagaagacagttgttgagtctaagagct

SEQ ID NO: 56998 - DNA, 580 bp, Homo sapiens
actttattacttttctcctcggctctcttgccctcccaagtacatggtgactgctgctcctaattgctgtttcactaaaatgcacaatgctctccattttgtgttttaaattccatgtatttctagggccttcaggatcactaaaccctccaccaagagaatgcaatagaagtggcggttatgaaagtttctggaagtggcccagtagtacagaagaatgaggatagcagaaagggttgagaaggaattaagaaagacctgctggactttactgagcccacactgatgagtcatgtggtcaaggttgagcccatgcaactttggcacagcctccaaagccagggcaaagtcactcacagagggactggatggctatggttagacctgtgcttgaaccatgcttttcagcttgggagcaaactcatatgcataatttcctttgaccctgtgacaatcccatatgatacgtttttactctcacttttcagatgaggaaactgaggctcatagaatcacccgggtcctgctgctgcgtagagggcaaagctggtgtgctttccccatgccagaggccttaggg

SEQ ID NO: 56999 - DNA, 897 bp, Homo sapiens
gagagggcagtatatagacagggcttaaaagtggctgctaaaatgggactggaccggtgcctgtgagctcaaacacaagttcacatactctcctcaagcaggcctagcatccacccccctccctagggttccagtttggttctaagtagtttttggctcacagcatcttttgttgttctctgcactgcagagatatttgctgtcactttgttgtcagacccaggaaacgttgtctggctcccagaggtcagtgactcatggactcacggtagacacacagattgtttgtgagctagggcttgctggagagtatctggataaacaagagaaacccaaatcaggctgtctctctgcctgctgagagcactgtttattgttccagcctcagtgtttggaaatgtaaacctctggctgacttttcactcctctggcttcaccacagagttcagaaatccactgtggccacaaaggctgttttggaagagctttctctctttagctgtctctgcagttttaggatgctggaagccatttgcttttctgatttaagaacatttttcctggagtgagggagggaaagtccagggtctgattggtgaggctgcaggggtggaactgggtcacctggacctgggatgcctgcaacttgtgggctggctggttaaaccatgagaggggacaggcccccctctctcaggtatggtcctggcctttagtcctggtctttcccacaactagggcccttacctgattgttggtgccagctcagaccctgggagtctggtattatggtttctcatttccagaaatgtttctttggggtcattggtgtcaggtatggggagataaagtatggctccttttcttaggaattcatagtctagttggaaagagaga

SEQ ID NO: 57000 - DNA, 1253 bp, Homo sapiens
actttaaccataaaccttatgagaaagtgccatttctccatttcacaggtgagaaaactgaggattaaaaaggttactcaaataactttcctaaggataaatgtgtgagtcttctaactcacacatttatcaatgaacaaaaccggattcacaagtacactggagactttacattttgggcaaggatattaagctaacgggagtgagacaacccttcttcagtagaaaaaaggcgagcagcaggcgctgctttagttaccagcactttgcttcctccgtctccccgcgccaggcatcgggcatcccaacctcgactttggccttcaacttggcgcgctccggagctagagctctgcggtagcgaatctgatcgcgtgtccatgcccgccccctgtcccgcctcctggcttttgaccccgtccttggtcccgccccgggccctggctcctggccccgcccttggtcccgccccgggcccctggctcctggccccgccccagcccaggcaggtcactgcgccatttcctgtccaaagctgggcgaatcaggtcggtgccgcggggtaccccggaatcccccctgggagctggtcctgcactggccttcagagccgagcagaggacgctgctttgggccccagagcatgggaaggtcttggctgcggtctgggacggctgcggtctgggacctgcatggagggcccgggacttgcggacgcctgggagcggttgctgggcaacagtgcgtgcggcctggcctctttgcgcccggcgggcagcgcgcgtctggggcaggctccgcgcggggctcgggcacaggtccccgctgccgcagccctaccgagtgaagcactgagcgcggcgccgcttcgccatcacctggctctggccctctcaccctagcgtaggggggcactggccaggcagtgaggaccctgagatccatgccctgggagacagaggttgtctcctgtccatgcacccgcgcgcctgccttctaaccttcataccgttgggcagattaattcactggactaggcctctgttccgtgggagttgaaaagatttgacctggaagaaaccctagcgattattcagttaagccgcaaccccaccccctgttttatataggtaagggtgcttcacggtgaggactcgtcgcgtgcctggtgctttacatcagtccccagaatagtcctcgtagtttctctcttactgttcccatagtatgggtgaggactctgaggctcggag

SEQ ID NO: 57001 - DNA, 1472 bp, Homo sapiens
taatctcagctactcgggaggctgaggcaggagaatcgcttgaacccgggaggcagaggtcgcggtgagccgagatcactccagcctgggcgacagagcaagactccatctcaaaagatagatagatacataaaaataaaaacatactgagggtttgggtttgttttttttttaatgtcggggaggagaaaggtgcaatcctccaggctattttattcatcaacaaatcaaggagtgggtggaggaaataaacactcatcgatggaagaaggggaagggggatcctgtcttttctattcctctcctgcgctcgctccctagcttcctcggagcttccagttgctcctcccgctctgctggtctcttcagtctccctcttcccgcggcacacccctccccaacataactccactctccagtgctctccagccaccgcctgttcgtccccacagtcccaggtctcctcgcctcctcagttcccaacccctgtgtgggctcccctccaagatccctcctcaatccacacattctgggcccctccactcctcattcagcccccacaactagatctccccaacaggccccactctgctggtccccactctgtctgcccttagcccctgactcctctctccagtcccttcacacaaggacccggagtccccttccagtcagcagacagctgccccgctctcaccttgatctcctccacccgccgggtcaggcggctgatccgggtccccagatcctccttttccagcctcccggagtgtgccaaaacttctgtcacgaacgaggccatggccaagacgggaaccaacgctgactgggtcactctcgtagccagcgccgcagctcccgtcccgccggccgtcttgacgcgaggcctgccgggaaacggagtctcgcgggcctcagaccgccgcccggaaggcgaggggcgcactacaactcccagcaggcaccgcgccaatcccgagatgggatttccacggtgtcccgtagttggcaaactgtaagcagacgcgttttcttccttagttgttttcaaagttcgttgcttcccgcccgtttttcactggaggaaattaaacgtttttaataaccaggtctaactgaacctttctaaacttcaaaaggcttacttgtaaaattatctaactgaaagagccaacgagcccatctcgatcttttttcctcaacttttattgggccgctgtggcaccagaatctacgaatggcgccctctagagttgtgtaaagaagtggcgtcacctcattataaataaaaggttgcttataattgcatctatgtacatatattacatctacgtgatacattacacatttacattacctacattacatatttatattacttagatatacataatattagtcctgtgtgaacaagatacttagtactttctgtcatattataaatatataaatgtgtcaaaagcttttaaaaa

SEQ ID NO: 57002 - DNA, 927 bp, Homo sapiens
acgtgtttttctccttactatcaccctgccctcctactacattcctttttactgaaataatgaagataataatcaataaaaactgagggaactcagagaccggtgccggtgcaggtccttggtatgttgaacgccggtcccctgggcccactgttgtttctatacactttgtctctgtgtcttatttcttttctcagtctcttgtcccacccgactagaaatacccacaggtgtggaggggcaggccaccccttcatcttcctttcaggaacacctttgctttcacttcatatctaccacagtgtggagcaggttaatttgtgaatagggaaacacatgagtcagacattcatgactccaacagaataagtccgttttcttctctgtctcgctataaagactaagcctcacccacatgatgtgtcaccagtgtgcaggggcagctgctgcagcctggggacaagaacatcaaatgtccgagtctgagctgcctggttcgtgttggatctgttgtttaccagctgggggaccttggcaagttacgtaacatgtatcacacagtggcagtgtgaaaattaaatacggataaagtgtctagccaaaagtctggcatttagccgtactcagtaaatgcaaattatttcctttcctgtcagaacctgctacttggcagcagcaacaaacaggaatggaagctggtatgattaccatctatttatagctgctgtcccagcagcaaggggagcctggggagggagcacctccctctggggatattctgtgtctgggtaggttccttggattgaggaatttaaaattattttgtaaaattaatatttgtgggctttttgtaataaaaatattaagtgataaatttataaaatgtgtaaaatgcgtaaaatgcataggtaagcacaaataaggaaa

SEQ ID NO: 57003 - DNA, 1116 bp, Homo sapiens
gagtgtcagcagacctacccaggttgtggctacaaatcaagtcccttccataacgataacctaagttcctttgcttgctctgcctgcaatggcaggctctctcctgactaccccacctcaggtcttcctctggcatttctgcaggtcctcaaggaggagcctcctgttgctcataaacctgtttgtcagctgcaattatcctgcagcatccaccttgttcctctccctgccacctgtcctccactcctgtaatcagttcaagaatcaccattggccctgccaacaattccctcaggagagcagctaaaggggatggctcctaatgccctaagtaggtcacttctccaggttcagaggcgtgctgcattcctcacagtaccagggacattccgccctccccaagctggtgctgtgctttgtcatctcagctctgaggtctcacaacgcctctcgcctcctgataaaatagccccaatatcacgagatagccattgctcaagcaagaatacacagactatgacacaagagtaaaaaaatttgccaaagtagcccaggacagttccctccttagaaaaatgccattttttttttcctgctgaaatggagtctgcacaggtgcaacttcatcttctgcaactcttaccttcttacccagagcagatttctcttgaagtcacagtttctccagaaagctccttctccttttatgcctgtccttttgtgtatgtctacttggcacgcacaaatcaaaatgatccctaggcaaatacagctctgagtacaaagggccagtttgcatcaaaggtgtattctggctttctgtgtctggtaagtcagaaaatggtttccaatgtctgttttattagctactccttctcaataaagtttcaaagctctttggacaaagtttcaatcaggggtgaggctcaattatctaagcattttcttgaccttccagggtctacatgaaagaataatttcattattattcatccatctgatcatttattcactcacttaacaaatatttattgagcactgaccatgtgctaggaaccagtataaaatggtaagacaaaatatattcttgtccctcattcaggcaaattagggaga

SEQ ID NO: 57004 - DNA, 1782 bp, Homo sapiens
agttataacattccgaagtaacactagaagacatgctcaaattgccctcttcccaagtttcttcatacagacattagcttttctctcaaaccagggttctttcactctcaccagattcttagatcagaagtccttatattgatttcaatcttcttagacattgggaacaggagatcatcatcagtagactttctattcatcacgcagctcctccccctccttaaaaatctagagcgatgaaggcaataattggggaggctgcgctgttttgtttttaaagccgggttgggagggagggaagtggtggtaactgggacccctggtcttatagaagacggtgattaattccggactttaagtgagataacttcggtctgctttaaccttttaaaaacgccgccataaaactgatttaaaagtcaaagcaaaacaaaaccaaccaacgctgccgctttcggaagtttctcaccccggacggggcccaggagggctcaccttactgatccctgcggcggagaaccccacgtccagccctttatatttggttttccaaaatctggaaatccccctacaacttcagctcgcccacggacgcgaagatgcagtcctcaatctccgcggcccgagccccgcagagcccttggccttctcacccacgctggcgggcgcaccccctgtcccgcccggccggggcgccctccgcagcccgcaacccgcagccctgcaggccccgcacgctcccctcagggcctggagcccgcccccagctcccgctcgccgccgcggagcccaccgagccgtggccgtctgccgcgccggccgcgtcgtcctgctgcagctccgcagtcatggccgaggcgcccagccgcgggtcaccggtctcccgccgcagccgccgccggcccagcctctcaggactaggccccgcccccgccctccaccccgctccgtcccgcccccgcccgcagcgcgcgccggaggcttggcccacatgccccgcccccggcatgcgcgcgcacgcaaggcgcgcggcccggggccgaacagttctgcgtgctcccgcgcacgcccggctgaccagacgtcggtcacgtgatcccggccccgcctgtcgctgttggtcagcttcacagccggtggaggctgcgggccgcgctgccagtgtccgggaactgggtttgcgaatcctgggagccgcgttcctgagtcttctccgctctctgccctcaaaacctcatttgtaggactgacctccggctccaccctccccacgggcgagttaaaactgttcccccgccgtgggaaactgccgaatgaccgtggaataaaggatttcccatcaggctttgtagccatttccaactccaatgacatgaagaagtgttcaccatctttaaggagagaaggaggatgaatgcagtcgcttgtctaaagctaaccaaacggaccaaagcctccgttcatgggtgtcccgcttggtgcccttaaccctgatgctcttaacctgggcatgataaggaaaattgcagtttttccattttcgattttcagaagttcaaactaaaattttgtgttactttgttacgtttgagccagatatttacgatttcatgttaaaagaccaggtgctcctattgaattgttttttgtttggttggtttcggtttgtttttttttttttctttttttttgagacggagtctcactctgtcccctcaagctggagtgcagccgcacggtctcggctcactgcaacttccgcctcctgggttcaagcgattc

SEQ ID NO: 57005 - DNA, 434 bp, Homo sapiens
aatgttgaaattataggcatgagacaccacgcctggccctgaatatgacttttttatgtctagctcctttcaatgacttcccatgcttccatgataacatcaaaactctttggcatctccacaaattccttcatgactaaccactatcctatgcccttctcttacctctgtccacatgaataaattccagtctcactgaactgccagcagttcttcaaaagggcctggccacctcttcccttttggagtttgctcaaactcttcctcctgcctggaatgcctgggcaggacatggcccatagctggtctacgggcttgacagcctgactcagagcctgcaagggcaactaacttttattccagttctatacactgagttcaggagtgagtatgaccaggctgtgttggagagtcaggatcaggttttcattatg

SEQ ID NO: 57006 - DNA, 1537 bp, Homo sapiens
cttggcctcccaaaatgctgagattacaggcgtgagccaccgcgctcagcctccaagggagctttaacaacgatatccacgctcaggtcccacagtcggcgcttctgacttaattctgaacaaaagcctgcagtggggcttgcacagtggtagttttcaaagctcccaggtgatcccaatgtgcaaaccagggctgagaacgcgccttgagaggtaccttccttcccactctggcctagcgcccgttcggttctgcccggtgaccactagaggtcagcagggcttggaggacgtggccgcgggtggcccagcagggtcccgcccggcgctgcgctctggctgcggcgggaccgtcagccttctccccttctggcctccagcggacggaggtcaggcgctgacttggccccgggctaagaggggacgccgcaagggggcaggggcggcctgctggcaaaatcaggcccgtgagccgcagaaagtcaacttcacttggaaggtttttaaaaagcatcccagattgaagcctcacaatcccgcccccacccttccgcagcgggagcctctctgcaccaggattctctgacctggtcactgcctggccctgtgcgcgggtgggcgcgagcttcacgcgcactcacagccagcccggcactccagggcccccataagtataaaataactattctgtcttttccgtaggaggagccagcatttggatcccaagggttgtttattttgactcactgctgtttttgctggagaagggtaaaacagaaagttcctttactttggctaagatgtggcacacataactgccctgagcccgaatttctgatgagcaaatagaagcggaccagtggttcaatcttccttcatcatcttcaaaaagaataacacccaagggcacataggattggcttctctacatttcaatttaagagaaatggaaagaagactcatctaccactgaagatacctgaactcaaaaatgaaaaataagatggcctccctgatcagctccaggttcttccttcctagttctggctcctggacacctcatgaccacattgcgcatttgcactcttagtgagtgctgctcataacagggtattatgattcctcttatagagtccacctttcattccaaattgtgaggctgctggatggcagaataagttctgggcacatagtaggtgcacaataaacatttgttaaaccaaaatgtttgttgtcaatcttgtcttcaatctaacttgtctaatatgtaaaaccaacccagagagaaacttttctagacccttctctgttaagctccacacaggtccccattctttttggtgttttgttttgttttgttttgttttgagacggagtttcgctcttgttgcccaggctggagtgcagtagcgtgatcttggctcactgcaacctccacctcctgggttcaagcaattctcctgcctcagcctcctgagtagctgggattacaggcgcctgccaccacacctggctatcttttttgtatttttagtag

SEQ ID NO: 57007 - DNA, 653 bp, Homo sapiens
tctgtcctttctcccccaaagcctcttctgaaccaacacatacataaactttctttccaggaacaaagatctcagatctgagttccttggggagaccaggccaaaatgtcagcctgactttggcttgattctcaagatcatgcaaagaagacagaaaagttgaaacacagaggaggaggggaaacaaatagatggcaacttagacaaaaaatggggaggaggcgagccgccagagtctgggctctgtacagcctgcatgttaagcctgcaaaccagttacatatccctgaccccggcggcttgaggaagcctgaatgctaaaaggcaaagtctaaaaatgggccctgggtagattggggaggtcccgggaaacctggtttcattttacaaccaacaactaggatccaggttgtcacgggaaaatactatataaacaagttagttcaaagagtgactcacacttagccaggctataaagttagctctgcccaggctaagtactaaagataactccccaacccccttttgcgcagggaatgtagggcaggagccctgggaggccctggctggctggcttggtaggatcccaaccctgtgcctagcactaacctcctagatctggatacccctctggccaccaggaatgagttggg

SEQ ID NO: 57008 - DNA, 4915 bp, Homo sapiens
ttcctttttgttaccttctccacctcttaaattcaggcattaatctctctttaacacttactaacaagggctgggcttttaatgggcagcgtttatgaagcaagggagattttcacatagagtgaatatggcacgggggtggggaggccagggccatagaggattgtgctttctctcccattgtttccagagattctctctttctctgatttgaggattaataggagattaggatcaggggttaattgtgtgcttctcctgctactgcactgaggagaggctggtaggtggatgtggacagcaaagcggaaacctccagcaggcactatctaggcagaagctcaacaagtgtagtgattctttcttctgtttccctggtgaggcaccaggagggtcttttctcctctccttacatccctccactcttgctctccttgcagcccagttctttcctaactttctttaaatccctttcctctaacagggtgtatagaccttagttagaaaaacaggtagtctctaaatgggattgctctttattgttaatgaaatgaatacccagggactgggcttcccctccgcttgccctgggtttgatgtggttgtatcccgtgctatcagaggagcccttccttcactcaagtgtgttcccctgcccagctctctccgcagactcctgctgggctgagctttccctgctcttaagagtcaggagtggctcttgctgggatggaatgacccgtctttggggctgcctcatgagcggctcttgtgaacccggatcagttccgatgtgtaaactctaccgcctggccttcagcgaacagatacagatttctgccaccttccatgaccctacagttcatgggactgggtctggggcagtgccagaggcacgcatggaggtgtgattctaggtgagtcctgcggaaaacctctggcccacccgtgagtcacggacagaacatgcagactcaggccttggtgacataagctccgcattgctaaaaccgcgtgacctcgagggctgactggcctgagaaccctggatggcgctctcggccacccccacctcccaccccaacctcctgggcttcggtcagaatccacagcccgtgcccgaagagcgcttcccgcctctggcaccctaccttcgctcagctccagggaaaaggggagagggcagctttctgcagtcagaggaagagtacattttctttggctgctctaccctctgaagtagggcggccagctgaaggaggacacacttttgaggggcccagaggttgtccaagcttccccctgccccctgaagactgtgcactgagctgggcgcagttctcgggaactgtttccacccagattgctggggggcgggggggtaggatgagggcagagccgagaggctgtccaaggtttgggagagagaaaagtttctcccaggactcgaccttggcctccagcaatcgcgacagctaaaaacgggtgtctcgcttcgacaatagatccccgcggaccttctggcacctggttcactagcgcccgcgaactctgcctcgggagacttattgaaatccggatgctcaagccgggaggcgcgcagtaaccaggaggatgagagggccgggtttgggctaggaaagcggccttttaaaacagatgtcagggggactgcagccccgagccatgagaaaaaagttaaaggcgagatgacacgcactgaattggggcaaacattggaagaggagacaaaactgcgtgcttgagcaccggggtgcggggagggggggacaaaacccgtatccagtgcaaattaaaatcttgggagtaggtgggggctgctgcgcgcccttcaccctcagttcccctattaaggattctgagtccccatgcactcctgtcctctggctccttccttcctctccgctcggccggtgagaggcggccgccggcgccccagcagcagctagatgtcaggcgaagcccggagcgcggagcgcggggaagggaggggaagggaggggaggggaaaggaggggtggggcggggagcgcgcgcgggctcggccagtgcggggtggtgggcgggctgagcccggggacggcgcgggaggggggagggaaggggggcagctgtgggcagggagccgggctcggccgccagcactaaagatggagaggcgccggggccttgcaggggagggggctcggcgttgacgtgggacgcggcggaggcgcagcagccggtggtgatttgctaacctcgcagcagagaggagttgagggcgatgagagcgggtactgcgaactgccgggcgatgctgtcgctgccgccgtgatacggagagcaacagttccccagcaacacccctccccgacacaggcacacaccccccgacaggcacgcacacccaccccacagtgcccggctcggctgcggtgagtgaggggccgggaagaggcgcaccgcccagcgagcgccgcgcgccggggcttcccggggctggagaggtctggggggcgcgcgctcgcttcggccactcggccgctgggcttgtgccttttttatttggcgtgttcccttcctgccgctgcagccgtcgccgccaccggttgggggtcggctagaagggggagccccggctgtcagcctgggcgcagctgcctccccagcccttcctcttcagggcacggtcggggtgagaggtggggggcgtagcggtgtgcgggggctgagggcgtgagcagaggggtcggggatccggaggctttgtaccgccaggggctggcggagcaacagagcccgtgggtgctcttatgtatgcggaccggtgcgcgggcgcaagataaggttgtggtttatttatttgtgtgtttattcgccggccggctgggaagctagaatcggaggagctgacgagtagatctgggggcggaggggagcaggactgggactgcttacgttttgtttctctttgagaaaacgtggtgggctttttcttgattggacttgatccccaccccccttttgcaggggagggagggaagctccagagggtctgcagcgctgcgggccctcctcggctctcggcgggaccggcggtgacaccggagctcgccgtgcgctcccggccgctctcggtgggtgccggtctctgcacctgatgcgttcgggatgcctttcccaccctggcgcgcccgccgctagctcgcacagcgcctcgcacactcccgcacgcgcttgaaatgcgcacggtcccgccggcccgcggaaccacccggacgcacggagcgctccgcaccgactcgctcgccgcctccccgagacgctcgcaccgtgcttgggccgggcgcgctggccgctggcgccgctggccagaggcctgggacccagccggtcgctcccagggggtcacggccctgggtcggagagggagggcgggcagaccccttctcgcctttcctcccacaactcgctgcggggcttttgtgcttccccttcgccgcggggcgggtccgcctcccctgccgctctcgccgcggagtccagcccgcccggactgtcgccgttcctccccgtctctttcgctttccctcgtccctagctcagctctccttctttcaggagtctagctcctcgggaaaagttgcttccccaagtttgctgaagtcgtctccaagtctcggtgggggtcgctgggaactgggggggtgtgagagcgcggtcgatccccggagctcgggcgggttatcgccggctcttccccgcgccgcctggctggacgctgcagccagcgccagccggatcgcgggcgccgagcggcgggtgggggagacggctgcccgtgggcgcccagatttccctcaggacccaaaaggcttgtttcagggcgccaagcttccattcttttggctgttccctcctagttctcagaaaccccgatgtctgcgggaaagcacgcggtggctcggctcggctgaatgctcatcccaaccttgacggcctccgtccccaccccggggcgggcagcaaaaatgtcttgaccagccgtcctgtgaatcctttctgcgtgagcttggtggctcctgaactgatagagctccttctgggggtggaggcaagcaagcagtgttcgaagagtgagggagagaccttgctgttccttgctctcagtgcattcactgcaatattggtcgctgtaagacagacacggggagggtcctgggcctgcgcggtctttctaacactcctgtaagcgaggtttggagtctaggagccctcttattgatcccgaacaggctctgggagaggcctttgtttcccagccctgtcttcccttcgtactggttgtaactcacaccacaggtgctggtgccaatatcacttccagcgcctctgagccatgtccagcatcccttgctgcccctggtcacaggacttgcagactccttggagcctgtgggacacacgtggagttcacacacccagcccagcatgagcactcctggctgtaggggaccatatttaactatggtctctctccataccttaatgacccatccttcttcgttttttagatcctcctgtccaccgggcagttgtgggcaggagggtaggtacgacaccttacgtaagtgtgtgtgtgtaaacacacacacacttttttttttttttctgagacggagttttgctcctgttgcccaggctggagtgcagtggcacaatctcggctcacggcaacctccgcctcccggtttcaagtgattctcctgcctcagcctcccgagtagctgggattacaggcgggtgccaccgcgcctggctaattttgtattttttgtagagacggggcttctccatgttggtcaggctggtctcgaactcccgacctcaggtgatccgcctgcctgggcct

SEQ ID NO: 57009 - DNA, 996 bp, Homo sapiens
gggcggcaccctggggtggctgaggtgaagacggagatgatgcaggtggatgaggtgcccagccaggacagccctggggcagccgagtccagcatctcaggagggatgggggacaaggttgaggaaagaggcaaagaggggcctgggaccccgactcgaagcagcgtcatcaccagtgctagggagctacactatgggcgagaggagagtgccgagcaggtgccacccccagctgaggctggccaggcccccactggccgacctgagcacccagcacccccgcctgagaagcatctgggcatctactccgtgttgcccaaccacaaggctgacgctgtattgagcatgccgtcttccgtgacctctggcctccacgtgcagcctgccctggctgtctccatggacttcagcacctatggggggctgctgccccagggcttcatccagagggagctgttcagcaagctgggggagctggctgtgggcatgaagtcagagagccggaccatcggagagcagtgcagcgtgtgtggggtcgagcttcctgataacgaggctgtggagcagcacaggtaggccccgctccagccccgcacctgatgtaggacttgaggccctcacacccctccttcacaccctggctgctcccaagttaggggcctggctcccctgtcttggcaatttgtgaaaaaaccagaacacttcttctaaagttctggcggggaggggagcaggttttttaaagtgtagtgagggggcctaggatctttccaaaaagcaccaggggacactcatgggcgcagcttcttaataggcccttccctttgttttttgcttttgggcccctgtttgttttttcggctgtttggtctgttctcctttgcttggagtgactgataaaatggagagaaggagaaaaggagtgggatgagggtctcttgggccctgcatctgaccatgttactaggtttcaggtcctcgggttcccatgcagtg

SEQ ID NO: 57010 - DNA, 964 bp, Homo sapiens
agagtcttactaaatgaatacaggtgtgcctcagtttgtccattggagggtttctgaattttccataactaaagattttctattctgttttggctgggtgtgtggggtgaaagctcttactctctggcagttatttaagtagtaagaaatttgctacaactcttccccacccccacgttttacagataggaaatgagcactttgactgtccaggtcagacttctgattttgctacttactaactgtgacagtggttgtgttacttaacttctgtgtgcctgtttgctcatttgtgaaacagaaataatagtagtacctacttcattgggttgttataaggattcatcagaaaatatttatcctgtgtgaggaacggtggcacaaagtaagtgctccataagtgtttgctagggtatttttcttgtcattgtgtgaagtaggtcatgctagccatgcagggtgaaaaatgtgttcatgttggtccagatcctgctttctccctgagaccgttcttccgcataggcgtcaatccgtacagtgctgtaaaactgctgcctcgggcacctcatgtttggggctgagacattgcttctgcgtcttccccagaagctgatctcttgtactgtggtggccagggtactctttgtcccattgacctgaggcctggtgagtcattccagttctcgtttaaatttagccgggcagcgctccactgccatcgggtccaaatgccggggaggctcactgatgcggtgtcctgttgcctgtgcacgtggccaggcgtgcacatcactgtgcttatgagagagatgaagagcacagataccaccttactgatgggggtcctggggctgggcttgtgggtgttgggggttccagagctccttccctttcctgcctgtcagtgcaggatgcttctaaaatgtggactcagcagacattgttttgagtgcttgctacatgt

SEQ ID NO: 57011 - DNA, 738 bp, Homo sapiens
cgtctcccacccctacaagttgttggctggtaagcaattgatgctcagaaaaatgatgttcatctgaaatcttaaatgagtggactttttctaccttccctgactttgcaggtgcttcttgaagagccaaggagaaaagaaaacttctgacctcatcacctagtcaataagctgtctgagaaacaaacaaaagagtttagactggctgctaaagctaggaacccagctgatagctttgttttgatgtccttgtaatgtttgcggatcgcagagggtgctatttagagcagggggcatctactgggacagactcactgggaagttgaaacagctagctcaaagtccaagagatgctaaagatagtgaaatacagcccaggaattgagggggagggggttcctcactcaagaaggagactttctaggagggggcgggcgtggtattttctagggacagtatggaatgaagggaagaaggttggctttagaaggaggcaccctgtgggaggctgagacaggtgggtcacctgaggtcaggagtttgagaccagcctggccaacatggtgaaacccagtctctactaaaaatacaaaaattagctgggtggcaggtgcctgtaatcccagctagtcgggggaggctgaggcaggaaaatcgcttgggattacaggtgcctgtaatcccagctagtcgggagaggctgaggcaggaaaattgcttgaaggaggcggaggttgc

SEQ ID NO: 57012 - DNA, 617 bp, Homo sapiens
tgcaggtgtactgggtagacatgtatgattgcgctgtagccctgttatggcccggggagaaactatgaaaggaaccagtgaaatcttttgttttgggcactgctaaattgatgatagtactaaccctgtgctagcagccagctggtgaaataataggtgaataatgttagtacattgtgaatataaaagtttccatttgcaaagtgctactgctgttctaaagaagccacatttctaataaatgattgcttaatcctgtgatgctgccacagccccacagagtttgggaatgtttgggaattctttctgaagtgtgtgccgcattcttttgctttgccttttgggagggtagatgtgactattggaaatggtcaaaataatgcagtagcaaatctgttgactatagtgagtgataagcactgtcggctgctgtgtctgactcggaaggcagattctggaaggggtgtgtggggaaggcttgttggctcagcactggggtgagtgttggcctcacttcttaggtgggaagtggacaaggccaaggggcttttgatttccagctactatggctggactcccagtgaggaaggagtcgctgccatggattgcctgggact

SEQ ID NO: 57013 - DNA, 1842 bp, Homo sapiens
tggaaggttaaaggagcttgtgtgttcaaatcttagcctggtacctggcatatactcagcatgtatttttttcccctttcctgacaatgttccttgccccgaacacttgaatagtggagagaggaatgtttgcttttcctctccattgaaccaacactcgcccatccactgagcccaagattcaccttaggattgtctgttggactcggctcttttgtgacctaacagtgcaggggccttgtgctgagctgcacatgctcgctctcgctggtgctccctctctctctctctctctctctgcattatttatagtaaaccatattagaacagagtgttaaagaggaaggatgagtcattcccattgaaaccattgatgacataaataaaagcaaaatgcttactatgtgttttgtgcagtatttaaggccaggttgtgctaatttgaatgctcccaaactggatctgtgaaagcatacatatgtgggaaaaaattcaggtttaactagagggaagttatttattgaaaatccatttcagtatctgctttctcccttctatttacttcagatccatattcatatcatgcttgttgttctggctaacgagagggactggcttattcactagctaaggtttgtttattttcggaaggttgaggaatagcacagagaggttgtctaagtgtccctgtctccattcctcctcttgccacctgttgaggaaggcactctccacctgctttgcaggcgtgggctctcaatgtgtccaagaatcacagtcagagctgaagggcccttggaatcatttattgcagcatgctcatttgggaggagtaagtggaggtccagagaggttctgtgattttccctaggtcacacagcaagctagaggcaaaaccaggaccctcactcccagcccactttaattcttccttcacaagcctgcctgtgactgcccaggtctgttctctgcttctaccaaggggtaggcaagactagaatctgacttgagagcagtttcagatctttgtctgtgagggatgctggggggtttctggcatggtgacttgcctcctgggacactcattaacctctctgctgctgagcctgagcagactaatgtacatcaactccttaggatttacagacaatgccctatgttgggggttttgagacccaaagattgctaagacatgggacttttccttgaagagcttatactttgagttaaaatatgtatgttgatatctatgacagagaataggaaatggaaagactatgatatatatattcagagttgaaatgacttctgtctggagtgattcattttaaattttaaaaccttgttgagcacttactgtctgctgggcacctgggtaggccctgggaatactgtgatgagcaagatagacaagacgtctaccctcctggggctttcctaatggggaagaaagatccttacttagctagcagtcctgtccgtaactgtgtaagggtgattttgatacatgttgggagcctggatgaagtagcacatgagtaggatattaaaggataagtaggttttgaagacggggacagaaagaaggaaaattgtggtcagggccaggggagaaaacaaggagtaactttctttggcaggaatgagggtgattcatgctggaatggtaggctggggtcagactgtggtgctataaatgcgtggagagagattagagaaggcagcatgaagaatggagagaaaatgagtttgaagttgagcagacccgggttcagattttcatgctgccacttgcaaactgtgtgatgttggccatcaaggactgtgaactggctgggtgca

SEQ ID NO: 57014 - DNA, 1273 bp, Homo sapiens
aattaaaaatgcagctgtgcatgcccataatcccagcttctcgggtggctgaagagggaggatggcttgaacttataagttcaaggctgtggtgagctatgatcacgccactgcactccagcctgggcaacaaagtgagaccctatctctatttcaacacaacaacaacaacaacagcaacacacaccatgaactgtagcttcttcattcctacagtgcagttattgtgtgggatagcctgaggatttggggtagtgtacttaacacactctgcacagtgcctgtaacagtgtagttgctcaataaatataactgctgtttgttttaactgctgtttctttttggactttatcccgggagagttggagccttggaaggcatttgaaaaggagagtgacgtgactggagtgctccatactgatgtgacatccactaggcatgtgtctgactgccccctgctccttccctgccttcacgagcctgtctgaaaaggagtttagtgcgtgatcatcagctcctaaggagacctctcccctgtatcttgtacctggcactctaccaagatttgatgagaggacatgaaatggacccttgccacctctcggtgggcggggaagctgggagaggggcctggggagagggggtcttcagctgtcaggatcaaaggaagtgacactctgaagctggtctgccggactgttacccgtctctctaactctcttttaatagaaacccagtctcccctcttgcctccctgatagtgaacagcgacgctatctcccgcgggccagtctcggctgtggtcgtagcactacgcaatgtctgcaaaccgacagtggcatggggagataagggccccaacgttgtgtaacgaggggcatgggctgtttgcccgagtggctcctggcccctgggtaactgctaacctcaacggaggagcgggccggccttggaaacgccgttccagggcccctcgctggttccacggatgcctttttgtggttggataaaggaagctcatgtaggccgcccacagcgcagcatggccttgggctacgggtgtttggttgttttgtttttctcttttctttgtcttttttaaaaaaagaagttgaaagggggatagtcttgcttggcacctaccacctttaacccaaaaccaaataaaacaaacagttcctaaatataaattaaacttcaacctgcagtatagacatcctccttccctgcccgaaacccactggccactggaggctagctttaagaaattggt

SEQ ID NO: 57015 - DNA, 553 bp, Homo sapiens
aatgcagagcccctctgatgtcctcagccttctacgtatttagtgatgggggtggtggtggtaaagagccttgcagacagcctggcttgggtgcttgcttgaagttcttacgcccactaactcctgccctgctctgtggagcctgctgaatggggcattaggctagtcacacacctgtcctttttcacattcatgctgtaccctttgcaaacattacgcagcagtgcaaactcagccctgggcctcagaggagccaggcgtggccaggagagtgggatttggaacggaagtgcttttgtttttggcattcactactcccccacccccactggcacttggattgtccttctttttctccttggtgtctctcatcctgtccagccttcaagacctcctcaagtcaggcttctctgggaagcgctgtctgtctgtcttggtgcttgctggcttcctcttctgtctcctgtgccatctccagtttgcaccatttgagtataagctctgctgcctcgtttgagtttaagttttatccccccagccacaacctaagttc

SEQ ID NO: 57016 - DNA, 1377 bp, Homo sapiens
tgcaaaaaccagcacgggagccttagaaattctaacctcctcgtcctctttatttttatcttgagtcaggtgggccaagaagcaagggaagagtccaatataacatacttaatggatggaggtaatttccttggactgttttggcagaaattaagcatctgtatttagataaaggtagtggtgggttggattttcatagcataagcatagttgctgaagatcaataatatcaaataatgggttcttggtgaggggaaaaggaaatgggggaggggtcttttcactcaacagtttggaaatgctaatgattatttgtggttttcagcccagaattcttcatatttgcttgcaagcttctatggcactgccgaattctacagtaaatatttcggacatcctcagccctgttctcctttcccttcagtaaattacatattaaagtagcctggtaactgagcactggttgctgtgagataagggctgggaaatcaatatgtttgccatgtggctgcttgtttatgacacctgcctctagaacagttgagcaatgttctgtttgttaaagctgcatttcagaagcttgtatcctcctaaaacaaccgtgatcttactgggggagagagaggtgctacaacagatattgattttagtttttctaagtatggaattacacttctaaacagtggtcttacagcctgtgattttttccccatgaggaggagatgtagatactctgaatatatatatacacatacacacatatataaaataaatctattttataatgtttatgatgtggtcagttaaaaaaggagtgtagtttataataaggaagtgtaggtattatttagatttatctcctctcttggcacctggcttaaaaaaaaaaaaagtagtaacaagaaacatagcagctgctgggaaacatgcattttaatctaagtctccagtgtggttttagtttaaccagtggatgatactgtagtctcaaggcttagcctgctggtgagtcaatggttcttaaagctgtgtggtgtcagctcaagtgagcgaagcagtgtgtggtgtgtgtgcattggagggtgaggggtatgaggaggtagtcagccttggagggagaagggagacaggctaggtcttcttcacgtggccttccattttggaaaacagaagcgatgatacaacttctcttcttgcccaagggattcagtagaaaaaaatacatttccaaacacattgcgctacagtcattgaacttcaaagtgtaaagcatggattgtgttggtgcacttgtgggtgcccatgacacacactcttcaatgctcctgtgccttcctaagaggtgtctgtctttctcaaccccagtgtgtgtcctct

SEQ ID NO: 57017 - DNA, 1903 bp, Homo sapiens
ctgttactaatctgacctgggaagttttctttttcgtaggggaatctagaaatactccagggaaagccacggccaagcctttgcccagccagtaaacttttagggcttttgcgtgaggttggtttagaagaatttgccgatgccaaggctgctatgttggtttcactgatgcagatttaaagaaggagggccagtgagacctcgggaataggaaggcagaggaaacctttctattctgatgtcttcaagtcttggtgcttgaatgtgccaaggagagtgaggatgtaaataatttagtttgccttcaggatgcaggatctaatctaaacatgattaagctgatttgattttatagattggaatttataagtgatagaaactgatgaggttaatgtgaaatatttacgtaataaaaagcttcattacctgatgctgaagggtagagggagaaaatattcttggcaacatgtttaatcttttggaaatgaagttgggttaaagttttctttgtaaaaactgaattctgtgatcttgtttttacacatgctgtgcttaaatattaacaccaattgagcaaattgccttttaactgcctttatttgctttcattaacagtataatttaaaagctcaagaatttgcatggaacctgttgtgcatgttggggggaaaactattcataaattaattaatcgtgagaacattatctttaaggaaggtcacaaaacatgagcatgatttccaaaaagcagtgacatgtttttgccgtttcttggggacgtgatgtacttttggcttagagatctgtgctgcgtgtgtgtgtgtgtgtgtgtgtgtgcacgcgcgagataacttggctggatcaagaaaaattttaatgactgggcatgttttaagttaagttgagtgaacctaattacactgtagtttccagagagctaaaggcaataataccattggtatttaagcactagtttgaaaattaaagccaacctatataattggctgtgctccttagatggtttatttctttcttccctccatttctgaaatcccccttttctttctctttcacatttaaaccaatagagagaaagagagaaactgcctagcgctgcgaaccacaagacggtccttccagtggggaacattaactgcattgtcctctcatgaaatgacgctaaataatgttaaaggtttccagtatgatttcactgaaattggttgcttccttctgtacagatgtttttgtggtttagaacctcagccaaggcaaacattatgaatgagatgcagagaccaccatgtcctatgaagggctgagagttcctttgggagttattttacttgtgattctgacacctctgttttgacaaagcttcattctttcagtctcttctttccgtctccctctcctggtgctattggtttgttgtgggtggttttcctaattaagttaatctgcaacctagtttttctgggtccacagatgccagaatgctgaatttatttatcttgaatgtttttgttggctactgttgagacacattcttcctcttccccttttaccccaagtctgttttaaacattttttttttgaggcttccagacgcacttcaataaagaaagaatttctctctggtgtccatttgtcaatttttttgtgggggatgtatattgtaaataatataatagatatgtaaaaggttgtaaataaaacccaaaggttatagaggaaaagatgtgtaaatttgactacatcaaaaatttaaaactttttgcatgattttctttcggatttttgccttttccttgcacatttgttggttctctttcgatataaatcagaaaaatgaatcttttatctgtcaaatgcatggcaaagattcttcccagtctatcat

SEQ ID NO: 57018 - DNA, 964 bp, Homo sapiens
tgcaggtgaggaaactgaggcacagagtgggtcagtaatttgcacagggttctacagcctttgagtggtagaactggaatttgaaatcatgactgtctgatcccagatcccaaatccttgcccagtatattatactcgcagttttgtagcttttcacagacatttccaaattctgagtctactctcaatgcagggtcttctagcataacctttgttcctgttggcaacacttcattttggactgtcaagatgcatttcctgagatgtgagatgtcatgaccctgtgtttggtaagtttggctgcaaggtactggctgtcctctaagacacttcctgagtcccaagtccacagattttactgaggactgaaatggctgcattcttcatagacactgagtttgcctgttccaaaaatggtgatttctatagcaaccatttattctagcagatgtgtgcctggtatggttggcagagagggtgggaccaaaaatggaaacggccttttattcttcacttcctgaatgcacgccctgtatgtgaggcatataggaggaaaaacatggcatccttagaatctgtaatagatctatggctcaggaaagaaatacgtgttgcttcagactgctttttatctggagcttgagttgggctgtgtttggtttgtggcgtgttctttggcagatgtacctgttggtttcaattcaatggatgtttgtcatttggtctctgcagaatatgcacatttactgtgggggtaggtggctaataaacagagagaagacactggcttggctcttaaagatcacgacgtctatgtaaatgtgtattacatagggctttttttggtggaaagtaaaataaccaatttatgccagcctaagttaaacaagaggatttaatatcataataaaggaaggttttatggagcccagggacaggagcatggccccatctttgaaaggca

SEQ ID NO: 57019 - DNA, 1269 bp, Homo sapiens
tcatattttaactcaccctcctcatctgtgaagtcattttttttaaacaatgaaaatggataaaagaaatggaaccagagagagaagcaagagagaaaaactttaattaagtgcctattgtatgatagacactgctgtgttcttttaaataaatacctttcagattaattccaaagctaagatttagcaattccctggttctgggattatttggccctaggatcagataagccaccagtattcactgagtcattcagactccagagttgcgccagatcccatggaagatgcaagaatgcatataggctgtagttccttctcttgggggttgagatcacacagctgtatacccatgtgtgcacacacagagacagatacagctagtggatcatgccggggggaactatacattccagtgctccagaaattcctggcatactgtgcctggggtattaggaaggtgacttgtgagtccctccgtgggacactccacctccttatggcagcttgtggctgccatgatgaaatgaaacacccactcctgaagatgtacaatttgtgagtgtggtagacaaaatagtgactccctaaagatgtcatcctagtctctgtaacccatgagtatgttagattacatggcaaaggaatgacttaaggctatttaccagctgagtttaagatagagaaattatgctgggttatccacctgggtccattgtaaccaacataacctcaacggtctttaaatgtggaagagggaggcagaagagtcagtgtcagtgtcagagtcagaggaggagtgagccatgggcccaggaatgagagcagcctctagacactgaacaaggtagggggacagtctctccttgaccctccagaagccacaaagccctgccagcaccttgattttagcctagcgagacccattttgaactccttccctacagaactataagatacatttgtgccattttaagccactcagtttatcgtaatttgttatggcaacaaaagggaactaatatagtgaggcagaagaaatctgagtggctcatccttgggcaaatgggagccagtgctgatccttttactgttctcgggtgctcttgcaacaggaagtgacttgcagaagtccttttttatctgaaatgccagggaggatggactcttattcagcctagcttctattcagctcaaaggaaagaacatctgcctttttcccacatcttctctgtacccctcacttccttcttgtgggggagattcctt

SEQ ID NO: 57020 - DNA, 995 bp, Homo sapiens
gaaggtagcattgtgtctccctggctagagtggaaacatataaaaatgatcctggataaccaggagacaacatttccttcgcatgtatccaggcagaacaaggagataaaggaaaagtctgtagctttttgaaaactgttttcccagaaatcggttatttgtgctggttaaaagccttgtacgggagagggagaacaaaaaccctgttcatccataaccatagtttaattcccttatagggccttttaggatctggagagaatattttggatttatttttgtttcccttgggctgacatcatcaagcatgcatcatggtgccctgttttgggtttggaaaaagctcagagaagctataaatcttaaagcattttactattttttccttttccttttctaaaagcacaacttttctggtctcttaaaagaaaaagaaaaagaaaaaactacaaaagtatgtattgatctcttcccctcggatcttaactgccctggctgtaataccttgcttacatctgccaggtttttgtgcagttttgcaacatctccttaatccagtgagcataaatagaacatttcaatcatatttggctaccaggaacttcacagataagcacgctaagaccttgttgaaagagactgtatgagattgtgtgcgataagatcatcctatagcccagtgcacaaatgaaaaacttttgttcttggtgaaatttgttgatagagatatttcaaataaatgacttaggagaacttagtattttaaaacaaaggaccggttacgtagcagccagaagcccaggcctcttggttctccacagccacgaagatccctccttgagcagttgctgcagggagattagtgtgcccctttgtcatttctgacattgtgttttagcactcgcaggcagccttatctgcaagtgctgtattcggtgtggtcatggccccagggaatgccattgtccttcctcatattttcaaggctcaggaca

SEQ ID NO: 57021 - DNA, 3413 bp, Homo sapiens
cttctcttttggacagtaggggcaactgttttttactggtgtgtgtgtgtgtgtgtgtgtgtgtgtgtgtgtgtgtatccgcatgtgtgtgtagacaaggtgagtttttttccacctctacatttttctcttccgattctctttcttgtttgtttgctcattcagtcaacaaaaatgagcccctgccatgttctgaggtcagtgatgaagactgagaggatgaatctggtatggacccttatgcaggagatataatccagccagcacagacccatgtcagccccacagcctttcagttttgtaaacctggttggaaagaacctaagaaatcatctagctcaacctttgcattgttgcagaggtgtcaagtgaaatctagagaaactaagtagtttggccaaggttatttaatggatatctgcagagccaggtcccctgcactcagcccgatgtatatatatgtacacatatatacatggtcaatataccactgttttaaaggtgattcttaagaaaacacagctggtttggtattttctctctctccctttaaacggttccaaaacaaccaaatggccactgtcttccctaactctcctggtctggatccccagcagagaggcacctgctgtgtgctcccaaaacctgcagcatggaaggtgttaactagcactcagttagttcttggttgtttttcttaatctgttgtttgaaatccttggcttttattggtatatttactttatggcatacataaagagctgtattaaaaaataaattgtgttgtaaaagcattcggtaatgtttattaatattgactagtcagggagcaacgaactctattgctagaaggataatttgtggtaatacccgctaagcattcacagcttgtcaaatgactgtctaatctcaacattaaaaaaaagtgggcaaaagggtaatttcccttatgccttgagaaaatgaaagtgacccattccccagccaacattagaatgattgcttctttttctcccctgggataccaggcctcctttgtggttccaggcagtcccatggctagattttagtggttaggtatccctttgtcttagggtggttggaaattgccttgttagcaatagcttctcatatgtctgttctggctgcctggatctgtgctgaggccataaaagacagagataaagacatagttcttgcccccacagagtgtatagtcttaaggaacttataaatggcttagtcttgaatcttgaacttaatattcctacaaaatacataaggagaatgacactgggtgtgactaatggcctacttagcctggaatgtggtacttttggtggcatgaagagacattccttgggaagacatgatgtcacccttagaaggaagggaacattccccagagtatccctgatgccctatgaataacatggtctggcttagggtagaggccgctagtagaacaggctctgtttagagtattccttttacacaaaaagacacatagaaagtacaggagagctagtctgggcgtggtggctcatgcctgtaatttcagcactttgggaggccaagatgggaggatcacttgagcctaggggttcaagaccagcccagacaacatagcaagacctcgtctctattaaaaacaattatttaaaaaagaaagtacaggagaatggactgaatatggaaacactctgcagtctccctggaagttgctttggggaggaaatactgatagcctcataactttgcattcatcccttcctcttaaaattagagcacagaatgccgttgactatttcacctttcctttgtcatttgaattaaaggtaaatggacgttgaaagtgtgtttttgacttaaaggtctaaggaggaagagtgagcccattgctaaagtacataagctttccctttactcaattctgtgtctacttggaaaggtgaatgaggctagggcaaggttctcttatcaccgagcttaagagtcggttgcttttgcggctgagagcattggcagagctccataaagggacctaccttatgctgtccccacatggggcccaaggctgcatgtcagcaccaactgcccaggtcctgctcgacaggaccaggaagtttgcatggtggctgggtaagtagatgatcttggagagtgttggttctcatgggggcggcagactttttggagaagagaggatcatttaggtcatggctgggatcttacagaatctcccgtctgcttcctatctattctgagtacccctctgaagcactgagaaggtcaaattgatggtcataggatcagaaaggggtggtcataggatcaaaaagcccaaagcatcggggtgacttttgcactgatgaggtcaaattgatggtcatagaatcagaaagcaaaaacccaaagcattggggtgacttttgcatgtggagtggcctcatacctacaatagggtgagttgggaaggattatgtactgcattgatgtggtctgagtgttggttcagaggatggctcagttaggctgaaaacaaggacaacatcgtcttataaatgcccttacaggatggatttcccactttatttttcctcattcaaaggcgggagagagcagtgggtagtccagctgtggagccctcccattcacttttcccaattacaggtcctagttccccatgctggtctttccagcaaaactcacaggtcagacaatttcaacccttggattattggaactgaggtttctttctctaaaccttccctgcctgttggtctgctccaacttgagcatttgcccctgggctcaggaacctgggaagacatgtgacattggcagtgctgggacatgaacccctctctctcagctaggtagtgctcctgggcttttccctttgacatctgctagtgcagtgagttcttcgcatagccttccccccttggtccctggctgcataggatggaagtgggccgagcttaccctgcagagagtagacatggtggatgcccccttggggctcagctgttgtggtcagctctctctggaagctgaaggtagggaggatggagtatggcttgggtctctccttgctgccctttatgctgctgttgctgttctaggtaggctaggttgataaaggcttaccctgaagatgacaggttggtctaatggcttcatgcttctatgcagtagccattagccttctttgtatggactttaggagccacaggacagggtccagttttgaattggaggctgtctatgaagctgttgtacttagaatattgttaggatgagcaaaggaatgccatagatgccactttacagagagggatttctccagcatccttgatcaatcccttttgaacgaggcctcatgaggaaaggaaatataggcacggtct

SEQ ID NO: 57022 - DNA, 3575 bp, Homo sapiens
caggaatggagagtgaggacctgaagcatatggggcaatggaatctccactgagtataggatggagatgcgtgggctgtactagaactgggttactttcaaaatggtgttcagcaaggtagcttcttctcagagaagagtgtgtgaaaactctaccaccaactaaggcagtgtgcagaaaggtgcaaaaatgtccccagatgtcttccttcctttcctgtcacagtggaggctgataatctcagatggccacgtgcaattaaaccttatgaaaagacaggactagattgggaagatgtgagtgtgtggtaaggaagaaggaggtggatagaatttccattttgatctaaatgctttgcagttgcataatgtggtgatggtagtggtgggaggttgtggtctaaagagggaatagactgtgagttcacacaaatttgcacttttgctccaggaatcggttggaattctatttccacattggctgttctgcagactgtgccatggagagtctactggtagccaggtacctcaaatgcactgaaatcctccaccattattttctttgaattaggagaagccttcacttttccacattcttcctttggtagatgaacaagaattaaagatacgagcaaaccagtgctgggctctgttgaactcccaggcctgtgaggttgttccctttttctctaatgaactttatgtgctttgcccaggtctctctgccagtgaggaaagacctttgcccttgtacttcatgtgaaatcacatggacaccatattaatctctggtaacctgtatggggcactgagttagtgggtcagttgcagggcagtgaccttaccctgaggattagacaggataggacatccgggtctctgaaggcagcgaaatgcatgacaacagagtcattccgaggacaggctggtggtaacttctggaagtttctttcactgaaagataaatagcaagtgagtaaaggaggaaactcaggccacttggattagattttaaatgactagattgctgggattgggtctagaggtttgcttgggcaatcctagcctggctgcctcagtgtcagaggacatcacaatgcaccgtaagaagtgggacgtggctcagggagaataatagtgccccttagaggaccacctggtaggctaggtaaaaggatatgggtaagacttttgaatgataaaattttgtctctattcaaaatatttgatgtgatcttcatcactttataggtgatcaaacacagagagattgtgatagcatgacttgtccaaggttaatggccgagtcaggtgggaggatgcaggtcttctggctgctggctgggcattcttctttgtaccctgccacctctgtagtaaaagggcaagtgcctgtcatctttcacaccaagccaatccagttggccacgataagccacttccaccaactgccaagcaaatccattcatacctagagaaaaggcagtggtgttacccaaaccaagagtgtttatcatggtgagggatttgatttggaaccctcatggagaagagatgggagccccagaggggagtttagcctggtggtggctcccaaatctgaagaccggtcactctagtgtccctttggaaaataaatccaaatgggtgttcgtcctcctattcctcttgacagccacccttcagaagtgggcactccaggagctaacaaacccctggtgaagaaaaggatgaaaataaactgaaacccttatgttgccatccaccagattttgccatgactgtgtgcgagttcacctgccaaaccccttatgaatagagcctttgccactctatagaagaacatctcttagaacagcaagtatctatcatgcccgggcaagtgacaggaatactccaccatcgtgtgtgtttgcatgcactcacatacccctaggtatgtagtttaaaagatactttgtccaaaatgctattaggacatgtcccagtgcccaacattgtgaaatctatttagagttaagaatgttcagttaaaatgttctgtactgttaatatttctcaatttgggtggatcagcatggcaaggagcaagagaacatgggggggtggtacccctacagtgtcatagataagggtgtgtgtgtgtgtgtatgtttgtgattgagaaatcatttgtctttggcaagtggggaaagggaaagcatgcaaacaaaacaatgtgattgagaaagagctctgctgagagaactttgtgtgatccctatcagaaggccgtacacagtggataccatatgctggtcctcatgctgtgggagcccattgactgtggctctagggaggctcacctgggtccaccacatggtcttgacacactgctgggttctcattctgggacttggaagggtgggtggctcggttttgctaccatctagatactgccagcttgagtgtgtaatactccctctccccacctgcagttttatctgttgtcagtaccagctctccagccttttactatggtcttaacacatcaacattttgatggagatagagggccttgttttcccttctgcctgccccaccgcccacagatccggcttctggctgccacgcctgccctgtcctgagggccaaggcccctggggacgttgcagggatggcgcagagactggggcggaggtggaggccagatcctggatccggcaatagcatgtatgggcctgacaacaggagtgtgggtgggcggcagcttggagcctctccccagtgctcggctccctgctagcgcacccggttccctgcatcttaccagctcccgtgctggctcgtgactgagctaggggtctggtgggagaggccccgggttgggggttgggagttgggatgggagcactgctgtaggttgggcctgtgaccggttgttactgggaccttggtcttcccaggggtgataacatgggcctagcccacctcacagaatcacagtaatggcaaaatgagagcatgtgtatgaagagctgcagatgactatgaccaccctacatttatagaatgatgttatccagtttcttgaaactctgctttctgttggggcaagacagagggaagacacttctaaagctgggccttaggggaaaggtgtgcatgttggggtgggtcattgcagtcctaagaacatctggatgccagagaagtatcttatgtctataagggcatcaatttattcacaggcttattcagagcctcctttgtgtcagtcactgtagtggaagttggaggtaggagagagaaaagatacaggtgtagccctcctgggtcccatgggctcgttcacagtcaccacccgggaaaggcagtgctacacagaggtgagcagaggctgtgggcctcctgtgaggtctgtgctagtttgacagtgagcattatgtctgtctgactgtcctgggtgttgcatccttcctccctctggaattggatctgattttttttcttggtccatgtgtcagtggtaaagcccgtggacaagaccaggaatgggtgcttcactggctgcagtccctgggcagagggcgtgat

SEQ ID NO: 57023 - DNA, 11381 bp, Homo sapiens
cttcctgtgggccctccccaccctgcccctggctccactgaatcatcctcctcctgcccatgtgtctcacctcagcccagagccctaacttccaggcatttctgcgtccggatctgcttgacactcacgtacactttttcttctgttttagggacttacaccttgtatcttcatgcttcccttcagctttgtacgctacttaaggttcagagtgtggcgggtttcatgaactatctgcctaccaggttggctacccttcccttgctttcttggtcttgattttttctgctttagcccaccactgccttactgcagagtgtggtgcgtcctgccctagacccctgtgtggtgctgggcacttctggggcagtgcacttctagcctgttggtaaagcgtctttgccctctcagccgcagtaagcgtcctttcttattgctctttccttgagtccagtgctgtagccagactcattttcttggtttgctttatgggcttgttgctttctgggctctgtggctttgtttgccccattctgtctacttggaataacccatctcccatcttcccagatcttccaaggtcccttccatgatgccatccccagctgttccccacctccagccagaagcagtcgtgccttttctgtgcccatgtttctttatttgaagctatctttgggtgcagtttttcttctgtgttacagttatttatggacttatctctcttacttgggaggcggggttacatggtggaaggaatttggacacgtacctactgctgatgtgatctggggcaagaaccataagctcttacagcctcagtatcctcatctgtaaaatgaaaatatttaacgctatctcggagaagctgtgaggctcaccttgaatacataccaccatagctaacatgtcatggggttagatcctgtccacgttatgtccagcacactgcctggcacattattggtgccaagaagtatttgttgagtgaatgatgcagcctgggatgccgatgaacagggacactcctctctccggacaagtccctcctgtggtaggaactgtttatgtcctaaggactcactggaggggacagccaggagcccctggctcgtattgtatccctcttccaggcggtgtgacccagtgtgagttagccagtgtctctgctgtgaatcacacatcagcagcattggtggggctggtggaagcggctgcagaaaagaaagggttgcttgcatactcatgtcaggtgggcccggtgtccccagttcagacaagagtgtgactgtgcaactgccctgcggagctggcggttccctggggaagctgactttggttccacctgagatgctgcttccaggtcccctgatctcatatggctgctccagaggctttgggagttgggtcctcttttcctagtttttcctttccatgcctgtcttactgggcactgaaggctgattgtgtcaaatgatttgtccctctgctagtcacttgccaatgcccttggaaaggatgatttgatgattaggcaggtgcgatgagtcatagtagtgttttaattcacccttgcagatagctcacggcctatattctgatatttctattcttttttttctttctgttgtccggcatactcctcacctccgtgctgagaggtcttgaaaataaaatagcacaaagggcttagtgaggctagaccatttcctgaattgtttggccactgttaaacaggccctgggggcctctggagtgacctggacttgttggggagttggggtcagagggctgggctggtggcgctgggtcttcttacagattccagtagtggtttacatgttctgatgcctgaaaacagaactaggtgatgttttagaagagacattgaattagatgatgtgaggttttcctgctgctctattttgaaggttccatgaagaaagctgacagtgagaatgggtgtgccaggtctgtagagtagacccattttacagatgaccaagggttcaagcagcccacagcctggaagaacagtagttgctccagaaccctgggcgggggaggcgggggggaggcgagcattttttttcaaaaggcgcaggctgtggagaagtgagtccaggatctgggtaggggttgtggttgcccccctaaatgttgctgcccttgcactggcacattcctgctgttttcttctgctcagcagagccgaacggctctcacttcctggctagctctgtgtgctgccccaccccctcttggcgagcattgcctgtgtttgttattgtagtcctggctccaggccaggcctggctgcgagccagacttgtgggtacagtatgtacagtgagtgctgagccaagtttgtcatcatacaccattaattttttttttctaatctggttggggtggggtgaaggaggaggcaagaaaagagtttctccgatgcttgagaataggccgcattgaattccgcagagatgtcatttctgaaaggcagacggagctccggcttgttcttccttcgcagtttttcctcctttctctccctgtcgtcctcctctcctcttcatttccctatcacgcgaaatcagcctgcaggagatcgacaatgcaggtcttattttcagtgactagaatactaaatttacactgctaaatcagttttcattgtgttgaaattgacaatttgtttaattagaagtttgccctgtaggaggcccttctgagagacagtgccttccctttttctctctcccttactttctgttttaagggtttttaaaagagcctaaatggtagtagtgaatttcagtttaattgaagttttaatttcaattcgaatgtgtgaattaatcaagtgtttatgggctatacctgatgatcacaataagtttaaactaactatcaataaccaaactcattaactaatgagatgatctggccaggccctgcattctcagaggtggttttgggggtcagaagggtttgcgtgttggggaaagaggcttggggtgggaagagagatgacctccaaggctttgcaaagctagccctgatggagggtgaagcttgggtgtaggactgtggcccttccccttcctgtgtcccaggaagactctgaaacctccctcctcaccctctgctaccttaccccttttggggatctggcattgaagcatctgttgatccactgtctcttcgccactccttgtcgtaacacgagaagtgattcctagctctgaggtgtccatgcagagaccacagacacatgcagtgactcaaattggttctgagatgggccagtgtaaggtttcccattaggtagatttcccacagcttggcttaacgtcctggtggcttataagtgagcatgcctagaactgcttgtccctatttttgactcggctgcatacgattagggtttgagtattcatgtggcctgctcctattctgggagtgtcattcatttttggagccagaggatgtttaataagcacgaattgtgtgtcaggctctgtgcacttaacagtgaagactgctacaacatccctgccctcaaggagcttaagtctagagtgggagatgagtatgactatgcaatcatcatacaagatggtaatgtgtgcaaagtgctaagaaatctaggagaaattcagagtaggagagtgttttgtgccagagggtaacagaacagcattttgaaaggactcggtgaggggaagccgaagccacctatggaagtgggtggtgtaacctgcgagtgtaggctgggcctgcagggagagagcagagtgcagggtttagaagagatggacgagatacatctgtggaaggaatagcaaaatgatctgcattctccctgaagcactggagagccactgaaggactgagtaagagggtgacatatttttgtgtctggaatagaagggactgttgggcttttttttatgtagactaggctagaatataaggtgaataaagcctgttggagaacttgaagactggccgtctgtgttggggtgtggctggagtgttgagaggcctgtgccttctgtgctggttagggccctgtggccccattctgccaggtgggaggccccatccttccactcctctcttgcccttgtcaggcactgtaggccctggctgttgagaagcatccctgagatgaggctcttccccagagttagagccatggggaaagaatgaaggctttcgttgatagattttctgatttcagcagcagcatggagtggctggggcttatcacctgggacctgggtcatcctcctggcagggaaaagggctggaggagtccttcagattggatctcttaggctttcctctgtcgcggttggacggaagaagaaaagcattacaagatggcaaagatctgtggcttgtccttgttctgttttatttatttattcttttttggagcactgagctgtgggtttcagtttcttctcctcaaagacagagaagatgggggaagagaggtagctggaaaattccctgtgactgggaggagacagtgcgaggtggtccccacgctgatgatgggagaggtgcctttgagtccaaagatggcttcccctcatcttgtctctcctcccattcacctctctcctcccagattaggtatctgctcagagcaagagacttggggctgcccaggcttgtgagagcccatggccaatccatgcaccctctgcccactctccagtcaataccagctatcccttctggttagcttcctaccatcagggcaaacccgggagatgaccaggaagaaacttcgttcatgttccttgactccctccacattccttatgtgggggcgcctttggtttttgggtcaaggaagtggagaagatcagatgggggtggctcagaggccaggctgccctcccttcggtccgcatgggtgatgcggatgcagagagtggaaagggtgaagggagccactttcccccagctcgctcttgaacacacttctctttctctctctctccctactctgaatttggcttgcttcccgaactttttcccagagtggtgtcgtcactggcctgccggcaggtctggatgttctgccagcattccagagagtttatgatcgcttgcagatgcgcctccaagaacacactgtacccaaagcagaaattaatgcaggcttgactaccgtccaagcccgtacacgggagagaggaaaaggaaaacaaaaactgtttaatgctgtttataaattatacactggctgatgaaaaatacatttctttcctctccccttttactctccccccaacccgtcctcagtccccccccaaccccacccccaccccttctcgctttctgcctcaagagcctaaactgagaccagaagaatatggttttgctttttagctcctgttttggctgggatccgaaaccctgctgctgattcacagccagagtatttttcccctttacctgatgaaatatactgattttccagcccagatggggtgtttttggttttgttgtgtgggttgtttttgttttttttggtttttgttttttggccagggattttgtttacagcaagtatcaggttccatgatggtgctgggtgcgatgctggccccagggcagataaatcccccacgtaactgccaccttagtgctgcggttttgcgtgcctgggtcccccggtcctagtcaggccagctgaaccgagaaagttgggaaagttcattgcaggtcatggttttaaacagtgttttcaccagttctctcccaccccttcacctacagcccctgtgtgaagagggggttcacatgtccctgcccccaaatacacatgtctctgtctccatatggtgccttagcaggggttggggaagctcgttccatctacccctctggatcccagcatctcctcccaccccgcaaatcccccatcccaatttattctataaatttgtttccacattatgtctatccatttacatggcttttgtgttttttaatactgctaatgtttatcgtttgcccaacaggctcgacagattttgcttcctgtagagcatcgaggctttagagccccctcgttgctaagtagcagtctccctgtactgtaatgggctgattttgtattctgttcagcgctgtatcttatttttgtatgcaagacaaagtgttttgatggaggacgattgcggcagtgtctggaggctgtttggagttttatgggctgtacagtacactgtgtgctctctgaacagaacacaggctgttgaattttggattggatttgtcatttttcccccctcagagaggagcctgtcagatagaacattactttgagggtggagggaagaaagtggaaattatgtaataaccttcttccttctccctctctcgatgatttttctatctcagcatagggtggtttcttccacacaaaccctgtctcatgccaccacatgattttgcacagctagaggatgacggtcttattaggaaatgaatggtgccctagagggatggatgctgggacatctgtctgtctgccatttattctcctagtctccctttcctctcctttgctcctgccatccttcctacgttctgggttgccttgctggtccttgttattgtctgaggatgaatagatatggggttattggggagggatatttacgtgggatcaacctgataatggcaatgccatttctgatttccagggccttttcgtcttcccttggcttcgcagacacacaccctgccggaagcgttcttaggaggcctggccgtgctttctcttgccctcagccccattccctagccctctaaccaggctgggcctgggtatctgtatccagggctgtgcctgaggggccccaccctgctttgggcatccatcacgctactgcggcccttactttcagtgctcttgtccaggtctctgtggtggcaggtatttatttttcagctcttctcttctccttctatttctccccaatctgctttcatctcacttcatctctttgtccctgtcctttgtgtctgtgtcagcctcggccttttcttgacactcctgtgtattttctgtcttccttcttatgtcttcatctgtctttgtctccatctgtcttcgttggtcttttctctgtctctctctttctctgtctttgtctctgtctctgtctctccctgcctccctgcctccctgtcctaacccaccacctcaaagttttttttagcttggaagctgggcagtggttggaatggaaaacaaaatgtcactctggcccagaggtctccccagaggggaggactcttgagccagtgtccctagaatgctcccagcacctagaatctcatgtgctcttgtcccttgcctctcaggggccagagtggggcttctctggcttggcccctgcttttcccaggtccctggatgttccccccaaatcccagttgtgttgagaatgggcaagtagtttagcagggttaggctttacaaggcccttattggactttgctggtactgtgctctcctgggccagtactgtgcacctgagtgcaggactcagcagctgccctcacatactcatgccctagcaaagtgcctggtacataggagtgttgtgcactgatagtatctgtcaaataaatgaatatcctgttataaaagtgtttgtactactagggcagatctgggtttggtggggcctgaagcgtactcagttttgggtgctgtctctcagaaaaggattataaataccaggtgttagagcctctcccaggaaaggggtcagtgccagggagaggcctgaagcttcagctttactggcttccgggagaacaggcctgggtgaaccacttgagaggttgctgttgaggggtctcacttggaactacttagtggggtggctcagggctgaggataggagggtgtcatctgcccagctctggggaccttcagaacctgggacatctgtgctcacaggcctcaggtttatgttccatagaggtcaagcctttggcaaatggctgcaggtcgcaatgggcctggaaacatcatggtatttcacatgctcttctcagtgaggttgcttggtagggatggaccctgagttccagctcacccagagcaaccaggtaggcagccactcttggtagcatcctggcctccacactaaccctcggtgactgtcagtgaaatggcatggcattcactcctctcccaggtgttcaactgcctaggtctgtggctgtggctctcctgcgttcttggggcatagaactgcaagtatcgtggggcagaggactggtctacgtgtgtgtgtgtgtgtgtgtgtgtgtgtgtgtgtgtgtgtgtgtgtaaccatgagggagagggggcctggaggtgatggaaggtgtttgcagacatctgggcatctgttctgtggagcttgcagactcatccattaaatgaggttggtgaagattgcaggattggacagtcctttgggtagagggactcacttgttggagggtatggaaaagctgcagtgtctcctagaaatcggggacacagtcctaatcagaacaccatgtgtgcatgtgtgtgtttgtgtgtccaagcatgggaacaaaaagagattgagaagaagcatttacatgaaatactcaaatttgttcctttgctgtaatgggcccgcacagaccattaccttgaagatttaaaaactaaatgagctcatcatatcgagtgacttctaccgacattcatgcttgattgcaaagcctgctttacctttgaatttcaacttcattgtttgttattaattctcagatggtggtggtgtgtttctaccttttggattcagccatgaaaatgttgattttgtgtgatggatgtgaacatttctcaacaagaccccactgaagaaccttttcattttaaaaatagccccatgacctttggggctcagactggagtttccgaggaatccagtgggctgaggcaaggcttgggttgactttggagggggcagaagtttgcatttttttgtctaataatttgagtttcatatgaatgattctgtgctccgtgcaatactatgcattttcataactgtctctttcactttgggtaaaggaagggagggaaaaaataacagcagcagcattctgtgggcaaaggaagaaaacaagagaatggggcagagaacaggctaaatttaaaattgtaattggctgacttccactggcttgcgggtgttttaatgactcataataacttcatttaaaaccagctgagcagaaaatagattggagaggagcctcgggccattatggatttgtggttttttttttttttggtttttttttttttttttttttgacaagcttggttttcagcagccaggaaggctctcagagagggcttggctgtgttttctctctctctctctctctctgagggttggtggtctgcccaggagagattgtatagaaaccagggcgagtttttttgtttttttttttttttaaattctccctctaccccttgctttttttttttttaactgattaaaaatagatgccttgaggtattattttagcatcagtaggatttttttcacctttgatgtggtaaatggaacataaataaaattgtttttgaaattactgaattaattaggtagtaaagcaaccacaatgcataaatgtccttggccgtctggtttttctccctaaccctgatctatatttgtagggcgttcccttttctccccagccccctcctgctctcccagcgacccctccttcctctgagcctgcaccttccctttgaatggcaagattcttttatcatcccggcaacagctaaatgattttttaaaatccataggattttgacagtattggttctatctggttatctgatcagctccaggagttttgggacttgccagaaaaggctctaacctggctctagttgttttaaataggtcctgcctgtttcccatgctaggcctggtgcccgaccggcgagcgttcctttttctcttctcttttgaaaagtcagccgactcagccctaggatgtgtctgtctgggcaggacaagaggccgccctccatctgatcgctcttagccatttatctatcccctcttatggcacctgtcaccttctttgttacatagctatttatttgcttggccttttttgcctactagactgtaagcttcttgagaacatgtgatttatttgtgtcccctatactacctcgcttagtaacctgaatggtggttataactcagtcatttgaaaaataacctaatgggtgagtgagcaggcatgcggatgggcacatggtaaggaacagacctgaggtgctgcctgcttccctccagccccaggagtcagcaatctggatgagaagacaaggatggaaggcggggaccttgtcagtagtgtgctctgttgcatcctcacagcgggacacatagcaggctctcaggaaatatctgttgaagaagtgaagggctcaggatgcatggtttggctgcaggaaggagagaaagacatttattgaaacttgctgtgttccaggcacagtgctatgtgttctgcatatctgaactcagtctttcttcaactttggaagacagatatgctgattccgttttgcagatgaggacagtaaagagttaacttgcctaagatcataaagctagaaagtagcagagctggacttcaatctccctctctttctctctccttccaccctgtgtcttgcttttctattatagtatagcatgctgctatacctagccctggcctcgtgctgtttgagtgcctaaatgcctgcttctctgtttgtagagctaaccaatctcaaactggggagctgagaccaggaaggccctgtgcccaagggtcctgggggtggggagggtggcatagtaattggctgctgcctgtgtgccttgcacctgtgccaccaggagcaggtgtggcttattagcctcttcctgctctgccagaggagcatgtgttcagtggttgtgagttgtggctatgacttctgctcagtgccttgtagggttggggataggagggttctgggagccttgcaggagggtctgtgggttagtgtgtggccctcccacccagggagagcttgactgtgtcatgccccccactcctcctttgcactatcctgccaagtaggaggggtaggaggagagagctgcctgtggtccctcctgcatggcgacgcaactgggtgctctgcttctggtagatgcaccctgtgatgctggggtggggtgaaaggggcagccgacctgtgctgcagcccagaaatgtgagagctgtgaccacttgggcta

SEQ ID NO: 57024 - DNA, 12009 bp, Homo sapiens
ggctggttgtgtccattctctgacagcctcatcttccccaggcacgcgctggggatgctggagctttctctggggagcgaaacatcagccaaatgggaaccagatggtgaaggttgagcagcagagaaacctcgatgactactctgggtcacacgtgtggccctcttttgcaggaaatcgtttgtgaagtcattcatcagttagcaactgaacctagggccagtggtgtgcaaagcttggcagggtggacagaggggttgaagccagtgtccttgtctgcaagaagctggtggtctggctgagagggtgacacgagccccctggcaagagaaggcgttgagcaaggctgggtgtgctcattgtgaccgcaagaggaaagactgagtgctgcaggcatttagagtggggagaagctcctaagaaccaggggaatgaggagagcttcgggaaggaggttcatgggattttgatgaggtctttgctgctggagtatccagaaggagtgctgtggtgggagtggcctacctttctggacaagaggaagcaagaacttctgtgagctagaaccatccaggcaggcatctctttcctcctcatcctcctccgcccatagccacctggcagagacttagagcccagtttcttgcacttgggagtcctccaatccctgtgatggctgtgggcctccttggcctggaggttgagaaacactgcattaaagatgaaaagctgccacttcagggggcccctccaagttgaggcatccataaaacaaacacatgtgaaagcaaggcttaaaattggatgcggacccagaagattgtaaatttctcatataggatttgatggactaaaaaatatgttacgagtacctagaaccccacaaagcctaggttgagaagacaggtcagagggctgcctctgggtgaggctgaggacagagttggccaccctggagggccaatggaggaagcatccgaggacggtctcaggacgtgccccagcccacctcctcggaccacgtgggtgaagcccctgtgtatgcctttagtgaagactgagcttgttcaccgcgtagatggaagccagtgggagagaggggcggatacctctgtagtcaggggctccttttgttggctctctccaggattcaacctgacaaagacatgtcttccagacttttccccagtagttaacgcactccctcctccttcccccaaaccagtcccgttttgattggaattctttcacttgcctgggacaaggggaaaaaaaaaaaagcaaattctaaagttttcattaggtagttgggataaaaagtcttctggggtagttggattaaacttcagcagctctcttactgactattataagctaattgagcacagggagctcattggcggctgcatttttgttggagtaattatgaaagaccacagtcattttcagtaacaaggtaactccgggtaaagacagaactctctgaaactttggatttgctggagtcttccttcctcagttgcctttgctaatatgagcccgggataaaggcccagagaccagatattttgggaggctactatcttgcctgaatatcccggatctcccagtgccttcattggggcctaatggacataatccagcacatctgagagagcactgctggggggccagttttgcattaattgagatttggggtctggagtcagaagctctggagtataggctcgagagggacaggtgcagcctttgaagctgacccgggagcaaagagaatcacagtgcactgtcttcattacttatttatgcaccaagagcagggtctgattatagataatgaggccgaatgatactctctgtctctaatgaggtcctgtctgtcctgtccgagcaaagcgtggaccagcgtatgtaggactgtgatgacaaccctggggatcttttctagcccataggattcttgatggggaaacattcctagacatacagtcctcccactgaactccacccccatccagaatctctatcaggagctaggagccggctcagtgggctgggaagggcctttcagtgccctttggacggggccctggggccttgccaagctgaacgtgtcctctgggtggcctgcctcacctctggcctgctgcccatcagcattgaatcatgcccctcagaggacagcatgtaactgtgcttcccgatatagcccccggccccccaaggtgacaggaagagtcattgtcacgggagtactccatctttctgacaccacaaggccggcgtggctttcttccctactgctcagccctgcacagcctagaattctgctttgggagcatacatagagttcacagagctatttttttttcctactctccgtctcccactttagttttcagaactttatctcagtctctggcacggactatctgcttccttcctccatctcaacattataaaagtttgtcacagtcagaggctggctgaatcgaagcagaaatgtggtgtttggttaaattgtaaaattagctaggaaagttaatgaggcgttccgcctctgcctgctgaagagcaggacgtttatgaaggtgcttcaaagcaccctgcctgagaaggaaggaaagggagacaggagcagcaggggaagctgcccaggagtgtagaagagcctggtccaggtgagtttccaggccttggacgtgcctttcactcgcttagctgaatggaacctgagaaatcatcccctcaatcctcctgctgtgggtccagctccatctacccactccgagtccataggagttccctactacatgtccaagaatgtcctgcgaccgcacacagctggccatggttagccattctagtgcccagatttcctttttgtcctgggcaaggcagaagagacaaaaactgaacactttgccttagaaggagcccatggtagaaaggaggaaaccagagataatgacagtggcagctgacatttcctggaggcctacaggtgccaggtactgtgccagattgctttacttcgtcatctcatttgagcctcacaagacccatttcaagttggtactgttaggacatccattttacagatgaggagactgagtttacttgcccaagatcacctagcaagtaagagacagagctgcgctgtgaccccagggctgcctgaccctgaagcccctggtcttaacctctgcggcaaagttgtttccatcccctttccaggctgcccatttctcccagcccacagctcacgtggtacagattgcacgtttgcagatgctcaccctgaagctttggaagtcacggtctcaaaggtgcacgtggaagagctgccaacagtctatttcctgcacacaccaaactcgcaggtcttctaattacaccaaacaaacctttctgttttcaagcagctatgggcttaatatggcaaatagtttcccacctggacctctggcatgggaggagccagaaaagacgagttttgttttgttttggtttgtttttttccggcagggaggtggttcgtacttagaataggcattaagtgtggcaggcaatatttctgttttgaaaagtgtggcatcttaaggctgctgaattttgagcctgcaaatgtcagtgccgtagttgtaatgtaacacctcaattatggtgcagggggtaaggaagccagactctgaaacctgcaaggctctttagatccacagcctgagccacaattaaggtttcagaaacaccaaaggcaagccaatgagtgtcatttttaaccagtttgaacattttactacttcctaacatcagaagcacccgggctagagagcccgcttcttgtcctcaataaagtgattaagctgaatgggtgttggggagtattattaggctgagaagggctaaaaatagacatgctctgttttctaaaagccacagcaggcctggagagactggcagcatcgaggtgccactgaggggcccaggggaggggaagggagggtggcagtctctggagctccgtgtctgagatggggatggtgggtgttgtgacgggtgggtcaggtggtggggcctctttcccagctgtcaccaagagtggaatcacagtggaagcacatccgtacccgtatatgtgtattaatgactttaaaggaactgacaactctggagtctctaggagggatgcctaggcctaaaatttacgtactcagccccaagataattgaatttacctgctgttctgggagaaggagtccaatctgggcagtgagtaaagggcagactataaggggcacaagaagagggacatggggaagagcagaggcctttacagccgagagtgaggatctgctcgacaagccttgattaactaggatgctcagagaagatgtaatcaaaggactttttggtgaactgaaggttaaccaggaaaccttgtctatatcggcctttgtcgtttgctatcattcatcaatgtgagagtccatttttctactttcagtgaatgcaactgattgtctttttatgatagaacatcttgcttgcttagaagtcaaaaggagaatgcctaagaagggagttaagcatggaggtatatgcctagagttttattataagtcactctagaagatcgtttgtacgttttccttcctacatgttttcatacctttgaactcattcctctctataatagctttaagtgctgggaggggcaaggaacatgacttccactttgtagatggagaaacaggccaagaaaagtaggatcttagaatacactgaggtctacgcagaggcaagtctagaccctgtgctgctcccagcccaggctctgtcggatagacagtgttgtttcgtgcctggaccaggaggtgagagtttttcttaataggcaaaggactcagagaagagagttaggtgggcttcccatgctgccattctgactgaggttttttttttttttcttttatgtttactagctatgagaccttgggcaagagaactaagctttttaaacttcagtttgcatatctaaggccaggcatggtgtctcctgcctgtaatcccagtactctgggaagccaaggtgggcggatcacctgagatcagaagttcgagaccagcctgcctaacatggtgaaactccatctctgctaaaaatacaacaattagccgggcgtggtggcatgagcctcctagcatctctctccaatgccacttgcaactgtctttgtagtgtgtatgtgtgtattttgtttctaagataaaacatctctaggtaatatttcaacaaatgaaagaaataaagccttttagaaggctcctgatgctgtcacaaatgtgataatcattgcactcttcaagaaaccaattggcagagctctgtatgcaagttatctgctgacaattggctgtaagctgtacaagccctgtagatgagagcttctcttttcctggaaactccaccaggaagccgtgccatagaccccaaagacatccaggtcaagctgcagggaagaggcagggttcagtaggcatagaaggctgtctaagctgggcccgtgctcccatcacaggcagtttagtggagaacctgggctggatgttgacagaactgagatgttagctcagctacccactagctaaatcaggagcgttagcagcttaactctctgagccttggtttcttcacctgttaaagagatgatgatacatccttcctatcctaaaagcaggacttcaaagttgcacaacagcagtgacaccactcactcagaaatgggactgtaaggttgttgaaggtttaaacaagatgatgcacatgaaggtgcccagcacagaaagtggagctcaacaggcacacaacaccaatactttcactccttcccttccaaggaacctacaaaggctgccctgcaataaggagtcacaatgctgctgctgccatagtgttgacagtcatcacaataaaaatactaataacatgtgttgcccattcattatgatgcaagcattgtgctaactactttacatgcaatataccagttaattctcccaacaactctaagattaccccccattttatacatgtgcaaactttttttttttttggagacagagtctctttctgttgcccaggctggagtgcagtggcgtgatttcagctcaacgcaacctcctctcccgggttcaaatgattctcctgcctcagcctcccgagtagctgggagaggacaggggattctgagacccaagcaatgaaggaattatcaatattgagatgccaaagagatctcagcattgtgagaggactcggcattctcttcagtcagtgggaaatgagagaggcagggaccagcctggagaaagtgagggaagccaagaatgccatcgagactgaggaatgctgcctcctattccctttaaaatacctccaatgaggtatgtcatttggcaggagtgtcaggagatgctgggggaccggggcagggccaggttatcagcttgaaatgggtggagtaggcacttggatcccggccaccacccttggaggggtcttagtcttcttttttccattgcccagccagtattgtgaatcctactcaggggagaggggtgtgtgtgtgtgtgtgtgtgtgcgtgcgtgtgtgtgtgtgtgtgtatgtgtgaaatcctccatgccatatttagggtgggggcctgtgacggagcattctgaagttgcttcagaagaaaggagcagaatagatgaggatgagaggagaccgaaggctcagatcacaggctgagctttgggactgctgggggccaacagaaacttctcttttcattctgaacttctctcctgagaatccccaaggggagacctgggaggagggtgattgttggtgtttaggagttgcggagatgtcccataaaatcatggcagaaacccttactcttatatccctggctttattatccagcctctcacaaatgccaaggttgcaaagctatctatctctcttaaacaaaacaaagttatgaacacttgaaagcccaggtattccctggaactcgggtcagtctttggcacagccgcactgacccagcctgactctggctaatgattctcccaatgtctggactctctgttccattctacctgcctgatagagcagaatattcaccttgagaaggattctgctggctgaaccggggaacccagccctcgcttggtctcaacagcaccttccaaacaccaagggttgtatgcatttgagctctcgtgtacggccacgtttaactttctttgccatgagcgcccagcttctcatgaacacctgttcatcctttctcccttagagatgtcccagtttaaaacttgtcatttcaagatggagagataaagggattcaccaagggttacacagctcaggcagtgacagtcaggaccgcaagtcagtttcttttggtactttggaaaatcttgggtgcgctggccagcagaaccctccttgagccagttatctaccctgtcttacctaagggtggtcctgtctcccattccagatagcataatatcatgtatacgagagccttagagaacatagtgtctcatttatgcaggccatttacttattgcgattgggcttctcccagagctgtgggactggaaatactatgggctgcataccctgtaggctgtggccaggagctgtcctcctggagctcatcagcttgatgaagtgaaattattctataatcatgataatgactgtgacttgagcacctgctatgtgccaggtacttcatatagtttcttgtttaagctatcatatgaggatgaatagctacattttcaggagggaagtgaggctgcgaagttgatgctggtaccgtaccggtagaaccttaaagccgtctctggatttgagctgttgctgttgccaggctggagtgcagtggtgcgatctcggctcaccacaacctctgcctccggggttctagcgattctcctgccccaggctcccgagtagctgggattacaggcatgtgccaccatgcccggctaattttgtatttttagtagagatggggcttcttcatgttggtcaggctggtctccaactccagacctcaggtgatccgcccgcctcggcctgccaaagtgctgggtaattacaggcatgagccaccgcacccggcccgggacttcattttgagggggcctgaccgttaacctccgagagatctctcagttggcaaagcatgtctggaaggaagtctggttcatcacagcagggactgacattcctgtagtaagagagattttgtgcccttgtgctgactaccacaataccatgattgctcagtcatagaagttgccaggagaagaaagagattagaagcaatggtaaggtgaacccctgagtcactactcttagacttcaggaatatttgtaattttttttggagacagagtatcactccgtcacccaggctggggttacaggcacaagctattgcacctggcctgtatttttaaaaaatctgcaacaaatttactatcctacttgcattttatttaaaataattcactcatgtatttttaaaaacataaatcatctcaaactggtttgcattccctggttcccttctgggtaggcagtaggagggtaataataccattaaacattggccatgagtgatgatgggagcagacggtaggggtgtcatttccttgatctcctcctggggaagaatgatctgaccccatctttactggtgtgttttggctggagaggtaagaatattttaaattgcgtgatatatctcttgcatgcatttgatgtttgtgtgtgtcttataccttgctattattttatctcctgatgacaatgatgatgttggtcttaatgacaactagcatttattgggctattattgtatgccagacagggtattaaacactttacatatattatttaaattaatcatccctcaaccaaccctgtggcataaacactctgagcccagttttctaggtaagaaacaggcccagaagagataattcacttcttcagggtggtagctagacatggtagaactgggacttgaaccagagtttgtttgattccagagagcgtgctcttcactaccttactgtgcagcttaatattgagtgcatgtgtgtgttctggctgtggacagtgtttctaagcctgttggattacccgctggtgctaaaaggggtaacaaaagagctttccaagccactctggctgagaattgagttgcagggataagggacaaggtagacctgtgtgctccctgtgggacttgagagagggactgcaggatcccagtaagagacaagggcaccatgcagcttcctagtagcatcacatttattaggtaggataagaaatgttccctcagccatagagatgtctcagcatttcctcctgacccagtccagggtttcctcttctgcagagtggatatttagccacacatgaggtgtcagtcatttgccaggtcactggtgggacactggcttttggagatctaaaaaccacctgtcctccatcccaggtgactcccgttgttctgttgctcagcccaggagaattccctggtgtctttctccatcctatatttatgtggggtcctgtatcattagttcattcaccctcccatcttgtagtgagtgaggccgaactctgaggatctttccccacagccttgtcaaccacagctacccttgaaccatatcctggacctatcaatggggctggttgttttcctttcagccaggatttgctcacctgctttcccttttccctcttccctgaatctgtgtatcttccagaaactctggttctggatcagctttttgttttgttgacaaaggagaaagagcaagagagagagctagagagagagagagagagagccttcaagctcctctctgggagtacacatctccttgagggaaagaacacacagtgccggcctttggaattggcagccagtgtgctgttctccgtctgataagaggtactgtaaataaaactgtacaccatggcctgttgtaaaatgccctgcgtctgtactcattgttctgacagcttatgctttttttgggtctgctgttttggtacactctgtacttccttatgtaagcaggcgtgcagatctcatcagaacattcaagatgtttattttaaaatctcaaggaattttgaaaaaaaggacacaccactcaacattagatgctggcaaacattaggtgttttttcagtggttcttttttttctcccttcttattattagcatgggggtgggagaggctttggagagggagggatttgaattttttttttcttccctcattggcttctgccttatttccttcagagagacaccaccccatatctgattgcattcagtgtcttctgcttccttcctggatgccgggaccccctcagcctcatttctggttagggcaggtagggagggaggttctttgacaagggggagagggcagctgcagggagcttgtcatggcttccactggatttcagctttattgtcattgggatcctgggcatttagagaaagctttatgtttttgaaagtgccctgctggctgttccctcctttgattcctgtgagttggggtgatccttggcacagagggagagctgctcccacacacggaggcctcagtcccgcctctggcatgtgcgtcctgtctttccaccgaactttaactggctttgaaccttcctccttcctttatccccaaccttctggaggtgtcgggaagtcagggaaaaaggggagaagagtaggagtctggagaacccaaaatggtcagggagctccctacagggtggtgcttagaacatcccgaagccctcatctgcagggtacctgggagactggtaggggcaaggatgtccgcctgtctctttcacaactgggtacctggaatctcagataaactcagtgcctggggtagggagtagtcactcggcagatcactgcctggggggcaggaggctcactgactgtagcggagggaagggttgtttgttggctgccacagtgagcattggactgggttgggagcagacatgctgatgagagggagatctcacaccagaagaagcagacagccccacttcctaacctttcctcccttttcctctcaactacctgagacctagccagagaccatgtccttgagttttaaatagggggtagtagagaacggagtgtgcagaataaggactctgccaccccctaggggacagacagcttggcagtgccctgagtggccattgcgcccttcccaggtgagttctgcacccaggaacctgcctgggactttctttgtttaacaagcatttagtgggcacagactgtatgccaggcatggcgcagggtatcagggatatggtaaagcccaagacaggtgggaacctgctctcacagagcttacagtccactgggaagatggaagagagctccaaatacaggacagttgaatggggctccaggggcttgtccagagaagatttcagagccaggttggtgaatagctgctgatactgacatattggttcgatggcagatttttctgctcccctcaacaaaacaatcactcatctttaaattagaggaacaaggtggggtgtgcatgtgtgcgttcatgtatgtgcacgtgtggtactgtgtgtctttatgaatgtgagactcactttacacaagataaatggcccccaaataactgtacatccaattccagtaaaatcagtcatactttaattgcatgaagggagctctttctttaaaggaaaagtgactggagaagatggtagctgcgacttactggttctgtatatctacccaccagctgtaggatggagcactttccccaccttgtcgcaactctccaagggacctccccttactgcttccattttacagctgaggcaacaggctccctgagac

SEQ ID NO: 57025 - DNA, 3122 bp, Homo sapiens
cgcaaaactggaatcgagactaagcaggtgtaccagcctccaggagcaccaggcctgtgcccttccacgtcttaagaggaggcttcagtgactggtgccctcaaaggctcaggaattttgggttcctggtagggtcctgaaccatgtctgctatcaccaggaacctgggtattccctatctcttgacttcttcaaatagaaccttccacctcatcctaccttttcgccagtaagaaaaaagaggcaaggtcattcctaggtttagaagttctgaggctgggaagcttaagggcaccctctgcaggcccagggtactaggttgaactagaccctagacttaccctggaggaattcagctctctcctccagccctcaacctgccctgcaaggtctgccaggttagtgactcaagtttgctgtgagagtagcctgtgtagctggcttatcctgtagttccttcatttcctcattctctgagtttttaagtacctactgtatgctaggtgctttgtggacttaatacataatagtgaacagaaattgggccctgccttcctgaaggttacggtgttatgaaggaaatgagcatgtaggttgaacttgccttaggtacagataattcaatagctgtactcttttggatacttttgagttattatttttattaagtcttcactatagtccaaaaatatagaccttttttcctccctaatctttgccagagaaaactgagtcccagaaaggttaaggaagaccaatctggggcaggacttgaatgtgtgccttgggcttctgtaccccagagcccacattttagcattgtcttccctccctgtgggggcctgggcatcagctctcatgtgcggatcaatggatcaaagcccctatttgaaaaagggggtcagttaagaacacacaatccaaactagaattagggcccacgagttcagcccaaggttctctccactgtgactacaaaataagtactttcttttactggcctagaaaaggttgcttagtttccacattactgcgtcacaggggaagccactcaaccagatgcaaatgttgagatgctggttctcatccactgtgttgtcggctgcaagagtcttgcagtccagaaacggcatacctctggcggctgagggtccatgctgtggactctgcccttcccttctagcagggagtgggcattggagggaaccccacccaaagggtcctcttcgtttcagtgtgaaggagtctaggaggcatatactctgtcttccccccactctctgtttctctctctttgtctctctctctctctttgcactgtgtggcctccccctttggaggtgcagaactgtctctccaaccttggtgttggctgcctgcttgcactggcccctctctcctgatatgttaataatatttggaggaagcttcagagacagtccctggctctgaacttcagagtagaaaatgaagtccttgtttggagaattttctgtagtgggtgatcatggtgggggcagggggtggggtgggagtagcaggcaagacagaggatttattttattttaattattatttttgagacagagtctcgctctgtcgcccaggctggagtgcagaaggcagaggatttaaaagggtgagcagcaacgctccttccctcaggatagctgctggccttgccccctcctgccctgagcttggcacgagggacagtgctgggcaccaaggagtcctgtaatgataggaaaactggcaactgttctagttcctgctctcaagaacagcctcccagtggctggtcccagaggagctgggagggggccagatgatgacaaataacttaatctacctaaactttacatgaaaaaaaaaaaaaatccaaacgaacctcaaacctctgtccaaggtggagggtatcggggaggacaggacagtgagtcatcagagggacaggcagactccatgtggtttgctgtgacctccccattgaaaacataatagcatttgacttttataaatatcagaggtgatttgtatagcatttcacattctgtgccaaggaatttaacatgagaaagctcaggctgaagaacggccgcggaacgtcataggcactttgggaggagggtcatgtgctgctgtttgtacagtcagtgccccagcatagatttactcttgacctaatttcatgctgttactataaaggcatgtttgatgcctaatatagagttttattttccaagcacaggggctctcggctgtgctggagctgcttgctgtagagtagggaggaacaacccagccgtctcctgctggcccagaccagctattctttctctccattgttcaccctagtggctcccagggcccctctggccaccttctggaggggcccccgatactcttttttaaattaataaatttcatttttttaagagcagctttaggttatagcaaaatggaatggagagtatagagttcccactgtacccccgtcctcacacgcaagtgcacagcctcccccaccatcaacatcccacgccacatgggtggtacatttgttacaattggtgagtctacgctggcacatcattgtcacccagggcccacagttcacatgagggttcactcctggtggtgtacagtctgtggatttggacagacatgtaaggacacgcattcaccatttttgtatcatacagaatagccgcttcactgccctgaaagtcctttgtgctctgccctttcatcaccccagcacattttatatgaagcatcactgccctggacagtgatttgaggggatcagtggtgtttggctcttttgggattggagaaggagaatttaagcaaggcaggtttggattagaaagggctgaagctcatttcctccacagacatcttgagtgtttctcgatgccagacatggatgctgggtcctgggatagggattttggacatgtatgctgggacctgggaccgggatgccagacacggatgctgggccccgggacggggatgccggacatggatgccgggccccgggacggggatgacggacatggatgccgctgggcccagggacggggatgccggacatggatgccgctgggcccagg

SEQ ID NO: 57026 - DNA, 1161 bp, Homo sapiens
agggaaggtttggaagcaggaggaggagacactcaaagctgctttggggtgcacttattttgtgtgctggagaaggatttgctggccatttcttgtgaaataaacttttttgtgtatgcatgtgtatgtaggctgttactaatcccgttcctttcttgatctactgtttttcaggttaatggtgtctgggatttgtggagggaggaaggatataaaagggcaaaaacaggagaccccggtgcctggattcagagccttcacattccggagatccccagaggcccctctccccagacccttcagctccagaaagccattgtgctccctcctggcctctgaccctgaggctctgggaagcagcaggttgttgacacttggacaatcatttcttgcaaggcaactgcctccctggggggctctcctctgccttagggtggtgactattcccccaaccagggttaaggaagagaaaaattaactgttggtcagagcaggaggcaaggatagagaatcctcaatttcaggcccccaggcatgttcacccctctctcacttgccacttcaggagtacaccacagcccagggataagctttaggaaaatgggttcgagagaggcatttctgatcagagttccttctggcatcctgctgtgggtctcatgtttgttgaggggaccccatatttcttcatgaaggatatctgtatgtctgctacagtctcaggaatgcagccacaggaacaaagaaatttctagccctggtgctgctacttattaggagcaagacttcagacaagttgcttgtcctttcagaagcttggtttcctcattggtagaagagggtcaaaaagccacttgcccggtgagcctgctgagaagagcagatgaaggaggtgtactctgcactctgtgaaacattgcaaatgtgcgggttgatcattaatgttttctcttacagccaaagctagtgtgtgtgtgtgtgtgtgtgtgtgtgtgtgcgtgcgcgcgcgtgcacagtttgtgagtgtcgggttcccaagcatttactctcctctctcctttctaggacatttcaggaagcattattcaaaagccggtggggtgggacagagggactattaaaatttttaagaatcaccttgcatttctttcactttggtct

SEQ ID NO: 57027 - DNA, 1568 bp, Homo sapiens
ccgggtctgtctgaccctggggttgctgagcagaaaccgcctggagctacccctaccaccggacaatcttcccaggaggaggaacaggtgcagcctgggggcctccagcccctagaagttgcttctctgtctttgctttctcctctccctctttgccgtctgctgtgctttcttgacccctcctgcccctcatctttttcctctctcccaatcttttttctctcctttccactcctcccctctcttcctcatctgtggtcttttctcctttctttttgcttttgtttctctgtcccaccttattttccctctccacatatttctcatctgggaaaccagtccttaaccaaattctgtgttttgattttgagcagttgccaccattcccccaagccgtcctgatcctggcttttcttgggcccctgcctatttcctcacccccacactctactccaactccccgacacacacacacagacacacacacacagcctcctcgcccctcccccagctcccctcccctccctcaggcctcagctttctcttgacagatgggagggcagtgagcactccctctttaaaacaacatttaatcgccgttttctgttcttggacatcaaagctggggcttaggcgctgtgctggggtcgcggcggcgcgggcgctgggggagaggaggtgagtgaataggggctgggctgaatgggctttgtgtgaccgccagctctgccagctttacatgctctttgacccagatatgatctcatggagagaaaggggccctggccaggccagcctgagaatgctccctccgtggcctgactcaacccctctcctccctgcctggggcaggcggccccactgccgccccctgccagccccggctgccactgccctctgccccaaccctggcaattgtgggcagcctcctccagaacacactcaccaggagggcacattgctggggtcagaagaggggacaggcaccgaggcaggggctgggaggatgccgccgtggggctgcagggtgttctccagggaccttaagcgggagctccccgcatgccctgtagtcctggctgggttcaaggaggcgtttgggtcatttcagccttagcagctctcctcccagtcgctctgaggaactcctctcctgaccaaagtggagagctgaggcccggcgccagcagaggtttgctgaagactcaggcaagttgcagcccgtgagaagaggcataagggaagccaaggccaaggccgcctccctccactcagcacggccaggccttcccatgtgggagcccctcacgcccctggcaccaggaagggaggggattggggatctgaagatgactggcctcagtgccctgcttcagcccagaccctctgtcacttccatcctctgctttgcttgctgcccagagcgattttccaaaaatgcaaatagcatcatgtcgctccctagatgagagtccctggtgactcctcagtactctgaggatggaattcaaactccttaacaaagttccaagacaccctgagtgacagagcccctgctcagcacccaa

SEQ ID NO: 57028 - DNA, 715 bp, Homo sapiens
tcaccccatcatcttcttctgctggagctctggatattagacagtctctgaaaagttccttgatgcttttactttgtctagctacattctcccccaccctgatgtctcatctatttctgttgcttttagagtgtacctctgggagattattccttaactgttccctggccacgtttgaagtgagtcctgggattgagtctgccttgggacagtgtggctttcaggaccagcccaattcctgcttgtgcaaatctgggagactgagtgtggttttaagctttgagagtcaaagacattatcaggccaggttcatggacttttggcaattcaatttctccgaaaatagcctttggctgtatttgcttccaatcgatttcttacgccagtaacccattaaccatgattaaagttctttcctcaacttagttgtccaatctgttattattattattattattctgcaccgccaagtctccttgtcaacttcctggtggttaccttggggtcatctgcgagtcagcttgggtgggaaaagcaacacctttaatctgatgtttgtcacagtactgagtctctttgtaagagaatttttaataatgagcctttaatgcttgaagccttttccagtttcattcctgtaatttagggtccagaagcaggtagctttcctatatccaagaaaacccaaatttttggattttcctcctacttacat

SEQ ID NO: 57029 - DNA, 1309 bp, Homo sapiens
aggcagggaggaggtacttggggaaagactttttgaaggaagtagcagcacattggtgagatgtaaaggatatttgagggtaagccacgtgaaggaatggggttgaggggtgaagagcaggaattcccacatgctgagacctggagaagaaataacatactatgttaggtgaacttcaagaaaagtgaaagaaccttagatgtaattgtggcactatccctagagggcactactaaggctgtggtagaacaggacagtgctccaagccagcagagaggaccagaggtaactgttgataggcatgggtggtgggcaggtaagtgatcgattcattcaacaaatatttgtggagtactctgtaaagctcagtgctaagctcagcatcagaacctttgcccagggttggtcctcatgctaaacatagttgcaacacgtaagcccttgaccacattctgcctcatgcacctactctgcctctttttctctccgttagttctgacatcggtagtttttaccttaccctttacccattactaaaagaagaaatatgttggctgctatgttagtccattttgcaatgccgtaaaggaatacctgagactgggtaaatttataaagaaaagagctttatttggctcatggttctgcaggctgtacaagcatggcgttaacatctgctcagtttctgttgaggcctcaggaagcttacaatcatggcggaaggcaagggaggagcaggcatttcacacggcgagagagggagcaagagagagaggaggagatgccaggcttctttaaacgatctgctctcttgtgaaagagctcactcgttactgtgaggatggcactaagccattcatgagggatttgctcccacgactcaaacacctactaccaggtcccacctcccacattaaggattacatttcaacatgagatttggaggagacaaatatccaaattatatcagctacatcaagaatgttctctttgtacttaggtacaaaggttgtggcactgtccctagaaggcactactaatgttctgggcacctggtgtgatagaacaggccagtgctccaagcaggcagagagtaccagaggtgactgttggtaggggtgggaggtggacctaatactcatgtgtgtgtgtgtgtgtgtgtgtgtgtattatgtgtgcatatgtgagtgtgtgcacatgtatgtgtggtgattcaggtagtggagagtggctagatctgtcagtggtgtcaccacatgggtgatgaatgaggttgtatcccaggtgctggggtcagatcagaagttgg

SEQ ID NO: 57030 - DNA, 2931 bp, Homo sapiens
actttctctattttgtcccaattcttcaaagactttttctggttgtagaattctaagttgacaattgctttgttttagcacatttacaatatcattctcttgtcttctagcaagcttcctagtcctgcaaagtcagctgttagtgtaactatcacttgtgttttttctctagatgtttttaacatcttttgtagtctttggtgttgcagttttttatcagtaaaatgtctaggagggaattgcttttcaaatattttgcttgtgattcactggacttctaaacatagtccttcctagactgttacaatgattaaatgagttaatatgtgtaaagcacatatagaacagtacttgcacaaataagtgctcaataaatactacctattttggattctgtgtattgatgtctgtgtcagttcttaatacattccttcatagctccaacccacccttctgtactctgtggtgtgagagctagtctatgtctcttagctttctcttttattttttccatttccctttctccctctgctacattttgcacaatttcttttagcctatcctccaattgcaaattggacagatttacaaattggattttgcacacacaactttcctttgccagtgtctctatgttggttccaccagtgagagattctggagggacatgcaaggcttgaggaggaggaagggacttaccatgtcctgtttttttgtttgtttggtttttgttttgttttgtttctgaggtctggttgtgggcttatgatcctgtgagcaatcttggcgatggttgtctgcatgcagctgttggctcaatgcacggctcatctctgcggtggcattccttgggttcctcaggtgtccagcattcccgcagcagctgtgctttctcatcagagctttttgatgcttggttctgtggactcgtcctctaagtttctaagtttctcctggtttccttgttctgtcagcccagtgagtttctgcatttgccacctctgttacactccagagtccacctttactctcttagccattaaccactttttacttagtcaattctttatactaaattttatattaataatttctgactcaagtttaaggtgggtttctgtctcctgactggattctgatacagtatttatcatcagttctggaaaattctctgtctttatctgtttaaatattattctagtccatttgatctctcttatctctcagaaactccagtctgacatagagcagatctttctcctctatgctcgatgtctcttagctttctctttcactttttctatttctcttttgccctctgttacattttggataatttttttttagcatatcttcctatttacaaatctattcaattacatataacattctgtcaaactcctctactgctaatatatacaaggtattttatatctatatatcagcatgtttagctttttagcattttaggctttcaggaaaagggtgtatcttgagagttagccagacatattactggaacctgatatgtcaatatttggaatcttttcttccagcaaacataagcaatgatggtgttcacacttttggtttgtatcgtattttctagcaatggatttggtgtagcacctctggagtctagagtgaggtattttctaggagaatgccccactacattgattttttgtgcattaagtattgtagcattattttctcatgaggtcatagcctgggacgatgaatcaaattctttaccagcagaccgtgtgggaagaacagccaccagtgaaccaaatacccagacaatatggaaataacatgtttttctttcttcttgccttccttctcaccctttgtttcttcccttatatgtgcatttatttacttataacaaacatttatttaagggtgggtagagggtcattacaaggaaacagattcctatctataataaaaaatctgattctgactgtaaatcttggaaatttctggagagggtagaaaaaaattaatgatggagtgaggggaaatgggtacaatatcaaggccacatatatgctatatcaccactatgtctaaaattccctggtaaattgacccatgagtgggaatgaggcacatttcccaaggtaaggattcaatgtaaggaaagctatcattgaaattcctcaatacctcagattgaatagtaaaatacgtactgttaaggccattttactcaccaaaactgaggcttaagagtctcaaaagttagtttttccagttgtccattttacaaattgctagtagcaaaccaggataacaacttacatctttggactttctggatgtctcctgctgtgctccattactagggcagtcagcagaagcagggagtgtctgtgctccagcagcagtgcctggggtcagtccacaaagacaccctgcttccattctacatctcctaggtctgtgaattgacatttgaagatacaacagttgcaataatctgagacaatttgcctgccacatgcaacttcttgcaatgggcaatcttaataccacacaggtttcctttactccctttccccaccccaacacacttggtgagcaggatcaatgactgatctaagttcaagggcagaggctaccatttggaattgccagaatagagctgtgtgcactccaaccaacagtgtacaagggtccccttttctccatatccttgccagcatttgttattgtctgtcttttggataaaagccattttaactgaggtgagatcatatctcatagttttgatttgcatttctcaactacgagatatgatctcacctcagttaaaatggcttttatccaaaaggcagacaataacaaatgctggcaaggatatggagaaaaggggacccttgtacactgttggaatgtaaattagtacaaccactatggaga

SEQ ID NO: 57031 - DNA, 4632 bp, Homo sapiens
gggcgtgatggtgtgcacctgtagtcccagctgcttgggaggctgaggcaggagaatcgctggaacccaagaggtgaaggttgcagtgagctgagatcgcgtcactgcactccagcctgggtgacagagtgagactccacatcaaaaaaaaaaaaaaaaagttagaaagattgaataagacctaatatttgctagcacaacagggtgaatatagtaaaaaataatttatttgtaccttcaaaaataactagacaagtataattgggttgtttgtaacacacaaaaaataagtacttgaagtggtggataccccatttaccctgatgtgattattttgtattgcaggcctctatcagaatatctcatgtaacccataaatatatacacctactctgtacccacaaaaagtttttaaaaagaaaaataaatagcaaccgaaaaaaaaagagagggagaaaagaaaaaagaaaaaaaaatcaagtgcctggctgggtagaataaattctaaggccacaatgttactgaccatgggttttttggctctcagtgtatagaaattgacacaaggccaatagtcttcccaaacatgctttactggaacttacgccctggcataagggccacaacaaaagagagagcgaattctctggcttgctgactccttggaaaaaaccggtagggatttttttattaggcaaagcacaggaattgacgtcagaggcaggatgtgctgctgggcaaagcatacgagaagtggggtatgcaggtcagcattacttggttgcaatggttatcttgaggaatgggccaactggtggtctggccagtggcaacaaggctgtaaatcaattattcagcattccttcccaaggtgggacacccggcaacattgtttatctcctaaggccagttcctggaattaagtgaaaggatgactaatggacatgttgtcagtgaggtagtggtgtgggttttgtgaccagtgggaatgcacgaaagaatgctttagcggggagtgagctgaagccaagccccatccctactctgtctcaaagtgagttcagaaaaggggatttaaagaattctttttttttttttttttttttttgagacagagtcttgctctgtcgcccaggctggagtgcagtggcgccatcttggctcactgcaagctccgccccccgggttcatgccattctcctgcctcagcctcccaagtagctgggactgcaggtgcctaccaccaagcccagctaattttttgtattttttttttagtagagacggggtttcaccatgttagccaggatggtctcgatctcctgacctcgtgatctgcccgccttagcctcccaaagtgctgggattacaggcatgagcctccgcccccggccttaaataattcttaaaggaagtaaagttaactttgaaagaactatcaggatttggattgactgaaaggagtggggaagcttagggaggaggtgcttgccagacactgggtcatggcagtggtcggtgaagctgcagttgcctagggcagggatggagagagagtctgggcatgaggagagggtctcgggatgtttggctggactagattttacagaaagccttatccaggcttttaaaattactctttccagacttcatctgagactccttcttcagccaacattccttagccctgaatacatttcctatcctcatctttcccttcttttttttcctttcttttacatgtttaaatttaaaccattcttcgtgaccccttttcttgggagattcatggcaagaacgagaagaatgatggtgcttgttaggggatgtcctgtctctctgaactttggggtcctatgcattaaataattttcctgacgagctcaagtgctccctctggtctacaatccctggcggctggccttcatcccttgggcaagcattgcatacagctcatggccctccctctaccataccctccacccccgttcgcctaagctcccttctccgggaatttcatcatttcctagaacagccagaacatttgtggtctatttctctgttagtgtttaaccaaccatctgttctaaaagaagggctgaactgatggaaggaatgctgttagcctgagactcaggaagacaacttctgcagggtcactccctggcttctggaggaaagagaaggagggcagtgctccagtggtacagaagtgagacataatggaatcaggcttcacctccaaggacacctatctaagccattttaaccctcgggattacctagaaaaatattacaagtttggttctaggcactctgcagaaagccagattcttaagcaccttctgaaaaatcttttcaagatattctgcctaggtaagtctgttgtctgcatgtctccccactaatgtgagtcatatagatggagtctcagggcacgactgggttttgtgtctctcgttgttgcttcacagcccttttggcatcacccatttatttaactaggataaaaacgaatattggtatagcgattccacagtttacaaagtgcttttgtatccactgtctcacttgatcaagcaaaaggaaaccagaggaccggagtgctgtcctgagtctaccttgatttgctaggcgacttgagggagacttttagcctcaaagggccacttaagtggaaattctaaaacagtacctattctgatcctaactcaagggaatgctgtgaatatgcatgagataaagacctcccaatatatgaagaactgggtgatttttggagaaagacattatatactcaatttcttttttaattaactttccttgaaagtattgcttaatagtttttacattctccatgtaacagactttctggatctggtgttcagtctgtacaccagatgtagatcttttttaccttctcctagaccttaaaattcctggcaacatgcctccaccctggattggggaataaaaaatgaaaagttttttttttttctttttgactttaaattttattaaagtttgaggtttttcaaactgatgtgctttatttaaaattcaagtgagacatttttagtctttttgatatttatattttctttgtcactatgatgtaaattacagggatttggggaaaatatgggattttttttttttttttggagatatagatctcactctgttgcctaggctggatggagtgcagggatgtgatcacagctcatcatagtctcgaactcctggactcaagggatccttctgcctcagcctctccaataactaggtcttcaggcacacgccaccatgcctagctaattttaaaatttttttgtagagatgaggtctcactatgttgtccaggctggtctcatcctccaggcctcaagtgatcctcctgccttggccttccagagtattgggactgtaggcatgagccactgtgcctggcccagaaaagatgttttaaaaaaacattttgagggaaaagttgtgaacagtagtggtctgtctttgaggatcgccagcacagtcccagggaagacaatgtaaatttgactctgcccactgccatgagatgcctgatctctcctctttgttcctcccactaatccagacggtgtgaagggagacctgctgattgacatcggctctggccccactatctatcagctcctctctgcttgtgaatcctttaaggagatcgtcgtcactgactactcagaccagaacctgcaggagctggagaagtggctgaagaaagagccagaggcctttgactggtccccagtggtgacctatgtgtgtgatcttgaagggaacaggtagagaaactggtgtctacttcttggcttttgaaggtacctgagtgatggttggcaaaagcaacagacagatagggaccaaagagaaatccaaatggagaatgagtggtaacgagagagcgagagcaagagagatgagataggcccatgtgtgtgcatgttagtaaatttgtgtatgtgcacgtgcatgtgtgcaccagagtaatggaagacacagggagagggttgaagaaatggatactgagcaaagaggagtaaacccccaaattttccaggcctttggggacaagagcagtgtgcagtcaagtaccttgggacctaggtttaggacagctgcaagtaaaaggctaacccagcttctcaccagcagcttttggatgtcagtgcttgtcccttgcctcactgccatgctgctgtagccatccaagcctatagaacttggctgtgagtgtggctaatgctgacatcaccagatacaaccaaaatctgactaggtttttaaactgaggtaagaaacataaaggaattacttgaaaagaatttattaatcaccatccatgaaagtagactttgtatacttacaactaatggtcaagatcttacactaccacatctacatgtaaatttatgcaaatgaatctcatttgttcatgtaaattttaatttcttccaacacgagaaattggcaatagcctattagccagaggtagccacgcctgcaattcactgtctttctcatatccttatgcacttccatcttctgctgattgtctgacaatatccagtctgttccccaactgaccattca

SEQ ID NO: 57032 - DNA, 1080 bp, Homo sapiens
ctgaatagatcttcaaatatttatttcaagaggaacatacagtgacgtgttttctaagtccatgcatatatgagaatgtattttgtcactcttacacatgaacaaaatcataaaattgtttaaatattgccccactttttttctgacatgtagtaagaagttgagagaggctattctattttttttagacagggtcttgctctgtcacccacactggggtgcagtggtgagatctcactgtagccttgacctcctgggctcaggtgatttcccaccttagcctcctgagtagctgggactacaggtccacactgccatagctggctaattttttgtagagatgggagttttgctctgttgcccaggccggtgagagcctattttcatatgcattttaacctgtatacccctgacttagaattttatattggctatagccttcaaagtggggctatattcttcaatataaaaataatttcatacaccttttttttctgttgactatgtgattctacagaatgaaattgatattaactagaaacaattgcagctatgacaatttggacaatatctaaagttatttagtaaataaggaaattcccagggtttgtagaatctcagggaaactttgtaataagtaaataaatcttcagtcactgttagacaacacaccttgccaaagtccaaatcatctgtcaagaaggcctttgaaactttgttctcactttctgtatccaccaccggcctttccatctcattcaaaaataaacccttacaatctagcaggatagtaaaagcattacttatctcacacctgaaatgtcagcttggaacaactagctcttgagacactgtcccctcccaatcactctgttggacattgcatttttggcagtaaatttctgcattcttatccttatccttgtgctagatcctgtggctttaattattttaagaatgataatgatcctatgcaactcatgtctttcctgcatcttcaagtagctttatcaacctacaacctatttccttcaagatgatttcttctttatctgaagttttttcttgtgctaaaggctg

SEQ ID NO: 57033 - DNA, 2907 bp, Homo sapiens
aaatgctctctgtgcaaagacctccatttctatttaaaaagatgtttgtatgttgtccaaaaatagacacagttgtgccaaatgtgttccacaaactagtgaaccacttctattccaaagcatctctggactttcacagcttgcaaaaggatattgataagctttttcaaaaccaggatcttgatgatcatgatgattgtttcagtgatacctaggaaacattcccgccttttacaaggatgcctctctcttaaataggtgctcttgccaccttatctccccaggaaaattcacagggcaggttaagaaaccttcaactagctatttcctcaattgtaaacatttctactcacaggtctcagagcacttcaaactcagtgtgtccaaaacagagctaccatctgctccagatctgctttatttctggtattcttagctccttgaatggcaccatcatataataaattggacaagccagaacctggaagtcaatttgtcctttccctctctgtcatgttccatatctaacttaacatcaagctctgtccattttacttcctgacttcctctgtaacccatttcttcccgtgtttaccatcacctggtctcagctacccctgtctccctcctgactggcctcccacttccactcttgcccctccactcaattcttctctgttctgcagcccaagtgaccctctcaaaatgtaaatctgatcatgtcactctcctccttagtgctccctagtgactctccagagcttttggaatgaaaagcaaaattcctgtcatggtccacaaagccctgcctagtctggctctgccaacctatttccccacaatccagccacgttggctctctcctcctgtgtttcctgccaccacgtggcctttgcacttgcggtttcctcttactggaatttcctcccgccctccctgcttgcttcagtctggttaactcctacgtatttatcctctatatctctgcttgcccgactcctttttggaggagcttttcctgatcctctaggtcaaggggagctcccaacatctccccattagtgccatgctcctttccttccttgcatttgtcagttttaatttccactcctatgagtgatcactgggttaatgctttctcccgccacccacccgtctacaatctccatgaggttagaatctgtttctcatttgttcatccttgtgtccccagtgcccagcctatttcctgaacatagtagaggttcaaaacatatttggaaaatacatgaatactcacattttgcttttcagacttttcctcctagaatatcattcacctgattcgggtgtggggtgtggtctctgtcaaagatgcactaatgattgttccttgcccgtacaattctcacagtgacctccacgcttacttagccttgatttccttgacctgttttgatggttctttctcaggagagcctgcaggaacttctgaggatggggctttggggatgtgaggacaatgaaaaacagcttgtcagggagattctgatgcactgccagccttgctgagacagggcaggaggaaccgcctctaaatctcaggatagttcacctggaatgtgggaagacattctcagaaagggttcttcccggggccctcctcttcatcctttcttgcctccctcccttcctccccatacccctcaggcttttatagatgcatatttacagaggacagggctacctttttttgcatattgattcttttgaaagggcagacctttagaactaaagaaatgaccacaccgctgttagctttctgcaaaacagcatagcactttcccggtgtgtgtttattacctaccccatgagctaaacatgaggcaaagtagtaattggctgggtctctggtgagtccatttccctgcgttgccccgaggtgtatgcaggctttacacagctaccttggcaactgacttccccaatgtttgctgtgtgtccaaggacaagcagggatctatgacactgggtgtttctagcaaatttccctctcaaattggcacattctctgtgagctttggagacttcacagtgtggctcacagtttgggaacaatttgcatcatcatctgactggtaagttctagttctgtggtaactcaagtgtttcaaatagcttaatacgcaatagggcacggaggttcgttctgcttctgttggaatcaaacacacatttccacaatgttcccgttatacaggatcatcccgaaacacatcccccagaacactatgttgtcactactctaccttttgatatacactttattattattcctatgtgcagataggttacttaagtttttctgttctagattagtttgtctattcaaatacatgtttctcacacacttctacagtgtttttctttttgttgttattcttaaagtgttctatgaaaacttccatgttgtatcaaggctgggtggtagctttgtaactagtttcccaccttagaatgactgtctgctttgtccaggactgcaagggggacttagaatatgggatttttcagtgctaaaactagaaaagtctgagacaaatcaggacaaagtggtcaccctgctaccatttctagccttgataaaggagcaggtagacccaaccaaggataatttttgttttctatgtagataccagtttagtggttggtaggaattcccccaaatcaacaccttgctaagctcatctctctctctctctctcttttaatatgacagcttattgagataaaactcacataccatacaattaatgcacccatttaaattgcgaaattcagtagtttttagtatactttcagagttgtgcaaccttcatcacaatcaattttacaacattttcataattctcaaaagaaatcctgtac

SEQ ID NO: 57034 - DNA, 1017 bp, Homo sapiens
cactgcatgtggtatattattttgggaaatttcgtttccattttacagacatctgtctatctgcacacatgtgcatatttgttactggatcatgatataacatgcatttgttactctagtttgtgatttttaaaacgtttgaaagccactgggctgttctttgggctctgggactctgctctgataaccaacatttttctttcccacggagatgaaagacatagcccctgttcttaaagaactgcaagtcatggggagaaatcgacatgcaaacagttaagacacagcaagacaagggctctgagatgtgtaagcacagggtgctaagggggaggatgggaagaaaggtggcatttgctctgggccttgcagactgaataggggtgtgtttggcaaccgagaggaaaagggcagtctagggaacaacgtgtacgaagacatgaaatgactcctcctcctggtagcagcctcctcacaggtctgttctccgacggaagccgggacctaagtaaatatttggcttctggtttttcatttgctttccttgaaatcaaacagaccgaccaagtcatgagcaaacaaggactagggtcattctggtcctaacttgtaaatctctttgaccgctgacccagctccggttttttaaggtcctactttctggggaaatgttcaacagtctcactttaagcaaacctttgtgatgcaggaagctgcaagtctctctgtaacatcctggggagagagtggggagaagaaagctattaaaaaggtcgttaacccatttggtgtcatgcagctcagtcttcgtgattcccatcatctggctgtcaaaagtaataaaagatgtccatggtacaacttactaggctgagctttaaaagctataactgccccctctaattttagtctcagccaactcggagaatacgaggcaaccaataaatcttatggaggctcagagaacatggaacaaacataggactaagggacagaaaacatgtgtgaatcttagct

SEQ ID NO: 57035 - DNA, 666 bp, Homo sapiens
taccattattaccggtgattacgtgtgtgtgtgtgtgtgtgtatgtgtttgtgtttataaggaatcaatgtaaaatttcctttttttcaaccactttattgaggtatgactgatctcacttacatgtagaatctaaaataggcaaactcataggagcagaaagaatgatggttgccaggaactgggggggtggagaaaaagggttggtcaaagggtacaaagtttcagtcatgcaagataaataagttctggacattcctacccaacataggacatatgattgccaatgctgacaatactgaaaatttgctaagaggatagattttacgttaagtgctcttatgacaaaagaagaaaaaattaaacatttttaggtagtggccaaaacatttgaaaactgctgtgtattggtggaaaactgctgtgttagaagatgaacaaagttcagagaggttgaattcttagccaaaggttacttaattttagatcttttgactccagatccagtacttttgcccctaacacttccatgcagttcacatttccctttgcttgcagaatcttcatgttttcatttctaatgaatgaatattaggtttatatcacattatttgttttattatttctctaatattgagtattttggtaatttcacttttagctatt

SEQ ID NO: 57036 - DNA, 2903 bp, Homo sapiens
tattatgatgaaaaaaaaaaaaaaaaagtcactgcaaccagtacttatgtttattactgtacctaataaacagcccagcgtggtgattcctattcacttagtagcctccccatctagaatatactccgtgatctttcttgatggccagactgtgtaaaattcatacagtgtttactacagggatccccaaatattgttagttgaatgaacaaacacacatttcaaggagggcactacagtgagtagatgaacagttttctgataggagattgtacaagtaatgttttcaccagtgtattttaggacagcagattcagattaatgcgctgggactgaatgcaaatagtaaaattacaaatataaagtaaaaatttggaacctttgccaaagaaaggaataataaattgatttaataatttgaaagaactgtaaggtttaggttttgttcttatttttagtgcgactgagattggagtctgtttgtagacatatctgaaaaaagtgaagggggagatggaagatggtaaatgccaaggaaaagatggaaggataaatcagtgtaataaaaaggagcacttctttttcgccaacagaagtaaaggtaaaggttaagtgtctgagttaacgaatggattgttgacctctggggagggtgctcccatcagctcagctttgtgacgacctaagaatatcccttccacacctttcctgatccaatcgttctggctgcataaaaccacctaaatcaatcaactgttacacttcccttagtgctaggacatattcatataactcccacgtattaaatgaaaatacatccatctaaaaataaaacaacacgattgctgctacaccaagaaaggattttaaaaaggcctgttcacaagctaagtgagggccagaggaaaggtgttcgtttaaactgaaattcgagctgcgataacacctcctaatgcaatcaaacgctgttgcagcacacttcttaggagatcgggttcaacggcagggattgggtaaggtgagaatctggcttggcggctccggccccggccatctggttcccttgggctccggccgccaccatccactcgacggctctcggcccgaacgcttggtcgcaccgcctgccgaggtcctagatgaatcgcttcaggcctggaaacgaggaagccgtctccggagaccatcgccaacgctgacgcccgcggtctgaggtcgccatgggaagagcggtaggccaccctgctcctctgatcaccggaggacagggacacattgttcagggccatattcaaacactgcccgcagtacttgcgttacgtccctttgtgaaggcaggcccttcgcggctccccagatcagtccagcctgtgtcggacccgatgactaagcacacaggaacccataactgagcctgcggaagagccagaagccgccttgcctttaacgaggggtatcctggcgagcatgcgcagaccgtccgcgcacgtcgtcgcccgctgagagcaagcgcaacgggcgttttcgtttgtgacgccagggagcgtgaggacgtggggcttccgtgaatgcgcagtgggtgcgtcggccacgaccttttggccaggttagggagggggcgacgctgagatgggggcggcggcggcggaagcggatcgcactctctttgtgggcaaccttgaaacgaaagtgaccgaggagctccttttcgagcttttccaccaggtaagcggctgggttcggccctttgcctttcgttttccgtctcgcctagggcctggccagcggccaccccgttttcttttcgtagccgtcaggggacccgacgggtggctgtttgggggtgaaaggcgggtctgggttgcgaaacgctcgctgggtgtcgctttcctggaagatcttggttcgtttaggccgaaagtgacgactaaaggtggtggagggatcctcgatcaggtttcccgtggtagagatccaggggtccttgggaacacagtgtgtgtgtagggtcttcgttgagcagtgctttttcttatccttcctgttgtcatcttccccttaggataatttgtctttggtttatctgactgggaacttaatattttaatttatttgtgtctgttttcccctaaagtttgcttatcaaattgcagcattattaaaatatgtaaaataaaatggttaagtactccgtagaaaaacagcattttagtgttgctgtattaaaaagtgtgaaaaattctgagtatcctattccccccatccctatcccctaataactggtattgtttgattaatcaatacaaaagtccgtttttagttaaagaaaatcattctcttgttcttgataaatgttcattttcatggagtggcaaaataatggcgattggtcactatgttaagccatacagtgctgtgaattgcaaaagtgattgtgtttccagttccttatgggcccccttccccaaataaatctaatgttcagtcataactaggatgtttactgtagccaaaatggaaatccgtgcatcattttcaaaagaagtttctgattacgtttctgttgtttttaaactttgtcatatcttatttgtaaaatttgagtattttcccttagttgctttatttaaattctaaacacctttttgtttgtaggctgggccagtaataaaggtgaaaattccaaaagataaggatggtaaaccaaagcagtttgcgtttgtgaatttcaaacatgaagtgtctgttccttatgcaatgaatctacttaatggaatcaaactttatggaaggcctatcaaaattcaatttagatcaggtaactgcccaatgaggttcggggggcattgtttcctgctgtttttaaatttattattcagttttaaagaacctcttatttgtag

SEQ ID NO: 57037 - DNA, 1425 bp, Homo sapiens
accaaccaaagtaagagttcttttttaactgcgcggttacaactaaccaaaactcaggaaataactcctggaagcaaacaaacttagcagtgaaaaacaagcgcgtccagtaacaccagaaaaacacgtggcgggggtggggcatctggtcgcaaccgcaggtgagactctaagtcccatcattcccttcggcagccaagccaggctgttgagggcgagccggcgcaccgtacgctgggacgtgtggtttcagctcgtgcgcctccccgtgggtttgcgacgtttagcgactattgcgcctgcgccagcgccggctgcgagactggggccgtggctgctggtcccgggtgatgctaggcggctccctgggctccaggctgttgcggggtgtaggtgggagtcacggacggttcggggcccgaggtgtccgcgaaggtggcgcagccatggcggcaggggagagcatggctcagcggatggtctgggtggacctggaggtgagtgaggtcggcggggggcttggggaggcgagtgaggtttcgctcgtggaaccgaggagtcgagcccgtcctgggagagcgttgggggtctgggtctcaggtgtggcaggtgagcgcggccggccacgggcggtgcagggcaagtccggaggcaggagtcctgcgggtgttgggcgccgtgctgcgctgtagggcttctttccacaagggaggagtcctccgtgtggcttcttctcctccctacccctccgcccagatgtggacttttcctaacgctctggcgtctctgggcttgggtcactggagtgggggcgggggcagcggctctgttcccagcttcccccaactaaatccttaaaggaccctaggttgttagggccagacgggactccggagatgactcagccttacccctcattccataagtgagaacattgaggcccacagaaaggattcaactcattcaaggtcgtgctgttagtgagagtctgagttgagaccagaacccagttcctatcccttcaggctttccatgcccgaaacaagggctcctcccaccgttgagcctcagtttatatgaagtgaggataataacagtagtttttccattagattgtgaaggtccagtggtgtaattaatgtgaaaactttgtaaactctgcagagacgtggtggtggtagttatccaactcttccaaaactgagtgatgtcagcactcagttttacttactttgcatctgtcccggagtagaatctcagtgcttgacaaatagcaggcccttggtaaatgtttgttgaataaacgaggactcgtgtttagtaccttcagtagttgcccgaggagcattctttctcttctgtttcggctatggattacaagctgactatgtttgagggaattcctgttaaataaacttgggtaaa

SEQ ID NO: 57038 - DNA, 1702 bp, Homo sapiens
tagcactccattttaaggacagaggtgcaacacttcctttctttttatccttcctctcttttttccctgtcttacttaaagtaagatatttaatgacatataacgcaggttttcattatttcatttcctttttaatagtattttttaaaaattacttgatgtagaattcaaatccatgatctgtcatttaaccctattcatgtcctggttaacatccattcatcttagatggggataaagagaggtttccataaaccttcatggtgtaaaatcagccaggcttaaacaagtgagcatatttaataccaatagtatcagattagatttgcccccaaggtagccttatttactcggagtagactctgaggtccatgaatgggatcagtatttcctagtgataacctattgtttctcaccgagaacataagaaatctttttaggtgacaaaggaaaggacattgaaaaatattagttgtacatttattttaaagcttattagacactatatataacaaatgaaatgtgtaatttaatagatatttttacataggccctggttaggataaagcaataaagtgacttaaagaaaaattctaaatcaggtaaaaatacagatgatgcatgaacatggcaaatttgtgaaagtggtcctcaaataactgaatttaggaaaaccctgaggggtaaatggactccttagattgtaagtagaatatggtgaatatgtgattgtattcatcttttccaggtctatagctatcaaagggtttttaaaggggccaatgatccccaaaaggttaagaactgctgacttcaacggcatgagtcaacattaaaatacaggtgcaatgttactcctcacaggcatccaaaataattcaacctccatgcagagtggctactgaataaattattctaggaatctcatgtattcgagtgtctcttctttcctcatggtcatcaaaatatggtgctacttgtctgcagagagaggacggctgtggggggcactggagttgagccatcaacagcactgggcaatgactgatcagacttcagggcccagtgactgagtgcttcaggcatttgaggaatgaaactttttgttactgcatagctgctagtgttcaaggagagtaaagctggtaggaaatgatgtagagaattccaactgtgtttgaagaagctacaaaaggaattcctggctgactctgcaaagttctcaatagtgctctaggagtggagggtagtgaactttcttgagcacagagagccttacttaagatatcaaaccagatgcgaagttccattcaggttaatataatgcattgtaattatcttagctttcctttatacaaaaatatttttccttatgtatattctgaaaagtggaataaaggctaaaatatttgtatgattttcttggataaaaaacagagtctcccacaaaaaggtgccatattagagtttaaagtatcaattggtgcatccttgtttttggagggcattagagtcactttcctgcaattaaaggctcgcagtactttgttagattgaagtcaaatggattcagatgtggagccttattccttgtcttagaatctacagattatggaaaccaaggcttataaggatcattatcaagttttccaaggagtaggaggtgtagcgcttgaaatattttgcatttgggagtgagggt

SEQ ID NO: 57039 - DNA, 752 bp, Homo sapiens
ttgataacctctacagactatcttatttctgtgtttcaaaagttataaagcaagagaaacaaaacagacagtgtggtgtgtacaggaagctcatggatagtgggaatagctttaacaaatataccatcttttctttgactctattggacaatagagactcatcagtcacagccggtcatctcattctcccagaacttggtttaggtagtagatgtaaacatggccacaaaatggaatgcctttttcactcaaatggaatctgagcagctttctttctagaggggttataaaaataagctttttatggcttgcatctccaaactgctttatgtggcatagtgatgaaaaatgctggaatttgtatataatgtagccaccagataagaaagcaggaaacagaaagaacaggggattaattgttagtcctaccgaatgaactttaccctgataaggcaatccagtccctgtaggcatagaagaagaaaaaattacagcactctgaatacacagagagttattcacattgtatacaaatcaaagcaggcctcctgcaacagctacgactcagatcttcacagatccgtggtgtatctccatcaacagaattaaacaaggcagtctgttccgagtgggcagcaacattgctgaccaggctggcagacaggaggatgtcaagaagatacattttctatcaagatgtggctttatcaacgagtttacttatttacctaggaatttggtctttcagtgat

SEQ ID NO: 57040 - DNA, 1762 bp, Homo sapiens
ttccttgcaagcatgatgatttcaagctgacctacagaactttgtgcatcacctacaacattggcaagggtggctgagaagaaagctctccaatacttgaaattattttcaagtcacttgcaaataatctgcttactgggaggaaggaaacagcagaacgcttctgagaggtctggtgtgttccaatcacctatagagagaaaccacaggactaaaaataaatgaataaataaaaatgcccaggagttacagcaagtatgcatctttttgttaaattttctttcatgatgacacaaaacaaggactaaaaatgtttgcaagaaaccacaaggtgatctaatcagaacttagctaaaattacaaatctgacaatgaataaaattccctacttaataaataattctagaaataagctgataataatcgccaaagctcagtagtcattcaaaatgggcaacagtaataattcatatacctaggcctatctttaagttccattattcaagaaggaaactagtattctcactttatttttttctgaatgaatctagaaaatactttatagataagaatatgtccactcttgcaaaagataccagtggcaagcttcagtgtgaaagagacaagtatccatgtgtcagatgacagagttgccactgatttattagcaaattgaacttttgctttaagagaaaaaaacttctcaaaatctgtatctgataaattaacccagtccttcatgaacaccatttcaaaaagacactgccaaccttaagtttgaatgattcattgtactgtaaatatttgaggtgaatatgtctggtagcaagtgtctgaaacaagaaccctcttgcaacacaaccgaaaaatcaacggacaatgtatgagacagttagggtgcagtaatgaagctgacctcagactatttccatcaatacaaacactgacagcaagtttgttcaccaagttttcagggccaacaacttacaattcaaacctgggatcaatttatggactctgctattgttaatgaccacgcagggagagtaataccagaaaactgacagcatcctcaggactaacagatcatctcccagaatgtgaaaatgagataagtcaattccgccaccttgtctgcaccttgagaattaaacagcaactaccaactgatatcagaaattactctcattggaggttgaacacctgattctcctttgccacatcaagcagagactgtcagataagagaatgacaggaaaattcattccatccacatttcctgcactatggaaaactgcacggatacagagcaaaccatcaaagaagtataagtcaataagtacataaatatataaataagaaaactaaaatacagtaagaaaggaaactacagaataggggtcagcaaactaaggcctgtgatccaaatccagctcaccatgtgcttttgtagagcctggaagctaggaatagtatttgtcaatggttgaaaaaattcttaagaatatatcacaacacccgaaaaacacataaaattcaaattgcagtgtccataaataaagttttattggaacatagccatgctcattcgtttacatattgtctacagcagctttcacactacaacagcagagctgagtagttgtgaaagagaccgtatggcccacaaagcctaacatatttactaccttgccctctacagaaaaagtttgccaatctttgctatagtagaatgagacctaaattcctaacctttgatggc

SEQ ID NO: 57041 - DNA, 495 bp, Homo sapiens
cctgttcctaaacgtttcatgtcatggcatttcaagaagagcctagataggtgtccatctcagatggtttgggtatagtcttgactgcagggaggaggtatactagctatcccaccctgttttagcaactgttttattacttcaaacatctttgcctcctagttcctctatcctgcccttgttggcccatgaatcaccaatttgcatagatgagtacactgaagcattgcaagtattttctcatggcctcaaaggacgtgtgctgttgacagactgcagctgaaaaggaccaattacttaactaatgttttgcagagatgtccacatgctgaccacagcaatattgaaggcataaattattatgcaaagtcatgaatgtacatccatttcagagttatctacgggaaattgtcaggtcgactttagtgacaaagcacagccaagtggtgttttgagagagagaatccataacactccagtagcacagaaggtctt

SEQ ID NO: 57042 - DNA, 1132 bp, Homo sapiens
ccattttgggggaacacatgtctgtcaaaaggacagaacatacatacagcagtcaaccaaagtccttacagaaaaacatgatcaacaaggagaaaagagcagaatataaaccaagcacctattgctcaaacagtgaactgagactgcctcgaggaagtgaattttgggactgacattttaaatgaggaattagaagtgactaagaaaaggagatgcaggtattcaaaatgaaaaagctcacagaggctgagcaatggaagtgggctgaagagaggtagggctactcagcctttcacactgagtatgtgaatctgggtttacacagtacactggttctcaaacattagctggtgtcagaatgaccccaaaggcttgttacacacagatttctaggctccacccccagagtttctgactcagcaggtctggagtggggcattctaacatgttcccagattctgttgacgctgctggcctgggcacaatatgggctgagatcggaggagagatggagtttgttgactggagtgaactggagggtttcaaacgtgagatggcagtgagctatactttagctttcaatctgcagagatagtgggggagaaggaagacaccatggatggaatgaatagcaagaccagtggtcataaaacaagaaagattgggttgggcatgcaaagagttcatgtacagaagctagcaggcattaaaaaggtgaacgtaaatcaagggaggaagaagagggcaaggggccatggcaggcactgcaaggggaaagaggagctaggtccaaaccaaccaggcacagacaatcagcagaaattgactacagatttgaccacaccagggtcccagaaagagagagtcaaaaatgattctgaggttccaaagagcaagtctatcttcaagaaaataaaggggaaactgagaatggttgcttatttgtgaggatgaggagaaacggaactcagttttgtgtataagttaccaatatcaaaaggtcatcctagtaattgtatcctatagctaagtagatgtcagagcccagggagggaaattaagtttaacagtggatcacaacacagatatgggtttggagtcatttgcctttggaagaaagttggatctgtga

SEQ ID NO: 57043 - DNA, 1793 bp, Homo sapiens
aagattctccataattcaaagcatttaaagtaccaaacacagactaggctggatgcaagccttaggcagggaaaagggaagtctaaatggatggatgtgactatgaagggaacactttagaactaagtcatacaaaaacaagttatgagaggccctcctccccctcccaataatgtcaggaagttagagttattgagtaggcatcacttatgacagtgagaaaaagggcttgccaccccctcctctcaaaaactccttcacaaggtcacagatacatcagtgttacaaacgcatttaaaaaatattacagcaataaactctggttagagtggttccacctctatattcacaggaaagaacaaactccaaacttctcctaaattaaaaggtaatgttagcaaacacatactctctctgcctacacatgaaatctctcccctcttctacacaagaccaaaaggaaacctactttctgtttaaagctagatcagttgtaggcaattaactttataagcttaactttgccagtcctatttcacagactgtatagtcacacaaatagtggaagcatcgccacaaaacagactgccttacccatgtcatttttttaaacacagcaaaaagccatttctcaggtttgatccgattactgtgatctattttttgatcctgtagccactgactccagatacatctttattactgtacaaggaaaactgttaccctgaggtttaaatttccgtatgttcaccatgcctcttctaagaatatatatatctcagttttaagacaagcctctcatgaaagctgaggtgaagaggaacagatgacctcagagataagtttcttggtttgttgcttcaactctaaagtgacgatatagcctcagcaatgactcaaagtctaggtatcccaggactgtgaagtgattaaataaatggaaagagattctcttatctggactgctagactaaatctctttaatgatgcccaacaaccaagtatgaacaaacacactagaagtcattccttcaagatacaaaagtcaggcacgttgatagctcttcattcattatgggagaacaaacaacttcaactaagaattatagccctaaaaaagctgataataagaccaccactaaattaaattcatagacactaaggccttggcatattctgtatcccaacaaccagtatttataagaaatgaaaaggataggatatatacatattagaaatcaaattgtgtaaaaaatgttaaatgtcatgaaatggttagagaagttgtgacagaagttgaaaggaaaacatattcaagctgagaaattatgtaagacttaaaaacactggacttcggtctttacatatacatgggatttaaatatgcctacgtggaaggtatgaggataggacatgtctattggtggaaacaagttggacgaaatgtgtagcgggcatatagaagagactcaggccattcagagaagtctgtttgataggaaggaggaagataagttaggagtagcccttagggaagtacagaagaagggttcaaagaaaagatacctaaccagcctgagtaatcatggaagtttcctttcagaatgcagtgcttgaggtgaatcttgagagagatgtaggaactagccatatacattaaggtgcttaaggtagaggaggtagcatataaaaagcagagaggcatgggagagcatggtgcatccaggacacatttactctggtagtcctaaagcaaaaacaatggtgtggagagccggcgaggccaagcatga

SEQ ID NO: 57044 - DNA, 3943 bp, Homo sapiens
agacctcctctcaaactcaccacgaaatatatatatatgcattaagagaaaaaaattaagaaagtcatctcatctcctcactacaaatcatacccaattactttctaatttgaacacaatctgataaccagcatacaaacagggatgtacacaagagcaagaagctgcttccatggtaactggcaacagaattttcatgtagctttgacatgcacggttgagttccagaccgctcctaagtcagcatatatccctcgcagggaaggcaacttctcaccgcgagatagttacaaatatagtaccgttgctactacccggtgccttcaatgagcagtcttgacaggggaggcataatctaatcctacttctgctgccaagcgtcattgcacgactcccatttttagtcaaaaagcaatatccccgaccacagctttccaccgccccccggcttttttttttttttttttttttttttttgcagccaatacaagtctattgttgcctctattatgcgccagttaccgagcctttactcacgctcacgtttaactgacactggcgctttttacaatgcagcagcacgagggatctctttcaggaacattttattgaacccatccagtcagaggcatcacctgaaatgaagttgtaaccacaccggcatcggctgaacccaattatctcgtaactcataaattaagaattcacagaggaaaaacacataaacaacatccggagacagtggcatggaggaaaaaaaccctcagcgctggaattgacgctgctgccagacgccccccaataggtttcccaagccgagctcctttgcaagcctattttgggggcaagcagccaacccggcgtcccccaaatctcaagctagcacccccacacatcccccgtctcctacagcgtgtctcctgcggtgtttacataactgtgtgtcctctagcgtgtaaacaaaaggcacagcccaagcggagaggcgcccctgaagcagcaccgtggccccaacgctgtgcccgcccgggcctggggctccgcaggtgggggctgagctctcggcgtcctccgccacttgttgctcccgggtcctgcagctctggagctgcaaggaggggctttgcaggctcagagccctgctgcatcccctcctgcatcgccgctcgcaccccgcggccccgtgccactcggtcccggcgcccgcctggagcctgcagcaggggccagaggacgccgcgcggctgccaagcgcggcgaggtggcgggaagggaggctgggtgcagcacagccggcctctccgctgaggaagagctccggctcccttttgttagcaaaagcaaacactgccctcttctttcccgaccgcgccaacgcgcccggcacacgggcagccacacatcgggctccagccgagtgctcggtgtcttcagggaaggcaccgggcgtgcagagccgcccctgggcaaattcccaagactgctcttcacgcagggagcgcgcggaggcccgcagggtgcccgcctggccgcagaggccgcgacgccccctccgccaccctcgggccgccgaaagaacgggcagccgggaaatcccgtgtccccactcgtggcagaggacgctgtggggcgggcgggctgcgggctcccggcgccttcccgcagaggcggcgacagcggccgccccccccgcggggccgggccggggaactttccccgcctggagccgggccaaaaagacccgcagcagagccgagggggcggagggctgcgaacggccggagggaaacacgagaggcgtgcagtttggggacaggggagaaaggcagagcgcgttgggggaaggggcaggggagatcagacaagtctggggatgtcctggggaccggggagaaatcacgccgcgggcggctgggagtcagccaccaggaggcttcggggatggagaactgggggggccctctggagaggtgggggcgaatggacagccctgggaggtgggaggacctgcaagttacggggagaacggcgagtttagaagggtccggaagggttgaggttgtctttgaaccatccccttcccccatgctttacagcccccgggccccccattctcactccactctgcaccccgcgccaagccggggagagaaggtgtgggtgcagccatccctggggactctcattcacacttagccgggcaggggagaaggggctcacagatgccctcagccccttccctctcagccctgagtttcctctccacactccctccgcttcggatgtaggaagtggggggaggttgtcatggaaacgtttcccccctctgtggccaaggctactggggtgccttcggagatttaggggccaaccggtcggtgcccacacctacctgtggggatcagtgccgcggcggagaagagcaacagcagaagccggagccggagcccgggaggcgccgccgccgccgctgccgccgcacactgggatccgctcggcagcactacactcgccatgtcgggcacctgcctcagactggcggcgttggctgcctccggagcccgagcggacagctaatgagatgctaatgacatgcgctggaggcggagtccgggcagaccaatcacagcgccgcgagcccaacccggctctcggagggcctcgctccctcccccaccccgccccctggcgctggcgttcggcggcgcgcccgcgccacctaggggcggggccaaggggaggggcgtatgcaaatatgtttatgttaaaattcgggttttgctttccccggatcaaggaaaaagtgttctcccgggcgcctggcgtgcaaggactcgggctccagggggcgggtctagcttcttgtacacctttattaggaatgtttatagcaatcgctgtatcagaccgacgactggagaatctcccttaagagggtcctctgtcccgcacaccgagtgcatctggcctagcgaaccagacgttgcaaatttccgtcactcaccttgcaccgaaggaatagatctttgggaacgggggctgtgcgggagtggagagtaagaaggcaggtccccggattgacaaaacaatctgggagaagtgcatgcgtgctttgcacgtccggcggagcgggagagcccgctcaacagcctagcggtagactcggggatagttggagaaggcagccgtagagtcgggttctgagattttccagtcggtctttttgcggcagaatctcgggaaaggtagatcgaggagggtatgctcaggctcctccgcttgtcgagggtctcctccctggttttaatatataggtgtgtgttgaatatatgtgtgaaatatttgtaatattagatatttaagattacacaacaacggaaaaaattagtcaaggcttcaggtgaagagcgggggtggtgggagttggggagagggagtgtggtgaaggcagggtctgccgtgttcctccttcggggctcaaaccctctcactcctcctctgcgcccccagcccttcctaaggaagctggggaccaacaggtgctccgagcttcccctgtctctgggagagcctctcctgctaaagcgacttgcatctccggactcactctccctccccgaaattctctttgctttcttttcagccaggcagccggctctcttgtttgtctgctttttaattacttattttcttcccctctagaagatcgtgtgcgctctgaccctctgttgctcaagcatcaaattgaaggacgagccatattaagtgtaaaggtttataataatttaagtattcatagaatgcagaacaataagatgtaggaaatacaatttgcataataaatatcaatatcacaacagctaaaacaaaccatgacaaattatctgtggctaaatgaccaagagattactgaatgtaaattgctaagtctgagctatagtct

SEQ ID NO: 57045 - DNA, 1384 bp, Homo sapiens
gagagagagagaggaaggaaggaaggaaggatgggggagggagggagagagagaaagaaaagaaatagagaaagaaaaaagaaagaaaacatatgaattgacatctataagtattataatacttacataataatattataatacttatattgacatatataagtattataataattacaatacacatctatcttgctatggatctgttttttttgttctgttccttccctaaccaagagccagtatctctcctttccttcaaccccatgtctagctctgcatccctatccccatattttagtccatgatccttggggtctacccacttctttctactttccgtttcttgtctctctcaaggaattggtaaagtaacaagaaaaagattctagttctaatccagttttgtactgtgactcattgaaggttaaaacaaggaatgcgaaccctgttctggaattaataggtttgggagtcgaaagattaagtaaacagatgacattttccattctttcgaagtttcagcattagaacaacgagtggctggaactttaacgctttttctcttctagctctgtcaaatctgtgagtataaatgatatttgtcttctatccaatgatctcaacacaccttgttaacatatttcaataattacccccattgcagaggcagaaagtgagagagaataattaggaattgggccaagttgttctcggcagtggtggccagaattggagtcaaggctctttatctcctagactatttactgttcagccaattcatcccaaagagacctcctttgcccctttcaccagcatctcccttgaaacacaaatgggccaagaagactcacagctctggaatagtaatttctctgctctgaagaaagttctctctggagatcctttgtgctaagtggaggtttagatgatccaaacatttaagtgcatattgattgcagtcagatactgtaccctgacctgcatcacaagttctggactgtatttctctgggatactagctttttatgtaataaccttccaccacctccccatggaacagagtgcaggccaaaatcaaaggcctgggtaggggtcaaagttttacctattaagccgtgcaggagcatgaccttgagaaccaagttttgcattaacttaatattgctacagagtctttaaagaacctaaataattgggccaccattctgcctaactcactcttgttttgtcattctttttgttgttgttgttgttttaaatcaagactaagattaaaaacaaaacaaaacaaaagacaccagaagtgcagctctctctgtttatccaagttgtgaggttatgatttgctcatatccaactctcattgtgaggaggattggga

SEQ ID NO: 57046 - DNA, 1760 bp, Homo sapiens
gatgaggccagtatttcttggtactggacatcttttaaacatgagactggatgattgcagaagttgagatgaggttatatgagggctgggatggggggcagctgtctggtaaaaatctcaagggagataatcttcttggggttcacagcatctttctttcagcctaatatgcactagcagggtcccacagcttgtgcgctgggctgggcccccaggtgggtctgtttccaaggctctatggtaataaccatcttcactccgaggagaccaaatgcccatatgttgtgggagaaattcctctgttgggtagtagttgggctagccccttccccagattctaggagcctgggtgaccacttaaggcaatggtgatggcccaagattctcgtggtggggttcaggtgagggcagagtggaaagtcctgggcacacagttctatgcttgtttaggcatctgcaggcttgtgggataaattgagaatggcaggaagaggagatggtgagccagaggaaggagggggagtgtgtgggttacaggactgcagagccccctgctgagaaattgtaattctggccctgtggaccaggtaagagggaggaagtaagagggggtggtgggctgggaaggtggagccgggggagctctgattcattctagtgttgacaaataggctggattcctttcactcggctggactttgccctttcaggatatacagccagcgtcagcacactgctaatggggctttgagagtctccttttgatgagcacgtcccagaaagcaggtattagccatttctgctggggaggcaatgaaggcatttgcagctgaaatcggctttcctggctgccctaataaagcagagactttcaaagccccattagcagtgtgctgactgcagctttacatctggactagcccagtttaggaggggagcgctgggcactcatatcctggaccccaaggaacaaactgcctctgaccaaagctagcttctttttcatcgacacactgtggacgccataggagaggaaccctgtctccctatccttgggatgtagcttggtgcctggcacaaaatagactcccaataaacgttgatggaattgataaacgagtttggaggggggtcagctactaaaaggacctggagcaccacattatggacagctccaggcccttggtgagtgcttaatatacatttatgagatggatgaccgacaggtaggacaaacagcgggttgggaaatgaaaggaaaggctgatgtgagagaaaaggaaaagtagctcctccctctgtcccccacctgctgaattttctacaagtaggagacttcagagccttccatgtctccccagagagaagccagaggaactttttcttgttaggccccaaaggtgaggaatggcacgggggaaggaggacccctggttgccaggctcttttgcaagttctatatgcggagaaatctacgtagatgggaaggattttcactttctaggtgatgtaatggcgtctctcataagtatgtgccttttgcaggtccacaaacatatgaatgatagagccagagttccagttcaagtcagtctgccttccaggctcgcagtctttcttcccagccacctccagttttccctctgaccacaaagcccatgaggagtgtcattctgaatattcactgactctagacagatggccttttctacctgttctacaggcgtgcacatgcccttcgtcagaaagcagtctagaag

SEQ ID NO: 57047 - DNA, 929 bp, Homo sapiens
ttgggagccaggtctcaccacttagtgcttctttaattctcccgacatcccctgccatgttttgcatgtagtatggtgttatatttcaaatttgacattggatctcatgatctaatgaaagatttggggttgctttcaggtgggaaagccagtatgggaggcttggggaagcagcaggatgaggtcctggactgggtagtgacagcaggcaagtcacaggggcaggtagcctgggctcaccttcctgccccagccctcatcagctgtgtgatgccagacatgttatgaaacccctctgtgggtcagttttctagtctagaaagcagcagtgatgatccactcaacaaatatttagtaatcacctctgtgtgccaggtacagtttacaaaaggcattgacatcacaggtcaatagatgaggatctgcacggaatagatgagatagtgtatgaattacactcagctagaaagcatggaacatgccgggcgcggtggctcacgcctgtaatcccagcactttgggaggccgaggcaggtggatcatgaggtcaggagatcgagactatcctggctaacaaggtgaaaccccgtctctactaaaaatacaaaaaattagccgggcgcggtggcgggcgcctgtagtcccagctacttgggaggctgaggcaggagaatggcgtgaacccgggaagcggagcttgcagtgagccgagattgcgccactgcagtccgcagtccggcctgggcgacagagcgagactccgtctcaaaaaaaaaaaaaaagaaagcatggaacacatgttagctattgtcattatttcatatggtttagatgccaacattttggaatatccaggacttgtcattggttctctttgttagagagaatgtatggaattggaattgtctagaaaaacaggctatatggtc

SEQ ID NO: 57048 - DNA, 836 bp, Homo sapiens
agaagcaaagcacagttaaaaggaccttcaaaagttgcaacactgaaagtttaaccctgccctgtgacagggttaagctacaagcatgcagtgtctgctttgaactcagtatattggaaaatatttcctttcctccctaagaagggtagggggtctctccagtattttcacaagtacgtagcgagattcaggcttttgacagtggtgagttccttttttttttttttaatggaggatactgacctttgtcaatacgcaaagatagagaggtctgtgtgctaaagcaggaggttaagaaatctgagaatttatgccagattcactgatttcctaatttattccctgattcatgtattgattctttgatatactgcctgatagattaatgattaattcatttattcaataaacatcattggatttctttatacaagctcttatccaggaaaatcaagctgaatgtttttcttccttctggtatctcttttcttggttttcttccaaagcaattaagagaaggtagagagaggggaagatatcgaatttgactcctctgggatacatacccttcccgatgccagtccccagagaaagagagggccttgaatgtggagagagggagaagcatcttcttggcatctgaattcctctccttttctttgtctgcttctccagccctctccgcctttgcttgttcctttgtttcctgagtttttcaggctggggctgggtggtctggagggatcagccactccgtttgccccgtagtttccccagtcttgctatcctgccttcttccgcagcagtccagggagttggaagcatctggtactcct

SEQ ID NO: 57049 - DNA, 881 bp, Homo sapiens
acatggaatggccttctgtgatggccaaatgccccagctccagcaggtcttgggggggttccctttgtagtgggagaaatcatagacttttgtaaacatttaaagctgtctcttccttaccacttggggatagtctcctaggttaccagcccccttggaatccccttcccactgcagaccttagcatgcatacactgtcaccccgagcaagggatgacgagcgagggatgacgaggtgaagagaaggctcttcgctctggagccagtgcctgatttccactttgatagacaaatggcgtgtgactgtagattgggttccctgcggtgaatggaaaaggtgcttagaaacacaaagagggggaaaagctcctacccagaaggtttaacctccctttcctaactagctctatggcaatgagcaaatatttgagattcttggctcctcattttcttccaagctcctgtctctgtgactcagatgttccatgggaagttcagtgtgtcccaaaccaaactcctgctcttcttctgatcttccccacttcagttagaagcaactccatccatccagttgcttgaatcctctctctactccacccacatctgatctgacagcaaaacctattggttttaccttcaaagacagccagaatctgatccattctctccactacagccaccttttcctaggcccctatcactgctactaattgccttcacctttgccctgatcgagcagcagagtagggtgggaaaagcacagaatctggagctaaactgcctccattgaaaacctggtgctgtggctgactagctgtgtgacctagacaagttacttataacctctctgtgctttccttttcttggtgtaaaatgggaac

SEQ ID NO: 57050 - DNA, 596 bp, Homo sapiens
gctacagaaacagcttccctggggataagaaagcctaggagaaatgctggtgtctgaacagtccagatgtaggaacagttgaaacaatcttatttgggcttgagcagccaaaagactctggaaatccaggtctgagcctctggagctttcttttcagctgccccagctgcacattcctgaaaagccagcacttgcacgaggcatctcccaactcagacatgagtcacgccagcttattttaagtcctgacctcttcccgggaagggactctgacatggaaagccacgtgctgtgaagcaaccatggaccccggccaagggaaacagaggcccccaacagcttcctgacagtgtccttcccagaagcccagtgtgagcaagggccaggagcagctgtgggcactcatgccccctcccttgccagggcggaacagtgggccgcaccacaccagcagctcttgtacccaccgtgatgctgctgacggctggggcagggggtgccaggcagtgagggaagccctgtgtgctcctctttccaggactctggccttggttttccagtccacaccagattgtcctgaaaggctactgcagtcc

SEQ ID NO: 57051 - DNA, 690 bp, Homo sapiens
atcagtggctatggggaatggcacagccagaaggagaaatcaaagatgaaatgagcatttggatcttgcttaaactgaagtttagcaccctctatgcattattcatgtgtgacatcgtcaccctcttctctacactctccactgagctacaagagagccctgaatcctcatggctttgaaataatttgcacaatgacactgatctatcttcaaccctgcaaacgccccatagagggccaagttttggtctggctcaggtacaggtgcaggtcaggtcagcatgaaaccacaatcatacccttttggcaagacacttcaaggaagtgggtaatgattcacatttggtgtttagcttttgatacctgtaccaaatggtcaaaaccctaagcaagcaactggtcttgattggattgtttaaaaatatgaattattgaccttgggcaagtcattagatttccctgagctttgatgttccgtctccaaaacttggagtccatgatgacttccttacagggatgctgtgaggactgaattagttaatacgtatatgtggacatgctttgtaaactataaaatactgaatgagtataaaagcaatttaaaaaggccgaagtgtatcaggcattcacgatgtgcttggtattatgcaattggcacttacttgctcatttaatcttcacagaaatcccc

SEQ ID NO: 57052 - DNA, 1478 bp, Homo sapiens
gagggcttgagtcttaggggaaggagcttccctacagcctgcagcctttgttgaagaagctcttatcaagagatagccttaagctatagctctgtgcctgctgtggcctcagacatcctgcttttctgaggattgacctcttcagcccaagggaccttctatcaaggggtagttgataggaagaatcagtttgtttacttttcattaacttctcttaagtgggctgtgtgtacagggaaaggatgctgggagctgattagctgtgcagataggcagataggcagagaccatcttaggccaattcacttctctcttcctcactcctcagttcagagccatggctccacaaaagcctcccagtccccctcctgggagtctctaggcttgctttggtctcacctggaatccagctgccctaataaagggaacctatgttcccgcatgcgtctccacactcctccagagcgaggcctgctggctgcgtgcaagacccagtaatcgccccactattgatctgcggatggtaattctcaagcagccatcggtgctctgcagggggctgcatggtggggatgtggtgattatggagcagtggcctggactgttaaggagtcactgggaagcttcagtggccctcgactctgcttggcattcccaaggctcattgaggtggtgcctctgcacttctgccctcctgagcagtggcagcagggaggatggaaagcactgtgaggagttctactcctaaccctgattggttagtgaggtaggaggcagggaatacaggaagtactgtggactttgcacgcacagcttggcagcacctcttcccatcaaggagctgaggtgtcgccagtgacctaagcgccttcccatgggaaagtagcaccagatgactaaaccacaaccaagtgcaaaaggcgcccgagccactgacttaaaagaagtagtgaacataaagaaaatcatgaaaattagcttcagccccttatatacatgccatcaatcccaagtagagaaatccctcaaaccctggcttctctccccagggagggctctgagatacactgcaaagatgctgggcccagaactttaggtgttcccgtgacatgttgtgagacttctggggagaagctgtgagaggctgttagttccttctcacattgctataaagaaatatctgagactggacaatttagaaagaaaagaggtttagttggcttacagttctgcaggctttacaggaagcatgatgctggcatctgctcagcttctggggagacctcaggaaatttacaatcatggccaaaggcaaaggggaaacaggcatgccacagggccagagcaggagcaagagagctggagagtgggaaggagccaaacacttttaaccaactagagaactcactcactatcatgagaacagcatggagatggtgttaaaccattcatgagaaatccaccctcatgatccaacc

SEQ ID NO: 57053 - DNA, 1197 bp, Homo sapiens
tcacccaaacatcccctttccttacatcctttggtctctccaggttttgacaagcgcgatctgtctgcttccccaagaagtgtccctgagaattctttaagtagctgggaggtggaaaggatctcatgtatttttggtaccagagataatcagataattgtgcaattagtagtaattttaccgctcctgtagtttctttctaacaagggccccctttcaaaaaaataagagggatttctttttgtcagtcccttgttgttgttttgtctggagtgtctgtcatcaggaatttggcccgacacccacgcgctccgcaagggagccagggggaggggaaggacacaggagacagaactcctgggggagagaatctgcctagcaggcggctctcccctgctcccccaccgagcacagaccgtgggaggggaccctgcgggaggaggctgcttcagtctccagagaccatctcccatctctacagcgactcccctatgaccgtcccccacccggtgctctcgggccacggggaagggacactcgggaaagacaccagagaccgggagggtgcagctgggctcttcgcggggagcgggcgggaggccttcctgttacatgtcgcagctgggacacagacggcagcgctccagggtccacttgccggcttcggttccctcaggcccaggaccaggctccacaccgctgtcgcgtcccttagccgtgtgggctgtagcacagagggggcaaacacctccaggggcttgtgccaagtaattaccaagcaaattcccggcgatttcctctcctccccccgcccccccgggcagtgcccgctgcgtgttccctgattcggcccccggctgtgcaatcagctccaggtaacctgcggggacccgtaattgctctggagttgcctgcgagtttgcaaggtaagcacgcgcggcgcttctccctggccctggggcgcgcggtggagcgccttgcgcccgcccccgatgggccggatgccggggacctgcggaagcagaggctgcgggggtagagatccaactccacggagtgagagagcagctttgcgctaatggggccgggtgcaggaagctggtgcagagaggaaagaaggaagggagtctgggcgacttgcgggaggagaggggccacctcgccatgtccccaaggaaggggaccttgggggacatg

SEQ ID NO: 57054 - DNA, 521 bp, Homo sapiens
agctgtctacattgtagtgttctgatcccagcctgagagggaagcccccagggcccagcctatgtgggttatgacagcctctcaaagggcagctgaaatctggggcaggtgccagcacctggcaatcacttttgaaacctgctctttccaaatactctacataataaccctgaccgcttagcagaggagacattgccatccccacttactagatgaggcaatgaagagttccgggcatgaatgcccagacccagtaccaggaactctggactcctagccagcaatctctagactagcccagcagcatttctgctcatctgacctgtgactaatggccagcagtgagtggctatgtgcagttctggaccagagggtaatctgtggcaaaagcttcaaagacaaaaaatacatggcagcatgtggggaagatgcccatcaatttctagccccatagtactctggttctattgatgaactgatctttgctgcacaagagtctcacggatgctctgactctctca

SEQ ID NO: 57055 - DNA, 1838 bp, Homo sapiens
gaggaggtacacacatacaccccagtggaagccaactcaggatccagctgctcacggagttcctccctctgctcagacaccaagagtgctgctgcctgagactgagcagagtagggaactggggaggatctccactgctttaaacttaaatgtaacttgggcaatttggactttctttgggctttaattcgcaagggctaaatactttgattttggactttaatctctttgggattttaatctctaaatttttccctaggaatttgataatgggaagggtttatatccaaatttgggacatcttattttcccatttattattgaagaaatctttatgcattttttattagctctttatgcattttattattgaagtatcttcactctgctattaaacctcattacagaacctctgatgaggttagtggtccatgtggctggacatcaatttggattggaaatagaacaggctctgaacttgcagtcttagacacaacatagccttggactggattttattaacacactgttctggctcatctcagaggcttatggaagtgaaatcaacagtgtcttaggatggtcccaggaaggcacaggaaggaacagaagttgatgctgggggagcgacctcctgctcagatagttagctcatcccctcctggagccagatgaccacatacctggttgtccaggggttaaacattaagcccagctggttaagataacaaaaatctggggaatttttatccccttccttctctagttttcatatagagggacttccctgaccccacacacttggcccctctctactccctttttgacccagctaggagtgatttgtcacttgagtttatgtatgactcactctcttcccctccctctccctctcttttggtatatgcctgccctgggagaacacacaagctctgctgtcagccatgtggtaagattcgtggggctggctctgccccgactggggaagcctgaagttttgggggatcagatcagctcaggggtagagtagcaggtcattctggtctgacacaagccaccccctctaatttaacattatcaggaataaaggtgctatttcgatcttcatttctctggctcttggtctgtcaatggagtggttctgtagtcggagagggtgaaagtggagttacaaatttgcccccctcaaacctgagaagcaactctttggaccaatagcaaagtgatttctcagctgtgaactaacagtttgcttttggaatgaatcatgtgctttcaattttccacttcaaaaacacacacttcagcagaagtcactttacagcaaatgaaagaagaaatttccccaggggagaaaggtgtttgttacttagaggagggtagaagggatgacttaggagcatctatttttcccaactgtgaagtcaccaggaggtctttttgatattattgcccttctagccaataaggcagtggtttgcaaaatgctagcaattaagcagtgctctaattggctgaattgtatctctctgtccagagttctgggagagaacataggcagggttaggcatgggagaatgtgtctgactcacaacgaaggtaggaagggctgggtgggttttattgtgggataactttcccagagcctcctctatttagctctccacatggaagcagggctgtcaaaatggcaagttctacagagtgccccattgcaactgctcctcattaaactcccttcagagtcaagaatgtgttcactctcctcttcctctttatatactcaccaccgccatcgccagcaccttcaccttcatcattgtctctctcatttatgg

SEQ ID NO: 57056 - DNA, 1100 bp, Homo sapiens
tccccaggtctctgacattctgcctgtcgttacacagaatgcatcctgtcacaccatggcagcatgtttgattgaggcagggccctagttaatgctttgcagtcaagcagggatactgggctggtgtaatgtaaaatgctgacctggggaaatggcatttcactgaactcactgaggcttgaaatgggtgtgctgtgaactgtacggccttgccctcctgaagagagggccccgagggatagctggaaggcctggcagagtgcctctcctccctctcagcatgccatggccttctagggggcttccagttccatgctgaggctatacttccctctcagggagagctggttgctcccgcatgctgtttgtagtgttttacatctacctctgcaaacctgctgggcgttctggctggatgatgctgttcacattccgaatgcttgtgtttacccacctcctcactgaacaaatttacaaagtcaacattttgggacatctcagagatttaaaaaaaaaatggcaacacaaaactaacacaactatgttgtcctctcccacccccttgtttctaacacatcatagagtggaattaacaagattctagtccttggcactggatcaattctggatgccatctccacccagtctccatcccgtctttcccctaactcttactgttctgataagtgatggtaaacagaaaacaggccattgtgtcaactatacctggcttccaatcccaactcagtctctcactagctctgtgatgatgagtaagttacataatctctgcgagctttagttttctcatgggaaactgatacacgctttgcattgttgtgctgagctttaggcaaggtatccaggatgtgcatggttttggttgctggttggtcattccaggatttcatcctttcgaccttgaccagttcagtgattaatggttttcatcagttaaatctggatgatggagtaattgagtcaggagtgggacagggcagctggacccagagcagacactgagcacccctgggcaagcccccaatctttctgtgtttttgtgcctccatctgttgtgccctgatctgaaatcattttgt

SEQ ID NO: 57057 - DNA, 620 bp, Homo sapiens
agccacatgaagcacactgtattgtccccatgtttttttctgatgtggaaactgaggctcaaatgggtgaagcaacttgcccaaagatgctgtgctaaaatgctacaaaaccaggattggaatgaaggcttccagtgtcaaagctcgggctctttctattccaacaggagttctcattctacattcatgtattcatttactcctttatttacatgctcaacaaacatgcattgggcatttactgtgtgccaggcactagggacacaaggatgacttaggcatggtccctgcactaaaagattgcagaatctagtggaactcacagtctagtcttgcaatatttattcaacaaatatttaacatttagtagaacaaacagctggcctgattgagcacagttcttaagcagctgtttcatgtcccatagttgtcctcgctattgttttagaagtgagtgggtggcatcccgttccccttactcaacaggcagtgctaactatggtccatgcccaggaaggccttgtctctgattcattaggtcatgagccttagacattgtattttttagaagctctacagatggagtcattaccagctgaaaacccaagctttggggtttc

SEQ ID NO: 57058 - DNA, 1211 bp, Homo sapiens
accccatctctacataaaaatacaaaaaattaaccaggcatggtggcgcacacctgtagtgccagctactcaggaggctgagatgggagaattgcttgagaccaggaggtggaagttgcagtgagcctgggtgacagagtgagaccctgtctcaaaaataaataaataaataaaaagatttataggagcactgtgacctgaccaaggacaaagaagtgatgcaacccccttggactcctgttgatgcccagatgtctgtggtcacctgtcacctcctgacctctaaccctccttgctcccccttcccaatatgaaaaaaagctcaatatctatgcctttcaagatggttcttcagggcattattccaccatcttcttggcttgctggctctctgagataaagtcactttcttgccccagcaccttgtctcgtgacttactgaccgccatgaggtgagctttggactcagctaccctaacactgccatgtgtaactgcatgatgacaatgttgacttttatctgagccctgtaatcctagaaaacagtgaaggttaagaaatccactcaactttttattctggaaaacagtgtacctataaaaacaaaaacactttccatatgacttagataggactcacagatgcgtgccccacctcccaccaccgtcttgtttacttatgtcaaggccagacacagaccctccccagtctctttctttgccgcataaatgattaattgaatgcttgtccccactgactaataagaacaaaatgcttgttaaccaaactctggttaaacttctctccttcctccaggttctgaactctggctcgccctcagcctgagccgcaaaatagtctggcctcggagaaacagtcttcagtttcctataggatcgtgccacccattcatcccccttctcattcattcttgcctgtttactcctctctatgaaagaaaacccctgtttgcctaactcttggggatgcctgcagatcttggggtcagagaagctccctgctgcaataatcgctttccccactctgcaataatccttttaaataaaatctttccttactaagtccagatttcttttttatttgacaatgaccacaggcaagtgatttcactgcagtttcctccatctgtaaagtaagaaaaatatgttgcaaaattctaaaatcaaagacacgaaagtgctctttcagcc

SEQ ID NO: 57059 - DNA, 832 bp, Homo sapiens
aagaaaggagattgtgtctgccaagtaaagccagaaattaaggatgaattccaagccaggagactggatgttagatttagtgtgttcattttttattgctgcataacaaattgccacacatttagaggcttaaaacaacacccatttttaatctcacagttcatgagtcagagctggggcatgttccagtgaattctctgcttagggtctcagagggtgaaatccaggtgtcagccaggctgagcccttccctggaggccctggggaagagtccccctccagggtcattcagaactcagctcctgtgcttgtaggactgagatctcaattcccttgctgctgtcagtggaggctgccctcaccccatgtcaaggggttccctccatctgcgggccagcaagggctcatcagttctgctcatgcctctctctcacgtcccctccagccaccagcaggagaaaactccgctttgattcagctcatgtaattagatgaggcccatcccaatgatttttctgtcttaaggtcatctgtgccataacatattcataagtgaaatcacattcatgggttccatccctactcaaaggcaaaaggattttaccagggtgagtgttgttggggggagggttgttgccatctataatgaaataattacacaactcaccatgaagtagaatcagtgggagtcctgagcttgttttcctgcaactagacggtcccatctcagggtgatgggagacagtgacagatcatcaggcattagattctcataaggagctcgcaacctagatccctggcatgcgcagttcacaatagggtttgtgctcct

SEQ ID NO: 57060 - DNA, 748 bp, Homo sapiens
gggaactagattacctaaggcttctaagtatccttcagctctagtatttaattacaattacacttaacacatatccaacaatcaaacctgttcaaaggaggaaacagtcctagtgataatgcttaatgtttgtggagaacagtacagctttcagagcaattccatgcatgttaccgtacattacatcatgtcagcattcctcagtgagtgactcatagcccacccataccaacatcacctgggggaatggtagaaatggagaattgtgagtcccaacccagccctactgtatcaaaaccatctggaggaccaggaccctggaagctgaacttttaacatgctctgtagtgattctgaagaaaactacaacttggaagctgtgatatctttgtccccagttcctggcacacagcttcaaaaactcttggaatttcctgataggaatgtattttgttattcataacaagccctttttgaccacagtaaagtgtataaatgctaatggtgagcccttagaaagtttcaagggagaggctggccatgctagaaagaccaagcgtgggattagagttggaactttcagccccagcccccagctctagggaggggagaaagactggagattgagttcaatcacaaggccgttgattcaatcaatcatgcccacataatgaaactcatataaagactctggacaccaaagctcagtggatctttctggttggtgaatatattaatgtgctagaaa

SEQ ID NO: 57061 - DNA, 1202 bp, Homo sapiens
gcggaagccacagccacgacctcttcgggctcccagcgtctctgcacatgtcagccactcccccatcctgtccatgcctctcctgctgcccacgcagtccccagggccacctctctgaagtgctctggcctcattcattattcagccatttcctcagttcagaggccctagggacagagggttggctgtttgttcgctctttcatctcccaggttgtgtgaagaatgcagaaacgctgggctggtgtccaagatgccaacaagaggctctcagtcctgggtctgtgggagccctcatgctgtatgctccagggcccaaccctcacaagactgtgcccactggaattaccccactgccagagcatgtccccctgtacatcactgccagagcagggtgggggctctgacccccaccctggggagccaccactccacccaccaatgccccatccctgcttctaagtgacagtggagctgcgatttcatcccaccatgtcgaagtccaagtgccagctctttacaagcagtgagtggccagacctgactattctgtaaatagcatgtgagtcacccaagaatgagctttggactgaaggcagcagcaaagcctttgcaaaggcagagggagaaagactcctcctgaaacgatgtcaagatacatgcccactctaaagccaacacgggaacccgctcagtgtttgtgcagccctgattctgtgggctgcgtggcagggggtcgggaggcacaggtccttctaatggtgccacatatcatgggacatgcgtatggagccgtgacattgcacttcttccctcccaggctgcaagttcctctttagtcactcaagtgcccctgccaagaggtaccaaccagaaacttagccttcagtcacctgaacaaataccagggttgagggagaggagagatacagggtcaaattaccagacccccaaatactccttatccctttgcctgtcttggatcatttccccacagctttgaccctcccacaagatcaaaactggagccatccatacacatctccagcagtctagaggtggatacatctccagcagtctagagttagatgggccaggatgaggagatggggccagcctgggctgccccccaggcaggtggaatgataaccaccatgggctccccgctgcctcagacaggggagggtgcaggatagatgtgcc

SEQ ID NO: 57062 - DNA, 1351 bp, Homo sapiens
aaaaaaaaaaaaaaaaaaaaagaatttgacaataaccctaagagttatgatcatcgacatattgaaagcaagaaactgaggctaaggaggtgaggtgaatgcccagatttcacaactggggggtgggtgctactgggatctagtgcatagaggccagggaagctgctaagcatcctacagtgtgcagaacgctccccagcaaagaattatccagccccagaagttaacagtgctgaggttgaaaaactctggtctacagcctcctagacagaaatcacagatagttaccatttgccacatgaaagagctatgtgccagcactgcagagggcagggggaggtgcttgaaaaacagtccccactctggagacatttgtggtgaaattgcaccaatgcaagattaggaaagagaggaggaggtgccagggggctgagtcacctgagatgacaaagggaaggggtgaaatcactgtcttttcacaagtgagaagcacagagggtggaggaagggcccagagccagagacaacgtggatcaaaagcatggagctcctggagaggccactctctggaccccggttttgtacaaagcatgaatgacacagcctgctcctccatctgatggaaagttgcccaacctccaataggtcagcatgtcaacaagatgccatcatcaacatcactactgtttatagagcacttactatgtgtcaggtactgcactgagggcaaaatctcatttagtctaatatcaaccctctttcccaagtaacatggctagccccagactgccagaatctagagcaccagctcttaaccaccatgctgtgcttgctgtcttggcatcagatgggagagtgggcaaatggatgagagaggcccacaccatgctctgcccctccacatggcatgattagacagcctgcctgcccttgccatgtgttttcactcatcccctgacctgctgcataaactgtaagggtctcccaggctctaccacagtgtctggcatacagcaggtgctcaacacacattttttgaagtgaactgaaatgagaaggttggctccttgagctccatggatagaagctaaagtgacagcctcttcctgatcacctactctgttcaggccctatgcttggcactcactccccagttagcgcccgggagaaaagacagctataaatactatcagcatgtggcagagggagtgccggacaccacacaagtggggcaatttagagctcacgccttgcatgcttagagatcaggaggcagggaaagaggagagagggtctcaccaaacccaggcacttgggctgaaactgaaaggaaggggaaaagttctgacag

SEQ ID NO: 57063 - DNA, 468 bp, Homo sapiens
gcccctatgaaggtggtcagtcctcaggctccccggggctcatctccatttttggaatccaattacaaaacattgatccgatcccactccagagaactgatttatgccccggctgagggaaaaagaaccaaaaatattgtacccatttgttcaagctgtggttggttaaacagggtcacctctcgcctgccaactggcctggtcctctcagctcctctggcacctgctggaggcagctggatttggcaggtggccaggcaggtcagcccagccaagaggacaaagcccagactgtgaacccatggaaatgccaacccaatgccccttggaggcccccagggctttctgagtccaagacacacacacacacacacacacacacacacacacacacacacacacgtacctaacagttcatgagttactgaatggaaaaatcttcctagtccctagtttttcttctttctt

SEQ ID NO: 57064 - DNA, 801 bp, Homo sapiens
gatccacacagtacaggcccaaggcaggacagcaagacccaaagcaggaagaaaattgtggggagaggaagcaggagaacagtctgggtaccctggcgacatttgcctgagaagggaggaggctggtaaggggagagaaggtgataggggattctgggagctatagcagagccaggaggccccctccccccgactgccctgctgctcaaaggcccagggtatgcagggcagcctgtgcccagcctttgagccaggtgagtcagcctgacttctgaatattcaccactgcagcagttccaccattccccacagcccactctgcacacagcagccagaatggtctttcaaaatctgatcttatcactccctgctcaatagtgtcctatcacgctccggacaaagtctgaagtccttactgtgagctagaagttcctaagtgatctggcttctgcccacatcttagcactcctgacactgtaacatacatacatgtgcatttatgttggtctccccacagaatgccagctccctgggcaaaaatattgcagtcctcactgctatgtagagtcctcacagtatgtagagcagcacctgccacatagtagatgcaggatacgcctttaccgactgaacacctattgcaagtcaagtcctggcaagcactgggaatggagcatatgtgctcacgatccatgcttgtctcacttagcttgggggttcttaccctgagataatgagggggtttatgcaggggtttcagagagtccttgaacccccagaaattagatgcaaaatgagttt

SEQ ID NO: 57065 - DNA, 610 bp, Homo sapiens
tggcacaggctggatggcgcccacagtgacccctcatcatcctgccccactgtcacagagcacccattatcaatggtgacaccaggaagacagacagacactccagtgcagtctggcaacatcatccagctgagcccctcatcatcctgctatgtgaccacgggcccttccacctctgggccagtttcttccctacaccaagggggatgggccaccgtgtggaatttcaggaattcctgaaattcctgttagcttcatgttggtagcttgaactcagccatggtagaggtatttacacctcagaaatcagcaaacattacagaccagggtaccactgtttaggctgacatcccaaatctcctcctcccagtgtctggccaggaacagagcagctggtccaagcagattgcctcaagtgctcagcatccggctgccttccagggactctcccctgataaatatggatgcacacctggccagcagcaggcctgaaccccttgcccccacacacacacatacaagcgtgcacacacacactctcatactcacactctcatacactaacacacacacactctctcatacactcacatgcacatacacccacaca

SEQ ID NO: 57066 - DNA, 2578 bp, Homo sapiens
ctgcagctcagtgagatgaaacaccttgcccaagggtacacagcctataaagtggcacagctaggattcgaactctgaccagtgctgctccaacactcaagctactttcatcacatggcactgcctccaaaggatccacacaagtcagcgaggcagaaagacgaagacaataataaggcaagcaccaaaccagaaaagaacttggactagttctttagaacaatgtgacttcactgggtatctcagtgccttagggttactgtaacaaagtaccacaaattgcgtggcataaaacaacagaaactctctcgcagttctggaagctagcaatctgaaatccaggtgtctgcaaggccatcctccctggaaagtctctagcagagaatctttccttgcctctcccagcttctggtagccccaagcataccttggcttttggcaacataaatccaatccaatctcagccttcatctagacatggtcgtttttcctttgttgctgtgtctgtatccatacttccctctttttaaaaggcaaacagtcatcttggatttggcacccaccttaatcaagtatgacctcatcttaactgattacatctccaaagaccctatttctaaatgtcacattctgtggttctgggtggaaaacgatttggtagggcccactacactgggccacaaagttgtcccatatgaaaataatacccacttcatggtagtgtggtgaggcttaaataaacttatatatgtttaaatttcttataatggtgcctggcaagaaaagtataactatataaatgttagcttctcacgttaggactattactaagagtaacaggaggtgatcaaaggtctctgattcagaaccaagtccttgggatctgggaatccccacaggcaggtaccgggccctaaagatccaagcacagaggctttgaatccgctccattattctcgaggcacaatattcattctctatgggagaggacggaagtctaccaaggcgggaaaagagtaatcaaagttacaccccggctttaacgcactgacgctactgctcagaggctcgagatgtaagcggggcggcagaggcaaggcggggggcctcaagcgatgtgagtggggccctgagcatgagcaggggtcggcggagaagccgagagacccgccaagagggaaggaactgccgggcggccgagggcggagttgggaaggggtggctagacgtcgcaggccccgccccggccggtaccaactcaccccttgccgccggccccgccaggcttcggccgctttttgcgacgcttgcgaccggactcagatccccggtcgacgccggcatctgccccggacaagtaacgcttcagatactcggccttggaaagcggcggagctgccgccatggcagcggcgggggcagagagacgggtcggcgctggggacaaaatgcctcaacgcgtaacggacgccagccacccgacagggcggggccacggccggaagtggcggagagtgctaagaatcgcgcggctggcaggtgcggccaccgggacgcgctcgcaggctagccagggacgtgcgcaccttcggggcgctccacagccctgggacgacgccaccaggtttcttctcttcattcactcacccacccacccacccatccatccaaccgcagcaagcgctgttctatgaggccacaacctgacccaaaggaccccgcccccatcggccgcctaaactccagagcacgagcaagaaagtggagggccacgggctgcagcgtagccgagtttgaatactggttccatagctggctagctgtacgacctcgggcaagttatcacaaaacagggagaatcccggcacctaactcggaacggtcacaggctgagatgatattactgtgtgaagtgcgcagagcggtgttgggcacatggtcatcggaactatgttcgttatttttataagtatctttaagtggggggaatctgctccactaggcttccaggtacctaccgtccaagaaaggaagccaggaagtgcaaaccaacataattactatgaaaaacgtagtttctaagacctgtgtaactcttctagtgttctattacaagtagcccccagttatctcttgaaggaaactgtaaaacaatcttgccaatgagaaggacggacctggatcattttttagcatagtaaaagagagaaaccagagagaatgaattctaacactcaagttttggggggaaagaaaagactttattctttgcagggggtttagagctttacctgaattatctcatttaaccctcacaattctcaaatcgtttcattatcatattttacagataagaactgaagcgtggcaagattaaggaagttgctcaacttcacatagtcagaacatgactctagggagtagaggctagcgaagtggggtgcaagaggtcatccaaatttcttgaaataccagatctttttacctcatcatatatgttagattgtcagttttatcgttttcttcccagctttattatttgacaaaaaattatatatattcaaggtgtacaatgtga

SEQ ID NO: 57067 - DNA, 1880 bp, Homo sapiens
cttctctgttcatgtcctgggaagaaaagaatacgttcagtacaaagagactgcagaacagcttctcctcaagtaataaccagaccgtccccttccatcagaccgcagcccagctgtctctccctctcgccactccacagggtccagactgctcctttcgaatagtacaggtggtgtgagccaggctgtccaaatggtgagaatactattcataacaactactgctcatttcataccctcagacaacatttacaaagcattttcacaaatcttatctcacttgagctgatgacaacaccagtaccattttacaaaagaaactaaggctaggagacatagggggatttatttaagatccgaccgcctggaccagagctctgaccccagtaccgaatctctctctagaatactgaggtacctgctctgaggtcctctcacctccagagccctgacagacaaagtgtagcgcactccctggtcctggatcctgcctgccgactggatctccgtgttgttccagccacagtgctcgcaggaaaaggagctcactattatttctctgaagaagggaatcttggtgagcaggaggcgcgtcatgccctggtgaagtagaaagtagctaaggaaaaaaatcaatgaaactccctttccccgccctactatctccgggcgctcctcggggtccccggccgggcccacctggctgggtctgacccccggctcgtcccggcacaagccctacccacccgccgctcgcggccgcgcccccgcctcacattgcagtaacagttcatgcatagcgactcgatctcggtgggctgctgctcctcgtcctcggcgctgatgggccggaacaggtgatcaggggcaggcggcggggccggggcgggcgacggggcgacggcagcccccgggggccctggttccacagccccgctggccgccatggccaccacgcgcaattcagacctcggcttcctacttccgccgctctcgcggccccacccctctcccgtcacttccgccagctgccaccaccccaaaaaaagccgcagactccgggcactcggggaacaatgtcgtcaagggctcccggttcccgggtttatatggctcgaaccttacatcgccagccggatccacctcaactcagccgtcacttcccctaagacgtcctcttagaaccagggcacttttttgctccttcacaatagctccaccgcacggggttctattggtccctacgtcggtctacaagagccttgacgacaaggggctggacttgtccctgaggaatccctgagaaggtgcgcccggagccgggctgcttggttccagtgttgggccacatactgcttgcgtgctaggtcgcccctccgggtggctcagcctcttcccctctctcacaatccctgaatccctctgtccctttctgttcttcccactccctattctgtcctcatcactaccttccccaatcccagcctcaagtacacagccctcattttcactcctacctcctcatccccatcatagcccttgacctatgcttttccagtttcctaacaacaacaaaaacaccttttattatttctacctttctagcacttcctctctccaggtgctgggtccacaacccagttctgttgccaacattgtcaaaatccacggtgtcagggaagaccagcctgcaggcatgatgagcctacatatgtgtggggtctgtgctatggggttggggagcaggcaggtgctgagaacccggggacagtaggctgagctgggaggaaagggggccggacagggaagtccaaagacaaggagctgtgtttaccctttccacgtcctccaccacaccccagtttcagttcccaggggat

SEQ ID NO: 57068 - DNA, 2248 bp, Homo sapiens
ctttgtccccaagtcatcgcgcactgatcctctgggggaaccaaggacgcagggcgttggccccagggtcgagggctcttgtcctagccctggccagtaacaactcacgcacgaagcacaaacacattgcccatacaaatccagacctacaacactctccaaagaaacatagatgcgccacatcatcctttgattctggggactgcagcgggcgtcctcccgattgatcccaggtcccgcgcctcagtgagcaagggggcaacagctacggagttgtcaaggcgggggctgcaggcagagggcgctaaagagcccaggatggccgggatctgcagacagagctagcaccgctcctttcctctgtcccagcagcggccacagaggttgaggcagcagaggcaggtcatcatggcatggcccagctgtctcctcccttcgcctacaccccttcccctgggcactcacgcgggctcgcgagccatcttctgctgatggatctgctccaccctgcctttgtccccgctggtctggctgaagtagtcccagaagcctttccgtgcctgggtggccgaaaacgctgtggagagggactaggtaatcagggcctgggctctcctcccccagggtggacagggccctctggccagcctccacccacacccccacgttgaagtcagggtcggagacccacctgaaagaagagccagagcccaggtgagcacggcagccatgcttgccattacctgctctgagaagacaggtggagggaggcctggttaggggaagaaggagacgaagggacatggcgcaggggacttgcccagggggcctctgcaggggcaactgcccgaaatcctgttaccccttccttgggctggggagcacagagctgttggggctcaagaggactgacctaggtgagtcaaggaggctagggtgtcttcctcagacatgggaagagggcgtgctcttgctacctcagtcacatagcagggagcgtggtgctctaaccccttcgcaaaggtcccagaccccaggaacagttctctaggccacttctaccacctctcccctgcccacctgtctccctccctcccatttcatggtggaaaaactgagccataatgagggcgaagaggcaactctgccaaaatgttccaagaggacgtcttaggggccaccccaggctctcccctgaggccacctgcaatgccctcccttaggactgtgacccccatccctctgccccagctgctcacctgctcacgtctgggcacagagagcagacattctgctttatactccagggccctgagcctctggcaccaattgctctgagtaaataccacgtggaagttcaaaagaagttgacctcagctgcctcccagcactcacctcctgccctttccctggcacccagagggttaatgagtgccctggtatcaggggctgccccagtagagaagtgcttcccaggagctttacgggggatggggctgaactcctcacccagtttctcccaaaccccatgacctttaaccttcccactgacctgctggctggcccaccaacagagaagaacctgtttgtctgccaagggcccctctcttacacaactacccagagtcactgtgtcccagccggcaagatggacagtgttcacctaccagccagaacccgagcagcccctgaaagcttcactacaggttccgcaggcatcctcagccagcattcatagggttaaagaccaaccacatccctctttatgaaacaatcctggaacaagcaagggaagccaggcagggtgaagatgagatggcaagaggcatctgggccagggactctgagccccaggaactggagcgaaagtgagatttgccccatgaggaaaagctgaactccactcgcagggcctctgaggagagcaagcccaaatgctcagatcttctctgatgacacacccactccgtctacagtactcatacacacgttcacaagctcccgattcttggtcctaaatgcatcttgaatcaatcccctctcctccatttccactaccatcattgcaccagttgtctgtcaccttgattgcattcatagcctccaacaggtctttctaccacactcctgcccatttaattcatcctccactgtggctcatcctgactcatttccagtctcatctgctgccacataaaaccacggcattccctgagcctttatacaggcttccctctgcttgaaatag

SEQ ID NO: 57069 - DNA, 3484 bp, Homo sapiens
aattatccgggtgtggtggtgcatgcctgtagtcccagctactcaggaggctgaggcaggaaaatcatttgaaccggggaggcagaggttgcagtgaactgagatcgcaccactgcactccagcctgggtgacagaataagactctgtctcaaaaaaaaagaaaaaagaagaagaagaataaattcactgggaagataaaacaattctgaacctgacaacatagtctcaaaatacgtaaagcaaaaagccactgagtcccaaagagaacttgacaaatttggtaggagattttaataccatttcctcaaactgatggaatcacagaaaaaaaatataagaacaagtcagcaaacttgatatggaaagaacagcatccccacctgagagtcagcagcctccatgcaggaggaccgaggggaagccagggagcagggcagcctgagccaaggccaagcccagttgaggacaggaagtggaaggaggcacctaggaaggctgaagatgcagaggagtgtgttccagaggcagtgggaaaactgggagggaatagttctcgggatgttggatagagagaataagcaaagaacaatgcaggaagaagagtggggtgggaggccgtgaccttgctagagagccttatgttttgggctatgaccagggctgacagaagtgtgaggcatggcgggttcagaagagagatcaatgatgcatcgcacatctctaaagctgatgaaggcagcaattggcactgaggccaacctggttgggactcagagaggtgggacacatattgtgtgccaggcaccctgccacatcttggagagaataagacacaaaccctcatctagtgggttggggaaatgatgcagggctcagtgtggctagcgcgttggggtgggaagcagcctgggcacgcccacaaggctctctgccttccagaatctggcccagttgggtttgaaaagatttaatgacaatgagctctctatggacctaccttgtgcccagtatttacctttcttatctgtaacgctcaagtcaatactctaaggtaggaattgttatcctcattttatttacagagaaactggagttcagagagattcttgcccaaggtcttgccctgggccaattccaggtctatctaactccaaagtccatgctcagtacactgtctcctgcttgggagcaaagagaggactttgctcctaagaccagacccataccacaaagagcctcaacacttaactactgggagaaaacaccgtcctaagtaaaaagccaggtgctcttccccttaccccagggggtttaggatttgggagaaagaggcctgatggaatataggggtaccaggtccatgtgttaactgatctgggtacaagaacagtaactcaaggccagccagggaaagaacagccaagccgaggcacagctgccaagtcatcacctctcgttccttgtcccaccatgccttgtctcagcacgaacataaccccctcagtttccctcttctcctgtctcctgcataggcagaaccagttctgagtgatagccaggacagcaggtcctcgggtcctcaggcttgccactacaacctgtttaccctgcgcagaccatgatccatcaggtcgagaaatgccccactgctagatgtttgtgtcaaaaatgcctgccggtggtgcaacagctgggtgggaccagtgacgtggacttgagtgccacaaaatgtaccgaacacattctgagtcaacatagtgatggtgtgccaactccagataaagattttcattattatttgtttgggttttgtttatatgtactcctcttcatcaccaaagatttgaggctacagaaaatgaaaattgaaatggtaataaaagagaggggcttgcagagaggaccacaggatggggaaaatagaaataatcgcagaaaatcatgacccgatgaagagcacaatcatagaagcactaacagatgacaaggttgccagatcttcaccattggttttgggtttcgtgaaaacccgcgaagagagggattcagtcaattacatattttttttccttctttcttttatttttattttttattttttcttgaaatggagtctcattccgtcaccaaggctggagtgcagtggtgcaatcttggctcactgcagccttcacctcctgaggttcaagccattctcctgattcagcttcctgaatagctgggactacaggcatgaaccaccatgcctggctaatttttgtatttttagtagagactgtcacacgcgagacagggtttcaccatgtttgccaggctcttgaactactgacctcaagtgacccgcccaccgcagcctcccaaagtcctggaattacaggcatgagccaccgtgcctggcttgttttaattttttattataaacaacactgtgatgaacatccacatagctaaatgcatgcattccatgatcattttcttaagataatttttttcttattatttgtgtatttatttatttatttttgagacggagtcttgctctgtcacccaggcaagagtgcagtggcacaatctcggcttactgcaacctccacctcccaggttcaaacaattctcctgcctcagcctcttaagtagctgggatacaggcacaagccaccaagcccagctaattttgtatttttagtagagacagagtttcgccatgttggccaggctggtcgccaactcctgacctcaggcaatcgcctgcctcggcctcccaaagtgctgggattacaggcgtgagccacctcacctggccttaagatacatttttgaagggaagaacattttctgtccaagtacattcctgttcacaaacccttttccataacactggagacttcctggggaggttggaaccaatggcttagactccaaaggaatgaatgtaccataaagctttcagcaatcttctgtcaatgctacttgtatagacttccagacaaacattgaagattgaatgcatgcatctaatttcacttttttttcctgaaatcctcctgaaactataatgaagaaatgtttgggaaaagatgtagccaggcactgtggcttatgcctgtaatcctagcactttgggaggccaaggtgggcagatcgcttgagtccaggagtttgagactagcctgggcaacatggcgaaaccctgtctctactgaaaaaatacaaaaaatcagccaggcatggcagacctgtagttccagctactcagggggctgaggtgtgaggatcacttgagcctgggaggtagaagctgccgtgagccctgattgtgccactgaactccagcctgggcgacagagtgagaccctgtctcaaaaaacaaaaaaaaaaaaaaaaaaaaaagagacgggatcgggaaaaggaagaaaagaccacagcacaattttggatgttagaaagcaaatggaccagttgtgactgatttagccggccttg

SEQ ID NO: 57070 - DNA, 2479 bp, Homo sapiens
gactgttcaagaataaacatagacaagacttctgccctttcagaaaccagccaagattcttcaacccaaggcagctgtgaagtataacacatctctggctcaattttctccatatggtttggggttccatgaatgagtctgtgggaagatttcctgtacgtagaatgcatgtataaaggaataattattctatggttcgaaagagaaaaaaagtaagatcaaagtgtagaagctatgttaagaaagattccagtttaatgatttttgaaagagcagtaaaaataagaccaagatgtggaagctgtattgagaaagatccaatttaattctaataatctttaacagaattgcccaaagatagaatgaattgttttgagagatggtacagttagctgtcagtgggagtgttcaatactaagcaagattcactcgctcaaccattgagtgatgaccacatgcaggcactgtgctaggctctctgtattttcagtaagctattgttgtacaacaaagcaccctaaaacagtgtcttagaacaacagtaaatgtttatgatctctcacaaagtctgtgggtcagcagcttggctgtgtgtttctggttcagagtctgtcatgaggttgcatctgaaggcttggctgaggctggaggatctgtttccaaggtgaatcactttacatggctggcaagttggtgctagctgtttggaaggggcttcagttcccccctgtgttgacctcttcacagggctgcttgcacgtcctcccaacatggcagctatcttccctcagaatgagtgatccaagagaaatcaaggtaggtgccacaatgccctttatgatctagacttagaagtgaaataccatgacatagcctattgatcacacatcagccaccattgtgagggctagctaccacatcctgcaaatacaatgatgaacaaacaaatggtgtgcctgagctcgagggctgttagcctagagttaagatcattccttaaatgatatcaaaggaattagggctgagagacaaggttgttccctccaaccctaatgccctgtgatcttatgattccaggtcctaggtcttttgttcccatatcaccaatccattatctcagaaccagcagctcaccaaaccctcgctcctcagatgtgggccattcgggggtttttattgtgcccctgcattgtcagctacttgtcatcacacagcaagatagcatgactccaccctgcacgctctcagacaggagacaagggagtgcccaaataaccctaagcttgttgtttctgtccccaggacatacctcagcctcctcctgggagcacagggcatactatgataacagcaggaggacacggcgtccccatgcaggagctgcttttgatcctgccaggacaatccctcaagagcagcaaggccctgtatgtacaggaagagagtggccctcagatcacttccctttgccctaatcagggccacgtagtacaccagagacctcaggggtagtgaccctggatgttctcagaggacttctgacctttgaacttggggatgggcataggagtgtggctagcatctcagcctggcccaaaccagtgctggtcagcatgcctttgaggcactaacccaggcccacagaggagtcatctacttccaagtcacctgaggagccagtggtgaccagggagataatggcctgaaattgtgctggctctgagggactgttgggtaagctaatgtgggctgggctggagttcaaacacacctccctggtgcccacagggacctcccagcacacgctctcctatgggtctcaatgattcagtctttcctggtggcatagactgtagcctggagaagctctggggaatatttcttttcttacttatttctggttttaaaagtactactctcaggatgactattgttaaaaacaaaataaaacaaaaccaaaaaataacagaaaacaacaagcgttggagaggctgtgaagaaattggaaccctgggcgtcaccagtgggaatgtgaaatggtgccactactataaaaaaacagtttggcggttcctccaaaatttaaatatagaattaccgtgtgacccagcaattccacttctggatatttgctcagaagaattgagagcaaggactggaaagatatgtgtacacccccattcatagcggcagttttcacaattgcttaatggatagagttttctgtttggggtgatgaaaagattttcagaaatagtggtggcggtggttgcacaacattgtaaatgtaattaatgccactgacttgaacacctataaatagtttaaatggtaaattttatgttataaaagtaatactaaagtggtggcatttttttcttttcttcttcttcttttttttttttttcttgagacagggtcttcctctgttgcccaggctggactgcagtggcatgatctcaactcaccccagcctcaa

SEQ ID NO: 57071 - DNA, 3289 bp, Homo sapiens
atttttttttttttttttgtatttttagtagagatggggtttcgccgtgttagccaggatggtctcgatctcctgacctcgtgatccgcccgcctcaacctcccaaagtgctgagattacaggcgtgagccaccacgcccggcctaaaaaattattttcaatccaaggttggttgaatccatggacacagaaaccaaggatacagagggctgcctatagagctcctggcacagagtaagctctgaaaaatagttgctgttattataataatcatactgtataataatcatactgtgttcctgatttggagcaaagcagggagggtagcagagtgctccctcctctagtgagagtggcagagtgagactcagccctctgaggggcgccaggtgggccagaggcagggtgatgggtgggaccagcctgaggcctgactcctgcccttcttgccccccagccacactccctgggcaggagcagctggcttgagcagaatcttgggacctgaggctctcaggggacctcccattgggggatggagggcaatggtggtggtgcccaggaggtcttctacttagatgtctattggatctctaaatgaggctgcatgcataatcacacacaaacatccactgagaaggtgacacaccacgtcagcatgggtccctctgccggaccacaccactcctagtgactatgaggtgacatccaggcacgttgcactattggctcctgtcggtgagtgcagtgcctgacaacagtgagctacatttatttgtaaaaatgaacgccatcagagtagaccacaattgtactaactctaatttgctttgtgttcattttttcagtttccagaagtggcttaatgtttcctagggtcaaaggcagtcaaatgacctcctgactctggcaccccttctgctgggtccccactgccctgtagtggtccccacgctaccatgctgcctcctttttgatgcagcctgtgccatctctccgtgattgttggggtcagatgctggagtccactccctggcttggcatccaggctccaacacgtactgcctgtgtgtccttgggcaagtctcataacctctctgagcctcagttaccttggtgagacataaccattgtacctgcctcctaggctgtgaggattcactgagatgatcttatagtgcttgcaacaatgtctggcacataggaaaagtgatcactaaatgttagccacgtcttactcctgcaaggctcacctccctggaacccatcggtcccaaccctgctcctgaatcaggcacagtccagcttgcagcgggagcaaaggtcagtactcagtgcccctgtcccttccccaggccagaggggaggaggagactgagtcacgaatgacacctcagccgcagtttgacctccaggacttacagtcctagcagccggtgccactagcatgtgagaggtccagaggcgcttctgtctcacccgcccgcctgggtgcacccatgctgggagcgcctgcaccatttgagcatgtccgagagcatccaccagagtgtgtgtggattcacagaagtgtgcaaatcactaagaaccaagggactggcacagcccatgcgtgcacccacgctcgcgaggggacctgctgcctttcaacgtggcggggacgtgacctgttaatgaatgtatttacttcccaaagtctgagggtacgttttgcatcaatctgtagatggatttgttttggggagcagggagagaatgagagccccctgtgctcagtcttagagggtgcaagtagctgatgggaagagcagactgccttccagccaggcctggtcctgtgagtcagggacgtccatcttagtgggcatgaaaggcctgtgtgatctcgagggagacatcgcctctccaagcctctccttatctgtgcaacaggcagacttaatgattggtgaggcaatgaggctgatagctcagcattagctacagccacccctcctggccaaccacacagggatcaaaccaggggtcagtccagaggtcagagtcaggagcagacaactcagatccagccagggacaggcaggtcacacggacatgtgcctcacgtatgcttcaaggggccctcccccgggcagaactgaaggacagctcctgttgccataggagggagctgggtgagatactaggaggaacttccggcatgatgatgtgtgatgaacaagggcctctggccaacaggtctgaatcagggctgcccagcccagcctggtgggaagggcatggagcatgggggctcatgtactaaacctcacctggacacaaggtgaaacagcccaaccccagaggaccatttttggccccggatggtcaaatcccctcttcctcccatctaccactggcttctccctggagcagtcttcatcccaggggagccatgatgggagagaggggcagcgcaggctggccaccaagagatcccctgccggggtgcaggttggactgttggtgaggggccacaggtattctcaggtaccaagcccttggaaggagacaaggtaccaggcttcctggaggtgtgctacatctagctcagcaccctgccaggtctctctacccacatgtcctgacctccctgggtccgttgccatgcgggagagagaggccaggctcctccagaccctctgcagagatggaaaggcttggagggtctggggccacgggaccccgccagcccattctagcacacccgggcccatagaccttgttgcctgcccctgcctggatctgggtccccactgtgcctttgcctctggggctatggagcaggccgcagcagaagaggaaagggcatccccaataccaaatcctccagtgaccacttcttcaccttctaccccaccaccaaagtctgcaggagacttgagacaggtttgttctgggcgtgtgactgatgcctctataggggtctcagtgctctaagccgtctggtatttgcctggggtgtgtgaagacctggattaaggttcccagccttactactaatgggctgtgcacttggagcccttagagccttaggtttctaacctataaaatggacttaacgtctacttcacagggttctatttgcattttaacagaaaacaaagtcttaagtcaaaggaatgaatctctctctctctctctctctctcttttttagaccaagtctagctctgtcactggagtgcaatggtgcgatctctgctcactgcaacctccacctccggggttcaagcaattctcgtgcctca

SEQ ID NO: 57072 - DNA, 2845 bp, Homo sapiens
tttttgtatttttagtagagactgggtttcgccatgttgcccaggctggtctcgaactcctggcctcagatatccgtccgtcccagcctcccaaagtgctgggattacaggcatgagccactgtgcccagccaggaatggatcgctaatagaggaattccaagtctcacccaccgataaagaattctgagggcagagccgggccactttctcaggcctctgatttcatactgtggtgttagttacttctgagaggacagcttgctgccagagctctattttttatgttagaggctccttctgcctgcagactctgctgtctgggaagggcacagcgttaggagggagagggaggtgtgagtccctccatggacccgctgctttgtacttctctatctcatttccttttcagcaccactctgggcaatcagtattccagccccattttatcctcagaaaattgaggctctgagatgttatctctgtgacctgggtcctattacgtgccaaaggcatcatttaagcctaagatgtcctggctccaaggtgtcagcatctggaagacaggcgccctcatcctgccatccctgctgcggcttcactgtgggcccaggggacatctcagccccgagaagggtcagcggcccctcctggaccaccgactccccgcagaactcctctgtgccctctcctcaccagaccttgttcctcccagttgctcccacagccagggggcagtgagggctgctcttcccccagccccactgaggaacccaggaaggtgaacgagagaatcagtcctggtgggggctggggagggccccagacatgagaccagctcctcccccaggggatgttatcagtgggtccagagggcaaaatagggagcctggtggagggaggggcaaaggcctcgggctctgagcggccttggcccttctccaccaacccctgccctacactaagggggaggcagcggggggcacacagggtgggggcgggtggggggctgctgggtgagcagcactcgcctgcctggattgaaacccagagatggaggtgctgggaggggctgtgagagctcagccctgtaaccaggccttgccggagccactgatgcctggtcttctgtgcctttactccaaacaccccccagcccaagccacccacttgttctcaagtctgaagaagcccctcacccctctactccaggctgtgttcagggcttggggctggtggagggaggggcctgaaattccagtgtgaaaggctgagatgggcccgaggcccctggcctatgtccaagccatttcccctctcaccagcctctccctggggagccagtcagctaggaaggaatgagggctccccaggcccacccccagttcctgagctcatctgggctgcagggctggcgggacagcagcgtggactcagtctcctagggatttcccaactctcccgcccgcttgctgcatctggacaccctgcctcaggccctcatctccactggtcagcaggtgacctttgcccagcgccctgggtcctcagtgcctgctgccctggagatgatataaaacaggtcagaaccctcctgcctgtctgctcagttcatccctagaggcagctgctccaggtaatgccctctggggaggggaaagaggaggggaggaggatgaagaggggcaagaggagctccctgcccagcccagccagcaagcctggagaagcacttgctagagctaaggaagcctcggagctggacgggtgccccccacccctcatcataacctgaagaacatggaggcccgggaggggtgtcacttgcccaaagctacacagggggtggggctggaagtggctccaagtgcaggttcccccctcattcttcaggcttagggctggaggaagccttagacagcccagtcctaccccagacagggaaactgaggcctggagagggccagaaatcacccaaagacacacagcatgttggctggactggacggagatcagtccagaccgcaggtgccttgatgttcagtctggtgggttttctgctccatcccacccacctccctttgggcctcgatccctcgcccctcaccagtcccccttctgagagcccgtattagcagggagccggcccctactccttctggcagacccagctaaggttctaccttaggggccacgccacctccccagggaggggtccagaggcatggggacctggggtgcccctcacaggacacttccttgcaggaacagaggtgccatgcagccccgggtactccttgttgttgccctcctggcgctcctggcctctgcccgtaagcacttggtgggactgggctgggggcagggtggaggcaacttggggatcccagtcccaatgggtggtcaagcaggagcccagggctcgtccagaggccgatccaccccactcagccctgctctttcctcaggagcttcagaggccgaggatgcctcccttctcagcttcatgcagggttacatgaagcacgccaccaagaccgccaaggatgcactgagcagcgtgcaggagtcccaggtggcccagcaggccaggtacacccgctggcctccctccccatcccccctgccagctgcctccattcccacccgcccctgccctggtgagatcccaacaatggaatggaggtgctccagcctcccctgggcctgtgcctcttcagcctcctctttcctcacagggcctttgtcaggctgctgcgggagagatgacagagttgagactgcattcctcccaggtccctcctttctccccggagcagtcctagggcgtgccgttttagccctca

SEQ ID NO: 57073 - DNA, 2500 bp, Homo sapiens
ccttgggaggccccacctgacccaattcaagcccgtgagtgcttctgctttgttctaagacctggggccagtgtgagcagaagtgtgtccttcctctcccatcctgcccctgcccatcagtactctcctctcccctactcccttctccacctcaccctgactggcattagctggcatagcagaggtgttcataaacattcttagtccccagaaccggctttggggtaggtgttattttctcactttgcagatgagaaaattgaggctcagagcgattaggtgacctgccccagatcacacaactaatcaatcctccaatgactttccaaatgagaggctgcctccctctgtcctaccctgctcagagccaccaggttgtgcaactccaggcggtgctgtttgcacagaaaacaatgacagccttgacctttcacatctccccaccctgtcactttgtgcctcaggcccaggggcataaacatctgaggtgacctggagatggcagggtttgacttgtgctggggttcctgcaaggatatctcttctcccagggtggcagctgtgggggattcctgcctgaggtctcagggctgtcgtccagtgaagttgagagggtggtgtggtcctgactggtgtcgtccagtggggacatgggtgtgggtcccatggttgcctacagaggagttctcatgccctgctctgttgcttcccctgactgatttaggggctgggtgaccgatggcttcagttccctgaaagactactggagcaccgttaaggacaagttctctgagttctgggatttggaccctgaggtcagaccaacttcagccgtggctgcctgagacctcaataccccaagtccacctgcctatccatcctgcgagctccttgggtcctgcaatctccagggctgcccctgtaggttgcttaaaagggacagtattctcagtgctctcctaccccacctcatgcctggcccccctccaggcatgctggcctcccaataaagctggacaagaagctgctatgagtgggccgtcgcaagtgtgccatctgtgtctgggcatgggaaagggccgaggctgttctgtgggtgggcactggacagactccaggtcaggcaggcatggaggccagcgctctatccaccttctggtagctgggcagtctctgggcctcagtttcttcatctctaaggtaggaatcaccctccgtaccctgccttccttgacagctttgtgcggaaggtcaaacaggacaataagtttgctgatactttgataaactgttaggtgctgcacaacatgacttgagtgtgtgccccatgccagccactatgcctggcacttaagttgtcatcagagttgagactgtgtgtgtttactcaaaactgtggagctgacctcccctatccaggccccctagccctcttaggcgcacgtgaagggaggaggccggatgggctagaggttggagtaagatgcaacgaggcactattcttggctccaccacttgatatcagcctcagtttcttacatgtaaagtggatacaaccgtaccccctccaccgtaggtttgccgtgagattgaaatgagagagcgttcgaaccgtttggcacagcacctgcacgtaaagatgcttgatcaatgttgtcatgattacagttgagctgactgggcccttgggacccggactggagtggtggggggcagtgtcctgggaccaaaaagaagcacaaggtctcccaatagaggctgcttcctttgtgtccccaccacccgaaagatgtcaggtcagagagcccgagagctgcagatggcttgagtagggctccactcttcagatcaaaaaactgtggcccggagaggcgaaggcacttggccagcatcacagagccagcacgtggcagggccagaccttgagcccaggtcagctgcgtgtattctgctcagttggtgcagaaaacagttttgtcactcctatgtcaggtgttagggactcctttacagatctcagtggcatcagtacatccagccccacctggagactgctttctctctgaaaattccccagggcttctctctgggctgagagatctcagcacccgtatctagaaaatgttcccacccagacctggctggatgactgctgttgtagctctggaaggttaggaactaaaaagcccactcctttacctagggtagctaagatacactggagatggggacatggggatggggccgattatccaggggcctgcatgagggggcaaaaggccctgcagagagagggtagggaaggcactgcccagatctgtgaagccatgtgcgtgcacgcggggacattcagacatgagtgcaaggagggaccgtgagcagggaggtcatgtgagaatacacaggcatgcctgcacacccatgtgaacttgagtgccaggccacacactcttttttttttttttttttttttagctggagtcttgctccgtcgcccagg

SEQ ID NO: 57074 - DNA, 1598 bp, Homo sapiens
gtgagagcacagatatgagagcatcttggaaataaaaatgtacctgcaagaggtggtggtgaattttcttactcaggccagcttctgccagggctggcagaaagagggggtggcatggcatggagccgcagggggtggaggactggcttccactgctgtgcctgaggaagccgcggctgtttctgggcgggatgggagtagtgggagggggatactggccttgtgagaagaaaagggaagtgtctgtttgagaggtttttgaattagtaaaggaggacaggcgcaaactccaagcgcttcacttgcacccgggaccaaaccccaatcccagtggctggctccctgaggccgccccgctccgtcccgccccgctgacagcggctgggctggagaaggctctatacggacacacctctggggacggggaacccactgctcccagctaaagcaaccctgtttcctggcccgcctcagacagggctgcaggccttgtttgagcccctttcagggcacctggccttggattgtctgtggctttgcctggtccgctgtgacttcctttctacttgagccttgctaaggcagactctactccctcactcgtaagcagccaggcgtccagcaggtcctccaacgtcgatcttggccctaagacgtccagtctgggcacggagttgttgagatccggcaggaagtccctgctccagggccaaaggccccacccgggctcccccggatgtccccgcacccccctctattctcccaaaagaaagaagctgcttcccactttggaaacgtttattctgagcaccgggaaggggggcggcggcgggcgcctcactgggtgttgagcttcttagtgtactcctcgagagcgctcaggaagctgaccttgaagctctccagcacgggcagcaggccttggcggaggtcctcgagcgcgggcttggccttctcgctgagcgtgctcagatgctcggtggccttggcgtggtactcggccagtctggcgccgccgttctccttgagagcctcaaggcgcgcggccaagcgctggcgcagctcgtcgctgtagggggccagatgcgtgcgcagcgcgtccacatgggcgcgcgcgcggtcgcgcatctcctcgcccagtgggctcagcttctcttgcagctcgtgcagcttctggcgcgcgccctcttggagctctgcgcgcagcggctccaccttctggcggtagagctccatctcctcctgccacttcttctggaagtcgtccaggtagggctgcaccttggccttcacctcctccagatccttgctcatctcctgcctcaggccctctgtctccttttccaggttatcccagaactcctgggtcacagggccgagctgttcgcgcagcttgctgaaggtggaggtcacgctgtcccagttgtcaaggagctttaggctggagggtgagacagaagggttgagggctggcctcccagcgccccagcctatcaggggtgagccctgggtgacacctgtccgcggaggtgcagtggcctagcatttccagtacactctcaaccaacacccctgccccgccaggccatgccccgttg

SEQ ID NO: 57075 - DNA, 3111 bp, Homo sapiens
ggactagtgcccagttacgttggtctccaaagtgggcccttgaaggacctcgcttctatgcctccagcgcattctcctctccgaagacagcccacagtcttgctgggcaggagcagaggaggtggtgaagaagggaaaggggcttgctacacttgcaggcacaatgtggctctgtgatcacgcatcgggcagccctggtctgtcctttgcaggggacatgggctgtgaccctgcctggagatcccattccagtttctccatccagaccatctgtggggcccagctcatcagatattaggtgaggactcggccagtctggcttcaacatcatcccacaggcctctgccccctacccctgccctcaaccccaggctgggtccttactttagctgttttcccaaggcggagccttcaaactgggacacatagtctctgccgctgtctttgagcacatccacgtacacagtggccaggtccttcactcgatcccaggggctctgggggggttcatcttgctgccagaaatgccgagcctggctccctgagggtgggaggggagacccagatcaggccagctgtgggctgagatctgagccgaaaggccaagcttggaggtgggggagagggggccagtgagaaacctgctgcctctgcccaggagggtgggccacggggatttagggagaaagccccccgatggttggctccctaggttaggggacacctacccgtcaggaagagcacggccaaggtcagcaccgcagctttcatcctgaagggccgtgggggacctggaggagaagaagggcctggctgagtggggtgccttcagcatgcagaagccccgtgctcccccactcattgcagccaggtgaggagaagggcacagagcgggagaagacctcaggtacccagaggcccggcctggggcaaggcctgaaccttgagctggggagccagagtgaccggggcaggcagcaggacgcacctccttctcgcagtctctaagcagccagctcttgcagggcctatttatgtctgcagccagggtctgggctgggaggctgataagcccagccccggccctgttgctgctcactggtcctggcaatgtggaacttaagagttcaaggatcagctctgtccctggggctgggcaaatagagtgggcaaacagcaagctgcgggggctgcagggcaggggtcaagggttcagtgggggcgggaggggagtgtctgcaggcttgcaggtctcccgggtggggtcggggttccctgcactcatccccttcccctccatgggagtgtgtgggcagttgccattgtccattgtgttggcagaggaggggaggggagggacgctgggactcctccaccaaggagactgcctcccccaccaccagcattccagggagactacttcactcccctcccccttcccccgccctgtcctcccaccagtgctcttctttagtccccagcaggtcctccaggcctctctccaagcctcccaaactggtaaacctggggagaggggagagccctccgtggctcccagactgaggtttcggagacctcttgcatttcaaaacactccagagatcaattcggagctgccaacttttaattttgtcatgtaaagatattgtccgcctccaaaaaaccctcaccatctacagtgaccatcacttcaaaaaggaaaggctttaacaaaaaagggcataatctcagaattacattacagaattgaagccccttagattgaagacgtctccctttgcattgttcacacttatatttgatcacgcacaggtgtgactggatctcagcccttgggaagccctggtgtggggagaagacctctgggcaaaggaagtggcaggagacctgctttctcatttcacttggcctccatcttgctggaggaagatcgtgggcaagttatataatctctctgagcctcggttttctatctgcaaaatggggcaagaatggtcagggttgttggaggcccctgagacagcctgtgaatgtaaagtgctgtgtgtccgttggtgtttgcagcaccatcttgtcaggtttctcctggaaggcccagacctcccccagcaggttactgataggacctgagtcctagagcctgtgatgcaggctgagaggaactgtgacatcactccagcctctccccatgccaccatctcacagatgaagagactgaagagcacagagggactttgcccagaggctgtcatctctcagggagttagaagaaaggctggacctagaacccagtctctggacttgggatgcagggcagaaatgtaccctgtaccatcactccaggaaactccctaacactagaaaccaggctgacatctctgtttaccagatcagggagtggtcggcctcatgcctttcacttcagagaagattctggagccagaaaacctcaaatctaagggtcaggcaggttcaaatccagctgcctgaccctggatgagttatgatacatcacctccccacacatcagtttctgattgaagataatgatagaatatgccatcgccctgagttatggcaggggttactgtgtggcaagcagaataacgctccccaaagatgtccacagcctcatccctggaacctgtggctttgctaccttccatggcaaaaaaagattttgctagtgtgattaaggacctggagatggggtggttggcctggattctccaggtgggcccattgtcatcacaggggtccttaattatacaagagggaggcagtggcctcagagtcagagaaagagatgtgaggatggcagtggagatcagactcgtgactgctggaagggggccatgagctgagggacatgagcaacccttccctagaagctggagaaggcaaaggatttttccctgcagcctccaggagcacagctctgctgccaccatgattttagcccagtatgacccattttggacttctgtcctccataactgtaagataataaatttgtatcgttttaagcatgaactttgaacatatatgcaaaactgttagaaaggtacctagcacttagtaaacagtaactattctgttttctagaatccc

SEQ ID NO: 57076 - DNA, 1002 bp, Homo sapiens
cagttcttataaatacactaggccagagagaaaagcttctcaatatcctccaggccagactgtacagaagctcttgcttttataatcatatgtctatctagtgcctttagaaaccttaaattcaccatttgagccaaagttttccctgagcaatgatctccgtatggccagagggaaacaacagtcagttttgtggtcaaaggtctggcctagaactcataggttctgtgacagaaaatagaaggtggcgattggggtgggggaaaatgaagacttctgatcctgggatggagacaacaaattcttaaggaatgtgggccttgagatcctgcacgtacctggtcaacaaataaggtcacctactgtgaaaatcaacttctcagagcagcagcactcacccaacctcctaatgaaagaggaatcatatggattaccttcaaagaccccactgctcaactggaacacagccagaatcttacagaaagaaagaacaagctattgataaggaatgcctaagacagcatcggggttagaagctaacacctactcttgtgacctgatgatcagaaagagatgtttatgggctgaggtaagcagataaaagactgccaaggcagcagcattccagtagcagatggaaaggatcagggtttcatgtccagggcagagatgccattacactgaactttggatgaaatgatgtgctaccttgccagtgattcatttgggactgaagcagaaccacagctcaggaagcaggttaacaagcgagttcaaatacaatgcagacagcgcgggaccaggaggaatctaatgaccgtgcagaggtatccagagagttctggcagcaggtgaaagccttttaccctgtctttgctaatgatggcttttgtttcagactctacctgaggcttgacccagcagtgagctaatgaaatgagcacgaacatgtatttggttcagcaacacaaaaaacaaatgaatttggcgggccacaatcca

SEQ ID NO: 57077 - DNA, 1063 bp, Homo sapiens
tttccctgggaggtcagaggtggggataagtaagctcccactcgggtgtgtttaggcttccggtgaggtctgctatgaactttaaacaacacgaagtccaaactagggagagtaacttaacagaagctgtgaaagaactggccatccatcagaggtagaatgctatgttttaagaggccattttctaacagtacctgctcctctgaccccctatttctcttaacccaaggcctaattattctaataatatgttttagttgctaaaccttgtctaattaaagagctttgaagagacagctattcttgagaaacataaaaataaacccttatgaaggtttaccatcagaagctcatttggccaagctacccattaattaaaatgcccaagagacatttgtctggcagtaaatactaattaccagaacacatcaaagtgcttcttaaatgctgcagaatgattaatttcacaatttccaaaataagtgatttcttttattaagaaagtctttataaatttctaagtaccttgttttcctaaagtgattggaaagttctcaaaactgttatacgggccagaagctgctggaatgcagcctagttctgttttatctctacagtgacacatcagttgtccctggacaaatcatttatcctgccaatacccccacctcttgatcttctaaatacaagtaaactctgttgcatgctatacccaaagaaagaacagaatatttgggaataaacgtgtactctgattaagagtatcatacgttaaaactttcactttcaaagatgttgcaaaagacatttttgaaaaggtccactgaatactatatagggaatacttaaacatctagtcaatagagcacaaagtccttcaggattctgcagagcttaaaggtgattttctacacatcgattgtcactgttaatggttctggttaaaaggtagctgtaacagcgcactgggtagtacagcttaaactataatactttccccaaagttaccttcagtacccctatagttatagatacaaagaagataaacaaatcactttttttt

SEQ ID NO: 57078 - DNA, 853 bp, Homo sapiens
cattattagctgttcttgttgttgttattattaccactaatactgttagtattattctactttccctgatgagtctctatcccatttcctggtaattgcaaacatctgtcactttatttaaacctcctaaccaacctgagccccctaactttcaacagatgacttagctttgagcttaacagagaaaacagacaagaacttcctttatgtatctatacattgtcatgcacccaatctttcctttactctttcttcccagaagcaggtctttcctctaacctcaggcatgtaataagtaccaagtaagtgttagtcactagctattgtcatcatcctcaaacacaaggaatagcaatttccaaactgcattacagaagactgactgatactctaatttcggggttggcaactaccaacactcatggatcatgaagagtggctaccagttttactggattactctcctcttcatgttcaacatccatttagctgtcataaagaaggtcaagttctcaagacaaaaatgaaaaagctaaacaaatactggctcaaactcatagaaacagaaagcagaatggtggtgccagaggctggagggaaggggaaatgaggagttgttacttaatgggtacagagtttcagttttgcaagatgaaaagagtcctggagattgattgcacaactatacaagtgtacttaacactagtgaaccgtacacttaaaaatggttacaatgctaagttttatattatgtgcattttaccacaaaacaaacaaacaaattggtactagctcagtgacactccaatatgacccctcaccaacctctgccctaacttcattttctggaact

SEQ ID NO: 57079 - DNA, 928 bp, Homo sapiens
gaagtaagatgtggttgggcaattaacaagagtaaatttttaagttaagcagatagtttctgaaagtttaacttgaaaaggtaactaaaaacacacataggattttaggttcaaacactactacaaactgggaagtaaaagcaattgaaatttcaagtctaatagaacaatttctgtgtctcaatcttttattatataggatccaaggcagctgaaatttaaatttcagtctgaaaacagtggcaaaagaccttttcttctcactcagaaaaaaataagcttggaacagtagaccttctgtgagaaggcagcaggccattctgtatttcagcggggtcgtcatataaagaaaaggctatgactgaacacatgaactatgcaacttcttggcagcaatacatgtacttaccaataccaatcactgttgtgatcccgcctagccaactaccagcaagtctgcactaagtctacaattcaaaggtgagaactttcctgaataaaaccactgtggaggccaagagtgtctagacctgaggaggagtagacctgccaacatcagagcactccccagttcaaagaatgaacttctttttccctttgagagatagagataatgctgtgaatggggccaaaggtcaggaggcttaccaaaactgggtataacctacatacattaacgagtcaagcaacaaatctgaactcagaatacgtggtctaataccttagtataacagtgcaaattactttattggcagtatattgaaagtaaattttttaaaaaaagaaaacattaataggccactactcactcgatcactcttcccagacacaagtatctccaaccagacagcaataacttccacattcgtacctccaggcttcgtatttccaacagccacctccacagtattacctttgtgtccttggg

SEQ ID NO: 57080 - DNA, 2551 bp, Homo sapiens
tatttaaacttggcagtcaaccccttcttttttttttttgagacagagtctcgctgtttcccaggctgggatgcagtggcgtgatcttgactcactgcaacctctgcctcccgggttcacgtgattctcctgcctcagcctcctgagtagctgggactacaggcgcgtgccaccacgcccggctaatttttgtattttttagtacagacgggatttcaccgtgaatccaggaggcggaggtttcagtgagtttagatacaccactgtacttcagattggtcaacagagagagactccgtttaaaaaaaaagaaaaaaaggaagagaaaaggaaagcaaataaaacagtttattgatactattgagccataaggagctacactatttgtacttgaaagataacagccattcaaagctgtaccttccccaaagaaaagccccacctcaaccacatcaactgctactagctaaataaaaacatacaaccttccaaacccggggtttgacgaatgagccagatgaaactacacattcatttgctcgaaaaagtaagtgtaacagccaactcagccgtttatcagaaggcacaggcccttgagaagagcatcatgggtcgcggtgatatttgtatgtgtatatgtgcatatatatatacacatacatatatctccatggttcctggcttaaagctcctatataacccttgtaatttcctaagtgactttggttaaaatactgtattcggcctcttgccactggttcctgaacagctccagagtgataaaagcaaaagacagtcttttgctatttataacaagcccctttcaaccacacctgagcttatgttaatgagatgatttttgcaaagtccctagataaccacaggactggtggccaattgccaggggaatcaaccctgtgctcatacagttagaactcaaaaccccaccctcaacctccagggaaaggagaggggctgaaggttgcactgataaccaatggccaatgacttaatcaatcatgcttacctaatgaagcctccataaaaacctaaaagggggcatccaggagagtgaagaggaacacatccacttgctgggagggtgaggcaccccagctctaccgggatggaagctcctgcgttcagtactcttccaggctttgccctgggtatctcttcatctggctgttcacttgtgtcctttaaaacatcctttctaatgaactggtcagtatgtttcctgagttctgtgagccactctaacaatttcatggaacccaataaggggatattgggaaaccagtttatagccagcaggtcagaagcacaggtaaaaccacctggagcctgtgactggcactgaagactggggacagacttgtgggactgagccctcaatctgtgagatctgacgctatctccaggtagacagtgtcagaactgaactgaactgaactgcattagaggacaccagctggcagctgctgcagaactggttgactgcttggtgtgtggggacacactcccacacatttggtcacagaagtattttgtgttgagagtacaggagaaaccaattctgttattcctatattctaggagtcatccacagtcattcgagcagtttctacacgagagaagaaagtctactgcatcgtagtaaaaaataaacattaaaccttcagaactatttgcacaaaagaaaaatggaatcacaggtcaggtggggaaggagtggtgcttatcaaaggtcagccacttagtacaaatttgctaaactgccttggtcagagcacattgtcagaaccccactctttccacagaattttccaaacattaacccatgtccgtagcacgctgatgaggtaaatgatgttttacagatagggaggaacaaaaaagtgagggcctggctgagccaatattctctctgccttttagttagcatacagatctctgtttattattctagaaagctgttctcaatttcacacataggggattatgttttaagatgtaaagtctatataagggctgctttgcttaccactatctttgtcaaccattatcaaaaactccattaattaagctaggcaccatggtgtgcacctatagtcccagctactcaggaggctgaagcaggagaatcccctaggaactcgagtcctgtctgggcaacgtaacaagacgtcatctctaaaaaaacagaataaaataaaataaatctgggcacagtggctcacacccaacactttgggaggccgaggcaggaagatcatttcagccaacgtgtttgagaccaccctggatagcacagtgagcctctgtctctacaaaaaaaaaaaaaaaaaaaaaaaaaaaaaaaaacctaaaaataacaaaataacaaataaaaaataaaaataatccataaattagttaagaaaccagcttttgagcaccttctacctgtaacaacaggcctgcctacaaagaaaatattagttttaagtaaatcctactttattttattctacccattgctacagaaacaaagatctgatcattttgt

SEQ ID NO: 57081 - DNA, 790 bp, Homo sapiens
tttctaaaaaacaacatggcaaatcagtcaaactatccgatactaaggctaataaataattggtaataacatcggcaaatcagccatagaatttcctcagttatctttcttggcttcaaacaatggggaccatatttaagaacacacataggagataaagactggttagatagatgatatttgcagatgttaaaccatcacaagctaatttcactcatttcaacattgctcttccccttcacctccaaagcacaagacagaatcagtcttctattctaagaattgtttagagaggatttgtcaatatataaccaaatatctgcttagtgacgggaaaaacctctgttcgccagccaaaggacttgtgagaatgagagctacatgtggcttctcccctctctggcctcctaattccacatcagtttgtagttattcttgtactacaagagtatcagtttcagaatgtaagcctcataagctcccaggaaagccattctagtggaactgttccagagtttcactttagctccataaggaacctaagaagccccgcccataagagtgaacggtaattgctccgttggtttccacctctgacctataaagaccaaagcctgagctgtctgtaatccataagccattttaatattctgctagaacactgcaaaaatgtggttttcactagaggcactggcatgaagctgaaattggtattctcgcttactaatcctgtgtagtatttgttctaattctcaaaagtagaggaaattctctttttaaataaaaaggg

SEQ ID NO: 57082 - DNA, 497 bp, Homo sapiens
tgaggaaactagagttcaaatgcgttaaatgatttagccaaggtcatacgttctgtggcagactcaggatgagaattagggtgtcctgacttccagtctaatgttttttatgatcacatcaactagacaatgagagaaagccctaccattcattggtggtaagtgcagtgggcactgttcctatccatctgtctttcacaatatacaattcctcactgttctgcacaatagcctatgtggtaacacagcacatatgagctaaactaccactcaagggtcattttaacaagcatgacacaacactgaggcacaatgcccatgttaagcaaacagcaaaataccatgacacaattaaggctttatttaagccaaaccatgtatctatgcccctgcttcaccatttaactaacaagcatcttgagggcaaaaattatttcttcttgatctctatatcctttgcggcactattcaaaagttttgctcacatacctgctaaa

SEQ ID NO: 57083 - DNA, 836 bp, Homo sapiens
gtaaaacaagatatttaaacaattagcccacagtataagaaattatatcaataaatgctaaattgtatgaatcagatttaaagtagcataggtcaaagggataggtttgcaagggccaaagaagtcaaaggactacatgaagatcgggcttccactgaaccttgaaggcagggcagactagataagtaacactaggataaactgcaagctcataaggacagaggccatgcctctctctcttgcttaccaacgaatcccaatgtctggcacagtgcctagaacacagtgacactcaaatatttgtagatgaaacagaaggataaatagaaggaagaaggggaagaagaagggaggggaaaagagaaattccaagagttgttgttttgttttgtaagacagggtctcgctctgtcctccaggctggaatgcagtggtttgatcatgttcactgcagcctcaacctcccaggctcaagcaatcctctcactttgcctattgagtagctgggactacagatgtgtgccaccatgcttggttaatttttttttttttttttttttttcaggagagagagaatctccctatgttgaccaggctggtctagaactcaaggaatcctcccacctcagccttccaaagtaccgggattacaggtgtgagccaccacacccagccaagagttgtgtttgtttgtttgttttaatgaaagattaaatgtggcaatataatgaggcagtgaggaaacacacactggtgaaaaataaggtaaaacaggtagaattaactcaaatcactgatggttttaaagttcgccaaatgaggtttaatatttaatc

SEQ ID NO: 57084 - DNA, 1246 bp, Homo sapiens
aaaaaaaataaaaataaaaataaaaataaaataacatgactgtgtccaaaaagcatattgttacatttccacttttaaaaactactaactaaaagtgtaaacagctattttcactaagatagctattcatcttttaatatcatcgggcaaacctggaaaatgtgctaacatttctccagaggcgaacccataccactcgctaatacatatgaaagattttgtccctaatatttttactatctgaaaatgtgaatgggttatcactaaggtcatcctctttggtagttgtgtaatcaaatggctgaggcttaccacaattaaggcaagagacaagagaatgtaacccagcagaaagccagtgactaatgctgagtcacagtttccaagtgattatttaaccaaaatgtcaacctctcatactaacaattccctacaatggtggctgaaagtagatcaaaggtattatccaaaaagtatacatcagtattttgcaggataatgctaagggattgaggccagtaaagtctagttggacctagcatttataagcccaaatttgctaagtcaaggagattcttacctcctcaaactttacagtgggagaagaattcatgattatgttgatctcagtatacttggatcctccagataacaccctcttgccaaaaagttccaggtcctggctactaccagctacagtctttagtggcagctatataatctcaatatagaaggactttagaaagaaaaacctaatgagggaagggagcattggaaattttatcttaaggctctacatatgcacagcaagtgcattacttaaattatatacacattcatcatgagtttgcgagctctcaacatctccaatgctcattttccttagcattccttctactctttcagcccaaatcatccataacagacaagttgtctggttacatgctaacactcatccatactcatactttctggttatgtacagctgtgattagaattctactgtccaattttgatgcctaatacctggtatcgtggaaagaacaagagccctggagtcatatagacctacttataaatctcagctctaccacttacaaggtaaagaactttggacaagttacctaagtgaagctcatttttctcaatagaaattaggtaaaacaatagttactttgtaaaaagctgttgaaggctagcaagaattatatgaagtatacagaacataggaggcacttagcataca

SEQ ID NO: 57085 - DNA, 1457 bp, Homo sapiens
gcctataattccagtgctttggaaggccaaggtaggataactgcttcaggccaggagtttgagaccagcctaggcaacaaaccgagacactgtctatactaaaaataaaaccactagccaagtgcaatggtgtgtgtctgtagtcctagctattcaggaaactgagatgggaggatcacttgagcccaggagtttgaggtgactgtgagctacaatcacaccacactgcactctggcctggtcaacagagcaagaccctgtctctaaacaaaaccaaaaaaccattctggaatgacatgacaggacatgaaacactgctcaaaacagcagctaatgctacctccattcttgctccctatggcaagcaggttatttttggacctagcctatgaagcagcactttgttgactatgagcttcatcctctgaatattcctttcacattcaaccttggtcctcgctttctggtgccgagctccaaaacctcaatggaatacataatgaaatgttgggttactttagggcaaaaggttaagcctacaaaagctttctaattgggaaatctcttccatgaaagcatacagaaatttgctgactctttcttttcctaatagctatttgctttctttggaaaaaatcttcagtcaaacacaaaagccaactacctagcaaagctcaaatacagacaggtgttttgcaagcacagtaaatctcaagggtaacaaatcaacaagagataatatctactaataagctgcttattgctgtgctgggagagttaactgcctaaaaatctctcagttaagactagcattgaggaaaaaaaaaattgtaatacaactaaaagaaaaacaagctcattttctacccagagaaaatgtgcaaagggaagaacccctgtaagtcaactattctgctacataaaaaccttttattccagagttattttcagtgtcacttaattccagggtggagactaagggtcccaaacaaacctgtgtgtgtatgtgtgtatttttctagcttaataattctaaaatccacggttaggctttttcaggaaagtctgaaagtcacaaaacccctattatgctctttgagaacagaatgggtaatcatgtgaaaatacatttgtaaattagcagttatttagaataaacaatttcaattgcaaagaaagcaaggattttatcacattaggcatgccttgttccattagctcagttccctagaccttaaacttctctgatgctcacaagaccctgaagttggttcctacatgagaaagacattacagaaaatcccaagagaatgctgtatttcagagtttaagaatttctgatgttctacagagaaaggaggctacactaaagaataagaaagtgattattcagcaatgttatctgaacttaatgcaagtcacatccaatgaatcagtcaaatactgcatgccacagg

SEQ ID NO: 57086 - DNA, 1228 bp, Homo sapiens
aactaggaaattgcacactgctacagaaacacaaatgaatgctggtgtggctccttcacacatgcaactcattgtccaagccatttcagtctcattcaagactttgaatatttccatacataggaattgcacaactgcataccacaaatgatcaaagataaaaaccaacataaacagtgacacccgtttgtaaacaagccagtgtttaaaatgctgcagtcctaaaggataccaaggtctcagagaaaaactatgaaaaacacacgcacgcacatatacacacacatgaaaattagaaagcgggcagaccagccataattaggcactggctttgctgactactgaagatagaaatgtctcttttatattaaagccaagaatcaactgtttgcaattacatttacgaaaacattcaaccctgtctgtaacagattttatcaatattttggtgtatccaagggctggaagattcaaaattctttaaatcatgaaaccataaaccaggcaaccaattaagttcatggagactatcccccagaggtcagagcaaaataaccacaggagcacaaagtgattacacagaaaataggcagaaaaaaaggaaagaaatagcaaaacaaggaacaaggcatattgtttgtaaatgtaagtttgccttggctaatagtcaactagactggaaacacggtgaggggctggggtggcaagtgaggagcacaccaaagtcttggctcaatcgacttcccctgacttcccctcagggtctgagggagccctggactttggtatctcattcagctctgacctgcagactggaggccctgtgataaaaacggacaaaaaggctgaagagggccctccagaggaagtgaaactgaccaatcaattcgccacagccacccaccctgacaccctggtaagaagggccccttgtagcctcaggcagaaagatggtggggaaggaacttcaggttgcaagtgatcaggagagaaggcctagataagtcactggcttcagaaaacaagccactgccaaaaaagcaaaaacaaggtaggtcatgacaaccagaggctaggctgaggaggtgaggggaattgatgtggctttggtaggaggcggcagcagctgtaagggttcttcattcctcaggctgagggaaaacacaagctgcagttctaaacataatgaatgactacattaaaagtattcattcaagtaagatattga

SEQ ID NO: 57087 - DNA, 2843 bp, Homo sapiens
gcgggttccaccaaaaccaaaagattcctcctgatgtcttagattccagtcctcccaacgaaggctacatgaaagtgctaccatatttcctcaaagaattttacatgcatacatatatagcttcctaattgaccttggccaatttcactcctatagcgcctcaaatccctttgagaactaagggctcgatgagtgtaatctcccggtgtctgggttcttcaatcacaagcttccccccaaccagtaaaagcccaccctgggttctacaaagcccacaattcccgaccctccaacaactaaaaataaccagcaatcagctctcccaaattgtttaacccctgactacctagtgccatcataaacctgggacagcccccacccccacctcactcccccattccctgggccccttcctgtggacaagcaaagcaatttcccccttatttccccattttcctcattgcctcctccactaatcgtgtctcctcgggatccccttcgcaccatctatcagtcttagatgatcaaatgcggattcctgtctctgtcttaaggcaccaggatcctgggacctcccagcgccctgcagacgtgcacattcccagtccgtgccccagccgtcctgggtccccttacaagcccgggtctgccacttcacccttgtttttccccatcctccgggtccacatttcatatgcccctgccctcattcccttatgattccctagctgctggttccagagtcttctgggcttacagtctcccggccctcggggagttccgaccccttctttccaatcatcccctttacccgcctgccctcagccccgaggacccctccccgcgcccggctcctgggcgccggtgctctgtgccctcggccccctgcttggagttccgccgtctcgagtcccaggtgtccctagctccgcgcccgccccgccgcggctggctccctcccgcctcccggcccccaacgctcccaccacgcgccgcgctcgccgccccgaccccccggctggggggcgcggacctctcccggccccgccacgctccgactgccgcctggcccctgcgccggtaccttggccttggtgacgaggtgcgtggcccgcttgaccaccgcgaagttgcccttgccgatggtgcggtcgatctcgtagtagccgatacgggcgggcatgggtccgcgggaggccggggctgggggacgcggctggccggccgcaggggacacggcagcgggggcggctggggaccccggcgcgggcggaggcagcaggcggcccgcgggcccggctcccccagtcccggccccggcagccccgccagctccgctcgccgccgccgccgccatcttgttgtgcagtgaaacctccggggccgcggggagccggctcgggggagggggcaagggggggcgggaaagggggggccgcggacgtcactcggggaggcggggcgctttcgccgaccggcgcccggctccatggcaaccgcgggtcacgtgccgacgcgcgtcactgcccggagccatggcaaccgtgacctcaccggcgggctcgaccttcccgcgtgggccccggttcctgaggcgctggctcccgggtgcccccctccgggagctggcggtgggaaccttcgatgggcccccaacctcgaagtctccgccacctttcccgagtggggggcgcaggatgcccgacccaaagccaaccccccaccgccgctcgaatcgccaatgtgacctctgctgtgacctctgtcccagttcaacgatcacccaacctcccttaacaaaaaaaaagtgtttcctcatcaccaaaaataccagcgttgtcccactttagcccttgaggccacaaatgcaggaatagctacactcttgaagcaactgtaaccaagttggtaacaacgcaggggaattcttcggtaaaattccttcctcttacaaaatccagctcaccctgcacagtcaacctaattgtcaccgaatataggagaatggggaaactaggatttgcgtgttcaagggcggacaagccagtccaaacaggcattccagtcattgggtgggtgacagccaaagaaggtacgtcattttccttcctaccacccccatctctgaacaattctacagggatgtctgtcagagtgcctacatactatttctgttgcttgtataaccctgatgaagcagtggtgcgcattgtccaatgaaccacgtcgtgtttaaacaacagtcggttaagcaaaataaataagtaaataataaaaattccatccttcctagtgactctccgaggacattgagggtcatcaagttaataactccagcaatttcatatctctttttcttcccttgcctattacctgcatccttcatagctcccaggcttcctcctcctctctccccttccctttattaaatagattaacttagctgctttaggtgagggttgcaggtaggaaatcagactgtcaacaaaatagtctttggcaggctgggtggaaaggagggaagattgtgaatattccaatgttaaaatgtattcctttggactagtcctgatccatccatatctatgtctctctcaatggtagaactgtattgtgaggtcactgcatgcacagtattaaaaactgacacccagggcactgtaaatgtgtggaaggataactcgtgtttactcgctgaccaaagaacacctcctggtgctccaattccctatccaaccatgagtaatggctgggacttaagatgggacagaggggtcatcccacaatggtcttggatctattccctggtagctgttccaaactgccaacacaattaacactaa

SEQ ID NO: 57088 - DNA, 608 bp, Homo sapiens
gaccagcctggccaacatagtgaaaccccgtctctactaaaaatacaaaaattagctgggtgtggtggcaggcgcctgtaaccccagctattcaggaggctgaagcaggagaattgcttgaacccgggagggagaggttgcggggagctgagatggcgtcattgtcctccagcctgggcgacaaaagcaaaattctgtctcaaaaaaaaaaaaattaaccttgactttactcatccattaaacatttaccaagaaatatttgttgtgccaggcattccctggcactgaggctacgaagaggtataagacgcttgccatagaataattcatatttagtcagggaaagagacttgtaattaattcaaagagagagatggacattataatagaaacaccagtggactcttggaattcagaaatcaggatttttatcttgagaaagaccctgaaaaggcttattaaatggatttgtatgatttttttttttttgagacggagtctcgcactgtcacctgggctggagtgcagtggcgcaatcttggctccctgcaatctctgcctccagggttcaagcgattctcctgcctcagcctcctgagtggctggga

SEQ ID NO: 57089 - DNA, 2224 bp, Homo sapiens
catgtaccctagaacttgaataaaaaaaaaaaaaaaaaagaaaaattacttgacatatcttgacattttaggctcccaggattttacagtattcttaacaggttttgtcagcaaaatcaacccccacccccgcatcagtttaagagccctggaaggctctgcctattcaccagcatagagctgagatccttaaagggccagttcagggcactgctccagcaaccgttgcgctgctataagcttgagcacatctcttgcccctcctctctacttttatagatcctgcatttatttagcatataatcttttcaatattgactttgtatatgtatgtcttcccctaaactggatgtatcttttaaggaaaagcctggggttcgtcatccccctatgtatcacctttacaggcggtcacccaaaatctccacattcatcatagaaacagaaattccactaataaatgtcaggtactgcctccttaaccttggtccgctatttccctcccactttcagcagtctggtttattccatgggtggaagaggaagccaagttggctgagtgtgaagggaatggcgtcagtgtgacttcacgccacatcgtcccgaatgccagctccacactgcggtggcacgaacgcaggattgagagatgcagctggagtaaagagagaagcccatgtccctcagacgccacacaaaatgggggtaaccgcgagaacaaagcagggtacccaacggggtgtggcgggacacctgggcgcacgccgccagcgcccgggagagcgaaggcggggagagaggaaccacgctgaggcgtggcaggatgggggcgggacttccggaagccatttggctgagtggcaggggaaccggaagtggaggagctgctgctggtgctggggccggaggagggacgcgccggagcgggaccgacgggaccgagcgagcgaccgacgcgccacccgccgacgcctcagccgcttggggcccgcacggaccctctacttcagtgagtgcatccagggtcgcagggaaccggtggcttagaggcgggggtcggaaggggctgcgaggtgttattgtgagaggcccgcgacctcccctcccccacccttgcggcccctccccccacgccgccccatccacttggggggggcctcgcgagcgcgcgccttctctgcgggcccagcgtcggcttcccagcagccggcgcagctagttttcgctctgagagccctttcccgatattccataccgaaagctggcgtttctcctcagccgccggccggcgcctccacggcctttcccaggagggtagcgcggcgggcgccccgccccgccctgccctgccctgccctgccgggcccacccgcggtaggccttgcgcaccccagctcgccccggctgggcgctgcagctcctgcccgggtctccgctgctgccttttccctttatcacaggggtctaacttctcactcttctctcccctcgcgtctggtcggaggccaaaaccagttactccgttgtgtttttaccgagcacttttccctcctccttttgttgaaaaatttcaactctttagaaacttctccgttgcctcttaggatgtgtttattcaaaagttgcatagaccgtcaccactcggaagggattatttcttggaaggctttccagcccccatctcatcttagacatgaatgtgctcggagcggctggtgacctgcccaaggtcagccagctagataaacctgtcagcggagaggtttggggggatgtttttttcctggctcaccgtccgtttgccagatccgtgccttctggtctacaggtttgattgacccgttgcgtggtgactcatgcttctgcttttcatagctcgcaggccagcgttgcttttcagaatttatacacaaacaagaactaacactcggagctttcgcctctttgtagagcttacccgtagagaaaggaaagaccacccggatccaccctaggacctcattttgtacagcttgaaattatgggaaggggttgggccgggggtaaaggtgtggagaaagtggaaggagaaagtgcttaattaagattgtctttgccttggatgtgccttgtgtctttggcttcttctgggcacattgttctgacataaaggttgcctccttgtgggggagaaggggaggattagtttgttggcttgggcatttgatcataaattatggaggtg

SEQ ID NO: 57090 - DNA, 1628 bp, Homo sapiens
ttcagcaagaacccaacacttggagattgttaacagaaacatctgcctattccaacgtgagtttcagagatggtgaaaatcacgggagagagttgggtaggagttggagaaggcattgcaagctttccccttcagctagacagctgcagcccctttaagggcaaatgcgggacctggtcctttaaatctgtgtcagtttcccctgacgtcagcgggcgggccagcagccctgctgtttatcgcccagcggcgcagctcacttttcagtgttcgtgcgtcgggacggcgcgtccgcccgcccttaaagggcccgcacctcggaaaactcgcagcccagcacggcgtcgggtagctaccacctatcacgcccctcactctgcgactcgccttcctccgcggccagcccccgccgccggctcttcctccctcccctttcccggcgtctccaggctcccggcaaccagccgccctccttctcacggccctggcccggggctccagggtctcaggtcgtactcagcccctcgcgagctgggaccccttcccgtagccagcatcccctccctccccgccccctcccggccgccccctcccctgcggggaccctgggagcctcttcggggctcttgggaggggacatttcctaatctcaggccggggttaaagttctggtcctggtgagatgctggaagctgcggccgcagccgcaacccgtcccggaggtgtcctgtctcctgtcgccgccgccgccgccaccaccgctgccactgccgccctgccggggccatgttcgctctgggcttgcccttcttggtgctcttggtggcctcggtcgagagccatctgggggttctggggcccaagaacgtctcgcagaaagacgccgagtttgagcgcacctacgtggacgaggtcaacagcgagctggtcaacatctacaccttcaaccatactgtgacccgcaacagggtgagggctgggggcttaggggccagaggcgagtggggaagccgacgagggctaggcgattctgccgccccgctacccttttgggaggccccaggaacgagctgtcctgctaggttcccagttcccagaaccacactggagcctcttgaccagtcctccttcctttgccaccaatgtttctctgaagctccagctgggcagtttttgaagttggctcattcccatcttctcttccgcccccattcttccatcagttgtggtctgagcacacatggcttgctctctaccctaaaccccagaatctgacagctctgtggggtctcggtgggagaggaaacaggcttattactgggcttgcccagaaaacctcaggggaatgagactggcccagaactgaaaagctctgtgcaggcaagttacatctcagactccccagggagatgaatgcagggcttcccagccctcttcctgcctgggagagccagctggccttgtaaattgagggtgacagaggttttataaggccaactgcaagttgggtgggaagagaaggggaatttgtccactgtgaaaaatccacttcaccctgacttctctttggtttcttcaccagctgtgagtccctgagttgaaatagacacagctagtgtgggaagtct

SEQ ID NO: 57091 - DNA, 2657 bp, Homo sapiens
tcaaggtgaggactcagactccagactgggactccaattgcctgggtttgacagaaccagggaattggtctcaggagccctcaaaaaaaaaaaaaaagagccaagttagaactgggggacagacaaatggggtggcaggacatgtgtgtacctatggtggctgggctcctttaaaagcctttgctctccactgggtccaccctggggcagggcttagtactcagatacacacccaagcggctctacctcaaagcattccagaaaaatgggaattttactgaaaggcttcctggaaaggagaacttatgccacctctcctttacctctaaaaatcttcatactacatttcttcctctcgttttctcttaggtttccaggcatattccctctcaatccctccctgcccccgggagcctcaattctcccaagatatttaggtgtcttccccagtctgcatactctactaagtaaacaaactaacaaacaaaacccttgttagccagacagtggccccgctaggcagactccttcagactcagtagatcccaccacagatgtcaggaagaaagagaagcaggagctccttctgtctactagtggcaaagcagcatttttatcccccaggcttctgggaaaggaaccttaaatgccttctgaaagcaggtctcaacctctcccaacggctaggcctccctttacagctcttaattgacaaggaagaagagaatgggcagcctggagtccaagatcctgctcccaagctactgtcctcgctgttccacacccggctcctagaagccagcttgggtaccgggtcagtttcccgattctccctccgtcggcctcgatcgctccgtgcaatgtgcccctctcctcattagcacccacattatccaggaattctgggccctggggccccatctccttggtcccccacgccaggacctcaggcaccctctgtgcagctccctcatcctcagacgccggcttcccccacttctggggccccctgaccacccaggtccagccccacacctagttcccaactcaccggccccgccgcagctgccgccgcctccctgcggaaactcgcggcttcccgggagccggaggagcagtgacagcagcatcacttccgcccgcggcgcagccaatcagcgcggcgcctgcggcccggcgacccccgcgggccacagcaaccggcgcccggggtccggctcccgcgggcggcctacgcaggcaggggccgtgcgggcgctgggggctgaacccgcgggctccgcctccccgagtcctcggggcatcttccacatggtccctcttcagaaggctctccttcatggcgtcctctgtaaagggcatttcggttccgacctttaaaagccactcgttgctcttctccttctgaccgccatggccccgactgtccctgtaatcttcccagaggggatcctgcccacccaggtcgccttccttctcgcagtcggctctcccttcttccccgcgccccgggagagtccacttgtatctcaggggtctcccgcagcatccccgtgccccggcggcgccagctgtcgccgccagagggcgccgtcgggggcggcgcggcgccaccgcggcctctcctctcgcggccggagcctcgccccctccgctcgtgccgccggaagtgggaggtgccgcgcgcgggccggcgctcgacccctccccccgtggctcggccgccccctccccccgctccgcccgctcaggtgcgtcccgtccctcccccactttcctcccgggggcgcggcgcgggaggtgtgtgcggggcgagcgtgggtgggggttgcggggcgagggccgggcatgggggtcgggtggggggcgtggagggtgctgtgagaaccgaggcgggggtcccggcctagaagtgggacgggggggtggctggcagcggggtggggggaccgaggggaaggggtggaggggggtctggtccgagccagcggccagcctagcagtcccctgtggggggtggccaaggccacccagcgccgcttccccccattgtccccttcccgtctgtcccctgttctcgcccgaggacccgtggctccggcgcccctgcttcgctggtggtcgccccgggttgcggagttctttttggtacactcgaccctccagccagctgttcctacccgcgccacgggctctctagccacggagttgcatgcatggcccttgtcctggggtttcgttcaccgggcgcagaggaccccccagccctgggctatgttggagacgggatgtttgcacctgagggagcagcaatggcggtttgggcccattttctcccaggagctttgtataatgagggaaactgaggcacagagggtctgtgggctgtgactgaggtgttgacacagccccatctacctatctgccctatgcgctcttcagtgttccgggggggaatacgtgtgatgctgttaaaataaaagcaagaatgcaaactaacccgatgttcatccccacctcccaagtattttgattttcttttctcctcataaggtcataagtttgctctgcggcataaaagatgaccttttgatttttaaaaaaggcgtccgtcccagttcccttacttgtgttaccatgttttttaccttgacttt

SEQ ID NO: 57092 - DNA, 1720 bp, Homo sapiens
tgagctaccatgcccggcctctagcatcacttctccttggccctttcttcctcctttgatggcctgaccccaccttcagtcagaccagagccattttttgaaagtctactatatcctcacaggcaaaaaaaggaaaggccccaccctcagaaaaatggtaatttgtaagttgcatctcgcctcttgccgactttccatcacctcaggttctcctctgccccaggggccttcatttctgtatcttctctcctcagtccagtgaaatcaactgacctcagttttggtgcaggccctgaccctgtcaccttgagcagatcactgtgcttctctggacttcagtttcgtcctctctgccagatcctctctggctccttcctgctctccgtggtgcctctgtggctgtgctgactgtgccctcccccagtgcctgcttagacctcctggcctcctcacatccccaaagactcctctgacaatctcccggccctcagaccttgtctcctccctccttcccagccccccactcctggcctggtttccattcccctccctgcccctcttcccctacctctacccgtggtctctctccccggtctctgggcagccaccagctccagatgctgtgctttcagagaaaatcaatagagctgggaggctcagcagttcagatgaaatcaaccaggttaatgattaagaaggcttcttcacccaccctctccccacgaaccctcttccccattctcaggactcagctcccagcatggggggctggcctcatattacagggctccctgctatcactggaccccaaagaaagaggatctcctccacaacaagtctctgtggcctgtgcaagggagggaacatccggcaagttctaagcaaatatggctactgctttacactggagtggagctttgacctgggggctcctgctgtccctgcccctccctgcctcccccttcctctcctgcgaggcaggagggagctctctgcagggtactcccaccccagccctgaggccctgggcgctcttgctgtccttccagccccagcctttccccctgccaccccaaagggggccaggccgagcccaggaaggaacgtccccctccactcccatccctctcacccaccccaatactacgatttcaggtccccactgctctctgcctcccctctccaccttacacacacacacaaaagaaaaccagaataaacagttgggcttctctcccgagcaaatgtcgacccgtctgccctctgcggtgtgctcccgcccgagagaagtaattctggtcctgtccttcagcgcttcgaatgggagccctggccagtcccggcagccttttccccacccctgctccattccaagcggggggatggggggggctcttaacaggacgggcccgaggcaaggctgaggcactgcttgctcattatgaaacagggcagttcagggcggcctgggcagaggcagcggtggaggggctgcagccgccgaaccccagcagctgggttcccctctcgggtcactgaactgggccaggggatgagactgccctcatctcccacagccaaccacaccaacctgcctgcggctgccccttccaggctcctcatgagctgccacctgtgctggggagtcaagtccctcctcccttcccaggcacccacctcttccttggcccttttccctcacatagatacagccacccca

SEQ ID NO: 57093 - DNA, 1569 bp, Homo sapiens
ctgtccccaccagcccatttgagcaggggctagcttgaggcatccccatcctgtctcccctctgctcatgcaggcggagggctaagggctggcctgaccaccttaccgtctgcggggggctgcccacggtcatctccacgtagtagccctgccccgacttgcccctcaggttgtccaccatctccacaaagctgcccctccggccgggctcctcgggctcttcgtcggtctcccggggcagccgcagccccaggggggcgccccccaggccgctgcgcaggggcagccggatgccgtgctgggtgccgtgggcaggcagcactcccgcgcccatccacagcaggagccagggcagggcttgggccatggtgggccccggccttcgggccctctgggctcgcactggcccacgtccgtccctggcgcctgcccccaagtctgggtggtgctggtggcttctcaggagagggagcttgggggcatcaggacgccagggcctgcagggccctgggccagcccccgggtccgggctgtggagagcggtcaggggagatccgcagagcacgggagcaggggagaggctgggatccggagcccgctacatcggcacggcggcggccagcctgggcagcgggcgcgggctcccggcggggctgggaggggcgggcatggcgggccggtggcggcttccctggtccccccggcgggcggcggcgcgggcaggggcaagggctccgggctcctgcggctgcgttggctgctcaggccaccataatccagctcgcggctcgcagctcccgggcgggctggggaggcggaaagacttgtggcggcggctgtcaaagccaaaaggttttcgcttttccctgggatcgctgggaagtgtagtcttcccatggcaggcaatccggcttccggggctggagaggggtctgggatgccctctgccgaggtggagtccgccctgcaaggccctggcgggaagggccagacggatggagaggggcacacctcccgtctgtcagtctttctttcagcatggaaggagcacccactgtatgccaggcacactgccaggcgctggagatacagagagaaataaacggtgattctacacgggacagttaagtgattcctgccgcggtggggtttcacactatacgatgtggcattaaggagtagggatttggagggacatctaggggatctgggaagactcagtgggagaaggtggtatttaatttgagcgtttaaaaatgggtaggattttcacgagcagagattgagggagcaggatgaaaggggaggaagagtttttccaggctgcaaaccagcggagcagggtccaaaaggggaaagtgcagttgtcttattttctcctgcgcctgcgatctgcgggcaggtaagagccagtgggtcttctcccatctgaacctgtttgtgcccttgaggctctacttgaatccttatggctcctctgattttctgcaccatcagccagactgaggagaaatggctgttgatagctttaaagtgttaacactccgaaaagtatctctatattaactg

SEQ ID NO: 57094 - DNA, 1375 bp, Homo sapiens
aatcctcacgtctaaactcggggtcctcttttttttttttttttttttttagtagagaaggggtttcaccatgttggtcaggctggtctcgaactcctgacctcaggtgacccacccgcctcggcctcccaaattgctggaattacaggcgtgagccaccgcgcccagccgatgaggttctctttcaacctcttgcggattcccattatctatcttaaactacactctttcaacctcttgcggattcccattatctatcttaaactacactcccatcgtgcaacggaaaacggacagagctcctgcgtgcaccgaagggacttcgagccaatccattgtcacagctctcagccggcgacctattggctcctgctggaggcgggactcccggttgctaggcggtaccttttccggaagtgtttgttgcgcgctgcagggcaacaccccggcgtccctggaagctgggggagcgggtgggtgttgggtggcgttgggggagctgcgcctcgcccagagcctcgcccggagcctcgcccggagccttccggggtgggggatagttgaggacctcatcgagggaggggttgggcggcggggaagggagcgagcgtggcgggggacccgaggcacgctctcgagccaacgagcgtgatgcgctcgagtgtgggcggggactgagggaagaagtgaaaatcggactgccaggcgacagttcctccgtttgaaatctcgccggctcctgagcgggccaccgggcccgggctgggggtctggcgggtgagtgagcagcgggtcgggacgcgggagaggggcactgggcacggggccctggtttgcttgctctgttcatcgttggcgagtgaggccaggccttccgaagcttgctgggatacttctgtggcaggcttccccccgggtccaaatccggggctagcccaatcttatgccatctttggccagctgggaaagttggaaagcttttttgttttttccttttcttgcattggatttaaaaatgtccctctacctctggcaccgctctcctcacttggcttcagcgactccctgtccgttctcctaactcagtccttggcagtagaaagctcccttctactcggcgcactccatctcttgcgttatcagcttttcagcgttgactcgccaaactactccagccagacctctttcctgagctcagacctgcttactgtcatcgtcagccttccccggtccctccgatctgtttctcctcttgtatttttttatctcaatgaagggcttcaccattcactcagccaagtctgtccctttaatttattcatctaataaatacagcaaacatttgtcggacatgccctgtcttctaggcagtgta

SEQ ID NO: 57095 - DNA, 2303 bp, Homo sapiens
gaggctcttcttcctctgatggggaagtccaggccacccagccaggaagtgcctgccagaacccagcagaagccctcctgcccccatgcccacagggctctttctctggagctgctcagaggctggatgggtttggatggtggaccctttagcaagggataggtgtgggactggctgctggctcacaggctaattctcctggccctccctgggcttcctacccagctcttcctgttcatgggtgctgtgaggaaggccaggactcagcggacttagcagagaccctgcaaccccattgcccaaggccagcacttctgggcctgggggctctggaagtgctctcccaggggctggcagggcagagctacctgccctctccccagatggtgaaacaagtccagtttcccttgggccctcacctgctccgcctggctgcgttcccctcaccctcacctggacatgctcacctactaagctgtgactgtcaccttttgctccacttcgagttcacctggggaggctgaacaaccaccgatgccccatcagttgaatcagactcacggcagctggggttgagaagagctactgaggcaaagcctctttcccctcccaccctacaaacgtccctgcttgacttctctgcccctccccatgtcctgctgttgttgatttactcagactacagggttagaggcgtcgccgttccccaggagttggggaagatgtgtagatcacgtggggtctctgcctctgggaaggaatgagcacttaagaccccacagccaagaattaccccagagtggggcaagtgctgtacctggggggtgaacaagcggaatgagaagagctgagggctttcctaggaaatcacggcaccgggcggaccattcaggagccaggagcccctcctcccggcaaaggcccttggaaagattgagttgaaaacacacagctggaggggattcggcgcaagccacgtgctccctctggtggtcagaaagggaattgcggcctcagacgaagactgtcatggtcggagttgtctgattaagagtaattcacccaataatttcctaggcttggtagatctttgtgactcaatgcaggtctgaattgtggaaaatcccaaagtgaagtgaaagttcagtaactgccagcccatgtgacctttctggagagagaagggaaatgttcacaagagtcctggttaggaagcaggtcccaggcctctgaacaccacctggggccatggggctcgttaagcctccgcctgcagaggccaccccccaaacctcatattcaaccgggctggggaaatctgggtacgtggtggtttgaaaagcccctcaggttcagacctgataaagcctcacatttcacaaggagggaggccttgaggcagggtcagcgaagggaagtgactcatccagagcaggtggaatttccctctgagggtggcaggctggattgtcctctgtatggaacattctagaacattctagaaacgtgattcttctccagtgctcttacttctcctggggtgggccacaggtctgaataccccctcttcctgtttgccttgctgctgcatccaagaggctttgggagcctccctcctcctgaaagcccccctggctagacctgccccattcaagttcatttctcccaccctcgagggagagctcaagtgtgtgcctctatctcctgcaaagaaaactgaattccatttaagggtttggcctacaccaatgagtccacatttggagtggggtgtcacaaggacttggtgctgagttgtaagtcacctggccttcccctgcctggctcctggtctcctctggagtttctccccacaaccccaggccttctctgtttccccttcactctccaaacccacaggcagtcagtgggtagtccacctccctgccccaccaaccgcttcccgtcctttggatgttcgtgtggtgggaagagctctggaaggggagccagagacctgcagtttacctctggctccgactcaggctggccatgtcactctggataagccacggcctctcttagagcctcggtttccccttctgtaaattgaagacggtctgttttgctctctaaggacccttccctgctcaagccttctgtgtttctaggagagttggtggttatcagggactgggggcagtggattaagacaaagagcttaattcccaagtggagtgaggtctatcctgcctctggcccccaaacacaccctgttcatttcctggtcctgtagcttggttctcctgccagttctcccctct

SEQ ID NO: 57096 - DNA, 1011 bp, Homo sapiens
ggaggtcctcgaagccaaagcagctggagaaggtgcagggcagcaggatctccgtgccattgacagcgtagatgtcggtggcctttcccacagacacctccagcgacagggttacggggagcaggaagaggcctgtgtaaggagcaccgcctcccttaataaaaccccaccagcctggagctctggaaggggatgcttaggcagggcggagtagcttggccaggcaggtaggtctctatcaccctcagtgccaacctcgggaggatggctgtctactccaatcagcaccgcctgggccaccctccatcattctccatttctcccctggaaaggactgaattctggaccagggagtagcccttgttgcgctctggatgaccaccaggggtcaccccaacccaaggaaacaaaggcctggccactgccgcgaaccgcgccccggctccgcccctcacctggggacgcagtgcctggaagcgctcctgccgcacccactccaggacgcgcagggcgggctcccttctgtttgcaggggaattcccctaggacagtacgcgcctctcgccaggttttcaggactgacgggcggggcggtcgaggagggggaagagccgggtcccgtaaggtgaagaagagaaacgcggccgccgcagtcccgggccgccgtccagtagcctctcgttcccccgccctggaggctcctccctggtccccaggggcagagaggcagaaggacacgttcgggctggacctcgctgggccagccgagtccgacgccctctggccgccaaacgggaccctgggaaccgcaggaagacggcctggcaggggggaacacggcgggggtggggaccgacgcggggcttggagcttggcagccgcgggggcgcgcgggcgcagccagggtgggaaagtcagtggcagaagacaccctggggagggattccgggccagcccgagtgcacgcgcgcgggggcgggacggggagggcgctggacccgcggtcccctc

SEQ ID NO: 57097 - DNA, 1378 bp, Homo sapiens
gagctggttgcccacctgccctttctctttgccacctccatagtcatccccacaagcccagccccgacagagtcccctccctcgtcacttgtggcatcctccatcctggggatcgatgctactgcaacaccaccaaagttccactgtcaactcggccctcagcattggagtgccagggacatgcctcattacagcaccaatcaagttcaagttcaaggtccccattcctgcatcctctcccactcagctttgcagaagctttagcttcctcccactaccatctccccaccccaaacactcagacctcttcatcgcagactccctcttcctcaccctagcccagagctctgggtcctggtcactgagccccctttctatctttacttagccatggctctcaccaggcggcttctctcctgcacgaagtgcttcctaactcctgaggaaagggtcctgtcctccagctgggcctccttacaacaggccactcacccaactccccttctttcagcctgtcctgagactctgatcaattaggtactgttaatatagcagtgccatttcttgaacattggggagtggaatccaacgtttaagagaatgtgctgaagtcagacacagggagttcaaatttcagctcccgttaccatagtcatctgtttcctccctgtaacctgagtataatagaatctacctccgattgctgtgagggctaaacaagatacacagtgcctgggctcacgaaaagcattcttatgttagccatcgttgagttcctgccatgcaccaaatcacaaacacgtcaggcagtaggcattctttagtttacccgggagggaactgaagctcagaggggttgagtaacttgcctgtgatcattacgtaaatgacaaaggtggcttgaaacccaggtcctgccagagattccatagcattcctgctctgatgttaatatgccaagtaactcagcaaagcaggctggcagggcctctgcactgtctgtgtttagcactcctactccaaacccagcacatcacaccacagaaagagagagagcctttgtggtggggaatagttccatcaacagtccttggacttgactctcagttgctgctccagcaataagtaagtttaggagcaagaatgaaactctacaaagcaggcttgcaaataactttctagcccacttccccaccaggaagtctctgagtggtcaaatacaaacacttgacaggacagtctgcaagactgggctgggcagttctgaggctggatttaaagggctgcaacctcgctcagcctgtgggttccatttttttcctgaatctctacacctggcccttcctccattccatccggcccaagccaaaggtgcctt

SEQ ID NO: 57098 - DNA, 2095 bp, Homo sapiens
ccctacttccaacccattcaccccaaacctttcccaggaccaaaaccagcctctagtgtgttagcacggtttggctttcctccaggaacttcagtttttccaaaagtttctaactgtaaattcctcaccaggactttacttgccccctcaaccgaggcataaaaataggacgatttccacaaacaacacttatttagaaataatgtgccagaggaatgatttgggttggtttttatctctgattcttcccagtaactcatccactaagaaccctgcccacaggagggtctgatccaacggggggtttgaggccactcagctcagcctggttcccagggccagtgtcccactccagaggccaagtccatgctcccctcccctcagcaggcctgttcctccagagctgtccagtctctctgccaggctccaaattctccatcttcagtgtattgaccaaacaatgagacaggaggacagctgggagagcgggagtctgaaatcactggtagagtggcccaggacacacacaggagagagtctccaccgctgctgagatgaagggactctccattcttctcaaaaggcttgctgtgtttttggcattcccccacctgactttttttcaagtgagttgttccgatctgacctcagagaaggccaaactgggtgctgtgggggaagggcagaaagaaacaaaacatgcttgtaagaagtagttccataatcatagcagctgctgttcattgagctcttctcatgagcccggcccagtactgaatttcatatgcattatctcatgtgatccttaccaccaggaggtaggtattattattgcctttctaaggataaggaaactgaggctcagacaggccaagttactgcccaagaccatctggctgcaacacagagttagaatttggacccaggtctgtctaactccacagcttgtgatcttaacctctgtgtgtacagcctcagaaagggaaaacagcaaggtgccactacatttacatgaatttcatcaattcaacaacaaaaaacaaaggctctttgttacccctgctccctatcagagaacacctttataaatgcagtctcaaacaagtggcctgcagtcccaaattcaccaacagccttatttaacttggcacatcatattttaaaataacttgactggcccctgccagcctttgagtttgcagcccaggcctcttctcttactctattggatctagatcaagaggacaggaatggtgttttcaacagaatcaaaaccataatcgcctagcattaaacctggggaagttagctgtgaagacaattgttcctcctgcatcatctccacctcggagacgttctgcaaacagtgccaccctggctggtgacccactcagcagtagccacaaggcagctgtatcagcaggtctccaggagccaggatgaggcctcgcaagttactgcagcatcacataacagtatgggagaaagatacagagggaaaatgattccattcagctgcaacttcagggtggagttaatgtttcactcggtggatccaggccaggcctctgatctcacacttccctggcagacctctctctgctgcaatcagctgggagtcatgtgtcctcagggctggtacgataggaacaaacaaagcccatcattccacaagcagaggaggccagccttcccaaacccacagaacactgctccttaataggctgggtgcctataattagtctacaaatagcaccgtgctcatcgccagctcactccttttgtccctacccccactcactgcacgccccgaggtgccttttccaggcactgcagttctctaaggggctacagaagtctaagcaaagggaaattaggaatcagactccaaaatattgtatgagatccagcatgcagcctgcctggcagttaggttatgagaaggtataataagtcacaaagttaagaaacaaaatctaagcattggaaggaaccctactttgaccttttgatagcaaggaaaacgactcacagcaacacaatacttgcccaaggatcttatcctatttatcctattttctttgttgttgttgtt

SEQ ID NO: 57099 - DNA, 835 bp, Homo sapiens
cagaatggagctgaagaaaaaaagacatagaatggagctggagtaattaagtagtagaattgagcaaacgtatccattgaatggtagaaaccaacagaaagtgagctcaaagagccatgttgtaaggttcctgagaaggataccacctgggcacagggggccagataagcccagagcagaagggaccttcctctgcctcaggatggcagggcagagataagaatgggggagacatagatatgtttgtgggtggagaagctgcatgagcccccataatggctcgattttctctgtgaattggacttctgagaaggaagcacacagacctgccgtgctcccctctccagctggagacaaggtgcctccacagacttaggtctctggcctgaggtatgaggtatgttccatcctcaccccatcttccccacccccagccaaccacagccaactcctgaaggccctagcgacaggcaaagtccacaggccacatcctgattgctaactgggttatggtttaactttaacccctcacttatcaacctctctctgtcaacacaatcaagtctttcctctcctacacagcactggccttgatgcacactgtttgccagaatccagaacctctgatcagaaaaccctccatttttggttctggtgcctgcatgttcctctctgttcctggctgtctctcactagcttaggatcatttcccgctccactctaacacatacagcacctcccttgaaaccaagtatgctgactttggacatcaactccgatccttccctgagcttctgtatctttacatcagtagatgaccctggcaatgagtggg

SEQ ID NO: 57100 - DNA, 864 bp, Homo sapiens
agggtagagataaaggaaggaaactcaaagaatttcatgtgcaagaacaaggaacctctcatttcaagtttgtgtctcccatcagccccttaactacttgaaaggtaagcattaccattattgtaattgccttcctcttcacagctcaggaagctaagatcagcaaggttgagtaacttacttacccagctgataacataaccaaattcctgagctaggacgaggcccagttctgataatctccaaagccccggctcttgcaacacctcctggtggcacctgatgcctgactcttacaccactctgtcctgacaccagcagtcaggggcttctattacatagtgatgtttcccccgcgttaccttggcgtgctctcctggtgacagagtccagtctatcttgaatatacatttgtcttctgtgctctggaaaacacatcccatcagagctgaatcacccacatggactgttagctcaggcggggaaacattcaagtcattcaggcccaaggaataatctatagaagtcaaaggcaagaggacacatcatttagacaaatactctcaacaacaaaaatcaattccaatcatggagtactaaacacccctctccctggatgatccaacatagacaaagtcctcggaggcatgttcaaaggcagcatggcatccctgtcctctagttacctatatggctcatcagaaggattctgcaatcttcatactacaataaatgctatctggctccctcctcctatccagccccttacacttttctggaattcttcctcccaacctttctaaagaaataagggaaaccccagaagtctctcctttctgatcatcaatttagaaactcacctcc

SEQ ID NO: 57101 - DNA, 1119 bp, Homo sapiens
catcactctgttgctcaggctacagtgcagtggcgcgatctcagttcattgcaacctctgcctcccaggttcaagtgatcctcccatctcagcctcccaaatagctgagaccacaggcgtgtgccaccacacctggctaattttttgtatttttggtagagacggggtttccctatgttgcctagtctggactcaaactcctgaactcaggcaatcctcccatctcaacctctcaaagtgctgggattacaggcgtgagccaccatgcttagcctaggccacttttcgaagggacttttcccaaggttaaggaagctgacagcagcacaaagcttttaccatccccaggtctgaagggcaaagggaggaaatggtgttactagatcctggtaagagtgggagctgtgggcaacctgacaggggctgttgttagagggatacaggtactacagatcatggcaccaagagagggagggagcaggaaataaatatcctgatctctctcctgccctccaatctcctgccaatgcctcccgttggccaaatataactggaaaccagaggaagagagcctgaatgatgtactttatacagttagctttccaaagagtagagtagagaaaagaatgagtctggtgggaggggagaaaactaaaagtaaacagcaactgactttactgccagctgaggctgactcagatttacctaaaccaatcattacatctagtggtgtcctggtaaacagcagaacatttttacaaaaaataaaaggtccacatacatagggttggacaatttctgtggtgcaaatactcctaccatggtcaatttcaagctacacaggttaagtccctaatgctgacataggaagaggtgtattaatacttaattggcttttgagagccaatcacatcctcccaatcataaagataggtcaatatgtgatctaagctaatccaatcaaagcgagtttcagaaaacctgcttggaaagttatttaatgccccccaccccacacccgccttgtttattttttgttttttttgagatggggtctcactattgttgcccaggctggtcttgaattccttggctcaagtgatcctcccatcttggcct

SEQ ID NO: 57102 - DNA, 1781 bp, Homo sapiens
atatttctcgtgtgtgtgtgtgtgtgtgtgtgtgtgtgtgtgtgtgtgtgaaagagagagagagaggactgggtttattaggagtgacagtaggccagcctaaatatcatactgcaaagtaatttagcttaaaaactggagacttatgatgacacaggcagctgggagggatcgggggtgtgctggcaacatgaatattagtcaccagttaaaaactttccagccttaactgctaagatttaggacatctgaagtctttatattaaactatttatatttatataatattaaatatctctttcagaaatccccattaccctcaaggaaattttataaatttagcaattcactctaatactagatatactaatattttatttcccaggaagacacacatacacaaaatccaggaaataattgtaccttaagatgaaggtaattaggctggattgaaatttatgcaatttgaaaattatatgaaagcaaaactcacctaattttaagatgtgaatgtcagtgtgaataccctacttctgatattacttaataaattttaacagaatttatatgctctttcttgtattaaaaaaagttatgaaaatgctaaagcagttactttttcatcgatatgcttctctataacgaatcacatcacatcccttctgtgactagcaaatatttcattttatagactacaataatcacctacaaaaaataaaattaccaactgtcatgattttgtttcccaaaactactggggcaaactactgaatgctagaactgttttctttctaatcagggtatacagcgcccaaacgacagcggtcaaccactgataataacaccacaaaataacaccgggtgcccccaaagccagagctctttgtggttccatcaagtatgctatcaccaaactacaatgacaggtcacgcaaggtgaaaaagctcccaaagctcaggaaaggactgacaaaataccaactatcctcaacggggtggtgatgacatcgtcccaacgtcccgctccctccctccttccttcccagagctatgcgggggctttctggagacccccctacccggaaccggaaaagcgaccatcttccctaaccccccggccggaagtggagcgtagccagccggagcactcaccctggaagaacaggacgcccagcagagggaagagagcgcagccacggcttccagctgctcctctctgctgcatcccggcagctcttcagatgcttgcacaccttgtttacagctcccggtaacgacacaggtaacaccggaagtgacgtcagagcaggaggccgagagacaacttaaatggcgatccgaagttaccataggaacctggcttctttccagaaccacacctggtttcactgaccagagatttattaactttcaggcgggagctaaatgctctcttttgcttgaaaatgaagtaggctacggacttggaataattacaattttgtttttatggaattctgcagaactaaataattttgatgctctgactgcatgtcagacatcgtttttacgtctcgagatttagttgaaggttctcagaatacactactgtaaatttagagttcagaaacacctgggagatcatacagtatagataaatatatattaggtgcttgtagtgatatgtgccacaagcctcattggttggtgtcctttttagtgtaagtattgcagcctccaaaattgggtgtttattaaattacttttggcggtggcaatgatgatcaaatcattacagcctg

SEQ ID NO: 57103 - DNA, 1164 bp, Homo sapiens
aagtggtctcctagcaggtaagttttccagatgggtccttaggtggatttcatactgttactagtctattgcagaaactgaattaatcaactccagacagcttatgtttgcctgcacccctagaacctttgtaccacgtggcatttttttaaacttgatatttacatttagaatgtgtgtgttggggcactttcaaaatcacagtaggtctctctctaacaatctccactttcctggtgttgctgagagtcacagacaagacccacacacagaaatccaaatgccaagtcctgccagcagtgggaggttgagaacagccacacacaaaaaaatggcatgtaacctgagattagaaagccctctctgtgcctgaatcactggcagctgaacacacctaaacctgtttgtccgagagcagttctccaaaaacagtccaccaactttggtttcagtaaaacccaaagtaaaacaaactgtatctgtggctcaggctcccaaacaaaagtcttgcaacttctaagacaattagctaactttatagagtgagcagtgaaggaggaaactctgagagaagcccgccggctcttacctgtgagctgtatgccaaggagaagaagcaccgcacgagtagagctcttgccatacatgagggaaacccagccttggccccagagaccggacggggcagaccgagggctccaacaccctgccaaggccactccgggaggagcaagcaccgcgttttcccagagagaggagtttgagttgagttcctcacctgtgcctgtgactcagcccgctctgcctgtgcacttttctgaaatgaaaggtggggcctcagctcccaatgccctccttcctttcctctctcccgccctctacacgaacgagcatgagcacgtctgcacaaaggtcccaaactcccgcagtcctctctttactttcagttaatctgactgggctctggcctctagatggcctcggaaacagccagaggaggtggtgccagtctgaaatgtcccagactgttatgggtttggcccccacacgcccttttaaaacaggctttaggcttgcctgggaagtgaatgttgaaactgtcctgcagtgattccacttctcaaagcaccaccccagggccacattcacttgggactggattcg

SEQ ID NO: 57104 - DNA, 778 bp, Homo sapiens
aaatattatataaaagttattgaaatattaaaatactcattgggaaatagccccaaactttgctcaccccaacccacccttacacacacacatacacacacacacacacacacacacacacacacacacacacgtgaccagacatcccagtccctcccctaccgggctgcctcttgagttggggtaacaaagagttaatgcctggcatggcagaggatcaccaggattgttctagttgattggtatgtgtgcactcctagttgttaaatattttcactatcacacctggatatactcaacaaatatttgttgagccaaatactcaacaccagccaaacacgtagtatttactttagcttaagcgaattatttagccctgacagaagccctggaatgtgggtctttaagttcctatttttgagatgggaaagctgaggctcacggaaggaggtgaccagctcaagtctcctaccgtccatgccaaattagaattccagcctgcctcctgacttcaagtccaaagttcttcccacgcactaaagctagctcttcagtgtcctttcttaggaggtacttcctcccgcaccactgaccgccccctctctatttcacccccagcccatccggaaaggccagcgggacctgtattctggcctgaatcagagacgcatctgaccctctggagaacactgcctcccgctggcccaggtctcctctccagtccccctgcgactccctgtttcctgggctagtcttggaccccacgagagagaatcgt

SEQ ID NO: 57105 - DNA, 555 bp, Homo sapiens
atgttggccaatctgatcttgaactctagtcctcaagtgatctgcctgcctcggcctcccaaagtgctagaattacaggcatgagccaccgcgcctggccagggagactattatgatgactatgagtggacaatgccaagaaactgaagtacactccttatcaggagtttccacaaacaactagtcaaaatcaaacaactcaaagtccgtgcaataaagatagttcagtagtatttgagtccagctggtcagtcttggttcaggagatgatggtgattagggccacagttcactacaaaaagacctgatttaaactcactccattaaatgagagagctatattagagatgtctcagagacctccacccagcaacagtggacagccagtgtttataaacagaaaaaggaagtggcattggatatagcctgatcggttacaggtcaccctttgcctaatttagacacatctgatcagtctgcagtctgcccctggctgaaagctggctgctatggttggaggagacttcctttcttcttacaaaaatatgccctcaa

SEQ ID NO: 57106 - DNA, 1627 bp, Homo sapiens
tgccctcgtgacccgcccgtctcagcctcccaaagtgctgggactacaaggcgtgagccactgtgcctggccatctatgtgtatctcaaaacaaccttgtaggatgtatactgtctccactttacagataagaaaactgaaatccaatcaaagatagcacactccaaagattgctccaaagacagcacaacaataacaaacttgtagttgttattgctgttagtgttatccctttgaataatagagagtaacagaagctgcttcaaaaaggtctaggactggtgggaaaataagagagcagacccccaacagaggttgcgagcagagccagggatcacagagttttatctgccctcggtacgctgatttccaaaacccagcctcatattctatactccaaagcgcactgccaggtgggccaactccagcccccacaatccgatgccaaggccacttcttgccacttcctgcccgcctccagcccgcccctaacaagctagcgcatgcgctgtaggactatttgcgcgccgttccccccggtgagcctgcacaccgtgcttccggcgcggagatgaacttccacatgccccggcgcttgttgatgacgtaacttccggttgctgtgctgagtcggaagtgggaacccttcggccgctgagattctgtcgtgtcgtcgctgctggcacttcaggctctggtaagacaggcaatagcttcaggggacggggtcgttgactttgcgttgtgatattttctgctggtccaatgccacttcaagcctgttcactcttatcttctccaaattccttctcctatgctttgctaaccagggaccttctccttcttgaacttcgaccctgtctgatttggaaccccttacagtgccccagcttctgatgtctctttgtacatttctgtccccatctttgccaagcccctcctggaagaggccggagcgctatcattgcattatcttttgacttaactttctctagaacgtgccccgggcgggtggatctccctccttcccgcgaatcccttatggagcatggaaggataaaatataaagagtagataacaaataggcagatgccaagaagataagattaatcgtgagtcgtaagcaaaccagttcaatgcatacgtcagggtgttgataattcttaaggcaggtgatgagttcaccacagataactcttggggcactctgcttcatgtttccttgggtttagaagacacttctaaaattgagtgaccatgcctcatgaccttatatttgatgagccttccttttaggatcagttttatgccctgacagcaagcatgtgtttagtctcgctgtcatttactgttttggtctcacgtggaagcccacctgcgataaaatgggatccaagaaggactgctgtctgctttttgacttgagatccttctaggctgcagatagatgtgttgatggaatttgttgccacattagcatggcctgatagtgttaggtgaaacatacgacaacgaaaattgtttcttaatttctattttaaattgatattttaatttctattttatattgatatatgtattatttgccaggacacagaccttatgggagtatgatttgatagagctt

SEQ ID NO: 57107 - DNA, 2243 bp, Homo sapiens
catcaaatgccacttccctacatacatcttttcctcctcatattaaactatgaagtttcagccctctgtagtatacagctgttctcttacacatcggctcaaggatcttttctaggaagtatgctgaaatcagcaccatgcctaatctgatggaatgccccctctctgagtatacattgcaacttcagatctcaactctgccacttccaaactgtgtggccatttttcaagcccagtctcaatggggacaatgccttacaggctttctttaaattccaaaatgcctggcatagtgtgggcgttcaatacaggtgattttttcctcacatctgcacagctccttgtggttaactagggaattaggggaaatggattccaatcgtgatacagcactttggggagattgggattacaaaaaatcaactttaaaagggctatggggccaggcgcggtgattcacgcctgtaatcccagcaccaaggcgggtggatcacttgaagctaggagttcgagaccagcctggccaacatggtgaaacaccgtctctactaaaagtacaaaaattagccaggcgtggtggcgggcgcctgtagtcccatctactagggagactgaggcacaacaatcgctggaacccgggggacagaggttgcagtgagccgaagtcgtgccactgcacttcagcctgggcgacagagcgagactgtctcaaataaaaagggctatgggttgagcctggtgacagcctgtgtggtgattgctcggcccctaactttatatgtttggccttggaccctctctacctctgtacaacgatcgtgttggactagaagaatctcagcgaatccttctccagtactgacttcaaaggttctcagaatcgcggcgaaagcaccctacgcaaaatagcggaggtcggcgccaagaaaagcactgcaggttcagggcgcatgcgcatttccgctccttgccggttttccggacctctacgagtggctgccccacaaaatgcctgcttctctgcggaatcctactgttcttcacatgctctctaataccatcttttcatatccactttctcttccatgttgaaaaattaaattgacaggctggattctgcaaagatctttggacatttaagtatcttcgaccggcgcgaaaagaggcggcctgaccttggaagtgggacggggtcctgcagcgggtccttccggcgggtgacattcagccggcggttcggggcgacggactctccattccagaaccatggcccaatttgtccgtaaccttgtggagaagaccccggcgctggtgaacggtgagcgcgatgtgagaccgccgaggcgggcacacgggcggcagggaggcctgcgatggcctgagaggaagaagcgggctgcgaagacccgaggggcctgcgggtgccggggcgggatggcctgcaggtggagggagcaggaagcaggttggcgactcttttctagccttccactcgtctgacctgcagattgggttctctacacaacctagaagttcctgaattctaaccacgactgggaagagaggtagtgtgaaggaagcccggcgttgcccggcagctgcaaccattacgccccctgagatcgctaagagcagggatctagaggggatggttctgttaggagagctaagaaaaggaagggcagaaacgtgaaagtaaatcaattcggcctcattacatgtggtgttgttctcagtggagtatttggaagtcaacagaaatgtttaaggatgggtgagcttttttgaacgttgactttgctttctgtcctagacggattctaagatacttccgctttaatccgagggaaattttaggtggaaatggacttcatggatgagtatccatgccccgagaagcataggacgggatccgtataaacaataatctttgttacgaagcttagcattcgtggaattttttcagcttgaagagcctcactggtagaccgctgtatttcacaacaaccctgaataatcacagcctctgagtactagtttatttggccagtaaatatttcagttgtcttctcagtggcaagctattcattttattcctgaagtgagataagctaaattgacgtaagtttttcctagatgtgctgtattccagtaagtgactgaaggtcggatctcttaacttttgcctacgtttatgaaatgtgaatagaaagcagaacttcaaaaaaaatgtaatactttct

SEQ ID NO: 57108 - DNA, 1348 bp, Homo sapiens
agaggcttgagtctggggactccacacaatattcgaagacattcttccttctttctgctgccttgcaacctgcagacctcccacctgtgttaaatgaagaatgcttgaagtgaggttactcagaacccacccggttcatgttttctcaagggtagaaggcgggaagaaatctgttgacacagttatataaagcctgtcattcagtcccctgcctattacctctgcagaccgttatgcatattaaagaagggggggcggcaaatacaaaagaaaaataagagagacgagagagagagagaaagagagagagagagagagagaacgaacaaatcaggatgcttgagggaatccacgtggtcgccaatctgtaactgatcagagcagctacactgaagcaaaaaccccagcgcccaacgctaaatatattgcaatggagaaaccgtccacaatggggtgtctctgtccttagcagagccttggggctgccgtttaagaccctcctgctactcccacccttttagcatctagtaaaccacgcgctgtaacaacggaatcttgttctgtgtattgcgttgtgcgagtgtgcgctttgcaaaccatctgggccccatcctgcgcggttggaacgaagatcgattcgggacgagttgggggagttgaggcttgcctgtgtctcctccctttcattgctcctctccagcccccatcccatcgtccgctctgcacaaatgtttcgccagtggagggacgtaggttttcagcaccaggaggctgtggaccttctctggaggcgtgaagtgcaccctccggagggccagagctgagtgcaacctgctcacaacgaccctctccctccttcccaaattcgccgccccaggctgtaatattacatgcagtgcgctgtaccggtgcgggagtccaggaaggctgcatgaccttccagcgaactccccctcggcttgggggatggaggctgccccggggcctgcaggctgtgtatcgatcccccagcctcagccaacgcaagttctcccgacacaaacccctccctaccctctcggctttcccagccttgcaggcgtctaacgctatgctcgaggcgccctcccctctttcccgcaataaagtaaacccggtggatattcattcccctccctaactcgcctccttctttccccctcccccctcagcttactaaccccgcgcacagagctcgccgccggcgggccccttccacccagtgtatcataatgcccaacgctctcctcctccccctctcttaatcagaaacgtgctcgcgagcccccctccctctgcgtgcatacattagggtctgctttgcatgcag

SEQ ID NO: 57109 - DNA, 2045 bp, Homo sapiens
cgcctcttccctccaggccccgttagccacccagcttcagcttcgttgtaacaccgcgtcgttagcggagcacgccgtggcctcagtgcccgggctggagaaacacaacccaactccctgcagaagggcacgaaagccagacgagtgcacagtagagcgaggaggtggcaggagacctgccactcggtgtgtgctttttggaaagagctccagcatgaaaatgggaggggctccttttttattttttaaagtgcgttcattgagggcctttctgttttgcatatagtaaactgggcagcgcttctgttttgcatgtagtacaataagggctcttttattctagaagcgttcaattcgggctaacccatcttgtatccgtgccctggggcggaggagaaggctcactgctccccgacccagccgccgcgttatactggaagctgctctcccgggctgttcgattcccagcgcgtcccgggaacgtgtgtaatcggcctctcggcgctcaaggctgcaggcggcccggctccctacgcctccatcctccgcgtagtcctcgccccctccccctctctccggaacccgcgctctgctccgggctcccgggcttccttcccccctccttttcccgagcaatgcctctcccggagggcggggcatgcagttatccaggttgcggggccggcgggcgggcaggaggcggcggcccgggcctcgggatggagttgcagcgcccaggcgtcagaggcggaggcccgaggccgctatacagattgcggggctggcgggcgcggcccggcgctctgcatagcggccggcagggtgcaggcggccgggcggcgcagagctggttaggcaggttccggggccccgtgcccccccctccgcctccccgcccccctgtgttgtcgcctctccctctcgctgcttcacttcacggggcgaacatggcgcacagctgtcggtggcgcttccccgcccgacccgggaccaccgggggcggcggcggcggggggcgccggggcctagggggcgccccgcggcaacgcgtcccggccctgctgcttccccccgggcccccggtcggcggtggcggccccggggcgcccccctcccccccggctgtggcggccgcggcggcggcggcgggaagcagcggggctggggttccagggggagcggccgccgcctcagcagcctcctcgtcgtccgcctcgtcttcgtcttcgtcatcgtcctcagcctcttcagggccggccctgctccgggtgggcccgggcttcgacgcggcgctgcaggtctcggccgccatcggcaccaacctgcgccggttccgggccgtgtttggggagagcggcgggggaggcggcagcggagaggtaagggggcgaggaacccccaggtccggggtctcgaccctctgcggagccccctcccctcccccatccgggattgaggagcatcccaattctgggaccatctcggggtccctgacccggggcgaatggctctcccatcttgggacccccatgcagggctgcagacccccaggcgcccccaccccggggtttgggcccatctggctgagggcgtttgccccccgctctcctccccctgacccttccccaaatcccttggcacagaccccctcgccggggtttcccatcccgggactgaacccctcctccctttcacagattacctcatccgagcaagattcctccctccctccctcctagagacctgatcccgccacatccccgcctccctctctgggcagatgtgttactcctagggcagttttcctctcgggcgtctctcgggtgatggcctcatccagggccacgttctcctggcccttggggatcgtgtcccttccagcaccttgctttcgaaaacccgatgaaccctcgcgccatccccgggccaggtccctatactgccagccactcccccttccttcacctccaccctctacccccaccccaagcagaccgatcctcccccatcccgccctaccccaccggggaaaatctctcctctgc

SEQ ID NO: 57110 - DNA, 1200 bp, Homo sapiens
ttaacagtctctttagtaaatacaggtagttgaataattgtttcaagagctcaacagatgacaagcttcttttctagaaataagacattttttgacaactttatcatgtataacagatctgttttttttccttgtgttcttccaagcttctggttagagaaaaagagaaaaaaaaaaaaggaaaatgtgtctaaagtccatcagtgttaactccctgtgacagggatgaaggaaaatactttaatagttcaaaaaataataatgctgaaagctctctacgaaagactgaatgtaaaagtaaaaagtgtacatagttgtaaaaaaaaggagtttttaaacatgtttattttctatgcacttttttttatttaagtgatagtttaattaataaacatgtcaagtttattgctgcacatggttaagcttccttttggctttggttggagagggtggagaaaagcgggaggggcatggcctgtgacctggtcacaaagtaccttccacagtcctttactttaaggtggcatcactaaattattccctgtagcccaccttcaggtccactccacactggctctcttgactattttcttcctttattcatcagtgatgtatgttcaggacctaattaattgtggatatgaggcagggtcaagaggacaaaggaacagggcctttaccttctacatagctcccctgtttcatccaaggaggttaagtattgatttttatcggttttctcaactgtgaatataataaactgaaagcatttcagggagaagctggagaacaccttctctagctgcactccaccttaaggctgaagctggatttgtttactgtttctcctgggggcaggggcagttgagaaataaccaagtagtctgccaagccagggtcaaccctccaggccacaggttgagcaaatgctacagccatggacagggagacactcctcacgaaggggtggtcctcatcctttcagatcaacttcctgctggaggctccaccctcaccacgtccctccctcttctctcatctggagtcaccttttgggattttggagttgagcaccatggggactccaaatgatcaggcagtgctgcaggccatcttcaaccctgacaccccatttggagacattgttggattggacctcggagaggaagcagaaaaggaagaacgagaagaaggtgggca

SEQ ID NO: 57111 - DNA, 1350 bp, Homo sapiens
aaaaggaaaacaatgagaaactgtcttgattgtacttgtaagaaatgattgtgcggttaatattattttttgaaccctgacattcagagtcagtcacctggcacatagtggatgcttaataacaggtgtggaataaattggctgctacttgcccgggcagtgggccagactcataaacatagtggccattcagaatcctgcaacgttcatgttttcgtgtattagcggtggaaaataataggaacaaggcgagacctggacttcagtcccagctctgccactaagtggcttggctgtagagcttaactcttccacagtcttcatctgtgtaatgggaataacgatccgtacctctagcaggtgcgaggcgggttgtaaatggccacgcccgggagccgcaagaaccacggtgatccgcgcggccgcaggtgggctggggctcgggcaaggccgccctggcctccgctgacccccgccccgcccgtctcgtcggtcccgcaggcgccctggaggatctggaacgcgcggtggagctgagcggcggccggggccgcgccgcccgccagagctttgtgcagcgcggactcctggcgcggctgcagggccgagacgacgacgcccgcagggacttcgagagggcggcacggctgggcagccccttcgcgcggcgccagctggtgctgctcaacccctacgccgcgctgtgcaaccgcatgctggccgacatgatggggcagctgcgccgcccccgtgacagccgctgagcgccgcggacccgggcgtccgcgggcgaggggacgggactgggccctgaaccaataaagccgtcgggcctcaccgactccgcctgctcctgcgtcctgcccgcgcccggagagaagggcactcgggggtactcggcgcgggctggggaccagccggggggtggtgagccgcggccgcccacctgccgggtaagggcccctcgggcccgtggtcgggcatcgattggccccgcctggcgcagcccccgcccctgcagcggactgcggtgctcatcagacctgagcagttgctccggcggcgctcggggagggagccaggtgagccgccccggtggcggggggcgggggcgggatgctcggcgaccccaccctccgaccctctcctcttccgccgacatccaccggagccaccaacatcaggaaagggggcgtagggcgagggatgggagagagaacagggcaggagagaggatgggaacagggcaggagagagaataggattaggagaaaggcgatccctttgggggaggggcgcgtggagtatgtgtgtgagtgtgcgtgtgtgcaaggtgtggttgcacggatg

SEQ ID NO: 57112 - DNA, 919 bp, Homo sapiens
accctcgtggggttcagcaccttggtggcctgcctggtctgcagaaaagagaagaaaaccaaaggtaggccagggacactgggggcagtgtggatgaggtcaggctgagcagcagccaagacagcaagtgcagctgggcagaaccagtcatctctgacggtggcagagcacttccagggggtggccatgggtacggtgacatgcatcccaggtagcagggtcaagcactgggaacccagtctctggccccagggccaggcctgggcatttgagagaccccttgcctgagggtcctgggtctgaaagggtaggacagcccagcgtgggagggcacactgagaattagggacatggtttctttctccacaggcccctcccggcacccatctctgatatcaaggtaactcttccttgggctgggtggacaagcctaaccgaaatgcaggatggggacaggagggagcctggggtttctggtagaggcagccatgagtgcctgtgccgggactcatatccatcccgaactttgtcctccctgtagtgactccaacaacctaaaactcaacaacgtgcgcctgccacgggagaacatgtccctcccgtccaaccttcagctcaatgacctcactccagattccagaggtatatctagggccctgctctttgcccctgcttaatctccagaagtgcttctgagaaaaagaacttggtgcttgggaggggcgaggcctcatcaggcacactcctcgtcctgaacactgccctctttgtcaaccagcagtgaaaccagcagaccggcagatggctcagaacaacagccggccagagcttctggacccggagcccggcggcctcctcaccagccaaggtactggggaaggggcctgccaccctcctcctctgccccccagccctgtgc

SEQ ID NO: 57113 - DNA, 666 bp, Homo sapiens
cacggagattggaagaggtaaccgggaatggggtaaaggggagtcctcttaagcctctctagaaagacagttccctttttgctgggatgagtactaattacctgtagcccttctgaatccgtctcctctataatggaaagaaccccagcctagggctggggtctcactccagtctcaaagccaggccactttaggattccacgccaagcaaccagcctgttgtcagtcgctaggcaaaaagataaattttaaaattcgcgagagttgcttccactctcgtgagacctcctgcgcgttaagcctcacccgcgaaggctctccacgcaggaagaagatcaaggagtcacggataaagcctctctgggcggccaagtcgcctgtttgtctatggtttcagtaaatacgtctgttgcggcatctagcggctatgggtggcaacgcggctgataaatttcgggctggtgtagagttagcccttcaatctggaaacaaggtgtgcgtttgttcccctaggacaacaatctctggggatgcagttgctcccagatcagtcttaccaggatgtagacacattccaggggaaatttcgcagcactctgtaagtccttttctagcactatattacactatagtctttcccctccacagggtgccatggaatggaac

SEQ ID NO: 57114 - DNA, 2242 bp, Homo sapiens
tgaatggatttgtttggattgtctccactttttggctactatgaataatgctgctatgaacattagagtacacatttttgtgttgacatatattcagttctcctgggtatgtacctatgagtggaattgctcagtcatgtggtaattttgtttaactttttgaggaactgccaaactcttttccaacgtggctgcactattttacattcatcctcaccaacaattattatgatagccatcctagtgagtgtgaaatgacgtctcaccacgggtctgatttccatttccctaaggatattcaacatttcttaatgtgcatattagccatttatatatcttctttggacacatatctattcaaatcttttgctcattttaattttgtgttttctactccctccattttgcagatgaagcccatttttagacaggaatactgtatttgtctttttattgctgagttataagagttcttaggccaggcgcggtggctgacgcctgtaatcccaacattgggaggctgaggcgggcggatcacttggggtcagaagtttgaggctagcctggccgacatggtgaaaccccgtctcaactaaaaatacaaaaaacagccgagcgtggtgtggcgcgtgcctgtaatcccagctactccggaggctgaggcagaagaatcgcttgaacctgggaagtggaggttgcagtgagccgagatcacgccattgcactccagcctgggcgacagagtgagactccatctcaaaaaaaaaaaaaaaaagttctttatatattccggatactggtcttttaggcacacaggttatcctgtatattaaataatagtggctgtgccagcggcttgttaaactgtaagatgtgacgcaaaataaatgaaggcgatgacagtgaaaggggagagatacgaggttccacagctggagggtgaacgccccctacacctcctgggcttaatcgtaaccggagcggggtaccctcaatttccccagcccacaggccccgcccccccccccgccctttgacctgcgccgcttccggttgaagacgtggcttggggccgccatcttggcaagaggcgaagcggcagcggttcctgtcaagggggcagcaggtccagagctgctggtgctcccgttccccagaccctacccctatccccagtggagccggagtgcgggcgcgccccaccaccgccctcaccatggtaagatccgagccaggacccgaactcctggggtccgagcctcaccgtctctccttgtcggcgggcctggggcaggggccggaggagccccgccctgagggtctagggcagagtgcttttgctccgggctcggggagcagtgtggcctcctgtgcccggtctcctggagatccgatggagctgactccagtccatctgtcgtcgtgcccgcttccgcaccaccccccaaccagctggactccctcgtttgctgggacctgcccctgagacggcccggcgtttttgctctgcgagaacttcgtggtggtggtgcgggtcccaggctgcggacctcggaactgatgctgtcccgccggttccctggcgcttaggctcagcaggctgggcctgtctccggaggttctggtccttctgttaatcagagcttgtctcccacccccggtgtttgctaggccgttgataactcgaaatgcaaatccactggtgtccagaaatttttctttttgttcagaagggggaaatggagacacagagcggaaaggagtaacttctaacactaatgtataggacccaagtgtctctgaaaccttccactacttccgcagaactcacttgtgtccatttgttagtgtgactcggggtacatacactgtgtagaccactgggaaaatgtgagcaggttccagagaacacagggtttgccttcaaggaacttattgtccaggtgaagaaaaatgtgtatgtggcatgtcgtagtcagatgtctcacaggaggtggagtaagagggatgggttagcctccgagaccagttacttgccttcccatgcgttatctttgtatactcatctgttacaaggatgagaaaggttaatgtggttgaggatggaggaaatcagaactgctgacatcactcaatcttcctttatcgctgtgatttgtggatattcatgaagtagtagacattctttggtttcaaaaaagctagtaatttatttttcagtgcaccttatgtcctttagtct

SEQ ID NO: 57115 - DNA, 1400 bp, Homo sapiens
gggggaccttgggctccagccccacaagggcgtcttctttggctggccaggcggacgggacgggggacgggggcggggactggcgggaggggggcgggacaggctcgctctcctcctacttagcgagctcccggggaaaagcaacggtgtcctcctaagcctgaggccaccgcgaccgagccgagccaggctaagggaccagtgtctccctgccccccccccacctctaggtaagagcgccccgtcccactacacttgcgggtcccattcgctgcggtgctaggactggataaggggaagtccccggggcctggcgagagccctgagatcagctctaggctagggagctcggcagaaacccgtgggggagagagggcaccccaggtgagtgcgtgggggcgaaaggagcgttatggggagttttcctgtgagcctcttgcttttgccttcctcggccgctgccaacgccaccgccagagggggccgtgacgctctcccccccttggagaaactctgatcctggccctatccagactctcccgccggcacccaggcggccgggcggacactcgcggggtatcgggcggcgagcgcgcgcgcgggttttcgtcctccagcgccccacacctccccctctccgcccacagcaggaccttggggcgggggtatctcctgtgacgtctccccgcctgtccccaggccggccgccttgatggaccaggaagggattcggagtccggctcagagtcttgagcgtctaggagggctgcctgggggtgtccaggagatgggaagcccgcctggggcctcccaggcactccccaaggccccacgtcctcgggggccggggaggccgcctggggcgccttgccacgcccgcgcggtccctattggaatccctagcggagttccccgagcggaggctgacccaagtcatccgggctcccccgggatagggaagtgcgggcgggcggctgggtaggggcgccggcgcagggtggccgagtcgcccgctagcgcttccgccgaggcaggctcgagtggggacttggccgggcgaccgcacagccctgccggggacccacggctctggggcggggctgcattctgggccgttagctcagcggtcctggagcctcccgaggctgactcatcgggcggcgggctcaccccccagccgtcaaacgcaaacgcaggcgccccaccacgccgggctcccacgcggcacacacgcacgcctccgcgacacttcgcacacctacgtccctgcgtcacgccacccagacacacccggacccgcccacacgccgaggccttcccacgcactccatgccttacgcctcacaggaaagcgccccgcgctcacgcagcccctcacacccgcagccccgcttacacgc

SEQ ID NO: 57116 - DNA, 533 bp, Homo sapiens
acctactatgtacctccaaaaattaaaaaaaaagaacaaaacaaaacaaaagattaagtgaggggcttcaaatgtcttaaatattaaataaatgtaaggtattactttttatttaaaaaaagaaatcaatttccagttccactcccctacccagagattgggaggtcaggctgatatcacttggctcaaagccccacctctccaaacacacagtttggtctttctggcatgtccagtcctcgtcctgagtcagctagttagtataatccatctagagcctcaccatgaataccaaagacacacctatcatttgggaaattccaagagcttagaagttactacccagcaacctgggtcaaagaacagacaaactctattatacaacagtccagtccctagcctttacccgtagatcccttgtagcaaaacaattatgctttcctgagcaactgcatttgggatagcatttttataacagacaaagagataatatcaacatgaatatgccgaaaatttagaggagctaatgtgga

SEQ ID NO: 57117 - DNA, 1240 bp, Homo sapiens
gggcagcttggaggaggagaggaagggagggcgggctctggccagcaggctcttggacctcaggccaggctctggcagctgcgtctggtatcaggactgcaggtcccgacagggggcggtggctcacgcttgtattcccagcacagtcgccaagcctaatgtcccttccaacggtggaaaattttggtaaaaatcaatgacaggctgggcgtggtggtgcatgcctgtgattccagctactcaggaggctgaggcacgagaatctctcgaacccgggaggtctaggctgcagtgagtggagatggtgccactgtactccatctggacgaccgagcaagactctaacaacaacaacaaaaaaaacggactgcaggtgcagtgcccagcacagagcctgctacataggaattctcattttcttctcttccctactctttccttcctttataatctcttcctttccctctgaagtaccgaccccagagcttgagatctcatcccagcctccctcttattgccatcctcccctgctgccttccccacacccctacctctcacagggtgggggtagggcctcctgggaccccagtcccagccccagcagcagtagcaggcacagctcccaggtcctccctggcatggtggctgtgactgtgactgaatgagcaagcccaggcaccttcggcttgctgggcacagcctggctcacctgcctgtccaagtcggccaaagtccagcctttgaggcgtggccacctgaggggacgtgtgcttggtctgtgtgtggcccgcttgcccctcctgctctcagggcacagtggccacctcccttgcttctactttgcctcttctatttcacagtctcagctggtgccaatggctcaggcccttccctcagagcatggtggtgggggtggggagtgggcacccaaaggccagggacacagtcgaggccacacacctgtaacctggatgccaggttccttgggtggccccaagaccaccaacctcagagagttaccatttcccttaacatttcaaatggaatggctcaagatcctgtccctggtgtggtgtgaaattcagggcctctcactgttatctgcaagagatacagcggaagcacaggacagtagaaccattctgtctggggaggactaagggagacccacaatagtgtgtcatttgtaatgagtctttttttttttttttttgagactgagtctcactctgtcgctagg

SEQ ID NO: 57118 - DNA, 1093 bp, Homo sapiens
actgaggcctggggcggggatcgtgggcagcagagcccaggagtttcctgtagggtgatggccagcccacccctggcctgctcacctgaacttcatactcccctccgccaccgggctctccaccgttgctaatgtcatactgggaataagagggcgggccgtaggtcaggcactgcccccaccccacccacccccagccacagggacaacaaacaacgggatccttgtcgggagaagccgctctgcctcccagcagcccctgcagtgcccaggagtgcccactgggcgccgccaccatcccagctgcgcttgccctgagccctgccaagcctgaccctcccgcctcaccacggggacgccctgggggtacggggagggctcaggccagctcatcttctcatacatggctgacttgctggtagacatcaaagttggttcggatccaattctggggcatattggtagatcaggatctggctgccctagaaggttccagacattcccgtgactgtgggtggggctggactgggagccaggacgctgggcccggcgggaagccagatgtccctttcctggcccttctcttctcggctcacagctgccccccggtggctccgcgggacctgccggctgggacaaggggcacagccggaggaagcggcctcccctgcaggtcctgctcagggtcgggagggggcagtgctgcctgcagtgggccagagccaccttctgtgccctcacctccaggtatttcagagccttgtccgccacgccagggtcagagaaacacccgttccagagtggagtgaggttggatgggtaaaactcccggttctccttgttctcaaggtcgtagtcgaaccaggcactggtctgctcatcccacaggactgtgttcagggcggccaagcgctgcgccggcaggattctgtactttgtggcctgggagtcgttccctggggcagtgctgcctttgggccctacaggagccctctagaaagaacttctgaggtcagacgggcagcatctactctaacgcctcacctcctccaggaagtctccccaccctccccaggaaaccccagcctgtcct

SEQ ID NO: 57119 - DNA, 548 bp, Homo sapiens
agaatttagaggtgatgaaggtctctgcacactacgtagagggataatagagccctgacatacaacaacgaagttgtattgctggtcctgctagctgaaagaaaatggcttttggtagtgtttactatcaggtctgggggaaaaaaaaaaaaaaaaaaaaagcacgttcactacatcaatagctacataccaggtggcaggggatgttgatttgcttccgtaaaaagacaaacagaacacagtatctgggacagcagattgcactgaagtcaccacatgattaagtttacaataatccactgtcgttcttgatgatcctttatcttctgaacaaacaaaatatgtgcgttgagtggagtaatggcaggaaccaccatccggcactttctaagtctttgttgatggtactaaccgcttcagtcttttcaggaatgcagtgttgtttttggtttactattttgaaagaggcagttctgctgtcttccatttaaccttttctgtcataatattccttatttcatgggtcagggaactaaattggggattct

SEQ ID NO: 57120 - DNA, 585 bp, Homo sapiens
taccatttttactgaacaaaaaataattttttttcctgtttcaaaaaagggaatagtgactttgttttctccaggctccccttcccacacaaccaatgtaaaatacagcagcctgtatcttaataacccagccctaccccctcccttacccagcattgtctactggagaatttaaatacacttctgttggaatctgtcagctgtggatgggcagagtccaggtgccaggctagctccctctgacctcatgaactgtgacaacctttggacacttaactctttaccccaaagatgagtttttagatcagaaaggagagcagattttctttgggagttttaaaaaactatctttagatttagagatacaaagtacaactacaatctcacagaagtccactaaagttcaccaaaaagctgacttacttcagctctcatgaggccaataattttgataaaggtatctggcaggaaaatgattccacaataacaaatttaaagatacctagaacattgaaaaaaatagcaaattaaaataaatggcttaatttccaagaacttatttcatttttttgttactcatctaga

SEQ ID NO: 57121 - DNA, 721 bp, Homo sapiens
gacctcaggtgatctgcccacttcggcttcccaaagtgctgggattacaggtatgagctactgtgcccagccaagaataccttctttaatatactcacaaccaatgccaccagcattgggcagcacttcagcaccatgtgtaggggccaattaaaactgtgaaatcagcaacaaaaacttgaaaaacatggcagactgtgaaaaggacccttgttcacagtatgagagctaaacaagaggacagagattgctttcttcgacctcagctgggaatgtgcatgtcaggtgacttaaactctttgccacactgtacacgtccacaaatgactgctgaactaccttgagtattaattccggagttacaaataaattctagtgactaagcaaattcacaaatacagaatatgtgaataatgaggattaaccctagttaaggtcaaagtatttcagaaactattcaaaagtgtatctgtgacttggttaatcatttagtatcaactttaggtcaacaactaaacctgccttttaggaaacactatgaattattttttaatctttttttttttcttcccaagacggagtcttgctctgtcgcccagagctggagtgcaatggtgcaatctcagctcactgcagcctccgcctcctgggttcaagcaattctcctgcctcggcctcccaagtagctgggattatgggcacacgccaccatgcccaattt

SEQ ID NO: 57122 - DNA, 3737 bp, Homo sapiens
aagtcaacagatctcaacatttatgaagaaaatgctccttgattatgccttccttaaaaaaaaaatgaacaagttgctcacaagcaaatcctgattatcacatacacaaagctgtttacttcagactctgacctcttaagcagatatggttaacagctactttcctgtattgacggttttatattatgatcagcgatatcacgcagttcacagagacttagctgtttgcagagcactaagaggatgaaaagggcaacctctaaagaccgaacgatatcatcattactgtccatcatgcacagtaagacctcctatatccttaaatccaaaatgagactatgtgataactgctcccttcttaaactgaaacctgcactgcagctttttctcagagaaggaaatattcctcctaccccttcccaatttagatttgcaagttttctacattttcaaaaacaaaaaacaaaaaaacaaaaaacaaacaacaagaaacgtagactagttgggaggagcccctagcggagttaattacagcacttcacagatcgtagttagcaattgacagtttcacacccaaaacagtatcgtcatcgccaacaagagcttttgtttgcaaatgcagcgcagtttttctagctttgcctgcaagttggagtgactgggttttattctgaagggaaatgggggctgaggaagagaaaggagagagatacgggaaagagtcattgactaatgactggaaccccgtaactgaaaggaaatttcttgtccccccgcaccccgccccacgccccaaacacacacacttctgaccataaacacaaaaggttggggctctgcaatcttatctgcgcaatatgagccagcaaccgctccattagtagcaaacaatagggactcccccaaggaggccccaaatggaccccctaaaccagaaatccccctcctttcctccaagagtcgggggctccataaataccctcttgttattgacccgcaaggcctactgcaatcaagcagcggccggtttgcttctaaaccgagccctccaatacagcatgtccctgccgccccctatagggccgcctcgtaccctataacctccaccatcatccccctaagtccttgccgcccccttcggcctcatattccctcatcttcgataaagctactccgagtacttagcctgttcctcctgccgaccctgctgcgcaccacattcctatattcgcctcctctcaggcgctcccaccccacacagctgccgaccgccttcctccccaggcccggccaggccttaggcctccgcccgagagtcccccagagccggcccggggggctccccacagcccccaaagcaccgctgacctcgaccccaccacctcaccccaagcctcgcgactcgggcccgtgtcctaccaacgaggccactcccgctcggcaccctcggtcctttattgttgactcgaagctcccaaaatggcggacgctccttcctcctcggaaacctccgcccgcccccacccagccctctcgctacggcctcctctcgcccccgcccccgccccgctccgaggggcgcgcaggccagccgcccgagccgccggctcccccggctgtccagccctacctcctccgctgcccgctctcgtggcgccgccgaagtcgccgcctggctgagctaactcggctcctctgccccctccctcgctcgcccgttcgcccgcccgccgcctcctccctctttccctgcctctccgcatggcggcgaccgcggctcctcctccactcaagatggcgaaacctcggccgccgcggctatattcgccgcggcgtcactgccttcctggcctggtggtgagaggaagtcgggccgcgaaagcttcctgaggagaaaatggagggcccttctctcacaccgacgagaaaagttcgagggggaaatacgagttcctttctgaagggacaggacggctgcttttccacagccgcgacgtgattgagaaatggtggctggcaagggtaggcctgccttcgcccctccaaagtaaaaatcgggagttgagaccagaggaacatctctttattacatgactaaggatatgttttgaaaactggcccccgggcagctgctcggggacaggaagctgacctgacttctccagctggccggggaggctgatgccgggcctaaggggccgcgtccgagcctctcggggcgcgcctccatgcaggaaggcgcggaactagcgacccggagacgccgggcgcgcgtctgagtgtgggggcaggaaggggggccgaccgggcccggaggccgcaccaggcaggagggaggactccagagagtgcgcggggggcgctgcgcggtgggacggggcgagcctgtagggcgcgcctggcggcgggtaggctccgggcttgagggtgcgcctgggggcgctggttgtgggggaaggcaccgggcttgagggtgcacctgggcgggggaagtcttcgggcatgagggcgcgcctgcgggtggtatgggggggtacaccgagcttgagggtgcgcccggggggctctcatgtgaagggtaccaggcttgagggcgcccctgcggggggcgcagaggcaccgagcttgagggtgcgcctcgggggtctgcggggggaaggcaccggacttgagcgtgcgccgggagaggacggcgggggaccggactgtgagggcgtatcttgggggacctgtctaggaggaaccgggaggtgaaggcacaactgggggtgaggcgggggcaggggccgggctgtgagagtgcgactgaggggggattactccggagagcacggagctgggggcgttgcgcaggtggagtggggaggcctggtggagagggtagcaaaccgagagagcgcaccggggtggtggggggagaagctggactgtaaggtgaagagttagtagggcgcaaccgtcttctcctgccctcgaagggcaagactgaagaaagtaggggcggaggaggccgggccctccactaaagggagggaagctagtgaagcgtcagttataatagaaataggaattcagtaaggaaatggagaagcttaaggcaaagggtgactctccggcctgaccctcactatgaagatatttatgtatgttcccataatacttttcagatcccaatgtctgtgtttatccttgacagaaataatagaactgctgtcttcttccaagttaaacaaaactttggagctaaaagctagctaggtcaagagaaacaaaatctaatcctcacccaattgagagactgaatatacaaagaatggccaaacctaaccatgacctcctacccataacctcttcagtaatcggccagaagggtcaggacttaatctttaaccggcagcttccctatttcttgcccctgcttccagctctgggccaatcagagaaagccaaatgtgctcctcacaccaatcgcgtaagaagccctgcttctagtatagccctcctccaacttcccgatgccaacatcctccaatcagagccaacctgaagtttctcccttttttcagtatatgtaaagcttttccactcccctgcctgcctatgagtctgttaaatcaagtgatgggtcgcggctgactcttgccagctctgagtaaatagcctattctcatttggtggtcgttatttctacacagccggtgggaaggtggtggagaatagtgaagactattcttaag

SEQ ID NO: 57123 - DNA, 809 bp, Homo sapiens
acaggcatgagccaccgcgcctggccagccatccagttcttgaaggccaaagaaagcataataaacctgaagattcttggcagatcctggcattgctggactgcagggtgcataaacaccctgggtgacagatgacgtggccggccatctcaggcccatccctgtgcactgggtctggacggtgccagctccttggcaacactgcaggctgttatgaccctgtgccagggcgggggaggggccgagcaccaggtgacgtggcaacaccgcagtcaaaggaaagccatgctaagaggccactgccccgcagtcctgtgacaggcaaggggaatgcaggaatattggggaagaggggaggggtggaggggaaggatcattgttgcacggctctagcaagaaagaaaatctaaaattctgcttcatggctcagctcccagcacagctaatgcttggaatggaccagttgcctggacagtttcaattatttgtcataagcagctcaggccttggtgtgcagatttcctttgcccctcagtttcagatagcccactgtggcccctgctcatgattcagactgaaatagctgcctgttttgcatgccagttaagcctgcatttcagttcttgtttctttgaaaggacctgtcagggaagcagtatgaaatgtcaggttccggtttggtattccccctctaccttcaaccttgtagcttgacttttgtgggattcccactcatgctcagagtcccctcatgcgaataggcttatctaattcacaagtagctcggtgatgtgatgatgcctggccct

SEQ ID NO: 57124 - DNA, 635 bp, Homo sapiens
cctcagccttctgagtagctgagattacaggcatgcatcaccatacccagctaatttttttatttttagtagagacagggtttcaccatattggccaggctggtctcaaactcctggcctcatgtgatccacctgcctcagcctcccaaagtgctgggctgaaaaatattctgagcagagtaaacagcatgggcaaagaccttgagtcaggaaagtgatgagtttgaggaactgagagaaggctgatgtcactggaaagcagtaggagagtgagagttggagctggagggtgaacaggtcaaaattatgcaagctttaaagggcacaaagaggttggcttttatcctaggggtgctagaaagtcatcaaagtagtttgtgcaggaatgtagcccaaatgatccagttttggtttggaaaaatttaaacataggcagtggctcatgcctgtaaccctagcacttcgggaggccaaggcaggcaaatcagttgaggtcaggagtttgaaaccagctggccaacatggtgaaatcctgtctctagtaaaaatgaaaaaattagcctgatgtgtcagcaggcacctgtaatcccagctactcaggaggctgaggtacgagaatcacatgaagcaggggg

SEQ ID NO: 57125 - DNA, 625 bp, Homo sapiens
ctttctcgtccaagatgaaccagggcccatacacttgccactttcacttgttcctagaggctgtgtcatgtcttggctgcctcagggtgcagggactatgctcatatagtaggaaggtaacggcatacacaaattaggtgattacaggtctcacacttgtcagttggctccattcaatttcatacttggttctttctcttccatgatctctattttgtttcttgaacagaccaggactctgtaagctgaaacgtttggtaaattcccttccttgccagtttacactgactttgtacccacagttcaaggctaaatccctttttgtctgggctagtggttgccaaatccctttttgtctgggttagccatttcatgtagagactgcttctctacctatacgcttattcaaatgcagtagtgaaacaaaatcaatgcacagccatacaattactacatagcctgtgtaaagaatgatgcagatctatttatatacaaatatggtaagctccataatatattattagatttttaaaaagtaagtctccagacaacatttatagtagtgttttgcgtgtgtgtgtttataattgcatagatatagttctggaaggatacatggtaaact

SEQ ID NO: 57126 - DNA, 1660 bp, Homo sapiens
atcccagctacctgcgaggccgacgcaaaagaattgcttgaaccgggatggcgccactgcactccagcttgggcaacagagtgagactctgtctcaaaaaaaaaaaaaattggttacagattacaccttgttttctttaaagcctttaaagaaagtgtaatctgtaactattaataaaagcttcccaaacaacgaaactgtttactttcccgcgcaggctcaggttgcctccagctaaacacaaatgtgggggctggagaaaggcctggagagctcccagcgccctctgagacatggctccaggtcacacagcccaaagccttggcctgttttgtacgtggacggggcaaagagaacaccctcgccgcttctctctgcctttagcagggctgtaggaaacccccaccagagacctccagcttggagaggaaagagtggaacagccctctggaagcaagttacccacaggtttagtttgcctggagagaaacaggccggagagagactgcggcctccctagggtcttctgacggcaaattcctccagctcagtggctgctgggcagcagcacagccggtttctctcaagggcacaccccacacaccgcgtcactgtgcactagcctcagatgacagacaagcctttcacaagacttttgtggcactgttcatttctgagaccttctctatgatgagctcaaactgcttacctcagagaagaaactgcgtgcacagaaagctgctgaggccagcttggggccccttctttcctgtccctgggcacttccctggctgctctctttccccactgcccagcccaaggagtcccctctgcagctgacccgggttcagcctccagaacagcgagttccacagccctgaagcctggccatcgtcccttttctggacactggactggttcatagggctcagtgccctgcggctttctcctccccaccacaggcctgggaggggcaagaagcaccagtttgttttctgggtcagcctgcagcaaagagcgactgccctcaccgacaagctgagcctctctcccagcagcacccccacagtagccagcaggggaccctggaggatcgtggagctggatcaccacccagaagacatgaattcctcttgtccagaggcagaacaacagcaacagcagccacttatgctcctgtagtttccagagcaccttgcttaatcggaagtaggatgttacactccagagactactgatttacatatcacacatgtgctcatccatccattcaccaaacctctgttgactgctcgcgctgccctgcgttcctggcactgtgcagggttataatctagtaggaaagacctgacaaggtcacagatgtcagtactgaaaggaagagtagggtagatggccaccccacccccaccccaacctcaaaaaagagactaaaaaattactgtcacttgtgtaattcatcaacaaactttactgagcacctaataggcactgagtgttttcgtgtattgatcacgcattgatcctcacaataacctttgagatgggttgtgccatttacacagggcgaagaagagagactggccactgtcacacagctactgatatccaagctgagatccaaagctcctctgcttctcctgatgagaatgagcaccac

SEQ ID NO: 57127 - DNA, 5261 bp, Homo sapiens
agggggaggggagcggtgtgtcaagcagatggggagtgtagcttgaagccaaggattcctgcagcctaggctgcgggccctttaagctccagcccgctccccccgccgcctccccctccccggagacctattaatagccgctggaaagatcacatcacgggagaggatatttatcccccctcattccacaccagctcagatttatttcagctctgctgtcctgctgctgccgcctggccctgtctgccggcttctccggggaggggggagggaggcaggcaccgccccctactccagctcccacctccagctagactgaggccagaggcggccttcggaccccacagtagggtgggagggggtctgctcaaaccattttaaggagggaagaactagaagggaccagaagccgcaagcatagctggctgccagtcccctctgccccccacccaggcccaggcactaaggctggctgcgcctcctgcctcgggccaggccttcccatgctaacccccctttagcccactggtggcctgggagccaggtgcccagggcggctcctctcctggccagcacagcttgggccccatcaccactgggcccttcccttcccgcactccacacacacacatcccacccgccacgacacccacacaccttgtcttgttagccaggatcctcatggctcccacacacagtggggctacggcccctgtgcgtgcccagggcccagccaggtactcggtactggagcacggactgcagcaacaagccccaaagagaaaactcgtgacttggggagggggtgtcagagggggaggggagaagggaggacccaacagccctgggactagggagctggatagggtggggtggcactggaaaaagaggattacgagatggggtctcgatcctggaggccagccctgtccccatccctcccgcaccttgccctcagggggcttgcagtctccagcaagcctccgccccgacgggcggcagagacagaattcactaaaaggctaggtagcaaaggtgccgtgtggggcggctgtgaggtctcccctggccccctgagggattcctgctcccagacgcgcccctcacccagggtggggtacccctcgtgccccacccccagagcgctccagccgtggagggggcccggggttggggccacgccccgccccgtccccagctcgaggcctagcccgtgcccatcccagcaggcccgggcgggcagcgagaggcctggcggggccccggggctgcagctgggctcttctggagaccagtaacgctggctcggattcctccccgaccgcaagaatgcaggagcctcccctccccccgccctgcacccccaccccgcccccttcggcagagcccgggcggagaggcagagcgagcgagcgacagccagcgaggcagcgagcgggaggcggacaggactgcagcgtgcttctccaggccccgcgcgcggacagacacacggacaagtcccgccaggggctgggcgcgcgccagccggcaagagcttggcgagccccgggtgctgccagcagaggctcagagacccacagacacccgaactctgactcacacacactcacagctcacacgtggacagggagacaagacacgcacggagcccaggaagctagaggcgcgccgaggccagggaagcgccgccggagcgggaggcgcggagacagcctggggcacgcgcagacaccggggctgcccgagggctgagtgggagcgccggacccattgaacagatgaaaagactgaggccggccacaagagagccgaagaaagttgagcctggtagtcacaaagaaacacgcacagggccatagatacagcaacagacttacacaaacacagaggcctcacccaaccgcccccagccctggctcccccctcgcctcccctacccgccctccagcagccctccagcagccgatcccggtcaaaggggaggagtcttgggcccaggagcttcgtcccggtgacaggcccggccagacaccggtgcacactcctgatgctccctgcggggctgctggaggctgggcggggacctgggggtgagggggccccacctgccaccctgcgggagtctaaccccaacttaaccctagggcacattggccttcgccactccagccgtgtctctggggaggaaggctcctgggggaaggttccaaagtccaggacctgcctgggaagcagcccgccacccccagcttctccatcacaaccagggaagagcagaggcagaggctggagtcactgagataccagggctctgagcaggctcctggctggcatgcatctcaggctctcccttcaccagctcgctgattctcaaaaggatcgaccccatttcaacgaggaaactgaggtctgggaaaaggaagtggcgtgaccttgagtcacatatccagtatgtggcagtgtggggacggaccctcattccagacactgcagtgaccccacctccccacgccagccatgactgctcctctgagcctgcatcagatagttgggcttcccacattccagccacagtgcccaggtcccccataaggggggaggggcagggcaagggccactcactacctatgttcacagcctcaaaaattgagaacctgtaagaatttgggaaggggctattagaaaatcagtcctctccagtggccgttcaggcctaggctcctccccagaagactcttccagtcaccctcccctccgggactccaccccctctctcccaccccgccgcagggcgagctgagtcaagcgtggatgagtcaggactttcccatctcacacctcccccctttgcccctcaagagtctgccccagctcccgaagacccctcctcctccacacactcacagtctccgaagacacctggaaggcctggtgatgggaagccaagagggctgatcccagcccaatgcaattttaaagcacccagtgaagggggcttgctagtaccaggccaggggcccttgaggtacgagaaagcaaagggatggggctctgggaacacgtcaccgtgcctccctcttagggggttaggtggggaggggtagcaagctcacaaacagggagcaggtgcgagtcacctgagtggaaggccaggcgcataccaggagaatgaatcggaggagcggaagaggcggcttgacaaagggcctgagatatccatccgctcccccaccccgagtgacgcgagggtaggagctagcagcctaagggttgctaagggttaaagtggacttgatcctagctgggggagggagctgaggaaggctcagatgcccagagcctccaggtatgacacaccggctctgctccacacacaactaccacaggtagggcaggcgttcacacatccagtggcaacctgcctgctcctagctgcccccacgttgggagcctctgcttggctcaccagctggcccagcagtgtcactgcctagctcaaaaccaccccaaagaggcagtgaggaaatgttttggagggttcatgctcctgagctgccagggccccctgtgatgacgtgaaagcccaggaccctgctggggacaacagggcgaacgagatccttggcctctggctcagggagatacagcgcccgagacgacagggtcccaaatcccctttctcctgggtgtcaggacccctcagtcctcagaagctctctccaccactcaggtcacttcctcttcctgaggtggtgactcagcgggcagggaggtcaaggattcgtagcccagcaggaaatctgctcaaggaccaaggtgctgctctgggaccctcgatgtggggacttccaggcttagggggccttcccatggccctggttcctagtagctctccacacttcccccgactctgtgccaaaggagaccatgcaaatcagccatttttgcttgggaggttttccctgggagtttccagccccaccccacctgcagccctagggtaatgtcagacaaccccagctccacaggaccagggaaactcctggtcccagacctttctagtctgggattgttgaacagggtactggggggtgatcggcggttttgcccattctggcccactgtcccttctggagcctgcacagacaagtggcattgcttggacaggcctgaggtcacctcacttctcttggctcctacagtcattgtcagtgtggccgggccttgggaagcaatcatggcctggcagtggggtgcccccaaagacagctacccaatccccagctgctccctcccacagggggaggggtagagagggggtggggggcacaaggaaacaagacagggcaggaagcccaggcaggcggcgggcactctgggccaggcacaaacaaccaacacaggaaaccacagcccacccccgcccaccccacccgcccaaggctctgggagagaggagtgccaaaagcttggtaccccaacagaggcaagggccaggggttagcccagggcaagggaggagcaagaagctctccagtcctctctctgccccagaccctacctggggagggtagagggagccaggctggcagggatggtgctgcctctttaaatccaccgaaatcctgagctaggcccaacctagctctggtttcacaggaaggaaaggagctcaggagccagtagggcaggcagtggtggctggaattagccccaccggcccaaatatatctggtctctgcccgccgccccactggtacttcctgtcccctggcacctgcaccagggtgggggtaggagatgatccaggtgccactctctaccctatggagactcccatctcaggaggtggtgtggtgctgggttcacatgggtagaaggtaacttcccaagcctgggttcccagaacaggcagagatgggcaaggcagctccctgtgggccctcacctggcctcagtcctccaaggggttaatctgtcccctatttaggggggtaggggtggccgaggaacctcctccaaactgcctggctgctgggaacaatggggccattgtgggaggatggagtgcagcagactgctggcacagccaagcgcaccacggtgggacctcacccagcgcccgcccgcctgcctgcctgctctgctctctccccaggtacagccagaggcagaggcatcctcctggcccctcacctcccctgatggctcacactcttggcagcagcagcacctgggggccccacgagctctgccca

SEQ ID NO: 57128 - DNA, 10970 bp, Homo sapiens
caagtaaaaagacttggctcctcccctgccctcctctcagaggtcagctccctccgctggcacactcctgggcatcctgggctcaccgacacactcaaatccagagcatgaacccagagaggggctgggtggctgtccactctcttagcctcaggaccatgtctcaaaagtccaggaggcaagtgaagggggatttcccttcaagagagccagcctcccctctgccaggtccccttctccctgcctgccccttggcagtcaccctgtagtacttgggctgggagaaagcttaagcctactctcttgccatggatctcaaaggaagggtctgggagagaaagaacaactgacaagcagttctggaaagtagggggcccagggagaaaacctgttctcttctcaactagacagggctgtatctctcagggtggccccagaagcccccaaagggttaacaaggccctaaaaataacctgcgcccagcaggacccactgatcggaaccctccagccatctgttcccattttctcgtgttcacattggaacatctgaaaccggccccagagccccagcccgatcccaaaaatagccccagcctgcccaaggaacaggccccaggggctgggcacaggaggcatggccagtccagtagcaaggcatggcccaggcagaccctgagccctcatcccccaggcccatggatgggaggtgtcctctctagatccagaggaacatgataagcagagccaggggctccagcccacccctcttggtaccaagccagagagagcacctgctagctaagtccaggcctcagacccaggggccctgggatcctaggcacttctaccacatcttagtccccagaagattttacccaccttgtctgcatagcttccccacctcattgtgggcaccccatccctgccgcccactcctgggctcctcatccagaagttcccaagcctcagcccctccaccatcccactctcaccccagggcctataggagccctggccacctggccccactcagcattctcccttgccagcacacagggttaaggcagaacttttcctagcactgtccacactcccccttgcagctcagggaaggactctggaggtgtcccttggacgctgtagatgctgatattaccccactccccttctgggcttcaggatgccccctccctgaccatctgtgtccagcaggtgacagacaggcccatcggggctcccccacatgatcataggtctgggcactgcccctcagagaaatgcccaggcacggcacagggaatccggggtccagggccctgaggtgttcctaacagctgccatccaggtcacagctccacactgacacttctctccccaagccaggtccctgacccctaggccaggaaggagaggaggcggccatttaagccatttaaggacggaatgtcttgtttgcctggtgagagcagagcagcaggggatggggcagtgggaggagtgctgagctgaactgagcaaacagcctcagggaggagggctggccctgggaagcctgaagatagcgagggagacgtgtcctaagctccctgggccttctccaggcccctggctatttggcaaacttgcaatcaagaagtcagcaggcaccaacgatggggaagcggcggcagcaaacagtggatctggaggggtattagaatccaggaatctggagtgtggaaaggctgtctcttccccacccccacactccctctctcaccatcaattctttccctgctaaaacccctgggaggatcaaaagttcctgtgaagagctctgactaatcaaatgaggggaggatcaccaacatttattgagcatttactttgtaacttcaccagtcctaaatgcttcacgtgcatcctctagtttaatcctcagaacaatctggtaagaaagtattcttattatcctcactttcccactaagaaaagggacatgccgagaagttaaataactcgcctaaggcccataattttagaagaagcaggatttgaattcagacaccctggcatctgggttctgggccatttcacaatactccagatgcaccacagtatcagtcctctgaacgatgacgaaagaaagcatgggtgtccaggccccaccctctcactcctcacatcctccctccatgcctgatgtgcccggggcttgcccagggaagatcagagagagagcaccgctccccactccctcaacccaggtacccgcctggcctggcctgtggtgccaggacagagcaaagttctccagcctcccccagccccgcccaactccagtccgttacttcctcacccatccttgtccctgccggtcagaggagggcacaaggctagtcaccgagacaacagcacagagcccctgccaagagttaccacgggctcgtgagaggccccaggtgggggtcaaaggtcaagtgggactcaccggtgagggtggagtcccagccctgccccccacccacctgttcagccacacctggccaatgctccccatctctttcattcctcagtagagagcaggaccacttccttggtgtcccttggggggtggcttcagtggagaggttcggggctgaggtgaggggatgagaagcccctccctcctggggatggtctaggagaagtgcctcctcccagtccccagcttcctccagctttccctagtcgaaccgggagccctcaggcgtgtttgttgtgaattcagggagttgttgctaagtaaggaaggggggctggcggagggaagaggctgtgtgtgtgtgtgtgtgtgtctgtgtctgtgtgtctgtgtgtgtacacgcacgcatgtgtacgctaggggaccaggggccagggcagaaaccacactactgtggctggtagccaccctggctttgactgagccagaagaggccaagccagcgaggaggagcaaggacttgggataaccaggaagttgtaccttgccctccagggcgattgggcggaatctccttgcctcccgcagggtggggcgggtggggggtgagatccgctgagatagagaagggctggactctcactggagcctggctctaacccctcccagcccggccccactccccacctgactgggtctagggttctggtcagcctgtttgcccaccaggagccagaggagacctccctcctctggagggaggggaatgaaaggagagatgggggcagaaagccaagagaagggagcccaaaagacaaaacgccaagcaggaggctaagccagggtgacgcggccgccgcggacagaaatcagggaggctgagagggacacacaggggcacacagacctctcacctcaggaataatgtcgggctcaggctcaagggtgtggtctgggttgggggctccctgtggagagagggtcaaagctagaagcccccttctagcaatctatgtccccgctcctcccatcaccccagcaccccccacgaacacaccacagaaacatgtacacacagtccacacagcctgcagctccaggaagtctctgagctactcaattgccaccccccacccccaccaggacttctgtggattggctgggagccaagcctgaccccagctgcaccgctgcccccccccccccgaccccccaacccccgcccaccacaccatcccctccctagcctggaagcaggagaggaggaggcactggaagaccttagagctcccttagagcttggccccacggggaggaggagaggcagaggactcccatgacctggcctgaggacctgggggaggagagggatggggaggttggaggaccccagattctagcaccagccacctccaggttatcctatgtcagggaaaagaatggctgtgtattctatgtccctgtgtggtctccctggctatagccctggttccctgaagaggccaagtcctgaggacctggtctggttgggaggacctgggccgagggagtcggtttagcaattcagtaggagggggctgggcgaagctcccacagcaggcgggagagaggctggtggctgggctcagtttgtactggggggtcaaaggggagttcttttccgaagaattctgggagagacgccaactagagcaagctgctaaccacccctccctctctctcactgcactgggcggggggtgtccctgccaaccagacttaaccctctccagcctgtgttcctcccagacctgagatggggtctgctggggaggagaccttcggctgggctcaactttccattctaaggctcatacagagcagggcatctaccagcataaggctggttccacatggccccgtctggcactgccctgccctgccgccacctaggtgacttttctgagctcatctcctaaaggtgtctgcagtgacgtgtgtgcgtgtctcagagacagagattgagaaacaagctgaaaattccttgcccaggccctccccctgctgggtcactgagcactgtaccaacctgtacccctcccttcctcccactgtgctctgggaccagaggccactgggggtggggacgtaaaagggacagcttatccttatgtccacctcctgctgctgtctccataggtctctgactcacacaatcagccccggccccagcactctgcttcctcactgatttgtcacaagtgcttctggagaaatgcattccattcccatcctgagatcccaggatgggaaactgagatgcagcaaggttatgggggttctagtgcctgcatcccatgcactaactctgctatcaccgtccttgctttggccccaaatcaaaaaaccctaggaacctcctctaatgtagaatactgtctaagtgcagtaggagggaatgagattaaacatcaagaaggacttcccacgatcgatcaaggctacaagggcagctggccccaccccagatgcctggattccagacccctccgtcttctgctcaggctggaaatatgagtgtcttctcttgtttagctatttgaccctagctggagaagtcaacttttctgaaccttaaatttgccaccaagctcccaagtccaatgtgattggctgttccttgccctcaatgaacaagtgaccccagagtgggggcttagctccctttccccaccccttttcctttagaacaccgagcctctctgtaacaaccaccactgtataatcaggacaagaagaggtggacaggtggtatgaggaccctacaaggtgctaggtgtccgtgaggggtagagggagagaccccagtccccagggagagtttatcacaaagtctccactgcaccactctctctccaaggaccacggaactgccagaagccttggccccactccaggaaacttccctatcaaagggcagaggactgcatgtcccagggagctgtggggagacctgtgactacataccccagacatgttcccagggaggagagaggagggaagagaagtgaagcgcatgtgtgtgcccgcacacgcacatacacgtggacgagacacgcccccagcacacacactctccagaggtaccccggacacttacaacacagacacaactcccaaagatgcacatccaaagacgtttcctaaaaagcactccaaattctccaagagtggccccttcagacccacagaggctcccgtattcatagagacagcctaggggagctcaggaaacacacatgacatcggccaatcacacagaactgccaaacagaaccgccgacagaagatacacccacactgagacacacacacacacaaacttatacacacacacaaagtagtacgcagccatgtgctagcacacaaactcagacacacaaacttgcagcgcagagtgtgtgaagtcggattagaaggcaatgctctggggaggaggggagcctgcagggggtggagaaccactcagggatttcaaaacaatcctggtttcgaaatgctggaaatgctggattcagggccattccgagttgaggctgggggtggggaagtggagagtgaggaggaggggaagacgggccagcccagggctaccagtccattggaggaggaacgggaacggacagagggagtcccagctctggtggaagggggcctagaataaaacaccagggttaggagggggaccagtccagggccaagcagggagggcctgggctgcaaaggagaggcctctgcttttgccactgacaggaaaagtgagaaggcaggggaagccgcccctcccccttggcatggagaatcagagggaacctgtctgtgtcctttcccctactcctgggcagtggtgaccaccttctcccctccagagtggcaccctggctccccttccccaccagctagcacagccccaaggtgggtggaaagctaaggggtcacaggggatggggagatggcaagggcctgcaggagtcaggggtcttccacaggttccaggaccccccacactcagagcaggctgtgggcatccccctgggaacccaaggctttcttcctctccacaaggatgcgggaccctcggggagactgaggcagtgtaacacatgcccacacccaggaagtcgcccctcccacggcagccagaatgcccttactgcccctcccccagcctccagggaaagtcaggctgagttctcccaggaggggagggaggggaggtcaggccaggctgggggtggggctcagaggcctggccctggcaccaggcagaggaaattccaggctgtaagtccaggcagccttcagggccgccgagccaagtgacatgcaccagctcaggagctgcagtgctctggccttcccctcctagccctggccttccagccctccaactggctccagccccagctctgggactcagataggctcctcagccctggcaggagctcccaccagccccatcccggctcctctggccagttagagcttcccttcctcagttccctgagggcagcccccacggtgtgtttgtgggtgggcagctgtcggggctggcaggcaggggcacacatgcggagctagagcagccaggcgctcaacaggttgagccagtccatggaacagccggccccaccccagggagagcgggcctggcagaggctccctgcccgcggcacccagcctgtacccgcttggctcccacggctgcccactttcccacggtgccatcccccttctgccccctccccccatcggaggtcagcacccgggcagtgcccagggctctggcacaaggaaggaagggatgccattcccctgtcacccctgggtgcccaggctcttgagctacctcactctcagcacccaaggagccccagaaacagccagcatggcagcaggaccacaagaaccccaaaggacttcccaggcacctccttgtgggcctcttctgattctgggaagactggaaacttgaacaccccagctctccagagctgtcccagggtcctgggacagaacttcagcgtgtggtaccagaggcagtgtgggggtgcccccagctcctcctattggactccctggaggaggggctgcagagctgggtgacagtggctctcggactccctggaggagggctgcagagctgggtgacagtggctccctccactcctgccccggcagctgctgctgcaaccctggtcctttcctcccactccactcctgggctccatggagctccatcgcagtcactcccctgataggcaggcagctcccctttgctcggcatctcctttaatctaaagcaggtgccaggcattccagcccttgctgagccgacactgccaccccctaggcccctgcccagaggctactgtcctgcctggtctggaagttgagaccccagcctagggctcccgcttaacccaggtaccaggactccaaaggcaggaactagctaagcagggtcatgggtacccaacacagattcaacaggcaagatcaataggtcccaaattgccactgaggcgctagatttctgtggactgccaatccctctctaggaccctgtagtatctctccggtcccatgactccccatcctagtagagactcattctgaacctccatatgggcctccagaacccatcaccagtcatgggaccccttctactccaggcacaagagtcactctggatccaagattttaggtattctacctgcccctcagcacccttcctgctgtgaaccatcaccccaccccactcaggagcaacatgggtaagcagggaacccctagagggaggtggccagaaggctgcttccaggcctggctctccaaggccaaggaggcaaatcacctgggggaggcggcaccttccttcctggcaccagcctcccagtctctctccctgctcctcaccttcctcacccattctctccctgtcctgtcctgaggcctctatcagcagggcctcagagctgacaccaggaagacagggcctgagcatgctcctcctctggggtcatgaaattgtggtcctgacctggagaaggtagcccggcccatgctgagaggcagcagaagagcaaggcagcccctgcccggaagtggctgctccctggagagaccaagaagagaaggagaagacagtggaagcccactcactgtggtggtctcatccagagagctgctcagaggcagcagcagagttggagcagatacagggcacagtcagctttcacactaaaccaaggctgggagtgagggcagaagatccagggaggcttggaacccctttgtgagggctcaaacacacgcccagttcacctctctcagagcaacactttttctcctcgcagcagaggttcccccagacacagacacagacacagacacacaccccaagcagtagacagaaagagaagggagagagggggtgtcagaaaaacccggaaggaaggaagctggacagacagacagtagctgatcctagcttcattgctccagagagacaccctccagactcctagacttcaagggacactatccttctcagaaggagagagcagccctctgtctcttctgaaaccaaattccagcagccctggaataggacctaccccagcgcaacaagaagcctaagctcacttctcttcctacattcttccccgagggttcctttggatcaagacaggggccacctccccttagcagcgcagggacacttccaaggaactgtatgactgccccaccccccagccaagcccacatcactcagaagccttggaagaagagactcctcagtcacagcccccgctactcacaggcagtgcctgggagaaaagggtgacccccagctctccccagtcccaacccacctccttctggaggctcctatcagccagaggaggagggctggggtgctgagacccacggggttggtgagcctgggagggggactacatctcccagaagcccccagggcaaggttcgctgctccagctggcccaaggccggccttgttctctgcgctagggtggcagggtcccctggctgtccctaagccctccccacggtgttctggagctgccaacctgattgggggcttaagagtagcctccactgaccctgggggagtcccccacaccttaaacagcctgggggtacgtgccagagagcaagagacaatcagactgtgtttcccctccccgattcaaactggatctccctcctcgcgcctctgctggcctggcatgactttcgccttgcccccagcccacccctcacctcacgcggattggggggtcctcacgccaggccggagctggacgccatgaccaggtcagggtcgttgtgtggatgggggtcctcctgctcgccagttggagatgcagagggggcgggcaggcggtgatcttttgatcctggacgccttgatctcaataccagcccggcccgggagaggctatccggggatcgctgggtgcctgggttcctgcctcccaaccgcggagcatggtcgcgggcgccgggcagtggcgggagagcgcgcacacccgccggggccggggcgcggggccggggtctcggccccgaacctcagggctccggctcctgctcctgctcctccttcccttgcttgcttgcttgcttccttccttccttcctcgcctctcctttcctttccccaaagcccgcgggaatgccgggcgctgggtggggaggggctgtctgggcgcttattgttggtcggactccgagggtccgggtcacagcccccgggcggcgcggcgccgggggacccaggcgtgcgggcgtccggccggctggctccgggcggcggcggtggtgcagcggccccgggtccggggcatgtccagccactggctccgccgcgcgccgccgcctccccgggctcccctgcgctgccggagcctcgcttgcccctccactcggctccactccccagcctgaataagcatcggggctctctggctgcctccttctgccttcataccagagcccggagaggcccctgtcaaaataagagctcccccatctcgcttgcctcctcgcccaacccggctcccccagcctcccagtggtctgactcggtaaggcgcccggccggctagcgggaggcaggttggcccgggggcggggaggggggtttctgctctcctcctcactcctgagaactggggaggagacgcgccaacaacatcccaggctagggaaaggtttgacaaacctaccttcctatctgcactgattggaaggagtggaagttgcctggacacacgcgcgcgcacacacacacacacacacagcactgggtcccctcttcgttgtacccacccacatccataatgcactgagcatctctttattcatgtctctcctagtagaccatgaggtccttgaggacacagactgagttttttcatctcaatcctcagcagcacaaagtgcatgctaagaaaatg

SEQ ID NO: 57129 - DNA, 3869 bp, Homo sapiens
ctgggattacaggcgtgagccaccgcgcccggcccaaagcgctttttaaaaacatttcacatgtttcaatgctcaccacaaacctgcaagaaagaggttatggtcccattacagaggtgaggaaattgaggtttgcattacctaaggacttacccagagctacccagctagaaagtggtaagcccaggactagaatttgggtctccttatcccagggcactttccctgtttcctactgtccccacccacccagaattaatagcaagtgacaagcattgactgtgtctgataggaagaacactagccagcctgcttgttcctgctgtttcctcggccctctcccctgcccctcctcacagatggtccccagatagttctagcctcactgacctccctctcttctgaccacctatcccatcataggatctgagtacttcctgatgtgttgtatcttgtcacacacacacacacacatatatatatacacacacacacccctatatatgtataggtgtatgcacacacacacatatatatatatgtctgatttcccccaaaagattcctaagggccttgaggggttgatggtgccaacagctgggcactggacaaggtttagggaggcacaggtggaaggggacaaaaacctgaaagaagataacatagtaacccccccccatgtgtcccatcactgcttacaaagcattttcatgcacgttgtctcatgatgatgctttgatccaatcaccaaaacttttccaagtgccagcctgctgtgccaagcactgtcctgggttagggggttgaatcaccacagtcctgagaagtcgattttatccccacttaaaagaaaagaaaaccaaagcccagagaggcttctaatgtgaaagatcccagcacctaggctagtacctgacccatggaaataaggtttaatttcttatctcctctccagaaagacataatatgggcccccacttctccaacagggtgcttcttagaggggaccactgcatttatgtggatcagtctccccttacatatatgacaagccaaaggggcttgttatgatctctttggcacaattcctggttcgtagtaggtccaaaacagtgtttgcaggggcaagtgagtctgtgttgccaggggtctcttaaatggtgcacaatacatgtcctatggagcagccacgcggagcgctcccctgggtggggctgtgactcattcccccagcggaggttccaggttgggattcggagctgagctctgggcagccacaagttctgggtggaaccctggagagagccaggaggaaaggagagaggcagggggcccttgctggaatcgagcggctccctctactggccaactcggggaacctctgtctttccgtgtatctgtgtgtcactgtgtcacgaggggtgtcacaggtgtgtcagcgttggcgttcgtcggtggaagtgcccgcatgggtatgggtgcgtgagggtgcccgttcgtgacgcagtgtgggtgtgccagcgccacgaggggctgtttctggaagcacagtgtgtacacacaaccgtatcttgtaatacaatttactttggggctgctgggggtctgagattaggcatcccgttgccggggttactaggacaaaaggattctccagctggtactcctcaccggctggagcactagcccgagaaggtgggaggagtccagaccaaacagttcctgaaaaggactctatcacctaaagcaaatagggacccaagaaagagttaacgcagagccccacagtgacttcaatcattggctcagggcactgtcagtcagaggtctgggggcggggtttgtggggcctccatctgactgcccagcgcccctcacttgcccctcgacccccacatcatctcactgctgggctgcgcccgcacccccatcttggtggcgacaccgtcctgggccctggaggaagagccgatccgggcatcctggcttccccactcactccagctgcctggcttcctgatagatggtgattatataatagacttgctggacagaaccgtgccagcgctcggaacactttgccccctcctcgaagcctgccccagggcctggcacctgccacacagagcctgctgccgggttctgccggcgccccccagcaacgcctccatttcggggtgggagaccccaggacaaggtcctgggatggggcgggcgccaagcggagagaagcagggcgggtgccccgcgggtctcagggtcggcctgaggagtgtggattcacaagcgcctctcaggatagtgggacccgcctggccccttccaacctgagcttgcaacttgggagccaatagaggagcaggggccagggtgggaacgggaaggagtttggaaaaggtgtgggggcaggaaagggaggctgagagagggggccggctggggcaggggggagggactcttatccctcaccactgccgccttccccgactggagggtttggaaaaactgagcaggcagcaaggcttggctggaaatcctgcagcccaccctcctggggacacaaagctggagggcgggggcagggcggggggagagagcacgaccccggggaggacagggcctcttttggggctgggggcccaggggccggaccctggggagggggttcctggcgctgtctccctgcagtctgcttcccccttctcctctaccccctccgcttccccctcctccccctccgcggctccagtcttgcagattgcgggcagacttaactccttgagtgccagcctggtggactcggtggtggtgacgctgtgagggagggaaggaggagggactccggaccccactcccacccacagtttaacaccttgtgccccggaacgcaatcccggaactggttgggttccagtgccctgaaaggctgcttggttctggagtcgccacacgcaaaacaaggcacctgacggttcgggaatcgcccgctctcttgcctaatcttccctgcctcccctccccaccgccgcctcagggactctccctccactttttggctacccttcccccaccccacccccatctccaagttgcagccgacagccgaggtccctgccagattgaagcaggggagcccggaagtctgggttttgtagctgcctcagcgctctcctctacatcccacttctgaggcccagcgcaggtgaccgcagcccatgcctctcttgcccccagaggggctgcttcacccatctggggggctaactacccaacggaggcagggaacgctagcctcccctagctccagcgaggactaaggacctgagtagctggaaacctgacttcacctctaccctagcccctcccctagcgaacagcccctcccccgtcctctgtgaccctcaactctgctgtggatgactctgccgagggaataccgcagactaggcaggaaggggttaacgcagctactgcgctcgaatggagcgccaggtgaggcaccacccatcttggccttcaggtgtgtgggtggggaaagaggagggacactgaccttaagggctgcttttttgccccctggtggctaaatctggcttagcagccgctggaaaaaatacgctcacatggggattcgcggaagaagaacactggcgacgacagtagagtgtgcctcttgcgggaacagcaccttcctagggaaggagatcgttctgggaaggctgatggaaggagggagctcccacagtccctgccacaccatcccgctcagtaggctgcctcagccaattccagatccttgccctaggggctctacttgtgggtcccaaacacctggaggagggtaggaaaaaaacagaagatacaggccc

SEQ ID NO: 57130 - DNA, 3140 bp, Homo sapiens
cacccctcacctttactaaggagctcctgaagggctgccctggccagggagcctcgaatcttcagtctctcagagaccacagctggggttataagtttatagttgggaacttccttacagagtttatcataggtagctttgtcaaacaagactaagttattgagcttgtcccgaactttgcctttggaccacttctgctcaccaaaacaaaacagaaacaagttagtatttctggcagaagcaccctttccctctcgagtaatctgcgtcagagaaatctgttccaccgttatcaaggataaattacacattactaaaacaaaaacaaaaaaaaaacaccgacacgtttttggccttcaaacaggggccgagccccactagatcagttaaaaataacacagcaggcacagcggcagacacttcgcacaacagacccattttcatgatcctaatgggaaaaagaacgagtggtgacgggaagataaactctcacattttgactctagaaatctacacctgaaaaaccacttactatacaagttacctattactagaggattacgagagagttacccctagtctctttcagagaggtcttatttctaccttctttttggccttgcccccggatttgttcactgggtctttgtctttcttggccgactttccagcgtccttcttcttcttgtcgtccttaggcggctgtaggagggcagcgggaatgcaaccaggtcctcaaatagcgccaaagtcccctaatactgcgccctcagcccccgcaaactccaccaccagagcacatgggccaagcaataaccgcgcccgccctgcaaccgaggccggcaggccaaggagcgctcccgccgaaggctctccccactgagtcctcaaacccaagaacgccggcgacttcacacccctgaagcttaccattgcgaagctcggagaatagcagcagacaccgcagcctcgtcaagatgtcggacaaaaaggaagcgctgctcagaaacgggcccaaaaaccaccgtccgctgtgagtacttccggggcaaaaggcggagccaggcagaagaagtcccacggcgaagcgctcgccctctagcctgaggcggaagacaggaagtggattctagttcccaagccgcaccgcctaaatactgccggagtctgcgctagttgtgacgcatactatagcgctgttttcctgcactgataaacgaaaagcaatccaccaggtctcggcagctaactttccggcactacttatgcccgagcgtgtcgctcccagtgcgcaagtgcagcaggtggctgcacggggggcgcgggaggaggaggaggaggaggaggaggctggggtggggccggcggcaagtgctgtgatgcggttccggggaggggccgtcgggtagaggctgaataccagtttccgagcggcaaggcagcgatggcgatttttagtgtgtatgtggtgaacaaagctggcggcttgatttaccagttggacagctacgcgccacgggctgaggctgagaaaactttcagttatccgctggatctgctgctcaagctacacgatgagcgtgtgttggttgctttcggccagcgggacggcatccgaggtgggctaggctcgggcccgtggcgggtgcgggggtgggagggccccagtgctgtagaagtgggctggttgtaggtgcggggttgggggaaaaggggttgtgtcgggtcccttgtcccctcggcggaatccccgggctgcaccttcgctgaccgttagcttcacctctgcagtgggtcatgcagtgctggccatcaatggcatggacgtgaatggcaggtacacggccgacgggaaagaggtgctggagtatctgggtaaccctgctaattacccggtgtccattcgatttggccggccccgcctcacttctaatgagaagcttatgctggcctccatgttccactcgtaagtcccccgtctcctgaacggcagcgcttgtaatttgtctaccttttcttaaatcgtcgttctggtgttatgaaaaacgcaaccgatccagatctagattttaggtaataacggcagtggtgtcatctttttttgctgggtggggaggggccgcggagttacccaggctggagcgcagtggcgggatctcggctcactgcagcctctgcctcccaggttcaagcgattctcctgcctcagcctcccgagtagctgggattacaggcgcgtgccaccacgaccagctaatttttgtatttttagtagagaggggttttgccatgttggccaggctggtctcaaactcctgacctcaggtgatccacctgcctcggcttcccaaagtgctgggattacaggagtgagccaccgcgcccggccgaggtgtcatcttacttaaagtcaacttctcttctctgagccttagtttcttcatatttaaagaaagccagtttaactaaatgacctttaaactttttctgctctcaattgtgatatcagatgtgccggcctttgcttaaacacaagcttagtaagcgtggcacatattcctagagtattcattttacccaaagttttagatgtaaaatgtcttgtaacaaagtatgaatgtaaaatattcacagaattcaaatgaacttagaaattttgacactactgccagtcagttcacactacttctcctgactgtcccaggctgtaatgtgaactcctcagcaaatagggacacttcagtggaagtttgagaagcactccttccttagagcaactttgcctcctttgcatataggctctttgccatcggctcccagctgtctcctgaacagggaagctcaggcattgagatgctggagacagacacattcaaattgcactgctaccagacactgacaggtatgcatctccacggaggccagaggagtgtgatggagaaggtggggaagagatactgataagtttgcatctccaggtgggccagaggagtgtggtggagaaggtgggaggagggggttgaccaaagacacctttggtaagcaagaagagggggtgtgcttttcctggcacaattctttttttttttgaaatgtttcactcttgttgcccaggctggaatgcaggggcatgatccgcc

SEQ ID NO: 57131 - DNA, 1331 bp, Homo sapiens
ctgtcacccaggctagagtgcagtggcgcgatgttggctcactgcagccaccactacccgggttcaagcaattctcctgcctcagcctcctgagtagctgggattacaggcatccgccacacgcccagctaatttttgtattttttaggagagatggggtttcaccatgttggccaggctggtctcgaactcctgacctcaggtgatccacctgcctctgcctcccacagtgctgggattacaggcatgagccaccgcgcccggccttcctggcacaattttatagacacatctgtttgtttgttttgtgaatacaaaaccaatatttaatctgaaactgattttgtccatgccacccagcatgttcagcagaggttatcttgtgttcagataaaactcaccttaatgctatttcctgttgcgtgtactttggaaggtgttaagtgtttttccaaaatgaaatttgaaagcaaaatggatatgacctttggattgccagtgtcattgcttcaccctcttcatttattgaaaactgcctgactttgtcccctgcctggcaatgtttctgctgagggactccaaaactgttagtaagtggcagagctagaactcaaagcctggtcttaatcaggtgggtgacataacaaagttacttcacttctctggtctcatcggtagattcaaagtcttgcctttcctgcattatgtggtaaaaagaataaaattaaaataggcttatgaaagtgttttgcaaaattgaaagtgctgtacaaatacaggatgacactatttgctccagtgtctacgctttggtaaccattcttggtctctctccagggatcaagtttgtggttctagcagatcctaggcaagctggaatagattctcttctccgaaagatttatgagatttactcagactttgccctcaagaatccattctattccttagaaatgcctatcaggtaagtggccccacttcccagatactgtttaaagcgtccttgcccctccctgtgtgctctgtccaaagttagctgaagcatagtagagtattactttttttgtttgtttgtttttgagacggagtttcgctcttgttgcccaggctggagtgcaatgatgcgatcttggctcgctgtaacctctgcctcccgggttcaagcgattctcctggctcagcctcctgagtagctgggattggatgcatgtgccaccacgcctggctaatttcatgtttctagtaaagacaaggtttcaccatgttggtcaggctggtctcaaactcccggcctcaggtgatccacctgccttggcctcccacagtgctgg

SEQ ID NO: 57132 - DNA, 645 bp, Homo sapiens
tattacttttaagtaagacacaaggaaaggccggtggctcacgtgtgtaatctcagcactttggaagacggagagggtaggatcacttcagcccaggagtttgagatcagcctggacaacatagaaccccatctttacaaaaaaaaaaaaaattagcctggtgtggtggcggacacctgtagtgccagctattaaggaagctgaggcgggaggattgcttaaacctggaaggtcaaggcagcagtgaaccatgctcgtgccactgcattccagcctgggcaacagaacaagaccgtgtctctaaataaataagacaacagtagctgggtgcagtggctcacgcctgtaatcccagcactttgggaggctgaggcgggcggatcacttgaggtcaggagtttaagaccagcctggtcaacatggtgaaaccccatctctgctaaaaatactgaaaatacaaaaattagccaggtgtggtcgtgtgcacctgcaatcccagctactcaagtaggctgaggcaagcagaatcgcttcaatctgggaggaaaaggttgcagtgagctgagatcgtgccactgattccagcctgggtgactatttagagaaaacagactttccttggtgtttatgtcatttttgtttgtt

SEQ ID NO: 57133 - DNA, 3368 bp, Homo sapiens
ggctcaaaccactgtggggcagagggcgacacgtaggtgtccagcctactgcccatgttgagggtggggtcagatggggcagccccagaagctcacattacagggaagagggagagggcgcttctgtttggcagggcagtttcctcctctgccacctgatcccaccactctcagcctcctaaaatatcttgacaagcaataggagctggccaggaactgctcaggaacctgctctgggttgggtgtggaggtggtgggtaagaaagggcgctcccacatgctctttaggcatcctctatgacaatccaaacaggctctttggaagcactcaccttccgcaggaccttcccacatgggggccagcccagcccctgggccaggccattaaggaaccagagggcagcaaagacaggtactgtggagctccaggcaaagaatatgttgaccaggccaaccaggagcagcccagaagagaagagccagcgagcactcatctggtcagacagcaccccactgacaaacttgctgatagcataagctgccgactggctgctggtgatgaaccctgcagggaacattacacttaggggttagggaccaggggagaaacacaggagcaatgaaagaaggcatggggtcaggtgtgcaggggtgcccagtggggtgagacaggttacttcccagaggaacaggaggagcctgtgctgcaatctgacactcatggggccctactacttcggccacttctcctgcctcaccatcggcactagccccagactgacccatgattctcagctacagttgtcagggaacaaaaagggagcaggacgtggcagttccccctccctgggatttgcatatgggatttcccacctcactctggatgccagtcccgggcctctagcagttctgttgctccaccacccaacatggggcaaagggctcaggattggagtcagggaccttgtccctcctgaagggtagcatgccaggccacatgaagtcgttgtgccaactttttagttcccagtgctcacagtgtcagtagccagcactcaccctgaagcctccacatgcacccacacaggtgtgaaaaccatgctcagaagcccctcaaacactctcggaataaacagtgcctccagggcatgcacacacacgtcaaataagcagccctccttagccccgcaggcacccatgtccatggatctcagagcttctttatctggcatatgcagactggcccctggcctctactgtgcagacaatccacccacaccacatgcctgtacacaaacacccagtgtgtctggctggttctgtgtccccaggtccaccaccctgctgtttcagggctcacccaaatcatccttgtccaaagggatctcttccaccaatgatggcatgacaaaggagaaggtcttgcgattgaagtaatacaggctgtagcccccaaacatggctgagaagatcacagtgcgataatagccatagccctgggctgccatggtagaaaagagcaggccctaccagccaagacgcacagcctctgaccacagttcctgcttgccgctctcacagttcccagatctgctgagttgggttttttctgctccctcctccacccagcctcccaggctccctttatagccgccttctggacaatcattaagcctggggaggctccaaggggacccagtgtcctgagggagacaagaaaacaagagattactgagcgccaaactgtagggggtggaggaggtcccggaaggaggcatgcctgtgagccaggccagcaccctgtgtccccaggatttctgcctttacctcctctatcatgtctgcttgcctgtgaaaccagctttgattaaaggttcaacctaattacttttgtctgcctgagcccaggggaggcaggggtgggatgagcagagatgccctctctagccctgctccctcagtcacagaaccttctcattcattcacggaaggtttattaacttactagttgacaggcactgcacttggcactattagtttctacacccactcaccaccaccgcaccaaaacacaaagtcagacacataccccggctaccccacttctaagccttctagagagggcctcaatccgtggaactctcaatacttagcacataatagatttaattgtttcctacagttgccccttgtaattctgtgcaagggggacctccccagttcaggtcccacggtgtcacacagaaagccccgctaagggctgaggtcctgatggggccccacagagctacctctgggtccccattaccctgcgacgtcagtctgggcttccttcgggctagctgggggctgcagggtctggtttccaacctgtgggacgttggcaggggccgcaagcagagggactgggcagctcgtgggcgggaaggtgccccggcgggcttcgggctgcagggcacaaccgtcccgcccagggccccggcaacatgccccggcttttccgctcaattgggaaagcaactggagcagaaggcgtaggcgcacgcggagcgggcgaccgcacgtattctcccggaggccccgcgcttctggcacccagaggctcagcctggtaggggagggccaggcggcgggcgggagaggaggagaggcggcgggcggcgaagaggcggcgggctcgtggcacctgcccagccccgtgggtcctcacgctacccaggacacgctactgtgcggctgggaaccacgggggccgggggtgcaggagctggagaggtgcggagaccacaggactggcgcgatagaaaggggtctcgtgctggtggtcagggacagcgcctcggtggccccaagacccatgaattgtctctggaactgcaggaacagctccgggtcgtatcggaagttggggttcgccaacaatggctccccaagacctgagatccccgccctcaggtgactcccctcccccgcataccgcctcctacctgaacagaggcgggagcccgaataggacggggcggggctagcgaaggctgcgcaagcgcggccggcgggggcgtggtcttcgcctgctgcttcgcttgccggccagtggagttccccgccccacatgccggggacgtcgacttactccctcccgctggtcacgctgctccttggacgaacgagcatagcgccccttaggggctgggcacggcatgtccaattcttaagtggttgcattcaacaaaccagtttttagtgagtgccctcctctacaaaacacaccgaacactaaggtgataatcattgttcccaagttgctcacagtctgggaaaggtgttgtaggaacacacagtattttctttttttctttttttttttt

SEQ ID NO: 57134 - DNA, 1562 bp, Homo sapiens
ctcccttctccctcctgatgggtacaaaccattctctaatcatcccagcagcgcccacacaaaggcccaagtgaaagagcatgggtcctcggctttgccacatccctaaacagagaagctaacaggacaagagaaaggagacccgagccttttgtccaccacacaggcagtgagtggcgcaccgcagcactgtgcctgttgtcagacacctggggtgcggccagggatccccgcccagggctcaaccacctccccacacctggagctcccccgctgacggggaaagccagctgggcctggacgggaagagaaaggtaatgacgttgggggtagctaggatgaaggaaaggcctatctcctcctcggcatccctgcgggttgtcccgccccctcccctttcccagctcactccccggccccgctgtgcccacagacgcagtgccaggggcggtaaggttccccgcccggcgggtagccgttacccggtgttcacctaaaccccacctgacgaaggcggcggctcccactcccggaaacggatcccggcccgccccagcaagtggggacagaccgggggccgagctgcgtgccccccggtgcgaggccgagcgcccggcgtccgcgcggccctcccttgcgctcccgacccgcccccggagctcgcacgctgtctcccctaggaggggtggccggcccgcacctccatccacccccgctacctcttgcctccgctcctgcggccccagctctgggacagacgcggcacgaacgtacccacgaggccggcagcgccccccacccgcgcccttcacaactcctctcggtttgcaaactgttacattagccaccaacctctcggcggcgtctcgcgcaccagccggccccggacgcggcgcgcgctcattggagcctcggccgcccggccctgcgctgcgcgcccggccccgcccccgccgccccggcgcgcgtactcattggaccacgtcccaggccccgccccctccctttgccagccttgtaatggggcggcggaggggaccagccaccggttgggcagaagcagccggcgtcggcctgggattggaccacgtcacggggccagcgcgctccactccttcctccccagcgccggccccggggcgaccgcgggaccttttccggcgctggatgctttgctgccggggttcgggagtgacctgcgcctagagcaggtcgggcgcactgcagtcccgcactcggggctcttcttccggtcacctgtagagcccggccgaggaatggaataacaggcgtcctgtccgcagccccgcggagggggcgctggcctgccggttagtattgaggtgccctaggctttggatagacgttggagaatggctgtccctcggactgagtccgtcgcaaccccctctgttttactgaggaaactgaagccacagaaaaagatgtttgctgatgggtcagagataaccgatgcattcgtcgcagaatctggccaggatttcttaggttaagccccactcatttgtataagaaagaatattccaaacttaagtactaca

SEQ ID NO: 57135 - DNA, 1034 bp, Homo sapiens
gaattgaaatgctggctgggccagtggctcacgcctgtaatcccagcactttgggaggccaaggcgagatgactgcttgagtccaggagttcgagactagcctgggcaacatagtgaggccacctccccgctgtctctataaaaaaatctagaaattagtcccacgtggtgatgtgcgcctgtagtcccagctgcttgggaggctgaggtggggggatcgctgaagccgggaggtcaaggctgcagtgacccgtggtcatgccgctgcactctagtctggggacacagtgagaccccgtatcaaaaagaaaaatgctgcctatttcaaggttgtagcaaagctaagtttgaacagagcaaaggaagcgccatagaagctgcactacttgctcatgtcacagctggggaatggggtggtcgaatggggaggtccactgtcgcaatgttccaattcccgcccagagggagggacctccccttcgagggagggcgccggaagtgacgcgaggctctgcggagaccaggagtcagactgtaggacgacctcgggtcccacgtgtccccggtactcgccggccggagcccccggcttcccggggccgggggaccttagcggcacccacacacagcctactttccaagcggagccatgtctggtaacggcaatgcggctgcaacggcggtgagtgctgagccggtgaccagcacactttgggcttctggacgagccgtgcagcgattggccccaggttgccatcctcagtcgtctattggtcagaacggctatctttttttttttttttttttttttttttttggtccgagtagcttttaaagggccagtagctcggttgccctccggaaggaatggggaaatcagagagcggtgatactgggttaagagtggaaggattgtttggaacggaactccggtccctgcgggcatctgggtgggattcccatcaggcctgggatgcacggctctagatttagtgacccagaccaagaacgttcgtctacacagacggggtcct

SEQ ID NO: 57136 - DNA, 1932 bp, Homo sapiens
tgcctaaggttctagtcgtggaagggttagctgcagaattccagttcagaagccaacggaggctcagtccagacagggattaaccgacttgtgctggtatctaggtgcttggattgccgagttgagtttgctggaagggaaatggggcggcgtcggggggcccgacaggcctggctgccagtcggcttccgcgaaaacgactcttgctgtccacatagccagccgtgaagccaaactgcaggcctctgccctcccctaaatgtcctcctaggaggcagtcactcgggaggaagatgtgcctgttaccaagtgcttcgtcccggccccagcgcagacctatgaatgaagatggagggagagctgatgtgaaaggcctgggtcccggccgcagaaggggcgccagaccgaaatcggcgatcgcgtctctcccaccaaagcctcccggccagcggccgcgtctgaaagtcctgggctaagcaccacgccgggggggtaccagacaccccggctgcagctgccgagggcctcactcaccttcagggccgccggcctctcggcctggactgcccacctcggccctgcgtcagagcggaaggccaagtcttccagaaggtgctgcggcctccccgcagccccttagcgactcgggatggggcggctgagtcacgaacgccgaggcgggcaggtgcggcgccgccggcctccccccggcaggctcgggtcttccgcgccacggaggtccccgaagagcgcccaagccgcatccggaaggcccgaaccctaccggagggcggacggcggacagggcagggcccgaggccgacgcggcaggcggtgcgggacgggagcgggggcgggcggggactcgaggccgggcggcgaaggcgggcgaggggaggggaggggaagggagccgcggcccgcttgccccgcagtctgaagcggctcagctctttccatgagggcggtggtggcccttaaaagggcctttgtggtggcatggggaggcctggcggccggccgcggcgcgggccctcttagtactcctgggaggcctgggtggccttcttgccgcccgagggcgccttcggccccacggtggcgctggtcttcttgggcagcagcacggcctggatgttgggcaggacgcctccctgggcgatcgtcacgccgcccagcagcttgttgagctcctcgtcgttgcggatggccagctgcaggtggcgggggatgattcgcgtcttcttgttgtcgcgggccgcattgcccgccagctccaggatctcagcggtgaggtactccagcactgccgccaggtacactggcgcgccggcgccaacgcgctcggcgtagtggcccttccgcagcagccggtgtacacggcccactgggaactggaggccggcgcgcgacgagcgcgacttggccttggcgcgggccttgccgccagtcttgccgcggcccgacatgctagcgaggtagaccggtgaagcacgacggctcaaacactagaacagacgcccgccgcagtgtaactgctgtcgcgcgcgcgccgcgaggccgcctttataagcccccaggacacacctctgcgccctcctgattggctcttttctccaatacccgcctccggttggttgcggttaacccttgggtgtcgcggctcggctgagggagcgcgcccgctgattggtcgaatttgaaaaccttttgcccggggagaaaaggcgaggaggaggggtagcacgcagactgccaactatccgctgatgtagccaatccttgtaaagcgcgcgagatttaaacactacaatcggaaaccagaagcggaagaccaaaggggtggagtctgaggccacctagagagcgtctgggaaatctgtgccggcgtaggatttttaaaggaaaggggtcaatattatagctactgca

SEQ ID NO: 57137 - DNA, 2188 bp, Homo sapiens
atggcaaggagggcacctatcagggccacaaactgggggaggctcgggcaggtccatgactcaagcctgctcccattccaccttttaagaattcctgtcttttctgataatttcttagcccctccccacaagcccaaataaccccagttctctcaggtacctcccaggtcccagccacaggcaatcacccccacgaacccacttacttcatggtgggggaatgccttacactgctccttcacaaagcagttcaggaaggggaaagggatgaagcagaagaggatgataaggaaaacagcaccgctgatcactccctgggattctgggctgtggcccagcagcaagggggcgagggggaagaggaaagggggcgtggtcactcactagtgcaggtgttacagtaacccaaagtggtcttctcattcccggttttttattctggtaagtggtgaggggggcggagggaggaaagcaccactgccagagtcccagatatacccaagggtccctacccatcctttccccaatgcgagtaagttctgctcatcacctctccgagttccaggctgcctgggttagttctgagtcttcacgtgtggtcaagcaccccggttcccgcccctgccctagccactccttccttagcccttgccccctgcccggacccgtgtgccgctgctcacatctgctgtcggctggttttgttgaggtcctgaccacagaggcgcgcagcaatgaagtggccccggaaggccgggatgagggtgactgtggccacaaatcccagcagcgagacgatcaaattgatcagcagcggcatgggcaattccgagaaggcccacatggtgaccggtcaggggcccggctccgccgcctcttcaggtaacgggcaagctgagcagcagtcctgaggcctcagcagtatggagtggccgctccccacaggcaggctcttcccacaccaatctgagcaaaacccagcaactctgacttgagccgccgtcgggacaccggggaacctctctaaggcaacctatgttctgccccgctgcacccgcctatctactgtttccgcccggatcttgttcgctgaacaaccattactgcggaaggcggcggccgccatttttaatatgggcattagagggtggggatggaagtggaagagaagtgtgattccaaatttcatcctatgttcaagagtagaatcaccgagagagtactggaaacgcaattaaagaaaggcagccaagaacggatacttccctaacattatgttaaagatgtactacccagagcggaaatgccaattgcccggttccaagatgaatgcctccttgtaccacgtgtctgacaccgctcacattccggttccacgtcagttttagctccgtccgcctccataggtcaagcttaaagggcccgtacctctcccttaatctgggatgcctccggctccaggaagatggctattgaaaggcagggggtggggaggagggacgagggtgtggagacgcgcctgtttcttgcaggaaacctgttgccaacatagtcggaagccaaggtaaacacaactcagttcccggaaacaaagctacgatttggaaggatggtgtaaattctaaagcgtagatccttgaaaagcccctcccactctgtttttcttgtcctcgattctggtatttttttctcagcatcccacccaccttctgccccagctgtagcagttagttgcccggcaacccagcgcagcacttcactgagggattgggagtaccctcaggtcttggatttaactcgagacttcagcttggccgtggatcactgcattgtacctagctcccacaaggaggagatggagatttccaggctgaggctctggaaagagctgaggagggagaggaatcagacccacaactgatttcctgtgagtctgaggaactcccagtcaggtttcttcctgtaggtcactgtgcattttgcttggcctcctgcaggttgctgtgcattttgcttggcctgttcccctgcaaacaacaattcaccagctttttttttttttttttttttttttttttgagacagagtttcgctcttgttgcccaggctggagtgcaatggcgcgatctcggctcaccgaaacctccacctcccaggttcaagagattctcctgcctcagcctcccga

SEQ ID NO: 57138 - DNA, 1398 bp, Homo sapiens
ggacctctgccagacacttctatctgggagggacgctctgcgtctccttaccctgggcctagcttcccccaggaaatgggaagctagaagtcgctgagtctgggggtgttgggagaagggggcggtgatttccacaggggtcacctccttcttaacctcacaggcgtccgacctgtggaaatctaacaagcataggggaaagcaaaggcagcatcttaggtaagtgaagttactcttgccttgagctgagtgtgggagcaccgcgattgcaagatggggcgaggtgatcaaagatcccgcctattttcaaccccggaacctcctccgctcgctgctagccctcccgccctcctccagcgagggagcgccaggctgtcctggccccgcccggcgcgggtgcggctcctttaagggcgggtgggggcggggcgccggcggtgttgtcagtgtcagctctgcgcacgcagccctcccggagccggtgccggcccgcgagccccagcgtctctgcagaccagtcccctccagggtccggcggggcccgcgcggtgggaggagtcgggcactggccggcgactaacgggtccgactgctgaccaagctaggagagacccggaccacggagacagagaccccggcatcgcgacccccgaggacctcctctcctcgccctgtggcacccactagtcctgggcactcagccgcggagagcccccgaccccgcgcgcccagccccgggggagcccacctcctccccgcggcccgcccgggccatgctcccccggggcagcgggtgagccccagccgggaccgggatcggagcccgcgcggagcatggatccgggctgggggcagcgggacgtgggctgggcggccttgctgatcctcttcgccgcctcgctgctcacggtgttcgcctggctgctgcaatatgcccggggcttgtggctggcgcgggcccgcggggaccggggcccgggacccgccttagccggggaacccgcgggttccctgcgggagctgggcgtgtggcgctcgctgctgcggctgcgggcgactcgggctggcgccgccgaggagccaggagtccggggcctcctggcgtcactcttcgccttcaagtctttccgggagaactggcagcgggcttgggtgcgagcgctgaacgagcaggcctgcagaaacggggtgagttggaccaagcgcttgggtggtcccttcagcctttccttccaggggagggactgactgctcgtgctaggaggccagacgagggtgggcataaactggggaaccctatggcttctcttcccctcccggatcagagaaaagggtgccgctaaggctggaggttgtagaaatccaactgggtccccagacttccatttctgtgggcaa

SEQ ID NO: 57139 - DNA, 1612 bp, Homo sapiens
gtcgagaaggactaaaaaaaagtagacagggagagcccagatgctgaagggtctagaaaacctcagtatggttttggagctttgccctgaaagcaatagaatgcctttgaattgtctgaagcagatggtaacttgatcaggtctgctttttgcaaagtggagaatgctttggaaggaagcaagtgtgcacgcagcgggacccattagactaatgtataaatcctgcctggaggtcatcactggacaggggaggtgggggaggcggtgaagataaacaaaaggggataaatttgaaatatcctgttttaaaaggaggtagaatccacagaacttggcaatggattggatgtgagaagtgagaggaatcagtgatgactgccagctttctgacctgaacgagtggatgaagggaagccgagttttggggggaaagagaaacatataataccaacatttaaaacataataagactaagaggctgaaggaaagggtagaaccttcaatctgagccgagcggggccgacagcgctgggcagcatcccacgcctttttctccgcgaggcccacgcaaccagccaactaaagcgaagaaccacgtgagggagaccccactgcgcaccaggcgcgagccctgcgcatgcccgttgggtcccggaggccgagcctgcgcagttaggggaactcaggcccataggctccccgcctttgcgttgccctgagcagcgaggcgcggtcacgtgctaccttttgcacgtatcctgtcgcccctctgtccgcccgggacgcctagccccacccactgttcccgccccttccgtgttttggtgcgcacgggttccgccagacacagctaccattggctgtcagtcggatccgagaacgacgattggctttccttgaccgtccctcaagcgcctctccggagatggtctgaggtgggagaagagctgaagagacctggagccgacagacggtaagctggggtatgtgctctgcaggggctgcaggaggccaagctcttcccgagccacctcggcgagtattcttgccgcttggccacgctggtctgccctggtccggtcccctcaccccgactggaacctccctgctttctagtctaggggcttcgctgcggctgagactcggtcgccgccacgccttagcgtgaaggattccgggaagcctgcgggactgcgagtggagaggttttgcccaacgggacggtctccttccttctgtccaaattctacctgtccttcgaggcgtggtgcgggccccactgcttaggggagacttccttttcgcctgaccgcggaggtgtctctctgtcctggtctccctcatcgggtactttgtttcggtcgttgtcttcacgtatcagtcttatctttttggccaaattatgagttcttaggcgtttaggaccctttttttcttgaataccacagttcattcattgtcttgcgttacagtatatgccctcttaagtgttaagagggtagagtgaagatcatgcccctatctcctcagagtagaaacaagagacacagaaagagaaattaaagaagacaggaggacagtcagagagcgtcagggagttttgcctaggttt

SEQ ID NO: 57140 - DNA, 1651 bp, Homo sapiens
tcttaaccaaggttaccagcagccacacacataggtctgggctctgaagaggaccggatacataaggcagaacccaaggaagccttaggctcaggtctctgcctgaaggtaggctggggaggcggagagggacagagggaagaatcccctggacaccgcgcctcagggaggcccaggggtaaggtaggaagactcaggcccgggatgttgttctggctcatccacttcctaactgaatcaacctgcacaagtcatttcacccttctgagcatcagtttcttcatctgtaaaatgggcctaacaagcagcccagcctgggaggtggttagtgaggtcactgggtgtcactggcgcttgggaacctgcagagggcagtactagcggcagtgcccgcggggatggaggcagggaggggggacgatggcgggacgggtggcgccggggttccagccctgcgcctgctccggagcaccgggcccctctcgctgaccccctcgtcccaggaccccgcaggcccgagtgcctgggctcgtcctctttcgcgcccgctgccaggtgccagggccgcgcaggcgggcggaggtgggcaggaagcgccacgccgaggagccggggactctgggagctagcgggagacgccggcgtccgcccagccgacccctctgggccgcggccgacggctcccggaactgggcagccgcgggtaaaggcctagcgggcttgataacccctgcgccctggctgggaggccgcgctgagcggggggcagggcgggccgggggaggaggctgtgcaagggccgcggggagatcccggccgagaacgagagggacggagctgggcgctgaatggcgggcgttctggcaagtctccccctgcgttcccgaggccacccgaaagtaggagagctgtttgggacccagtttggtggaggagctctggacctgtaggaacaccgcccctgtacgtttcctgcagtgccccctccttttctcattgccctggagacctgggtgatcaccggagaactgccctcggccccgcaagtcccgtcttgactcagtggccctagatccgaggttaaaccggaacctaggctttctcaggcttctggagccctctcttaacccttccgcagcccctgggacgggccagcacccagccagctcctccgctggttggccctgctaaggcaggtggcccaatgcagccagttctccttaagcgtaccctgcccaagaagccccgatctcagtggaggagaccaggtgccaaataggggcacattccatttaagtgagttcagaggcctcagaaaagacttcccagggacggagacttttgagcaggatcttaaaagattggttggggcccgagtggtggctcgcgcctgcagtccccgcactttgggagggcaaggcgggcggatcacttgagcccaggagttcgagaccaccctgggcaacaatggtgaaaaccccgtctctacaaaaaccaaagccaaaaattagccaggtgtggtggcacaccactttagtcctagctactcaggaggctgaagcaggaggatggcttgagcccaggaggtagaggttgctgtgagctgagatcgtactactgcactccagcctgggcaacagagcgagagacc

SEQ ID NO: 57141 - DNA, 1752 bp, Homo sapiens
aataaaaataaaaaataaaaaaaggaagtgatttcttttcaagaggtcaaagggcctggaagaagaggtcctggcttgagtgtctcaaggctttctggggcctaatccggctggaatgggccgcagcattcatattcctgtccttggtcgtgtcttaatgaagaattgaaaataataaggggtggagaaataactttcctttttctcccaccatcctcccacagtgtaaataaacaaataactctaagctcgatttcctcatttgtcaggggtggggaaagacttgacatcaggactcttccattccatcgccacctgtcttaatttaaacattcccatgacccaccccagaagcgccaacctcccgcccacaaggagcatggaagtcttggtttctggctactgcgcagactccaccttggacctactccccaaccccccgccgctcctttccccgtttctccagcagagggcgcaggcccaaaggttccgccgaccccgccccagcctggccccgccccgccccggcgtaggggcggggaagacgggcacagaaacctggccgcggctttccgggagctgtgggcacgcgagctgctcgaagccggtggcccggggatcgtcgctgcccagtccggccgcggccggccgcttccccgagcttaccagtaagccggtccgcctccgggacgcgccccgcccgccccgggctcgcgcgctctgaaggggcgcgtcccgcgcactcccggcgccgcccactcccctccccacggccgctcctccctccgcccggatagccggcggcggcggcggcggcggcggcggcggcggccgggagaggcccctccttcacgccctgcttctctccctcgctcgcagtcgagccgagccggcggacccgcctgggctccgaccctgcccaggccatggccggcaacgtgaagaagagctctggggccgggggcggcagcggctccgggggctcgggttcgggtggcctgattgggctcatgaaggacgccttccagccgcaccaccaccaccaccaccacctcagcccccacccgccggggacggtggacaagaagatggtggagaagtgctggaagctcatggacaaggtgaaaggccggctgagcgcccgctgttgcagggtgggcgtgggcggagggccgcggggaggggaacgagcggacggaggaagcgggggaggggacgggtctggtgaagccggggaggcgcggagccggggtgaccggccgggggcgtgggggcagggacgaggccgggagggtggggggcggcgtgggggaggggctgccgttgggagtcggggaacgctggggtgccgcgtttggggtagccagacaaagatggagtgggggctggggcgaaggttaactgggaagtcagtggggcggaagtacaatgaggggtgcggagtttggggctctgtgcagggtgtagggatgtaggtcacggaattggcctgggaggttagcagggagggggtgaggaagagtgatgtaccggctggggctcttggctgggtgagatctgactagggaattaggttcatgggctctgactgaggaacctggctggggtcaggacagctctcagggaagctgtgctctgggtgagagtatagtcctttctcattaagatgtaacacgaagataaaagacatattgatgtttaagtgaggcaaggaaagaactttcctccccatctagcgccggctcaagtttt

SEQ ID NO: 57142 - DNA, 666 bp, Homo sapiens
gagatcccaggtccttggagccaagcagagattgagcagagactgagcaccgaacagctccagctgaggctggtagaggggcagaaaggggcaacctaggctcggggccaagaggaaggcccctttccttccaggccccctcctctccgggtgagctcagagtgtgggaatgcaaagaatgtgccaggctggggcacacaggcccttttgtgtcaccaccgccaggggaagacaccactgctctatcctctgccctccaaaatccctgccctcactccccagcgggctaactctggcggaagttccggtctcatgctccctcagcagcacctccatgaacactccgcacacacccgcggaccccaccctaggtagctggtaaggatggagaggtcagagtctcccccaggggtcagggcaagggccaggcagtgggcaggagtgacgtcagtggtgccagcgtgctgccagccctgtgaggaggtgatgtcactcgacaccatctgcctgggctctgggatgcctgggttgttaccttggctctcggacaaggagggcaggtggaaggtggggtctccaacccagagcctcagacccctgactcctcccagagctagaagagcagggcagggtggagctggaccggctgcaactgtggagcccgat

SEQ ID NO: 57143 - DNA, 1994 bp, Homo sapiens
aataaatgatagaatagatgaataaatagaagagaatgaggagacggatctgggcaggctgcgaaggcggtgctattccaaagcccagcccagaggcagtgacctccgacccaagccaaaaaaaaaacctcgcgttcagaggccgggagaaagaacagctcccaaattgaggggagtccaagaccctgctcttttagagggtggggctaggagagcgtatttcgacgctgcccgccaacgaaccaatccccgcctaaagggggaggggatttaatctgtcgcctctccttccctttggaaagtaaatacgttcgggcgccattcaaacggaccaatgagtgatcgacgtttttgtggttggccttcaccgattggctggagtttgtcgtccctccctcctcgtcacgcctctggctccacccctttgcacacaagatggcggcgcccagcggagtaggggctgcgcttggggtttgctgaagctggctgcctctcccactccccttttgggtgcaaagcgccgctagcgggaagacgggggccgggcggggacaggggcacctgcgtagctggactgagagcctgcgcccagcttacatcgaccccacccggccccggcccgacccgacgcgacccgatccgatccgatcccattccatccgttcctcgtctcctcccggtctgacccgttgcccggccgtggttcgccacaccaggcatccaaagctgaggtcgctcctacggcctgggctcgccttcgctttagagatgtttggcctcttccctcccaaacagcccatcttcaaaacctggactcttggactggcacctggccacctttccctctaccaagactccacttccgtcttacccacttcttcctcagattcttggtaccccctgggttggagactgctcattttccttccaaattaatcccagaccccctaaaatattgacaaccttgacaaccccccaaccgaggagccagactttgttttggactaacttccatagccctatcatggaggcagtgtacctggtagtgaatgggttgggcctggtgctggacgtgctgaccttggtgttggacctcaacttcctgctggtgtcctccctcctggcttccctggcctggctcctggccttcgtctacaacctgccgcacacggtactgactagtcttctgcacttgggccgcggagtcttgctttcattgctggccttgatcgaagccgtggtccggttcacatgtgggggcttgcaggccttgtgtactctgctgtatagctgctgctctggcctagagagcctaaagctcctggggcacctggcctctcatggggcactgcggagcagggagatactgcaccggggcgtcctcaatgtggtctccagtggccatgctttgctgcgccaggcctgtgacatctgtgccattgccatgagcctggtggcttatgtgatcaacagcctggtcaacatctgcctcatcggcactcagaacctcttttccctggtgctggccctgtgggatgcagtgaccgggcctctgtggaggatgacggacgtagtggctgccttcctagcccacatttccagcagtgctgtggccatggccatcctcctttggacaccctgccaactagccctggagctgctggcctcagctgcccgcctcctggccagctttgtgcttgtcaatctcactggcttggtgttgctagcttgtgtgctggcagtgacggtgactgtgttgcatccggacttcaccctgaggctggctacccaggcactcagccagctccatgcccggccatcctaccaccgtcttcgagaggatgtcatgcggctctctcgcctagcactgggctcagaggcctggcgccgagtctggagccgcagtctgcagctggcgagttggccaaaccggggaggggcacctggagctccccagggtgaccctatgagggtattctcagttaggacccgga

SEQ ID NO: 57144 - DNA, 1330 bp, Homo sapiens
cgccattcttcaccagatcaaactgcaggctggcccggtagacggtggcatggacggcgaagtagtagaccccaggcacctggcaggtgaacttgccggtgacggcgtcgtaatgtccctgctcgttcaccagcacgcggtcgaagggcaagggtgcgtcagacggcggaggcacccggctctcggagcgcttggcgctgaaggcggatcgcggaggcaccgagcactccccggcaggcccggtgggccccgcgggtcccgcctctcctcgcggcccggggtcccctcgaggtcccggcagtcctgcggggtaagcggggcggcagggtgagagtagcggcggctcagcccgcagcggggcggcgactctaaggtcaccgtacccctccccgcccctgcctgagcttcggccagcgcctcctcccgcacgggtacctcctccaccccttcccgcagggcagatctggggggctggccaagggggctcccgccgcctgggcccctcccccgctcagggctgcaaagcgcggggagtggcgccccctggcgggagacccgagtcccggacaccgggagctggagctgcggccgcgcctgctcggacatcgccaccgatagccgcggcggtgccttcttacccggcctcccgccctcgcctttctctcccggagccccgggcgcgccgtcgcggccgtcgcggccatcgcggcccggcaagccctggctgccatggtggcccggcgtgcctggaaggccggggtgccccgggcagaggctggggatcttgttgtcgtccagtgggggcgagccggccgccaggcccaggagcagcaggacgaggagtggcctcatagcgctggcaccgggagcccggacgccggggtcctctcgcagtctgtggaccaggcaggactggagtcgggacccagaatcctgggacctgcctctctccccaccccggcgcggcccagtcggtccccaccccactgccgtgcccctgaggctgagcgctcgcagggccgagcatccggagagcacaggcaggcgcgagagggtgggagcggccagccctccctcccaccgccggcccgcgccagcctttcccacagtcccctccccagcccctttcccctcctccgccagactcaccccccctcccggctccccgatggcctccttcggggcgctcgctactccggaccctccagttggtggtgctccagcccccgcgcttctccccggccaggcgccccctgccctgccgtcaccccagtcctggttcgctccctgccggctccgctttcctcctcccagactccaagaggaaacc

SEQ ID NO: 57145 - DNA, 2490 bp, Homo sapiens
tggtacgatcttagctcactgcaacctccacctcgtgggttcaagcgattttcctgcctcagcctcctgagtagctgggactacaggtgtgtgccacgatgcccggctaattttttgtatttttagtagagacagggtttcgtcatgttggccaggctggtcttgaactcctgacctcaggtgatccacctgcctcagcttcccaaagtgctgggattacaggcgtgagccaccgcgtcctgcctaaatgcctgttattttcaacaaccaacaaaaatattcttcagggctttattgagtgtgtattgactatgtatctccctgccccccatctttatgttattctctattctctgctacagtggagactaggaattcatatatttggtacatattgactccttactataagaaattttgagtcccaaatccaggtgctatctcaaatgacctatatttgtactcctagaagtccaatatataaagtaactctcataagagacactttgaggaggttttgaaaagttaaacaacaaaacaccttgagtttcgatcttcagttgggaaaaactcaagtaagcctgccattctgaattgccagagacaggtggaattccttccagctgagctcagctcctaagggctgattaaagactcggagaatcctccctgcctggctcaggtttcaacatcctgactggccactgtctgggaatcctggagatggcagattgggcccgcagaggcaagggcctggctgaaattgccactcttgctgttggccctatagcggaggcgggtgagggggttggagagagaacaggtgctggatcgaggactctgagcttatttgtcaaggtctcttggctaatcctgggcatatctccaaggagtcagaaaaccttcaggctcaaagggttaaataaacagtttgcagatgagtctgccaccccctctctcagggaggggactgggagcaggcaactctggagcaacactggggcatgcgtggggccagctcagccctgatcagaacaggagcctgaaataactcagctaaaattactcatgccgtgtgctgacagcctatgaggctgtcagcagctcaaagcccatgaggttgtcagctgggggggaggggtgtgggtgggggaggagcaggctgaaggagggcttttctcaagaactgccttaccgatcccacaagtaagaggatcccttcttggccagctgtcagggctagcactaacaggtagggaagaaaaatatacccagaaaagagacccagtttaaacctgcagctagagagaaaggccaattggcagcaggtgggatataagcatccttagagaacttggctagggctggcagtatatggccccacacaacatctgaatctgacttactgacagtcagcaagagggccgcaacagagataattccctgggacaaagaccttctcagcattttccagaattggtgaaacgctgcaaaagtctccatgttgcgcactcggaactaaatgttaaagcttgcccacaacagaatacccacccttacgtctatttttggcagtgctttattagttcttagcccctgtgcctcagatgacatctgtctaaacaggctgtaggggaaagcattctaccactggtgaccgtgtcaatgttcaccaaagcaggccctcagctgagacaacagtcactcagtgctaatgggggtagggaaatgggaaaacggagtcatctgtctacagaagcactcctgtggtgttttaagatgttgacacttaattctgacccagcagtgaggggcaagaaggacacttcgtcacccacgattactattcttgaggatctaacccctctattggcctggggggtggggagatgggagaagctcctttaaggcatccttaggacccttggttgttatgttttagggtgggggttgatgcctttgtctaaaatttcctcagctcaaaaccacatgccagtttctaggtgctctgtgtagaaggcgggtggataacaggagtgggggcgacagaggagggggagcagggctgctccatgcccagccagatattcttctgccaagaataggaaatcaggagctccagggaaagtcagcacttttcattacagaggggaacaaaatgtccccagagtgacctttcttacaggacaaacaatcctacctcagggtcgacagggagaaaggggccagaactgcagaaggtgggagaccctgcacagccaacctctttcggtgaaagccagagaaggaaatgaccccaagtgttatgctgggacacatgtgcaaagagttgagaaagtttggacccagtcttccttccattcagccatcagcaaacctagttttgactcagtatcaagcactgttgcagggagcagatggcaccttcaccatcagcaaatagacagctttcaccttctagaggagaggagcgggggctcaggagagccc

SEQ ID NO: 57146 - DNA, 2323 bp, Homo sapiens
aggtagcatctgggcacccttcggtaggagaggccgaggtttgtgtcttcacacttgagaccccaatcaagggctttcccgcctacctcacctgtgtggtgagggtcgccccaagtcctggctgcagctaggaagcctggtgtggccctggcacggggcagggcacgcactgccagcacgggagctggtgcctgttacataagacctgtcaaagctcgggccccttctcccttccccaggcgggcagcgcccagcctcggccccggcattcccctgggggctgcttccgcggagggacccgctgcccgctgcataaatggagaggacggaaagaaggggaagttgccctctgtcacctgtctgcacctcgtctgcccttcacagggtcaaaggacccccgtcaccaacccttgggaaagagcccttggtggacagtgaaggggaggcggcccctttctgcccagccttcctcgccggggtttggcctcggaggagtaccccggcacggtccagcgtgctgccctcgcacaccgatcgagacccagtcaaggttatgctttcctgcacctgtcctgataggtgccaggaattgagaggccaagagccaccacctggtgccggggccaccgagagggagggggcaagggggacttcctcggacctccacccggggaggggaccacgagtaagcgtgcgatcacctgaggagggggcattccttgccaggagaccctgggaaaggaggggtgggggctgggaagaatccgtcccctcacctaggggcgcgtggcgggcagaggccagggagaaggcgggaccccaggccctcggcgcgggggtcccggaaaagggcccgcgtaccttggctttgttgagcaggagccccacgaaggtggagagcagcagggacggggagagaggggagcgcggccgcagctccttggcgagggcgggaaagggggcggcgggggggtcctcgggcagggtcacggtgtacgaggtgcgcatgctggggggcgggcggcgggctttggccctcgcttaacgttggcagcgggggcgcggggggagtccccgcgcggtgccacagtccggacgccgaggccggcgagaccgctacaggacagcgtccgcggcgcccgaacgcgcgctcctccgcctcaacctccccggcgtgcgccgccaacagcccgggtcccggctctcgcgctccggccgactggcggccccgccggcgcctcgggccccgcgacgtcagcgctggggcggggccaggccctaagccccgccccacctcgcctctaccccgcccccggcgccggcacgcggacccgaacgaggcgacaaggtcggtcctcccccgccgggccttccccgcgctccccggcgcccccagcccgctgacccccggccaggcaggcccgcgggggaggcaggaccggagccctgaggccctggccggcctcggggttgaggctcagctcgggataagtgatctttggggcccgcagaggacgtctccccaagacccagtggcaaccgggtgagcttcccccaaggcaccattacacttcctaactcttgagggggctgcaaaccattttgagaacgtgatgaaagctcttctctcttcagggcgaaatacgtatatgcacaaacttttgtctagagttccgggggtactcaggccttcgtgaagacccaaactcatgcagtctgtggaggtcaatgtgcccaggttaagaagatggaccttcacggcctaggggctgagctgccctcctcaaaacagtcctgtttggcttctttcaagagaggcagtgctcatgttttataaggtccaataggtcaccttctcatttggctcctgaaaagaaccttttctggtctcttctaaccaattacccagctccggctctcccattctcaaatttgacttgttttggggagctggggagaaagcaatacaatagtggggaaataggcgctcagctggcatggggcgagtgttctactctggcgtcaagcacagccatgctggaagatcaggggtctttagatttcgtttctgatgccccacccctccacctaacagggaagctcacgaatctgcctagagaaagtatcttgtttggagcttgctggctatttttagccagtatttttagcatttaaaaatactccaagaggcagcagtgtatgctgttactcatctgtgggctccttctgttccttctggtgtgctcatccccacatgtacacgcacacatgaccacagctacatggggactgtgtccaggacacacgtatggcagtaccccag

SEQ ID NO: 57147 - DNA, 3896 bp, Homo sapiens
gcccaggcagtctggcctgaaccagctggattccagaggcccacacacctccttcttttgcatgtgtctccgtctggggcgctagttttatgtacgtattgaggtgagagagtacaaggggccacgtgtgcagctttgggctctgaacatgatgttcatttctgcagctggtggtcagtggagcggctcccccaggggcaaggaacattttgccaggcttggattaacttctgcattgctgagccccaccccagcaccacattaactcatgaagacatcctggagtgggggtggaggaggaggcgggaggatggtgctgggcaccgattgagaaattgagcctggataaggcagtaccaaggctaacggccaggatacagcccacagccggtctgcaagggatggagacatcagtgtcttgctgattctagtcacaaaccgcaaacccactgccctttccttcgcagcagctagtacagctcctggccaaggggcccctctggcttaaggtcctttagtgaccttctcatgctgccaacacagattcatgacctcaggaagttcaacctccttagggtggcttagtgatcccggggtgggagtaggtaaggacagaccccaggatctcaggctgccaagctagacaaacaaggcagcagggatacaggccagtgtggctgcgtgaacggagcgagaacatgagggacgagaggcgagttgtacttctcacctaggagctccaggacagcccctgctatccgcaatttgttctctttggagtaacctccgctcactgcagggcagcattcaagtccaaagtcccaccccagggaaaaatcacatgacctcagcttatataatctccctgtcactgaacagctggaacccaaggcttcggaagatgagtcagcagccccagtggcaaataggacccaggtattcagtttcccagaccttttgctcctagaaacaggtcctagagcggagggcaagggtgtggaagagactgggtgggtgagaataggctgggccagactctgagcctcagccctggctctgcctccgagttgcaggtgcccagcttgctgactgtgctctggagggccctgggccaacccctggatcttcttggggagaggagagggtggcctgggcagggtggggcaagggctgggcagaggccagcgggcagaatgccagggctagggaggagcagctggaggggtggagctgagggggattaggaaggattgtaggggttaaagcgcagccctggcagggctcaatgggaacagctcgtccttccatagaccccgggaacaggagaagtggggcagagtagggagatgacagggttgggactggggctcctgggtctctgcagggctgagccacctgagctggcttggagtccccacttgggttagtgaacactttttttccaccatcactgttcctcctctctgcattttaagcagaaggtgaagtctcaggggaggccctcattatacaagtgctgagctgcgcccccctggcctggcattttgttggtgcttacacaagcatggggaggggataattctgaatttatgtggcgccccctgccacccgcccctgccccccgccagctctgtgctcatgctcagctgagtctgtgatattcaaagttcgtgttgcctattactgttaatgagggaaagaagtctggctagaactgttctccctggtcacagcctgctgttgacctcccttaatgaatgccagctgtagctccagtcagctatcctgagaatcccctgggacacaggatgtacttttttttacctctgtttctcccacggggttggtggggagggggcttcctactctagtcagctgccaaacgccccctttctatgatctcttttccccccttaagtttaaatgacctcttctgcagcattttattgatttcacattcctccaccttcattatttgctttgagcctcatggcatgcttgagaggtgggcagggcgggcgtgattgttcccttttatagtctaggaaatacagcccagctgataggtgtccaaggttagagaggccaactgttccttccactggtcacgagcagcccgtcccagcctcagatgacctctccctttccgtccacctgtgacactcaagaacacccagggctgcctcccattgtacctatttaagaacttcttcttggccaggcgtggtggctcacacctgtaatctcagcgctttgggaggccgaggcgggtggatcacctgaggtcagttcaagaccagcctggccaacatggtgaaaccccgtctctactaaaaatacaaaattagcctggtgtggtggtacacgcctgtagtcctagctacttgggaggctgacacaggagaatcacttgaacctgggaggtggaggttgtagtgagccgagatcgcaccactgcactccaacctgagtgagacagagcgagactccatctccaaaaaaacaaaacaaaacaaacttatttccctaagtgaattgtgaaggcactgaaggcagggactgttgctcgcacacatctcttgcctgccaaagcaccagaagggtacaacaacgaggactaacatttactaagcaacatgccaggcactttcacatacattatcttttcattcctcaagtaatctgtgaagtgggaactatgatcactcatcttacagaggaggacacaagttcagaagctaagggacctatctgaggtcacgctgctagtaagctgagcaccacaaatgagtgcctcagaaggcaagatccccagatggagatctagaaagaaactggacccagttttagaaagaagtggtccaggccgcacgagcagggttgttctcacctcagcaagacgcactctgctccaggaaatgacgataaggggtggagagatcagggtgaggttaaataaaggtcttgtactattgaccctggagaggcctctgctggttggcagtatcttctggggcatgagctcagaatgaaacactagctcaactgcagggcattcccggctaaagtgccttatgagttgcttctggatgagggtggctgagtttgtcccagggcaatctgccacttctttgaggtcctctctcaaaattcccttcaccttggccctggagccggggggaggagccagggttgtcccttctggagagttggagggcggcagactcccaggagggttgggccatgcctgtgtggggaggaggcagattcccagtggaatctgatccccagtaaaggggaatactgctgtcatgattggggctgagggtgggtctgtagtttagtctgcgctgaggttttccatctcagcatgcctagagatcacccaaagagcttgtggaaagagcagcttcccaggccccatcccgagagagtttgcttcagtgggtttggatgaatcgttaagccctgcagtgactctgacacaggcagtctgcagaccccactttaaggagcactgctgaccatgaaacaacccttctcttctgagcaaggggagggagccccgcagaggcttctaggacccgagcccctccgaggagagccatattctaattgccctggggttgaacagcaccagccgagtccaagtgagtcctgctccactccaagcccagcacgcagcaccctgagagctgatacttccccaccatgccagctctgttgtgacacatctctcttctccactcctttctacagtggatccagccctgccttgtcaagttctgaatgttctgggaggcaccagcgtttctatctcctgtgccacttcacagatggcacaacaaagccaagactccctaagtcatattatcaaagttgctctctcaagacct

SEQ ID NO: 57148 - DNA, 1414 bp, Homo sapiens
tgcccagcacaactttcacccctttctaggaaaaggtaactgggggatgatgtcacacagcgttagagggaaaccatagcgggagagacagacagaggcacagggtcggggtgggggcccagtcctgccctattttgctttggagaactccatcaataatgcaaagtcaaagagactccaggtctcaggagctgggctctgggacaccaggcagccaatcagatacaatccccccaacaagggtatgagctcatggctcctccccacagctctccctctccctcccccacagtaaggctctcagggaattggtattcttcgggcagcgccccaagcccgtgacatcccttgaccctgctgatgacgcagaagtgctggggccaaacgaggtccagaggacagggacagacagctctgaaaggctttggagccggaggtggggccacatctctggcccacagattcccaggagggctcccaaatccccactctccctcccatctggcaggtgattgccagacccctccgcctcctcctagcagccctgggagtcatgccatcactaatactccatggaagctgcctctcggctctgacttctagctacagttcccatgcctgcggagagggttcctactggggccggggccttccacatgtctctcccctcccgcaacccccagtttcactctcaaaggtcctagcaccttccaggtgaaagcacagcctgggttggtgccccttggcattacctgcacagctgtccctggaggccacagaatgcactatgggcaggagagcgggctggggccctggccggagtctcgctgcgcaagacagggacaggacgggcactcacgtggctgcgagtctccctgttgccacaggaacagcctgaactgaatggccctttcatggggcagtgggaggcaagccaattggctgggatcccccatacccctccctgcccagtgcggggggcccctgctgcccagctcctttcactgtttacccagagctggcaagtacaggcatgcagctccaggcagcgcctctccaggtgtccgccaccttggacaatgggggcagtcccctgcccagctcctcctcctggccatcttcactgaggtgtcctgacccttccttctctgtcagagattcctgttgctttgctcagtttccctctcctgggaggtgcagcagagttcctctgcacagaggcactgggcttcctgtcagggcatctgagccaagcagctgtcaccccagctggctggtgctgatcacctctgaaccaggccccaggcatgttgagtacttcacatgcagcttctgagtccatcttctctgcagtctcacatcagctctcatcggcccttgccatgtgacgcattcttctagatgtgcttcatac

SEQ ID NO: 57149 - DNA, 1384 bp, Homo sapiens
catctacagcatcaaaggagggggcctgcctcgaccttagcccaatcagctctcctttcctctgctttacgggggtccatctgggggatgttctcatgcccattccaggggaggtgagcagcccctaccactacctccagctcagtcccattctaaaggcagccaggtcaggaggtaggatgttcactcttcagggaagggctagaatgggttggctagggcttcccttgactgttgagaagttgctctctccggagcaccgcgtgcctgcttctggtttgggactggtgagaatttcaaagctgcctctttctggtttgggattggtggaaaatctccccttccgcttaattgttgcccaacccccgcccctaaccccctttagcaaactgaccggggagctttaagagcagcgagtgagctgcacgcacacgtggggagggggtttgtcagtgtcgctcaggccacataccaccgatatacacggggcacagcgaggaggacccgccaaagcagcatttccttagaatacactgatcagcacacagttggctcttcctggcaccctgggctgtcagcaggcagccctcacacaactggcagacacagctggagcgtccctgcacagccggctctctccctatatttctagtgtccactctgcccagaatgtcgtggacaccttactttctgagctccaaaccggcactgatccccgaatcccccctcccggatccccgacaggtggcacgtacctgcctcttcttggagtatggacgagtcgaaccgggcacaagcatggagctgcgggtgagtcccggctggcgctggcgcggcgcagtgagcaccagctgacgaagagggctccccggcctcggctcctgcctgactctctcccacctccgccgggggcccagaagggacctccccgggaaatcggcgccacccagcgggcagccgcctcatcgcgcctgggccggcagagccacaccccgcgtctcgcgtcactgagtcgcgtcacggctattggcttgttcctactgtggcgtcattagagcccggcctccggctggggccacccaggcaaccgatatacacagagaaccacgtggaggaaaagcacgcgagtttggagcgggtggagcaggaacagaggtggactggaatgtcacacgacggggcagctggaaggtattgggaaagaagaggcgtcatgggagaaggctcggaacttgagccctggggcgtatcaactttcagtttttagggaaggctaaacgtcccccactccccttctcactgggctgggggaggtcctgttcctcagcctcttctctttttctctgctgtcaaagacactctccgctcattttactttcatggg

SEQ ID NO: 57150 - DNA, 738 bp, Homo sapiens
ctctcctcgtctcctcccaggctttacgcaaatgtcactgcctgggtgagaccgtgtctggccactttgtgtaaaaccacagcctccctgacactactcaccgcttccggctttatttttctcctgggtgctcatccctctaatacaccgtctgttttacgtgttgaccttacttatgcattacctctttcccccattaggatgtaatctctgcaagggcagggcttttagtctgtttcttcactactgtatacccaacctctaacatcactcctgtcccaagggaggtgctgagtcaatatttgctggatgcctgattcaaggcctgcggtctggaagttctccgatggtggagcggcccctacggccacgccgcggtcggccaggaggtggcgctgtgactgcagaaatggcgggctccggctgcccggcctcttctcaggaatgaatgcacctgggacttcccgcttcggaggcaacgcgctgcgggtggggggcgcggaggtacggccgtgtgcgcccccaggtcaacctgctgcctttctcatctctggcaggactccggggaacctgtgcttatttctgggctggtgagggtcaccaacaccaccctgatcccaggcccggtgacgtctgtccggggcagcctctggaagccgagtggatttggttggacgcccgagtctttcctgggccctgggacaggggtgaggtttccgtgcccgcctgctcttgctc

SEQ ID NO: 57151 - DNA, 995 bp, Homo sapiens
agggcgccttcgatttctctattcagtctgaggcgtagcaattttctgctctcccataattaggggaattttaagcaaactccccgacggatgattacagcaggttcaatcctggctcctttgatcagggaagaatgaggacgttgttggaatattcctcaacctgctggccagacaggctctgcggcgcacgcccggctctcgggctccccctggagggctttgaacttgtgtcctggcgtctgagtgtccctgggtgctggagtctccccaggagaggactgggtccaaattctgcttcatgaaggattatcccagaggtagcttctctagctttgggccaatatctgggctcagagccagagttggaagtggtctcttgggtaggaaggaaagttaaagggtcatgtagggcagtctcccagggctgctgtgaatggccgtgcaggccatacactgtgccctctaggggacattattctccctgtagcttgtgtgaatgggactcctagggtttgtgcaatgtccagcctgcacaacacaactgacagcttgaaccgcttgaatgactccacttttctaaaacggcagaagagcctcctccttagggttgaaaggggctctcctctgtttagtccatttccctcgcctgttgtgcctgcccaaggcagtgtggaagagagaaaaaagcatggcctttgcagccacagcctagaggggaattccagtgtgaatgtttcctggccgtgtaaccttgggttagttaatgaacctccctgaactttaatatcaatcttaaaggactgttttgaagattaagtaagagatggactaaaacattgcttggcccttatgagtcctcaataaatatcactcccctctcctttccctgcccacgtcacactttcctcttaaacatttcatcttcccagacaaaccctttctcctctgtctgccccagtcctgagtcccccaaaggctgtgccagatagcag

SEQ ID NO: 57152 - DNA, 690 bp, Homo sapiens
ctggcatatactaaatgctcaacaaatgctagtctcagccttctgggctatgatttcagaggtgcaaggaaggcccctgattccttcctctgcctgctaggagacacctgaaattcctttaggagaggaaaaacctttcattacacagctagcaaagcactcccagtataaacagcttgggacaggaagtgtggtgactcaacacacgttaatatgtaatttgctgatgccagggcttccgcttagagaaagttttcataagcataaccccttgcctgtgagtgcctctgaaagcactttcacatctctgacctcatgtaatccccccagcgcctatctggggagggcaggtcctggaggatcatccttactcattttaccaaggaggggacttgggctttgagccatgaaataaatagtccattccaggttactcagccatgatccaggagccaggcctcagacctcagtctccagactcaaacaatgcacccttacctccagtggagtgaagaggggagaggagtcactctagaagagaacttggggaacctgagcttaaagaagctgagtcaaccctgggtggaggaagcagagcctcccaggatggtgggttaaggatctgctctctataagctgtggaattcttaccatgttgggccttgatttcttcttttctaaaatggtggt

SEQ ID NO: 57153 - DNA, 755 bp, Homo sapiens
cagcatcctcactctggcctgtggtgcctgccctggtcctggagtcctatgtttttcaggtaggggcccaggagagctctgcaaagagctaggatcatcatctctgcagaggataaggggaagtgccatgtgtctctgccagccggccccctggtaggtaccagcacaggcctgtgtttatactgtggcatgtgatgagccctaaggatgcaggaaaacaaggaccagtgctggagctttgacctgagctgaggggacttttcccagtctcctccctgagttcctggagtctaagagttccgactgtcctcaagggaactctgggactctttcccacggcccccggccagcagacgccaactagcccagctcctccctctctctgcgtccttctccccaggccggccacacccagctctgtcaatgcccagccccgagtcctggagagcagaggcccctgtccccagcggcccgccccacccctgcaactctggcccctctggcgggcaggcacggctgggcctcgaggcctggctggagtcacaggatgactggagggcccgttccatctatgcctgctccctcatcacacacaaacatgcaagggagagtggcaggagtctggggtagggccttttgaaagacgctcaggtgcattccctggagtgctcatgaagtcctcagccttccaaggcaggtgttaggagacagctgaagacatcgagactaagtggcattcggggttgccaaggtca

SEQ ID NO: 57154 - DNA, 2759 bp, Homo sapiens
ggacacgcggggcaccctcgggaaagtgggtcatgcagctacttggatggcaggaagcccgcggtgtctcctccagggagagcccccagagctgggagcagagttccgagggggagcccggtcccgcgccaggccgggaggaggctgccccggcctcaccctccaggaaaggaaccgcaggtgagcgaggagccgcctctgccgcagcagccgactctccgcgcccgctgtggggcggtgtggggcgggagggggcccgagcgtcctgagccgtctggcaaaggggccgccgaaagagacgaagcccccccgccatactccaaacccgcagctccgagactgacgccctccccctggggctgttgtctcccaccccaagacggtgattacggtgattattttgcatttatgtaacacgcagtgtttccaaactgcttcccgagcagagagctggttattaaataaacagaacgctattacatattattattttttgtaaagaactgagcggagaaagtgctttcatgctacatagagacgtgcatctgactgcttccctgcagggcaggcggttcggcttctcaacctctttctccgccgtgccacctcccaccccctttacccaagccgtgacccaacttttctggctcctttcactccccacaatccagtcgtgcccgccatccggctcccagccccggggaggcattggatgggggtggggacagcagaggtgagcgctcttacctgggaggaagaatgcggtcaagccgagagcgagtccccaccagcgtccagcggcgcccgcaagccccatccgagccatcgggggccgggggtccggcgagaggggcggcgagggcagcgctcctcgcgcagcagaaaccagcccggaagatgagggaagatcgctggcggtcggcgggcgctcgaaggatccaggtcagctgcagccgtcggccggggcggggtgggctgggtgggatccgcgcggccgcagtccgggccccgggccgccgccggctcagaggctcggcagatgcccgccgcaagttgcacgagtcatgccccttcgcctcctccgctctcctcccggcgccggtccccgccctcttcttccacgcagagcggggctggggagagggacccacccccggcgcgcccggctgcccggttgcgcggcgcgggctcctggccccggcccgctcacaccctcccgctcggctccaacttgcaggcgtccatggccggccgtcctccgagggtggcgggacgcacccgggcggcgcagaaggctcggggcccaggcggcgggcgcggggctcggcggtcggcggcccgggtggctctggctgcgcggccgggcgcgaggagaacgggtcggaggcgccgcgcgtcccagccgccgccgctctgccgggtgccggcgatccgcaacaatgtggagccgcgctcgctgctctcgctctctttctctcactcgccgagctccagcctctcacccgctcgcccgtgatgtcagccagaggggaggggttagcgttaaccccctcctggcctcgatgcgcgcccgccggggcccggtcggagcccgagcgcacgcgccttcccgaccgaagcagaggcggatcgcgagcgcgggctgcggggtccggctcaggaccctcgctcgggagctacccctcggccgccttccagctggggagccggctggagcgcgggctgccctcctcctccgctgacaaaggcaggcagtgacccctagcggccggcggcgccgaggcgcggcgggtgggggtggagttaggaccgggccgggggcggcggtggaggagagggcgggatggagaatcccggctagcagcgtgggagctggcagggcttctgcaagccctctgctcccaccctggccccatttcacagacgaggaaacaaaggcccaaagaagagttccgcccgggacggaacgtggcatagctcgcaacagaacccagtctccggagatccctctcctctgcaccacttggacgttccacggagaggcagcggtgcgcggggcgacggggagctgccagagaagtcagtggtgggcatgagtgggtgagacgggcccactgaggtttctggtagagtttcttttctaatccctgctcccttcgggggttccttttccaaaaattgaagcaccccgcgccccgcccttgcccaaacatagcctgaaaacgagctctcctccagtttccaggaccttagttttgagagatttgtgggattcccgcgaaagtggatcgtccagtcagtgtccctggcagggcagggactctccgccccatcccgttcaccacccactacatccgggtgtggtaggatttctgccaaggcgactgcgccctccgggccttccctcttccccttactctggtcctcctatccccatcccctccccctgggggaggaagacagacagagtttcccactaaggagagccgaattctccccagaccctggccggacactgctccctctaccctttgcccagccctctaggcgggcaggagcagaggggaagtggctgtttctgataacacgtaaattctggttcctcactggagaaggggcaaagacagcgccatattcccactgtctggaatccggccctggagtgtctcggtttctcgcggaagtagtcagatctggcattgtcatgaacactcacccactcactgtatggtcttttacatttaacaaatgtaacctgg

SEQ ID NO: 57155 - DNA, 789 bp, Homo sapiens
tggttagtggctgctgtatgagtcagcagagagggccagggttggaggagggttgagggggctggagagaaaatggagcaggaagaaggtttctggtgcccggggctgtatttccaggctccatgaacccactttgttcaacaatcgagggggataaggtgaacaatccctcagtctcttgagttcctcttatagctcccagcagacaccccaccttcacattgagagctgtagctatgtcgttgtacgattcattcattcttttctttggcacatattgcttgcttgctgttgctggacattgtctgaggtgctggaaacagtgtagtggacaaatggacacaggtcattgccctcatgtaacatacagacttggggaaggcacagataagtacacagagattgtgacaccctttgacccgtgccaccatgtgttggagggagcacacagaaaaccccagaatagctcgcttttctttcctctgggtgtcctgtcctgcatagcctcccactatgcattgaggtgacatgatttgcttacctgtctcccccaccaaactgcaggcaacttggcggcatggagcatgtgatgtttccctccaggtcttggcacagcacttggagcatagcaagtgctccaaatattggttggctgattgaatgaaccccagctcaggaagcaactggctacatgttttcctagaacagagtttggcaaactgtagcctgggggcaaaattctgcctgtaaccagcctattttgtgtagcccttaagctaagaatagttt

SEQ ID NO: 57156 - DNA, 545 bp, Homo sapiens
gagacaggcctcacagcgcacaatccaggctgcccttaaaagggcttgaaaaccagatccaggtgcccagaagagaatagtctctccaaggtgctactagtcctgcccttagtcctgcccccatctttctctgatatccctgtggacagcatgctatccaaatttctggcatttaagctgaatccagcctcagagccagcttgctaagcctcagtctgaggagctgcattctctgtgacatcatcctcctcggctggctctcaaactaggtcagggcctgctggcaggagccggctagcactgactgcccagcagcctgccacgcggttgcagcttctgggtagacagaacagcagggctgctgaagttgatggggaggtaactgggggtggggcagggcaggagaaggtctaatactgaggccagagcaggtgggaatgtcttccttacctcccttgctcccatgagttaattattaatagctcatcagccattcgtcctttcacttgcttattccacaaacaggtgttggatgcatgccttgt

SEQ ID NO: 57157 - DNA, 773 bp, Homo sapiens
ggataaagtagaccacaaacagcaataaaacattttaggggccatgctaggagaaagccgggctcagtggaggtcggtgagaacagtgataggtttgaccagggctggggacaggaaaaggctttacatggagacggtgcttaagtgaaggaggagaaggatgttctaggcctaaggagcagctcagaaagatcccaggggcttgcctgggaaatgaggtgtgaggggctaggcaagggttatgcctgtggcaacaggcaagctggccaggtcctgtttggcttacaggaaacgctgagaagtttggactttactatttagggagctaccagaaggttgtaactgggggaagtactgccatcaaatttgcattttggcaagataaactctggcggtgagtggagcaaaggttgtcagataggatcgaaagtggggaaaccggtcaggatgctgtggcactggccccagcaagatggaatgtgggcgtccacttgcagaggtcaggccagaggccagagcttttaggaggaagacttgaccagaactgacagatgggctggaggaaatggaggggcaggcataaggagctcccccagagctctggcctggactgggtggctggtggacaggtgggagaacctcattccagctggctctgatctggccgcaatcgactcctggcctgcaatcacccccagggcctgggtaggcaaggctgggatgctgcctctgtgctcagaatcagccaggctgagccccctgggcccaggatg

SEQ ID NO: 57158 - DNA, 698 bp, Homo sapiens
aaccccaacccttctgcacacttttatccccctcacccccttctcctcccccaaagaatcatatgctgtgtctggagagcaatcaggggtcctttcctttggggtattcacgtctagcagtcattaacaaggctgtactctcaaggccccgtgcaacgcctgggacaccgggtggggccttggggaaagtgcccaggcttcaggccctaaagggactgggtggaaaaggacttgacgatgttgtttctcaggttcagaggttttctgtgagatgattcagttgacctctgaggggacagcatgactcagaagaagagctgacttcaagggagctggtgagtcacagagacactgtgtcccaccgtccccagcccagctcaacaggccaagtccagcctctgggctcagcactgctcagcatggccatgatgacaggcaagtcctccctccaggcatggctgcagttctaggtcacgtctgctagagtctgcaaagccaccagtttggaatctggcccatactagtggcagcatccacacagctgctgggctgggcccggcaattagatgtagatctgaacgaaaccagtctctgagtttgatggacaacccacagagaggaggcatttgtggagccagtgcccaggatgtccctgctctggaggtctcttcctatagttgcataactttggcagcaag

SEQ ID NO: 57159 - DNA, 1262 bp, Homo sapiens
atggtcacagcttacccatgatgtggcacatctggtgggagcctcaggccgggaacaccctggggtggggaagggatctctgcgaagggagggggtctgcagtccaacaagtgatggcctggggcggcttcagggagtagggaggggctggaccgacgcccgaatcccacatatatgtgtaacgcattggagtctgcacttgcgtgaccctgtcaccgtcacctcctggacttctcaggaatctcctggttgctctctgtagggcaactccagctcactccaagtcaccctccacccagcagccagagggatctttccgaacataaattccctctcgccaccacctccctccttcacaccctgcccaagtcccttcagtagagagacccaggcctggagactgtacaaagccctgcaaagtctggtcccgccgccgcaccctcggagcccagcgcggagagggcgcttagtgcgtgagctaccgtcgttccccgcgactcagccgagcggcatccgcacaccctgctagcctaggaagcgcatcgagggagcccgctcaagctgaagcgctgcacgagctgtgtcttccttctctccgccgcgaatgcgggcaggatgcgagcaaaagacccggcaaagagggcgccgagggggcgcagccggggcgctgggcggacccagaggggacatggagaggaacgcggaaggtacgcggtagagacggggaggtggcgcgaggcgggacatggtgagcgacccgaggggcgcgcggactgggctcgcggacggggctcgcggacgtagagcagtcgaggcgcggagggggagcgcgcccccgtgtggccaggcggggaggcgccacggccggggccgtgggggcggtgggaagcgctccgcgtccgggctctcagcgttccctggcctgccccggctcgctaggctttgatggctgcttccgctccccataaaggcctgtttcatggccgacgccggcatgggctttacgtctgccctcgggctccctgcgggctgcagagggcagcggtgaaatcccctgtccggccaggctgttcttgctctaaagggaggcccaggagtgtgtgcgggcggcgtgctccgtgctgggctctgtgccgagccctattcattgcatatcccagtttctgtctctgggtgcgtttccctggccctggccacttcccctctttgagcgtgggcactgtgtttattagttcatttcccatccccacaccaagcactgc

SEQ ID NO: 57160 - DNA, 663 bp, Homo sapiens
aaggaagggaaggggagaggaggaagaggaggaaaactggagaaagagaagtaatgaggaaggagaagaggacgacacaggaaagatgaggaggaggaggaggaggaaggtaaggaggctggggaggatgtggcaggaggagggagaaggtaggaagtagaggagaaccattctgccaggctaagcccaggggcctagagtactccagaggcccttgaccttcccagcctttcccacagccccacctactgggagaagccagagaagcaaaggaaccagatctttgacctgcagcctgagaggaaggacactgttccaactttctgcagggtcacccaggagcctgctcatgagcagtcagcacccaggcgacaagcccaccttcattcagcctctttctcctgcaagaccaggctaggaggacacaagagcaggggcttcgagtctgagaactgaggagaggtggcgggtcccctaggtacttgccctagaaccttgggcaagccagcagcctctgtcaaatggcaaggatggctcctcttccttgggttcagggaaggagtgtcaagtgagaaggctggttgctcacaggggttctgtgcactccgagagccctggcacagactccacatggtctccaggggctcactgcttgcctgcttg

SEQ ID NO: 57161 - DNA, 4028 bp, Homo sapiens
gggagaggatgggggctccggagagctatcactgatatctactctacaaatgactgaggaggagaggtgtttcctaggccgccagccagaactctggctatgagatatgccgaaaagatttaggttagaaatcagaatgacagccgggcatggtggctcatgcctataatctcagcactttgggaggctgaggcagaaggatcacctgaggtcaggattttgagaccagcctggccaacatggtgaaaccctgtctctattaaaaatacaaaaattagctgggcatggtggcaggcacctgtgtcgtcactatctccatctgtcttcagaaccgtcctgcttctccctctctgtccccacttcttaccctttggctcctgtctgtttctcctttcgctcttgtaacctcccttcccagccctcaccactgctccagcctcttttcccaagtcctgccttggcctctctgcctctccctccctcccctttcctcctctgctgctcattataaaaaataaatatttctaaatacgccaaaaatgcactcatcccccaaggacccctgtctagcacaaagggctggttctttctggctgctccctgtggcctccttcttgcccactgcctttgaatcgtggcctcattcacatgactggaagggctaacagggcattttcccacgtgtccgggtggggaggaggacagggtcggggtggtaagttggatgaaggagggtggagacaggcagctgagaatcttcccaaaatttggctcatcctcaggggaaacaaactgcttacttgatatcatgactaactccttggaacctacaggatccattagcgatgcgggaaagattcgggttagaaatcagaatgaccatgcaaaccatgaggacagccaccatgtggaatgtttggtccccatggcacaaagatttgggcttcttcctgggatgagttgggatccctttggcatggaggcagagggggggctccgtgattcctgggagaccctctggatgtgagcacctctgagattctggagggagcccagggctccctgtgctctgtcctcccaccccacaccccaccctatgctctctgctctctggtcaagtccctggtccgcgggagcactgacctagagtgtggaagctcctccccttgaaagctgggctgaccttgcttcagctgagtccaggagaaaacacacatctgacacaccccagggctgggggaagggaggcaggagcagaggaggggagcatccaaggtcctgaagttccagaaggagtccagccttctcacagagcctgaagcataggcatgggcagagcgggtgccggacctccaaatggctctccctctgcactgtggaatcactcccgcaggaggcaggtggtgggagaaggccttggcctcagcattcccctgcccttgtgtcctcctgttctgaatttcctaatctctttcctgcatgtcccctcaacaacctcccctcccctcccttccccaccccacaccacagcagctgggctgctggaagtcgggagtgtttatgagttaatcaaaaactcctgtactttgctcttgaattgaggccatcattcctttgtcccagggcaatggggtcagtttgatctctcctggcttaaatagtgtgtagcaaagtaaaagggaaaagtgggggaaggagaagggaatttaaatttatcaagggccccctgctaaacatcacgccctgggctgggtgctctgcagagaccaagctcacagccgtgctagtagctgggtgtttccatgttacattgaggaaaccaagttgcaaagacttaaagaaacctgcctcagatctcataaatatgaaggaaagtgctttgaggcttccagtagagtttggagggtgttcctaacccaagattgggttaaaaaattccatgattgtccacagaatatggacagaaagctgagaatagctgtgatgttccagcttggaaagaagtggggggtgggaagggctgagaggaggcaggggctgcatgcagactgggctcctatccagaggaagagccccaagggggattgggaaggcttgtgaggttggaaattatggatggagggggctaaagaggaggcctagaactccccactccaagagccctggagaatcccggtctggcctgagaagatcaggagtttgggataaattgctagagaggccttgtcctcatgtgggccaagtaagcccttaaaatgggtgcccagcaaagcaagggggtctgaggtggcccagctctgtccctgctccccacagacacctgctaccctgggcatcctacagctgcactcaatctgcccctccttccttcctaggccttaggaaatatctgttcattttgtttctttccactttctctctccccttcttcctgtctcccttcatctgcctgctcctccccaatctgtcctgaagagtacatttctttccccatcagggagccttgtgggaatctggggggcctggggctgaggaagaagagacttcagatccaagagcagccctgaaggattgagggaggcagaaggggtgtcagccactgggcagaggagttcctggcagcagggagggccatgagataattagccctagagctttctaggcctctggaaagatgtggggtacaggaacagaagggaaggaagaggcaggtcaggactgggggaactcaggttccctggcctgcctgacagagacagcacatggtagagttgagaggggagccagggtcagggacagggcaggcaatgggaaagaacagggacattcccaggctcaggagtccccaggtctcccaggggagggtagtcctcgcctgaggttaggtggcgggccccgactggctgggagtgggtttctgtacgtggctggaggtgaatcacaccttctgtgtgggttgcatgtttatatgtgggtgtgccgagtcagcatgcgttgtcctgcgtgtctgctggtgtatgtaggtgttactggtgggtgacaggtcaagggtgtgccctggtgaagcgggagggtgcctgtgtgtgtctgtgggcctctagacctgaggaaccatgcttgagtttgttctcagaatgtgctggcatatctgtgtgccacgtgtccctttctctgtctctgtgtgtcctactgaaatcggctgtgtgcaggagtgtgtctgcgtatgtgggtgtgtttgtgcaggggccagggaagggttattcatagaagcaagaactgactctggtgggacactcgtgcagagatggggaggcacgttgggtgggtaggtggggggcaggcactgtgtacaccaacgtgctccgaattccagcaaactccagtgcctgagtttccagctgtcccagctcaactgtgcacagatgtgtgccgctttgctacagccataaacagacctcccaggatttttccagaggaaacgcagaaatattttggtgtctgctcttggtagtaggaaagagagtggggatgaggcttgaggctagggcttcgaaacagagggaccacagtcagaggggagctgaagaggcaacagcatcccccacaggccagcagggtgggggaagagctgtgatggcttccagttgtggggtcctctctaaggccccagctagcagctggaaagtgaagtcccagttgccagtgtaggggcaaagaaggaaagcttcccccttcaccctctgaaggtttgcagaaagtgagctgacaaaaagcagatcaatagaaaaaagaggtaaacggatgttatttaacatgcatagcacaggggtatggcgggagaatgattacccgataacccagagaggtccaggtgcttgtaaacccttctttatagtggaaagagacaaggtgttacaggcataaatacttttatggtgggggatgaatggagccaggaggcaggcattatcttgtgaatgattctttttggaaactgaatgggaccagagaacaaacaatagtttgag

SEQ ID NO: 57162 - DNA, 1155 bp, Homo sapiens
gacagagcaagactctgtctcagaaaaaaagaaaaaaaaggaaaaagagattttcctgatttgctagggtgcattcggtggtgccacgtctagacagctgcctcctaccccaaagagtatcttctcagggaaggttacattgtctccggctcctgtactcagtggaagggccagcttcctctgaggagataaaagggttacttttgtttctacttctgtaaactgtaaatatgtgctcagaatctccaggtgacaggacaagccccaatgctccacttttggaattgatgccaaagcttgacggagctgccaattcatgcaagaaagtccaccggcaccagacggggtgctcttggcttgtttccagacctgctgcccttccccagctgtagttccgggggcattgcccctcaggggaggactggtaccaggcgcccctctgcaaatggacacaccaacggtagaactggcttgggccctccagagacaaagttcaggaaagatcctcctcccatgatcggctccagagtgctccagggctggggcctgagggaggagctacgaggccggcttgcggctgtggcagcatgctgctgaccttgaactcaccttgactaccaccagagcggccccagaggcaggcaggggccagtcctccgctgtgttgggaccagagggagcacacagagccagagaagtccagagtcctcacccttcactgggacaggatgggacctgggtcttgccaaccagcttgggcaaaggtaaaccttctttgtgtgccccagggaggctcagagccagcagtccccactgtatggggcctgtgcggggagagggttcagatgtgcctcacggctgctgctggccgatcccaaggtcttcttccaccagaggcacctctgcctccttggccagcaaaggttgccacatgtggccacccttccctgcttcctgcctccccccatttgcaccccaggtgtgaacactcttctcatgggtgtttacatgcctactcgaacaccacaggcaagtccttggccagccagctcctttccaccctagaccccacaggtcagggtcagggactccccaccttttatacagtggggagagagtagaacctgtgctctcaaagtcagagtgggcctgcac

SEQ ID NO: 57163 - DNA, 5736 bp, Homo sapiens
attggatctgtactatatgccaaacatgttgcgaaatattttatgcacaatgtttcatttaattttcaaagcaacccagtgagggagaaacgtatgcgcccattttacagttgaagaaacaggctcactgacgcacagctcatgactggggccgagctccaggactgagatcctgatgcccattttctgaaccactactggctactgctttccaagggctagagatgagaaaaaaaaggaaattggtttatggtgtggcagaggtcttgcgatgagacatgaagaactctctgacaatgagggctgtttggttgtagtcggagtaattaggcttgttagagctcttcctctgacggcctttacatttaagatgaatggatgcttctatgcccggatggtttgagggaaacgctgtctgttcccagcacggggctggcctgtttgaactagctgacggcttcactggggatacaggattgccacacgcgaaaccgttagataacaggagaagatagcgcaggatgtgagccccgagtgggactggcagaaagtgagggctaccgacaggcagaggctactgtggttcaaagcaagggctttgtggtcaggcgggcagacttgtgtttgagtcccggctggctctactgcttttgtgaccttgggtatgttgcctaacctctctaagctttggtttcctagtcagtaaaaagagcctaagaatagaacctactttggagggatgccatgaaaattaaataagatgatccatgtaaaatgcttggcacagaacctggacataatcaaaatacaatgggggaggagctgctataataatgactattgttggagtccagaggccggagacagtggcacagaacagagggctaggtcggtggggagtcgagaaagtcttcctgggaaacctgagttttgtcctggagcttgaagaggtggtcaggtgaaatcaatagcaaggcatagagatgtaggtaggcagggcttatgtaatggagtgagatttcaaatgccctatcactttcaaagaaaaatctggtttgatctgtggttgaagtagagaaggaagttgactatggggaagaggtgggaaagagatgaggtcttccatccttgtttccaaacccaaaatgtgaacagagacaaacctcagggacctaaacaagaaatctgacatccagggcttctttgcccacttctgggctgttgtgggaggagaaggggtaagagcctgggaaatggctgagggcagagctggtggcggatggggacaggacctgaaacaagggaagttaggaaatgtgggcgaggcccttaatgactgtgtgggctgactcatgtgggagacctagcttcaaggccgcatggagatccagcatcctgtcaggcgggaggccaatttcaagaccctgggcatctctagtctaaacggttgccagctaagagtgggagtccttaggggagcaatccttgtgctaatccaattattccctaacagcctgccttatctcccggatgtgaagatgaactccttaggagccaggttctccaggaaggatgctgcttgtttcagatgctctatgtttttgttttgttttgttttgttttgttttgtagagacggagtcttcctctgtcacccaggctggagtgcagtggcgcaattttggctcgctgcaacttctgcctcctgggttcaagcaattctcctaccccagcctcccgagtagctgggattacaggcgcacgccgccacacccagctaatttcttttgtattttagtagagacgggatttcaccttgttgcccaggttggtctcgaactcctgagctcaggcaatccgcccgcctcggcctcccaaagtgctaggattacaggcatgagccaccgcgtctggcccagacgctctatgcttaaacatctgccaaatacctgctgtcaaccacttatgtcgagcatcatgtgggccttgtcaaaaatgctaatcctcagttcttttccctagaatctgattccatgggtttagggattcgggaatctattttctaacaagcatccaggtgattcttcaggaaaggcaaatttggaaaaggctgacttggtagtctcttaaattcccttcagtcctaaatctaggcagcagagagcgggtagcgggaagggcccctggatgatagcaagaggccgattctagccggaccctgcagttcacatggccctgtgctggggaagccctagaagggaaggaggctgcagagaagggagttttcacccatcagtaatcaaggtcccaacagaagtgaaaatggaagtcagggaacaattggttttgagcatcttcgtggggctttttcccttgcctgggactggcaggacagtgtaggtctgagcagcttccacgatacacacggggacacttaagcccaaagaatttttaaaacgtgcctaaattccacaactaatcagaggaggcagcaatccagatctcctggtcttcacccttcttattgttggggtgcaccgcagggcacgcatgtttccttgtggcttgtgggaaagccactgtcgtggagcgccagcgtcccgagtccctggaaattctcccaagtgacctggaatccaacatttccctggattttcatagtctataatagagagaaagaaccgggtctgcggtggtgggcaggactgaggaaaggccgtgaatgcgggaagcacgggaggcaggactgaaaaggaaagaggcacaggggctcacaaaacctgagggccgcgtcccagtgggtgacctgacccatcaaggtctaacacctggccgtggcaaagctgggcgagaacccccgatccaccctcccagtgtggggcagggaaaaggcagagtgcaaagcgaggtctgattttgcagaagctttttagaaattcgctgtcagagaaactgaaagaccaaacaaaacccctaaaaatccaagcccgattatttcatccacgtggcacaaaagcaagccaaaaaaaaaaaagcggggggggggggtggcggtgcagggcgggggaagagtcacccgtcctgcccctgctggaaggaagggatttgccccgggagagcaaacttctgactccgcctgggtcgctgactccgcgcggccgggcgggagggaggtcgaggaggccgctcgcacaaagccgcggagccgctgccccctctccccgccccctgcccggccaacgccgaagtgcggagagcagccgcgggccctttaagggccgcgaggtgcgcggtctctttaaggcgggtcctggtggtttctgttttctgaaggaagtgacggggggtgggattgaatgaaaagtgcaaaacacaggctcgcagcgctggagcccggggccgcggagccgggccggggcagcgccgtctccgcctcggggccgccgggggcgccctgctgagcgctacccacgtgcgtccgcgccacctcgcgggcgaccccgcggccaaggcccccggcggagcggctcccgggcgccccgaactagcccccaactttgggcgaagtttgcctgcgcctctccccgcccccacgcggcgcgccggggccgcggacggcagcggcccccggggatgcgccttcccggggtacccctggcgcgccctgcgctgctgctgctgctgccgctgctcgcgccgctgctgggaacgggtgcgccggccgagctgcgggtccgcgtgcggctgccggacggccaggtgaccgaggagagcctgcaggcggacagcgacgcggacagcatcagcctcgagctgcgcaagcccgacggcaccctcgtctccttcaccgccgacttcaagaaggtgaggcgccctcactcgccggggtggcaccttcaagcctgagccccccgggatcccaggcgctctcttgcctgcagacggaaagacgggcccaggagggagacgcagctggcccaaggtcacgccgggctcttctctacacctctttgcccactccccagggcccaccccttcattctctccaaagaacccctctgcttccctttctcactccctcctccagcgctcccagagccccccaggtgctaaccctcctccagaactcctactaacgactggactcccttcttggagtcattcccctgtgctctagtgggaaagtcctaggcgaagtgttctcgctgtgggctctcactgtgggttctccctgtgtgatctagagcaagcaagcctctttcctcctatgggcctggcttctcacccctgtacagggcactgaggggtctgcgaggcctcccagccctgacattttggagtccctctgtcacctctccctctgtttcacttttctggggagagctggttgcccctggtccctctcaagccgggagaagccctgtctcctctttggtctggaaggctggggcgcttgcagcaggaggatcctggagagagaccccagctgaggccccctccctctgggagaagtgctgcccttcactctgcctggcagagaagcgagccaacccccctattttggcccagattagggttagggagttagagaccagcccggtgggtgggtgggtgggtgggtgtgggtgtgtgggtgtgtgtcccagattacggtttgggagttagagaccagcccgctcttggtgtgtgtgtgtctgtgttggagggaataagaagggccttgcacccagggggctgggggattatcaggaaatgggcctggatggtgagtgactaacagtgacccagcagcaggaaagctggaggaaaagagggtgggtaagtcttaggtattcaaaaggagcgttctgtctccttcccccagctaaagagaggccctgtgaggctctgtccctgggggagtgcaggggtgaagccgattagatagctgggggagcccggggccccggggacccttgctgaagctgcctgtctttcctccctcgtagagacagggcgctttagaggagaggtggcggagtttgggaagtcagttagggacccagccagattgccatagttagcaggggtgaggggttaggcttgaccgctagaggtgggtggggttggggggtgaggcttgaccgctgattgccccagggccacggagttggcactgacattggacataagcaggcagatggggggtggggtagtgagcgttcacaaatgggaagactttgtagcccatccttactccgcaggcctaagctaggcaccctgcctccccacctaaaccctaggagaattttatcaagtgtgttctgttcctgaaaaatctatgttagtggctggatccatcaggaatcggggatctaatcttctgtccaagccctttgtccttgaaagttagccttaggccaggctgtgaggctcccaaccccctgcccactggatgtcatcttgtggctgcactagaatcctgcagagagacttccctggctgtggccaggacagtgaaaggcaatgggtagggctgagcttttatagcctttagctacatctggaaggtttttattgctgtgatctgaagggagaggctaagaagtacccaggtagctgtgatgtgctggcagtagtggctgatggcgggggtggggtgctggggattggagtgagggtatgctggtcatctgactgcccagttagaaaatgcatctggagattgtgagcacctcatttgaatctctacagtggt

SEQ ID NO: 57164 - DNA, 1337 bp, Homo sapiens
aggtgattccagtgtgcagcaaagtttgggaaccactggcgcagttgctctaggggaggggaggggacctggagaaggagccagctcaggttaaatgagggtagggcccaaactcagtcacatatttgaaacctgtcatcttacccacactaatcctaatgtgttttgagcagcacatatacttcgggcctaatgctgtgtgccctcagtacacaaactaattcacagcgcgcccttggtgggcaacactctcctttatactccacatcctatgggtgtaattagccctggatgtacataatcactggcatatctaatcataggtgtgtcaccatcccctctccctaaactggctatttgacagcccttctggtctacctcctggaagctggtattcttgccagtttctctttcacctctgtcccctagtccgagtggccaaaagctgggaagaggatgagtcacgctccaggctgcctgccttggggctgaccggatggggagggtgatactgacagatatgaagaaggtcatgtgtgatggcatcacggtggtgggcggtgggggtccctttcccctcccagcatcagggaggatagggagacacagactccaaaagtgtggaaggaggggatcctgaaggcccacagctggagccctggagggaataagcaagataaggggaactgtacagctgtgtgggtcagctcagggccgcttcgaagggacaaggacccatggaggatggaagcttgagccctgtcctgggcactgatgagtgagtgggagccagaggaagggatagtccaaagaatgctagggcccctgtgccggggggcctggtctgtgggtgggggagcaacatgggaagccttgaggtgcagtcagtaaagatgtggaatgtgcaatgtccacgttgccacctaagaacgtgtatcccaaggagatatcacagcacatagatgtgggaccgagaagctttcagggcccagtctgcccctaccctgtctgtgttagcacccttaagatttggcgtggaagcatctgatggatggaaagtctccttggggaggaaaaggcagtggaggtgctttcgggagaggcccagacttttctggagctcagagcatttcctcacaggtatttacaagaagtcgccagatggaatgaccaggctcactgacatggggctcctgggtctaatatctgtccctcctctgcgtgtgaggaattcctcctcagatcaggatggccagccctgcctgagggttcagaccccctcccgggagcttggccagcatctcccacccctgaatgctatgtccaggtggagtcct

SEQ ID NO: 57165 - DNA, 472 bp, Homo sapiens
taaagaagataaaaataaataaataaaaattataaaagagtaaaaagtcggtcaaacgaatcataaaaataatgcagagggttgtcagaaagcccccaaacttacacccaaagggcttttctgctatcacgcacttcatttttacaactgggaggttgggagtgccccccaaagagtctgaagggcaattgatccaggaagcagatgaaagggtgcgttttcttttatgatggcgctggtttctgaaattaagtgttgcaggaagacctggcacagattctaacagatagcgcccaggttggaggcaaagcacatgttttcaagctctgtcatagctgcctctccttatctctcccttgtgcataatgagtctacagaggaaccctgccacttgcctccaagatggaagtgggccaagctgccagaggctgttctaccagcatgattttacctccagtgctccacgttctcc

SEQ ID NO: 57166 - DNA, 880 bp, Homo sapiens
ctccagcagcttgtgctggttcccggccacttacagtctgtatcccagttcctgctatctcagacccagcctgggcagcaaggtaagaaccctgggggtttccacctagaccaagtccagtcaagtgctgctgttgctgctgttttttgctgggtgagggggcctaattggagagcatgcgtcagtcagtcacccatctgctattaagacctacttatccaccccagggtctgaggaagggaccctggcaatgctcctccaggcttagtctccttctctgcttccccttcccagcctcctgttgggtggtctggtccacctcctcaatttcgtggtgagtggagacggaaggtgcaggcgtggagcagagctatgctgtacaagggaggggaagcgccctgggaaatgcagtacagacaagtcccaattccttggaaatctctcctggacacagattcagacttgcttcctggaagcctggctgtgattctatttggagagagcagcagtgccacccacaggttgtagaaagggtgttcaggttttctttggcagggaagttactcgcagagaacttctccctggccaagagcaaatagattgaactattaataaatagctaacatttcttgagcatgatgtgccaggagctcttctgagtaatttttctgacattcctcaaaataaccttgtaaagtaggtagttctattatgcctctggtgacctactgggaagttccagaaccgtttagctgagacccatactcttggtcatcacagtgtgctgcctgtcccactcccatctccatcagctagggtcaaaagtgatggagggttggccaggctcggtggctcacgcctgtaatcccagcactttggg

SEQ ID NO: 57167 - DNA, 1402 bp, Homo sapiens
tggaatactgtaacttctaattctcaggcctgagcactttcctgctcatcaattcctgtttcacgacttaaattcaagcacgagggcaagaacgatgtcttacatcccccacaatgcctagtaagggtgcaagtacttagtaggtactcgataaattgattggatgagctgtcccattgaggggaggggagaagtggataatgatttaaacaaacaacaacagctaaacaagagcagcggcctccaggtctcacgtcaccgctagatccctcttgacccccccgccagagaaggaggaccctcccgcgccctttcggagcgtcggtggcccggctccggctctgcgctccatcctcccagccagcaggtgcccccagacccccggctcctcctccgccgccgtcacagcctcgtcctccgcctctggctcctccgcttcctgttgccgcgatccgggccgggagctgcgggcgcccgggcgcccgaggcttcccggtgcgctccgccaggtaaccgctcggcgcgaactgcccggccggggtgggcacggggcccgcgcggcccattggtggggaaggaggcggcagagggcccgggctcgcctccgaaggggagcgggcctcctcctgcctcggacgcccgaggccttcctgcgccaggctgcggcgccagcgggatgcggggataacggtgcctggctccggctcttggtccgggcgtggccgagcgtcgcaggcaccgccgcgcggagatgcgatcgccgtccctgcgaggccccggggcccgcgctcgccgccagccacgcctgctccaaggctcctcctcgccagtctggccctggaacgggagaaaccaggagaggagccttggacctctgagccgcgatggccttccaaatgcccttccgttctttggcaaaaaccaagagcaaaaagccgaaacccacacagggagttcccaaggtcacagagttgtgtctgccatttacgaatgtctgttcttttatttaagtgtttgtaaatgggctactgttttctctgttctgccaaggaattaggattcagagaagaagactctaaaaatactaataggcatatccaaatgagctgatccgcattactggccagtgaccctggcctttagaaggagataagggagggcagttctcttcacctgggatactttgtatttctggcccttactctgagaattggccttgatgttttacaaagtttatctcagaactccatgtcagaactggaccggactgtagagttcttcagtcctagtctctttctttcctttcccttcctccccttcctcttccttcttttcttttctttaatttcttctttttttttttaactgtggttctagaggttaaagtgatttgcccacactc

SEQ ID NO: 57168 - DNA, 1238 bp, Homo sapiens
ctctttcaataaacacttatttctgctttccatatagcaatttatctaagtttaccccatttactataaagtgaggggcttacaggaagagacacgcctttgacattctgaacattagatcggggaattgggtcgcttaaacagaggggcataggagggtgagagtgaaactggcagtgagggggagggctacttactgaacctcctataccaactgtgccagaggtgcccaagaccactgccaggttctgtaattctctgggaagactcagtggactcagcatatagtcttacttatagttttgatttattatagtgaaaagatacaaagaaaaatcggtaaaaggaaaaggcacctgagacaaagtctagggtaaagcaagcacaagtttccagagtcctctcccaatggaatcacacaggatgcacttaattcccctagcagtgatttgttacgacatgtgaatgagttgtctactggacaaggtcactacagactcagtgcccaaagtttttactgaggacaggtcatctaggcaggctttccctggcagatagcaaaattcaagactctcaaaaggaaagcaggtgttcagcataagccatattgtttgcacaagcagttcagacacagtaagccagtcttatcagttaattgtgggagcccctccaaaatctaagttcccaaatgccggccagtggccaaccctgtaatcaggcctctccaaggatagcagtttaggcctgctatgttaactcttttctgcacaaaacctatagagttagggctttggatctgagatgaatgaagtgtgggtagatttactgagtcctgttatatgggttctgccctaccaggaaaactatgccagttctcagggcttttgtgcattaatctcctaggcatttgaggctatgactaaattccatagggatttatcatgtggattccactgtgcttgagatggcagtttagatttcagctctgctgtacatattgcaaactagagccaaagactttaaagtgtgtactggcctcagggggatgaggttaatttttttttttcattttagatactttcccttttagtactcctcctacttttcttatttttactaaaaaggtaccactctatgaacaaactaataaaacaaggccagtcttggaaggaaaaaaataataattcttagtgtgacagtctccaagagaagcaagaatataagcttagaacaagggg

SEQ ID NO: 57169 - DNA, 4000 bp, Homo sapiens
gtttggggataaggtttgcattttggtcagtatatatatgtatatatgtgtgtatatatatgtgtatatatatgtatatatatgtgtatatatgtatatatgtgtgtatatgtgtatatgtgtgtgtgtgtgtatatatatatatatatatatatatatatatatatatatgaatgggattccttccggttgcatgtaaacactcaatttaagagtcttcagggtagaattgtcatgctagaatacaccagcaggtggcaatgtgtcctggtctcatcattagggaagtgccttggctaatctgcttctattctttccaaaaataaacattacaaaattagttggctgtgccttgaacctaaaaaatcgagcaataaagagtcgtctctggtctctgtttatcttttcctttttttcccccccgttctaactaacgtcagcgtgagctcatgcctctattcggggataatgatcctttcatgaactgttgcggaatgactttttgcaacagcattgttaagaggtaattgtttcctctctccacatccactgtttattagatttgatttgctacttggattccacaaaatggctgaaatcccttgtcaccaacataggtttaagctcaaaagtctgaaaatagttggataaagggaatagccactttggatgtttgcaggcagaactgaagaactgtattacatgtggtacctaaattgccaaaatactgaattattcaatcataaaactagatgggtatctaaagctctctacccagtaggggaaaaaaccgaaaaaccgtttgggaatccttcagagagaaccgtaatgctatttactggataaatatacttcattttcttctcccagttctttccacaacacgcttgttaagtcgccatggaaagcaccatgctttatcaatttggcaaataacacatttcattttgccaaggcagaaacagcctaaaagtaatatttataccgagaaaccctggctgcagtccccagctgctctcccgcagccctgcgcctccggctcatgcagcgctctccccccggagccggcaggtgcccaggtgagcggggcctgcggaggcagcgaggggcgccggccgggaaccggcagaacgcgtgcagccagaagacaggagagataatacattcccttaagtaataaaagtttccaggacaaggggggctggtaattttcaaagagcctcccggcacgatgtcctcgggatctggggggcgctctcgggcggtctctggtgaaagtcgacttagtacaaactggactcgaaggggcatgtctcggcactcaggggcccaggcgccgcgggaggtgggtgggcctcccggggctgcacgggtcccacctccctctgccccgtaggactactttgccgctctcccaaaccgggctccggcggaggcgtccgttcaagggcgagagcgcggccctgagcggcggagggatcccgggtgaggcggcttcccgaagtcagaggggagggggccataaagtcggcgggggacgggaagcgcgagctcgcgccggacgcggccagggccgggaaaccagaaccggaaccggaacccgcgcgcgcgcccgcggttgcgcggcccccacggccgccggcctcctccgctgtctgcgcgcgcgcccgcgagggcctccagaacccggcgagccggccctgcgccgggagacgccgccgcctccgcctcccggaccagggcttccaggccgggccggacgggcatctcccgcccctcgcggggagcgtcggggaggagccgccgcctctggcgattgcggaagagtccgggcctcaaagggatggggagcagtccgcggcgctgagagacccgggtccctgtcacctcgggccgcgggacctctccgccggcgccagcggctcgtcccagcaccgggagcctggtgagggcggcgagcacagaaggagccccgggcccgggacatggaatcgcgcgagcccggcgcgggacggccggagacgcggccaacgctgcggccacgagcagccggcagccccagatagagagccgggagggagggccccggcccttgccgcggcggggagttcgaggccccgagactccggaggaggagccgacacccgtccgtgagctgatcccgccccagccccggcgggagtcccgggtccccttcccactgcgcgcggatttccctctctgaggaagtttatccttgtgccttctggaggatttctctctagctcgactcactctggactgactcgctccctggctttctcagttcgttttgggagataacttgttttgctccaagccgcatccgttgaccccttacagtcggatggtctagatgactgaatggagttttgagttggacttttgtgtccctgacggagttgggcctgatcccagagcactgggggtggggaggaggtgttactgtaaaatgcaagttggataaaaggaggacctctcgccaagggccccaatgagtggcacacagtctactatcaccgacaggttggtatgaattcctccttcgttcggcctcccggaatcgggcccgacctagcaggggagtcggtgattgcagattgcctttggccagcgaagttgacaggcagaggaaagagggttgtttcggagctgtgcagttagcctggggttgctgccgagttatccagttgattggcttttggaaatgtaatttttccggagagaaacttcccttccgattctcagagaagggggaggcaaaaccatgattgtggttttccgcctgtagtgtgcattaggattgtgtactcgtctggaaatcagaggagaaggtcattttaggtgaaggtcggtgcctgaagtcggctcggtattggtgtattatttatcagctttagccgtgtcctgcagtagattctcaagacaattacattttaggaatttctacctgtgaacttaatgttgagcctactgcatggtgatctgggaacttgatctctttcagatgttgacctgcacggtgtttaattattatctaataactttccagaatgttgacattaccagtaaatcacaggttcttgctggaagcaatgtccaggagctgaagaaatgagggtaaatcatggggtttgcttttaattcttgtatttaaatatttcgtcttccagaaacacttggcgtttaagagatataagccgtaagcatagtgtaagcgcgcagctgaatttgttgagttctgtgtctgtcctttatagcacctaccagtgttgcatggtggtgggtggcgaattgagctagaccatgtgtggttgaagtgcagtttgcttatcctaagttactcttgtttatagggtaagggataaaaagcatattgattccttgaccacatttcattctcaatttaattatgacactgcatgctagtcccaaatttgtcagcttgctttatttttaagtcagtcttcgaattattacaccgtgaaaaaatagatcaagtaactgaattagagggccaaagctctttgatgaaaagtgcaacaatagtgcttctgcacaaagtagtcttaatttcctaataagagttttacccaattgtaagactcatttgttgattttaaaagggccaaattccattatcataccataacagctactccagaaacagaacttcctcttcctgttgatgctttccagcatcacatgaatgttcacttaaaagagtctgttaaatatttaaagtatttatatttactctttgtgtatttttcaaagtgggttttcattttcaatgaaataatttttaacttttccaagaatacacttaagataagtattgacaatgcttatcttactttcttctggttatccccatttttttcctttcagggtgttttgcttctgagaaatcacttttacgggtgtggggataattgttttcctgcttcattcaattctcgctctttctgttgagcctgta

SEQ ID NO: 57170 - DNA, 649 bp, Homo sapiens
tttgttctgatgatgagcttatttaaatttgggtttaatttgatagaaaattaagctgtttccttaatggggaatctggccaatcaccatcctccaccctcccagggtagaattttttccaggaattaaatagctctatctagcagggtcttcctgcctttggcagtagagcagtacaaaggccacattgagcatagctgctggggaaaccctttttccttctctagcctataaatgctgttctgtctctgtgaaaagccctgacatcagctcttggaaaaatccaaatacttgtgttagaacaaggctgaaacacttgcctgggcagagactaatggctgaactatagttctaagtttaccagattgcctctcagtattgttatgctttaaaaaacaaaacaaaaactgtaagtttcagacataatctagagaaattaggatagaaaggacaacttaatagcgcctcccattctttgctagtttcttcttatttttctcttttttctaaaaatctaccttcaagataatgtgaaattcttgcttgaggagtgagggagagaaataatatatcaatattataaactttatgcagtgttttccacatattagatgctgcataagtatttgatgtttgagacaaaataaac

SEQ ID NO: 57171 - DNA, 497 bp, Homo sapiens
catttcttcatattgaaaaggcagagagaaccattgctttataggaaactacagtttggaaaaacggcagtctcattactcaatcccttgagagaggaattatcttgaaaatgttataaaaaatattagtaacagatttactagtgtcagtggtcttgtgtgttaagtatattaggataagccacatttgtaacagctaacggagaaaacataactgaatgtcagtgttacacagtgaactttgtagagcagtgattcccaattctgagatgttgtaagaggaatgtcagaattcctaaaacactcatcctccaacctttcaaattcagtgctgtggtgagccattgttactgataagggtatatcccacttgtgatttctttgttttgggtcaagaaaagcttttgtagaagccagtgtaaaatggcatgcatataattaatttcctcatcttttcctcataaaatcagaggtccttttatcgatggtggtttgaa

SEQ ID NO: 57172 - DNA, 1754 bp, Homo sapiens
taaacatttaatcataatatattttatatacaatatttatgtgaaaaatgcccatccttgattaaggggatttttttctactcttatttttattatttttaccagtatattctgaagtagagaaatgtgaaatgagatgaagatttaaattcctagcaaacagaatcatgcattgcccctgttttataagtaatgagatcattttgtagagtccagtttatttacatttgttaaatgatattaatatctcttccataagcatgaatttggtggtttgcatggtgttcactgaggtgaggatacttgtttaagtattttgaggatctcatactttcctagcagttctttttacttggttttctgaagtgaatatagtctttaaaaaaaagtataaggtactagtaatcagatactcatgatcacaaatgaaagtggtggagaaaccttttaaggaatattcacaaaagtgataattttccagattgtcaatgaggaaatgaaagtctctaataagctgtcacattaattgtgagctgcatttctcagtcagcaacaactaatagtcaatctataatagctccagcagagggaatgaaagtaatttagaaaaaagtttactatttgatttgtcaaagtgtgtccaggaagtaagagagcctaaccaaggggctgttgtgcatgtaagctcttcagtaaaagtggtggtgtactaagctatatttaagaaggtaatttgagattttatattacatgctagtgaatcatttttggattttgcaccagaactgagctctttggtccctgcctgtctgtggtttgtgttgcaaggtccagaggcttaaaacaaagaacaccatgggaaattctccatgagtcattccgtcagctgtagcttctgttttatagtccttcggatataactagtgttttaatgccagctctcctagccgcttttcatgctttggttctatatgctaataaaaaagtatggcagtatggctattgtagataacgttcagacttttttttctcccgattccacaatttttagttcttctaatggctctaagctagaccaattataaattgtaactggtgaaaagatttatgactgtttattttgttgtagttgcgaggtaagcgagtggtcacttaatacttttggttctgtgaatcttactgtccagagaactaaagattgaattagcagttcagctggagtcagcactatgtgctaaatccctatacttaagagctcttatgtattgcagacaaatgtcctcttagctgttttgttattttgtgaaaaataataataatagagcaaggcagtttagattcatatcagtttcaaattttaagtaccatgttttaagccattctaattgttttgtagaaacagataaattaaaaacttgatttaaatccagcccacaggatgccttaatcacctttgatattttaaaggagatgaggaaataatggacttttttgctagtaagtggcaggtatggtcaacacaatttcactacatttgaaaaaaatcactttccctgcttgccaggaaaatttaaagtgcagattgtaacctgatcttttttcttacagtgtaacgtctgagaagttcaagtattgacatgaattttctatgataccacttggtaaattaaatctgtggtttcatcactggctttgaattatatatttctatgcattttacttagctaaaaacttatttgaatatttagtcttta

SEQ ID NO: 57173 - DNA, 946 bp, Homo sapiens
ttctttatgcagcaagtaatgaaagttttcttttatgtgtttgtgtgcgcgtgtttttctttcatctgttttaggatggagctgtagttacaccctccagacctttaggggacaccctaacagtcagtgaggcagaaacagatcctggagatgtactgggcaggactgactgtagcagtggagatgcttctcggcccagtagtgacaatgcagatgtaagctttcagttttctaaatcttttttcttctgtattcttctttacagcccctttctagatttgattttaagtgatgtgaattagaggtgtcttagcactttttaccatccccatttttaatgtaccaatttgataaacagaaatctggttactgttatatataagcttttaattccagagttcactttttcccttgaacacccattgccaactgtttcttttacagggatggaatttcccagcaggcatcttgttcgtgggtagagaagttactaatgccagtgcatttttactgaaccgagagaccaactgttgatatctttaagagcatgttaatattccatttgtggtcagagtgactcagtcttgaatcatggggcactttgccattaccaagaggaaaaacctcagtcctgttagataggcttcagttaatagcccaggtttagtgacagcactttcttgattaacccagaaactgccagatgaacatgactatctgttaagatgataataaaacattttaagctgaatatgatgtaacaccatagacatatgaatacctaaaagctaagttcagtattacttacccagcaatactttgtaaattgtatgcagtggtaggaataatgacttaaatgtagatcaccctctttaaaagtgatgagggaagaagtctgaacgaatgttttgtaattgtgggtcatgaaatcaattttgtgggttgt

SEQ ID NO: 57174 - DNA, 924 bp, Homo sapiens
gggagatcaaagtgaaatttggatagctatgttcaattgagcctactttgcatttagtatttgtatgttggagttactgatgcataatcatttcttcctctagatcaatggacagtgcagctgtttccagagcattgaattactaaaatctcgcccggctcatttggctgttttcttacaccatgtagtttcacaatttgaccctgcgactttggtaatatattttacaatctagcagattcagagttcttctgttgattcatgtgccatagaacttttcctagctatacaacgagtgggcagacttctttcagttttccgtataaagacagatacaaaagataattaaaacattatttttaaagacttggttatatagtaataactacattgtttatggtgacctacctgttccagacattcctactcaatggtgacctagcaaattacatttttcatggttcctcattttgtctttttcattcctttctccactacagctctgttatctctattcagacctgtataaacataccaattccaaagaaactcgtcgcatcttccttgagtttcatcagttctttctagatcgatcagcagtaagttgccaagttaatgttgtaatctttgccttagtacatggaattattgtcctcctgcttcctatcttccctcccatgtttttggattttactgtgctttctcacacctgtattatatttcaattattgattactctagacttttttttttttatcatttctaaagtagtttaggcatatgaattctcacagtaggttttaggggattatatatatatatatacacacacacacacacacacacacacacatatatatacacacacacacacacacatatttgtgttttttgcatgtgcataattagagtgaggaaatgaaa

SEQ ID NO: 57175 - DNA, 454 bp, Homo sapiens
tttatcttttgactatcacaagagcagaaaaagttgcagctctgtgaactgtgtgtttgtatgggtgtctaagtttaagaacctgaaatgcttcgggtagttggctggcctctgtcagacatgaacaagaagatgagataggtagggtttatgtagttatgaatctaggctgagaaatgctatgactttctgtagcctattatctgtgactcattaggtgacattggcagcttcccaaatcctatgacagatagaaattggcttcagtggctcctgtaatctaaaaacatggtcatgcatgggatttttgtagattggtaattgaagatgtcactattgcaaaactgacttgtgtggcaatttccaagagaaagacctatcttaaagttttccatcagaggcagggcacggtggctcacgcctgtaattccagcactttgggaggcaaggcagg

SEQ ID NO: 57176 - DNA, 555 bp, Homo sapiens
ctgaatttattttttataagaatctgttactgaacctgctcagtggaaagagccctgttagagctttaagaactcattagcgggataaatatgccgggtatgaggggagtctgcagcccagggctgctgggtacctgccagggtgggcggagctgcccggcctgtgactcagagggtggctgtgggagggcacacatgggaactgctgtccacagggtgaaggacgctgggagaatgcatgcatgggcagcctgcctgaagcctgtgtgtgacagtgatcagctgttactggcgctggtaggtgactcagcccgaatcaattgcaggcctgctggactctgaggcccacgctgtctcccttgtgctgcctggcacccaggggctctcgaagtatgaaaatagacaccatgcatgacacgtgataagtactgggtacagcaggagtaggacccagtgccatggatgcttagtgaggggtcctgaattctgatttgggggtggggtagtcaaggatgcacaggggccatgtgggcagaggctcacttacgaagtaga

SEQ ID NO: 57177 - DNA, 441 bp, Homo sapiens
gtctcctgaccttggatgctccttcttcaaggtggataggcctggctggctggcggcctgtggatacaaaagtgacctgccagcaggagcctttttttctttcctcttccattcagagctagtctgcaacccactggcagggagagtgttgaatctgatttgctgaaatacaatagcagattgattttgtagccaccagtgcctgtaacaaattccaagtgaagtttggattgcacaattgtggggtaatgacattttaattgcatgtcatatttagtctggctcaatctgaagcctggggtggaggcccaaccctgcgtgctcccagcgcctcccctcctgcttcagttgggcctgtttggtccctctcagagttttctctctttcccccagcccctcccacctcggggatctgggtgcaggcaggtgggggtgaagtcg

SEQ ID NO: 57178 - DNA, 1448 bp, Homo sapiens
cctcgtatctatccctgtgggacaactcgtccgcccgtgaaccaccatgggtccatctatagtagactttaccattggtagagtttaaatggcactttgttgaatgaatgaatgataaatttcctactatatttgtagtgtggaagcctgttcagctgttatctcattgtaatgctagtttttctcattatccattctacattccgtgagagcaaggattttactaaatacttctgtgtcctcataatactgggcagataatttaatgggtaattaattactgattgatttccttaaattttctatcctattaagacttttgaggcaaaaaaaaaaaaaaatcttattagccttgttaaggggtgccaacatttgaaagaattgactaagcctgagtccctatgatgaaacgtatagcatgtgggattccccatgacaggtggaaatccaaagggtttttctgatcatttcctgaaagccactgatgacttcactgaaggcaaaagatctcagttaaagggaattattagacttgacactagaagttgtcagtgtagccctcattatcgggctactttgtggtggatgggaactggctttggggctttgtctgtgacaggagagtgctccctgctgactctgggtgggtcagacagaggccataccagagctctgagcttccaccgtgtgtagagccctgagcggggcagggaacacagggacaaagaggagtgaggtaggtaggggaggagggtcatgggcacatggtgcaaacccgagtgtgtgtgtgagaaaaaagcatttctaatcagtgaccctcgtattaagcagggttctgtgtgtgagtggtggggttgctgggataaagagccatttgaggctggagggctggtctctgccattggggtcttggctggtgagaatgaggatgattactcatatccatgtgtcgttgtgactcagagagctcgggttctggagttggagagaccaaagttcacagctgagcccagctgctgcttagctgattggccttgggtaagttcctcacactttctgtttcttcttctcttgtgtggggtatcataataactgcttcctgtttctctgtgtcttgtacaagaagacatgcccccacagtgggactagcactcaggtcttgtcaattcttgtcctgtgctttctatacccttcagccaagggaaggggggctgtctgcttaattagctgatgttgataagagctttggagatacaaagctcttgataagagctaatccccttaatctgtgtggggctgatgtgtgcatgtgttgtacaaggcaaatagcactggggggattgaccaggaatgcagggcagcacacggagtgtgcatgtgtttgcgtgtgtgcatgtgtacacattgttcttgctcccttgaaaggtgctgcagacatgatgtgcagg

SEQ ID NO: 57179 - DNA, 521 bp, Homo sapiens
gtgtctaaaaatcactgcattgaagggccaggtgctgggagcttccctaagtggaatcacctccttggcttcctccaagctgtgttgttcccatcctttctagcacatggtctttgaagcatggagtgacacaggtgggggagggaatgccagttatctagcaacagttataaatttcccttagcggcagggatctaacaacatgagactttgagctttcagctcccagatgaaagaacagggattttcccagcaatgacagaaaagggaaacatatagccctgggggcccccacaggaatctctgttatggagctgctccaagggggcaccaaccacaagcctgagtagaattgcaataggtggccccagacctctgggcagccacccagaaatctcaggcatgcagcctggagaagagggagaactttccagaggccacagttaaggaattttccttgcacctcctggagctgctggagtttctgaaattaaaagggcctttatctggaaattatggtt

SEQ ID NO: 57180 - DNA, 645 bp, Homo sapiens
ttgtgtattcattaatttaacctccccaacatacctacaaagtatgtaatattactaaccccattttccagatgaggaaactgaggtacaaagaggttaagtaactggcctaagattatgcagttagtaagtggctgagctggccctagagggtgtacccttggtcaaaacattctactacaaaatcgttccctcagttgagagccaaggatagagaataatgttaactgagctcctctttcttggatttgtctattcattcattcaatcatgacttcattcaacaaatatttatgtagtgcctggcacatggcaggttctggacactggagatgtatgatgactaaggcagacaaaggtcactccttcctgaagatggcactctagacaatcaacaggtaaactggtaaataaacaagacaatttcaggtcatgatttccgctgtgaagaaaataaagcagtataatgagccagagtgtctcgaggagaggggcccattaagtgggcaagtagggaaggctgcattgatggcatggtgcttgagctgaggtcagaacggtgagaagccagctgggccatggccagggcagagcatatgtggaggggaaagagtaaactccaagaccccaaggtggaaagtgaac

SEQ ID NO: 57181 - DNA, 903 bp, Homo sapiens
ccgatggaggacacagggtggtacttcggggcactgagggttgttcctctttgccagcacaaagcctgcctcaccccagggagtggcatggcccctgctgctgttctgtgtcacctgctgaggtcagggctgggtcgtgtcatttgcgcagcccggcaacaccctcattcccagtgtcatttaaaccaatcacccagaacccacagaaatgggaactggggccagacccacactcactacctcctctaccccgccctgcctgccccaaggtcatgttgactgaatatgtgcggtgaatcttgtttttctctccatttccagggacgcaaacccggctatttctccttcctggacccattttctccgggcgtctggctcttcatgcttctagcctatctggccgtcagctgtgtcctcttcctggtggctcggtactctcctcttcccttccctgtccttacaccgccacctcgtgtccacctctgggaactgcatggggagggggtggggaggaggagagggggaggaggagttgggaagatcttggtgccaaactagaaggacaggagaaggactgggggcctgaaatgctctctgcccagctgtcgacctcatgctgcccatccaaacattccccactgtgcacgacgcagacaggtggcttggcttctgcacctctgcctcctgtcccctcccacttctccccagacccccacctaagccccttgcttgtgtaggagccctgggaagagaggaggggtggggttggcaggaagatgactctcattaagcactgtgcatttggctgccctggcatcagtcattgccacaaaggatctgccacaaagtgccgaatgacaaggaacagagcctgcaaatctggactgggggcactgggggctg

SEQ ID NO: 57182 - DNA, 846 bp, Homo sapiens
ctgggccctgacctcgctgtctcctccaggtgtccgtctgccaggagatggtgaccgagctgcgcagcattatcctgtgtcaggacagtatccacccccgccggcggcgcgccgcagtcccgccgccccggccccccatccccgaggagcgccgaccgcggggcacggcgacgctcagcaacgggaagctgtgcggggcaggggagcccgaccagctcgcgcagagactggcgcaggaggccgccctggtggcccgcggctgcacgcacatccgcgtctgccccgagtgccgccgcttccagggcctgcgggcacggccgtcgcccgcccgcagcgaggagagcctggagtgggagaaaaccaccaacagcagcgagcccgagtagtcccggaggccacaggacgcgcagaggccgggcggggcgggaggggaggggcggggcgggcgctgctgtcagccgccagccggaacttgtacagcgtcgacacctctccagatttcggatccagtcacttttcaaaaagatcaaggagcctgacgccccagccagagaccgcgcccggtcagggagcagggtccacccggaaacgttgcacccaaagggcaaaggacggccctccctcctgggcacaaggacccatcttctcccagtgggtctttccctctcgccaaaataacaagagtatagggtggggggtccctacccagaccagtccaatgaattggtggaatcatcagttgaatttccccctagtcaggggccaatgtaccctccgtctagttcttacagaaaaaaaaaaaattaaacagggaagtttttcttttctggatttgtatatttttgt

SEQ ID NO: 57183 - DNA, 1227 bp, Homo sapiens
ccaagattccaagtgtttctggaaaggttcagcccaatgctcttttctgcagcccctattgtcctctgatatgacaatgtgtactcctgttctgcccctggggattgtccactcaatgggtgggcacgagaaagagcagatgaggtgtttgtggtaaagcctaagccagtgcagccatccccgtcgccatggcaaccccagcgcggttggggaggacccgctcctccggcgccccctcccattcacgcagcggacgtgacacgtgcggcggggtcacgtgttgttgttgggccgggaaagctgcttccgggtcaatgcaggacactgggctccggcggccagagtgggggactaggtgaagcggcgccgggccggggctggccgggaccaggcccgaggctgagcggcggcgacagcggtggccgggaggggggaggagaggcgcagccagaggagccgccgcagtagctcccccgcctcccgggctgaggggtgagtggagccgggcccgctggctctgccgggctctcgaggcccgaggcgttcccctctggagccgaggcgcggagggtcgctcctgcagggtgctgggataggacactcggggaagggtgaaagccacatggggcctgtctcgagcagctgtggggatgggagacctgccctggggctagagggaggatggggcctgcctggcctgggctatggcggagctgggagggtcttgggctgggctgggctgggctgggctgggggactggtcccgggttggaggagggcgtgttggggagcctgcccgggttcctgggagaatctaggcgtctcaccttgccccagcgtgggggatgggtagatgcctcccagctgttagaagagggagacgtgtctgggactgctggggaaataggaaacttgtctctgaactactgaatcccagaaaagaggacatgtccccagggaggtttgctgggggaaggacgggcatgtctaggcccttgggacattaggcctgctcttaccaggggctgataaaaggatgtggatgtggtaattgaataagggcttttgggagaaaagatttgccccaaggttgggagactgagaacgagggtgttggactgacaggcgggtgccttgtcgtgggatcttgggggaagtaaggatctgtgtggagcttctctgttgagttctaggtccgctagtaggaagacattctgggaattggtg

SEQ ID NO: 57184 - DNA, 1128 bp, Homo sapiens
tgctttcatattttatgtggaggtgaattttttggtaaggattcaatttcatcttttcccagattgttattcactgtcctagcaccaattattgaatagcttaatgtttttctagtgatctctgtgctgcttccctgccatatttacatgggcatgtttctgggctctgttctctgtttcattggtctatttttcttccccagggttgtttaacagaatacagttgattcttgttatttacagtacttttatgtgaagttgccatgaacagtgaattaatgaatatggaaattgttactcctaggggaaatataggattaggttcctgcgagcctctgatcataacatttttgtcaagtgataaatagataattttgttttatattagtttctgtttaaagacatttaatatgtatcattgattcgttaacattgaattaactgcaaacagccctaaattcatacctgaataaagtgatctaattgtgcattttctccataaggcatattgcagcttcctcgtgcttcatgctttagaaacactagatggcatttcaacactacccttggggaccacttaaatagtgaagtcaccaacaaaaagcacaaaaatatgaaaagcatggcactagatagatcatggaaaggacacttgtttatattttgagagctgaaacaagaaggcgtagtgccaccttgttctacctcagcagggaacatacccgttgaacaactcaaattttttgtcactttgtgcttatctgcaaatgaccacaaaaatgctgcaagtattgattttgttgtaacaagtaccttttggcaagtagggaaatttgtagatagggaatttgtgaagaatgagactcaacctatgaaatactgggagagaggtagttttttaggaaacttagcattagcactttcccctctctgtcatatttacacatatctttatagcattttattttaagagaataatgctatgaatctttgtaatactaagtcttctgatagatgccattatgtcaataaaaagacttttgggaatacctttattatatttataatcatgttattcataggtaaattgaaggaaataattttaggaaagaattgcaactcttaaaa

SEQ ID NO: 57185 - DNA, 433 bp, Homo sapiens
agtaacttgcccacagttacacagagtagtggaatcagtcaggatttacatacccagggcgtttagttttagaaccagtacttactaccattgggcagtattgccatagcactaaatgtaggaggagctagtgaaaaaaaaaacaaaaacaaacgtggatttttttttttttaatgacctgcagacttttgcaacctttatgcgtgattgatgtttcaacattctggcaatccctggttattagccagggtggtttgtaaactgctctggaaggctgtagagtgatgaactagtggtctgttcctaatgaggcttttccttaacatgatggcttctgtagctgctcaagagcacagataatgggggtaatctgttctgtaaacagctaagtaatgaccttaaacttgtgtgttcacagcggaaagaaaacatg

SEQ ID NO: 57186 - DNA, 1357 bp, Homo sapiens
tcagaaatacataagtatcatgacctgtttaagattatttctgcctgctattcaaatttcaaagaattgtaatttaagcctctgtgctacattttatttaattactatttagtatgagcttcttttgagttcctgcaaagtagacatgtatcaagacatccaattactattggactggaaaatgctgtgacttcctctagttattagaatgcatttaaaacaagaaggttgacttctgaagtcacatttctctttcagttcttctctggaaaagaagttcctgtttggtctttacaacaaccctacgaggtcgacactcttatctccattttcttactagtgaggaagttgatgcacagataggttaagtaataccaaaagtcacatggctggtaaatgacaagaccgggatgccaacccaagcagtttggttgcagaacccatgcactgacagctgtactgtagtgctgactgctaaagttccccagcacacacctttattgttagtcttccttttcatggaaaaactaaaatgacatgtcctcaatatccatttactaaattgattggctctgtaacagaatcactgatgtggctgatagctctagatccagactggaatttgccctctgttttccagaattgtgaaattgtggttgggacatacctgttgccctcccttctctgaaatgccatattggacacaggatgggtgttactcacaataataaatgaacaagtaatgtgacccaaagagactgatgatttattttttaacctcaggacattctagagccctaaaactggtttcagcagatagccaaaggtgagagagatcactcagttccaactcagacttttatcaaggaggcataatgttccaagtgaacttaaaatgggcgtttattgaggaaaaacaataatctaatgttccaggagccattatcaaaggttttgttattggaaaggatgaggcagtcacgctactgttcctccttaaaattcaagagagagccttgtaaagaatataaatattactttaaaaatagaggagacagcttttctgttatggtctgcaagatctagatctgtctaaaaaaaaaaagacaatgcaatttcatttcatcagatcattccgacttgtcatccttgaatgcttcttagttacctaagtaacacaattaaggtgttaaataaataagaatgagactaggggaagcagacatcaaataatacagactaaagagaaaaatgttttctgaaatatttgatacatttgagggcagatgtaagctttattccattgttagggaatacaactaggacaataggaactgtcttggttgtgttaaaattt

SEQ ID NO: 57187 - DNA, 1143 bp, Homo sapiens
catgaaggatattgatattataggataggcaatgtttgcagaattgagtatggtctgcaattacttccctttacttcatatttttactattctttgctgcctgatttgaacgtgttttcatcctcccacccatcccttctcttgcctggtttttctgccactggtgatctagcagtttagttcttttttttttttccagcaaaagagcatcgatttctcaatagcaatttagttctgtctcatctagttaacatatgcattcttaaatgctttctatacttgtctcacattctcctaccttcagctcctgacaactgcctgatttgctctgtatttccaaagctaaattagtaagagagggaattagatagtttagataattcctttcttctctatctaacagaacttttcatgacagccctatcatgagctactagcctgaccttggattggctgcccttgggtcagactccaggcctggtggtatctggcaggaagggcaatttcgataaggtcacagaaatcacatggacagaatgtgcctgccaaaggctgttccttcagtcggaactgtaagcagggcttttgccctttgaccaggccaagggaagcaggccttgtcatgcaggggttcaaggtccagctccaccacttactagccttgagtaagctatttagtcttgttagagcaccagatctcaaaactttaaattgagaatgaaaaatacgtaacttgcagaatgagtgtgagaattagagatcgtatataaaatacctgcttcacggcaattacatgataaatagtaacaaacaaggtgggagggtcacttgagcccaggcgtttgagatcaacctgggcaacatagtgagaccccatttctaacaaaatgtttaaaaaattagcctggcgtgctggtccatgcctgtagtcccagctacttgggaagccgaggagtttgatgcagcagtaagccatgattatgtcactgcactccaaaaaacaaaagaaagaagcacagaatgtttaacctagtcttaaaatgagactttccctacccattgcctctattgttgaacattttaagtttatcccaattttccatttttataattaatgctgcagtaaacattatcatgaatata

SEQ ID NO: 57188 - DNA, 2379 bp, Homo sapiens
atagccattttgtctctgtgctcagcctataccaccaattactgtttatttcctgtccttgtaataagcaacatagttatttatacatgcccatttctcccacagcacataagctttttaaggttgggaaccatgtctttgtcattattgtaacatctctttccattcccggtgttcagtacgatgtgttaaacgaagtagacactcaaaactttttaaaatttatttttatttatataatgagtcttttttaaaaaaaccacctacactattttaaattcatttgaactttgtccagtatcctatgtacatttgaagtttaactaccggaaaagtcttttgaaggcagatcgaatcatgttatttttttcccttaaaaatccctcatttctgtcatgtattccccatattatttatgtaataggtaaagtggcccagtttgccactttgaagttgctgagctggtatcacaagtcagtcccctctgttttaatctctgtttaaggaaagtcactctgaaacgacagatcttttggttccttatttctgctttcctccgtcctcttctgcctgtgaagccaccctcctctgctcagctctgtttcaggaaatcggagctgctcgattcatgtgtagcaaatcaaagccaattagatctgcgttaaccttggttttcaacaacttgtatcgtgaaaaggtttctgtccatgtttaccctcatcttgtcaccatttagacccctacatacaccggctcgcggagcctccagccattcagcgctagaaaatcggggggactacgtcttaaaaccttgagcacctgtttgggaacatctgcacctcctcccttgagggagaaaacgacccagacattcgcgtcaaaggaagtgtcgtctatttccctcaacgcagggcacccgttctaggaatgtttgtataaacaccgtaaacctgcctggtaccaccatgaatgacacaagagctagtttaaaaagaaagcaaagaaacaaacgcaaaacccgaaaccgcatcctccaccgcaaaggtactcggatggggcgcccgccctccccttagtcagaggacaaagggggcgtggccgagcgcgcggcgcccacgtgaccgcggagagctgcgcgcaggcccttcgcgcgatctgccgtcatatcagcttatggcgccggtcgctgattggctggccgctccagcctcccggcccgcttgctggctgcccagctgctaggacagtttgcagagcagtggcgtgcggagcggcggcggaccacctccaggtggggacggtgggtgggcggggaaggaagcggaatacacctgagcgggctgggccggggggcgatggaataaaagaagatggagagacttcagcgcctgggactcgggtgggcgaggcggaaggtgtcctcgcagcacggcttttctccgcgccgcggttggttagcgagtgccctctgggtgctaggcgttgggcggatggtaggatcgcggtagcatacggatccgagtcctgcgccgagtgagaggagaggctggcaggtagcctggcatcccgaagactggcggcgagggctgggccgggggacctcggggcctggagggctgcgccacctgggagtccgggcggaggggccttccgctcgcgctgggagggatcgcggggccgatagggaggcctggacttgaaggagccgaccgtggacgggcttaaagaaaatgcagtgtttgatgttgggtgttgcagatctcttactcaagggaattctggtctggctgctgaacacgaatgctttacttttcccttcgttctgggagggtttttttcttttaaaggccagaagaatcaggctgaagaactggtcggtatcagaactcctgaccattgcaagcctctgttgctgcggcgtaattagaatgaagggacagcaatctggggctgaggagactgaaaggaaaagggaaataatctgttccttttgcatcataaaaggaaaaataatgtatactgacatccctgtgttacagcagagtagatttggaggtggtgtaagtgaagaaaacaagacctcagtacatagagtttccaaactggaaagtttgtggcagctcggtacttttagaggaaaccctctggaagttatttgtctttatatcactatcattttttaaagtttctaatgattgatacctagtaaataataactgatccttgatcatttacagagtgcttttccattcgttatgtaatgtaattaattagcatggggtggtactcagaatccctcatctgcatataaaacatcttgagagataacataacgtggtagcaaagagaaaggttgtggaatgtacatcccagctggtt

SEQ ID NO: 57189 - DNA, 1798 bp, Homo sapiens
gttagaaatgtgaggctgagttctcagcctctgacttcagcctgccttatcagccctatcagaatcttgtgggtcaggctacacgccatgccatgcgtgagatctgacattctttaccctcctcaacccttcaaccccccctttttttttttttttttaagagaagatcttgctctgtcacccaggctggagtgcagtggctgtgatctcggctcactgcagccttgacctcccaggctcaagtgagcctccacctcagcctcccaagtagctgagaccacaggggcacaacatcatgcctggccaatatttttattttttgtagagatggggtctcactacgtctcccaggctggtcccagactcctgggctcaagcgatcctcctgccatggcctcccagtgttggaattacaggtatgagccactgcacccggccctctttacctttctgggtgacaacagctaaagatggatctaataaagaggcagctggcattctggtcagtctgacactctctcaaagaaggtaaatgggacagagtctgtgctcaaggaaaccaaaagagattcaccctgctgtgtgagcatcagcatgcaccagctcagtcagaagctctaaccgggtgccgtggagaggatcaattttgagatgaacaatatatttatattatccactggccctgaagatcctgaaggaacttgtgtcaagttgggggaggcagggaaggaaaaagaatgttttctattatagtaaatgcaagtaaatgaaatagttgggacaggaaggcattaaccagaatctaacttcacaaggtcactaaattgaggactatttaaaaagttaaattgaatgagaagatgggccttttcttttccctgtcactcactggtggtgcctgtggcataggagaaaaccaaagcctgcaggggtgtgggagaagaatgaagcagtgaggtggatcaccaccaagctcactcagccaacacctcctcaagaccaccaggcagggagaaggcaggggcaccagggaacctgagaaggaaggagatgaaccaggtggtcgggagggcaggtggatgagggtgcagggctgagagtcggtggcattatgctggggaggacaccaagccagacctatgacgactgtgaaagggcctgggaaaggagggctcccaataggcaggcctggagaaatccacagtgagtgaggttatccagattagagcagcctcctacaaggagagaagcttttcctttgcagcttgctgatctggatgactgagtatgggctcctccactttgtagctttcacgctaagtaaaccatcaccactctaaacttgggcttccccaaccataaaatgacagtaatagtcccttcctcacagagtcattgggaggattaagtgagatgattcatgaaaagcacggagctgtgtgcctggcaaataggacatttttagtaatactattttctttatttgcaataccaggttggtattggcatgaagcaggttcaatacatcatcagagaccatagcccaaaacaaagaacaactattatttattcaatgatcctttttgagcactttccaagaactgttgccaggaacttggacaaacagggttgcaaaacagttagtcatagccgtgtgcggtggctcacacctgtaatcccaacactttggcaggccgaggcaggtggatcacaaggtcaggagatcgaggccacggtgaaaccccgtctctactaaaaatacaaaaaaattagctaggcgtggtggcaggcgactgta

SEQ ID NO: 57190 - DNA, 1077 bp, Homo sapiens
tttggatttaatttaatcaagagtgagaatataagttacttattctatgctctgggtgcatttgtattttaaacctcatcaattatcttggacgctttcctaactgaagtagattttggcaacagcaggagaaggagttatttctttgggggcaggcgggtatttctattttgcctgagctggtgaggtcaatggtagttatttggccaaagtaacatggaagagggaacaatgtttaccatcctaagggcagggaagtcccttttctgctttaatgactctggtctggttgcgtgactcagagaggcctgctttgggggagaaaacgaggtgggaagcagatggtggtaagaaaagatctgagattcaactacattggccccttaaccaaccattgccaccaggacaaaggtggtgtcacttctcaccttcatttaaatgcatgcatcctataaatatcattgagtgccaccatgtgccaagagtatgctgggcactgggcgtctagacttgaatgagatagactggttttgtcattctgctgcttgtagattaagaggaagatggagattaagcaagtgaccagagaggaagtatcaaaggctacaggggactagagccttagagtgagggctgtaacctagcctaggtgcctaaggaggctgctctgaaacctgaaggctgaatagaagttggccagccaggaggtgagcatgtgagaaggccacaggaagagaaagaacagaaagaagtcaaattaggctttggggagttttttcctcttcgtggctgtccttgctgctattttaaacatgactccacctggataaaaatgtaggacactgtgacctctgtgtgtttgtcctctacctccatctccagtggcctaagatgggcagtaggacagaggagggcagtttaaagtctgacaacaggcttaagactgttttatacacagctgtgagtctatcattacatttccgtgcatgttgattttcgtcatgatgctgggcagcatccgagcaaggccatgcaagatgggacagagggggatatggtactgtcttccatcctgca

SEQ ID NO: 57191 - DNA, 3583 bp, Homo sapiens
tagaaaattgaactgaccatcccttccttcccctgaacagcagcttgtatgcaactataaaggtagtctccctttcagccctgcttgctgtgtctttattcttatcaaaaaccaggatctgagttcagagggcagtgaaacataaaatgaaataggaaaggttgcagtagtacatagactttggctgctcccactaacctgcaaaaaaaatattttccttgggcgtaccttagcagttccatggcagaagttttatctcctgtggttcagagagtttggctcgtcaagctgaatgtagggttaaagtgtgtcctccctcctctgtgggtgtttgcctagctcctggctgtgggttgaagggactggtaaatatgtctattttactgctgaggcagggtggctcagtgcttggtcaccttggagggatcataagcaagccgccgctggggccctgtgccacgcacaggtattcatgcgtgcgtgcaagcacaccctgtatagctgtgtaataattgtccaggtgtggtgcattctttgtcagatgtacccttgtttttactgcctctgtgcaggatgtttatttgctgtgcttcaggctggggcacgtagcttgatcaagggtagtttttgctgtggcccctgcaaatacgttgtggtgcccagagtagatgaaaaactgtgagtttcccaatagagcgggttcatctggactcttgttggttgcgttctaggagctaattctgtggctctggactcttccctggaggtggggatgaggccggggccggggggaggtggtcttgtggcgctactgcgggctgtgcactcaggaaagtggccacggtttaggacgacctcgacacgaccctgtataggacgcaactaactccagagaaaacgagcgagccccatgcaactcttcattcctgcagggagaacaaggaggtgtgcccgccagggaagggacgcacccccaccggcgctcgctgccttaacttccccatccccgcgccagggaggggccggagtcgccgccgaggccgccgagcgcagaaagtgcgcgaaagggacgcgctgcgagcctcacacgtgacggcgccgcgccgaaccgagcgggacctggcggcagcggcggcgggcgcagcggggcggcccggagcggcgcgggcggcctggagccccgggagcggcgcgcgcggtcccggcccagcggctctcctggcctcgcgctgcacattctctcctggcggcggcgccacctgcagtagcgttcgcccgaacatggcgacacggagcagcaggagggagtcgcgactcccgttcctattcaccctggtcgcactgctgccgcccggagctctctgcgaagtctggacgcagaggctgcacggcggcagcgcgcccttgccccaggaccggggcttcctcgtggtgcagggcgacccgcgcgagctgcggctgtgggcgcgcggggatgccaggggggcgagccgcgcggacgagaagccgctccggaggaaacggagcgctgccctgcagcccgagcccatcaaggtgtacggacaggtgagcagttttgcaacccgcctccctccagttttttcctctccctgcacttcctcacccccgcatccatccgttgcagtcgcctcctaggtgcaggcaccactggggacttcccggcttgcatttgtttttttccttcacgagtacaaccgtcagcacttgaatcgcattgatctttccttcttcctgtcgatttagtaaacgtattccaggtaactcgccgggtgcagtgcgtattaccccagggtgtgtgcagagagatgtagtttccggcaggtataggaggggtgcagcttcattttacatctggataaaaaacgggctttctttagtgtatcatcagttggcagtggaggcgagcaccctgcagttgcggtacacttacacagaacagcacgaggtgggggtttccacacttagcattattagcacaataaaagtgggcaaacctgaaagcttgtcgactatctctgtacagtcagacaagaggtgtgtgtatgtgtgtgcgtgtgtaaaggctgaatttttaatttttaatttttggcgagcgtgtgagatgctctccattccttcttccccacccttcaagatgctgactctcccacccccgtcaagataactttattttggagaggaatacccctcatggcacttggagatttgaaaggactgcaggaaatttggtgggcattattattctataagtgatttatttctacccaggcaataggtttattagatcataagtaacgtgaatttcacttttatggtcagacttactgcgaggaattgcagatggagtttgtaggttaggatcagcactggcaaaattaatttgaccgtgttattgcctcatgagactcccagtcctgcagttaagattgacatcagcaaaagtataaggtcggtgggggagaaaaagtaggaccagaggagggggtaaatacacttgttttctagagtcaaattgttccttttgaagtagaaattattaataaaagattaccctgagttctgccttttctcactaatttcactttagccatttcttcaggaaatacagagttaaatgttcaacccttggatccaggacgaaccttgtaaacatatcaccctattgtgtcattttgttggtgaagaaactgaagcgtggaatggtgaagtgactagtccaaggtcataccgggaaggtggcctgctctctagtttttgtctgcattgtctcagtgacctttgcttgactgcagtcaccctgtctttatgcaatgctgctgaaatacctcctttctaaaataaaatagatctggtataaagggggaaaggatggtggtgactgggtgggagcgttggatttccctccactattggtccctgggcaagaatgtgtgccccagggcatgtaactaatggtggccacaggctgcaggaacctgcatgctcagttcctcttgggcccagatccttgtccccctgtccccaccccatatgacaaatatgtgtatgaacaaaaagaagtcatcaaggtccttgctcttaacagcgacaccagcatggggctgatggagggtgggagaaggaggaggagtggcccacttcttcattgggcctccgcagtcagcccagctctgctgtgctcttgaatcagcattctgggaactgggagttgggggctggtgggagacaatccctcccagtgctcaggtcccctgaagctatagtttaggttgaggaaaaagttttctggtttcaaaaatatgtgtacatgtgccatttctttcttgggtttggtttatgaaaagctccaggggatgtggggcaggttggacatgaactctgttctcactgggagtgactcccaaaccctgggcttttgagtttctgggccagccagattgagtttggttcagctgaaggatggagaactagcagtcaaactcataatgaggaattcctaaccggagggtgagggtacaagggtgagatttttcttctctgtggctgccttcctatgccattg

SEQ ID NO: 57192 - DNA, 1735 bp, Homo sapiens
aggtgcgcaccaccacgcccggctaattgttttgtatttttagtagagatgaggtttcaccatattggccaggctggtctcgaactcctgacctcgtgattcacccaccttggcctcccaaaatgctgggattacaggtgtgagccaccgtgcctggccttggtgaaatttttaactctgtgcccagaggcattggaaaggctggtatgatctggttgagcctggagggccctgggttaagagccacctgtggagaaaggctagcttggggactgtggctgggaagactttaataggtacctgtgagatagcaagctatagggttaaggtcccagatagttaaggaccccatttctctattagcccaggagacacatgcgagacagttccacctgtctctgccccagggacctggggagaaaggccagtgctgatctgcccaaggatctcagccaaggagcccgagatggcagggagtggggacagagcagagtggggtgagtgtcctgtgaaaccagaagtgtttggaaggacttgcatgctttgaacctgtgctcaattaattgagtaacctgagactctgtacctatgacttacctcatctgtgtacatttagttccctgaaattctctcactgagtggttaaaaaaaaaaaaaatctgcagttaactgtgcacatggtttgctgaatttggcaaggtgtgctgttggtggtggtggtgatgggtgggctggagggggacggttactgcagaaacaaggccttcaatctctagaggagaaaaatgaagcagtggatgtggaaagttggttagaggtgaaagagctatctaaacagagctgggggagtttagctagcagaccagagcctgtgggacgtccgcctgttgcctcacctcctggtagcccagagggcatctcctattactgagaaattggccaagccatgggtttaatgcactcccccttctccattagtcttgtttatagctgccctcacagggtggtgaagaagccactggtagggtatagaggccttcggttctgggatgtaatgtttacatgcttttctcttggagttaggaaagtgctagaaaacagtgtcgcctctgggctggagccttgggacctggaggttgggtttccccaggtttcagagttcggctgggaatcaaggagaaaactgcctgtgagtttcagttaggcaggagctcctagcttgactcaggcgtgcagtgttttgtcattttatatatgtcatcgcttgctcttaggcctttcgctaatgttaatgttctatgtggagccgttttgtgaggaatggcttattttggttgagaggcatttggtaatgaaaagaaatgatgttttagtgcgtcgaagtttatgaaatgacatccacaggctgcatctcatttgattcttacgacaatcttgaaaaatggggaagataagaatgattattcatctcatttcagagatgagtatcttgaagcttgaaaaggtgaagtgacttacccgtagttagacaggtggtaaaccggagagaacaagactcaaaccaacccgctaacttgtttcagatttatgcaggcatatttgtctatcctaagtaatctagtgaaatttttgatctcaagcagggatccacagcttttttgcagtacttttttttctccacctttaaaacctggagatctcacataattccactttctcctggccacactgatct

SEQ ID NO: 57193 - DNA, 2409 bp, Homo sapiens
gcggtgaggggctattcatggtgaagctgcagagggcaagtctgtggtctggaaccatcctgaagagctgtgagaaatgactttgggctcacagggaaatcctcacgtagggcaagtcctggcttggggtgcgctctcttgagggggtatttgctgtgctcactctgactgtgtttcctgcacatggccgtgtgttttcaggcagtgagaaccaccacattgccttaaagtctgtctctgagcttaatctcatttgcaaaaggtggcatttcatttaattgttctctgagattctttctggctttgatattttcctcattttttttttgccaactggtaaattaaggggtgatattatgttcatgagaaagagagttttccacagtttctttttagtagggagcccctcccaaaacagcaaagcatattcgctcattgacaaagtgggttcaccaggacagagtggcacacagaggtaaacagtagataggttctcgctgccaaggatcaatcagaaagggaaataagctctctaaactgatattataaggcagtgagattatgattatcatccttttagcaaagagaaaggaaagggcatatgtgtatttttctctgtagaatggtcatggctccagtgaaggagatagtagtgaatgctaagttctagtccaaggttattctctccttgtttcctcatctggaaaatgggcagcctgaattcatcagcaaagtagttcaggagttctgtaggtgaagcatcttgagcaaactcaaaagtcaagtgagtgagctgagattccatgaactgggcctctcttccgggagtgctcgtaaactagatttcagctttccttctgaggtgagcagtccagggaggataataagcctgctaaatatagtgagaacacagtcttgaaaggggacagtgagaggcaatttgcatacctagcatttaagccatgcaaagggatggtttgggaaaaccttgttctccttggacctcaggaggctgtctttgacttcctcagtttcgtcatatagttcaggggagtgcctggctccttctgtcctcacagttgaaggacaggatatttgttttatgctatattgtagaattttaaaaacgcttctttgtatttcactgctagtgaagcagagaaatgaatcagactgccttatttgtcctccttgtactgcgttttgggaggaggctgtgtaggagttgtgaggactgcaagctgtgggagtctaggacatcctgatttttgggtttgaccaatttgaaagaggtgtagagagggtacctgtgacccattctattcagtggccccacctcctgcataagcctcaacaactatacagatttcggtggttttattggaaacttctcatcattggcttagacttgcaaccctaattcccccagaagtgctctgtgtgagctaacaggtaagaaatgattaaagagcctacagggtgcctggcacctagcagacctcagtgcctacttcatccgcaagtgaacgcatgagtaatcagtcccttcatccaagccattgacttcctcccctctatttataacaacccagaacttgaggactgggtggtagcaggtccttcccctcactctgaataataggaggtgaatcatttcacctctccgggttgccagggcacgcagggggctgagggacaacacttgtggggtgatatggacttgttcgatgaagatgccgaggcgagtcaaggtgtgggtggcatccactgttgtgagctggcggtggatgctagccttgggcctgcggctgtttctccagctggggacagggaggcctgtgcggatgctgtggctctgcagatgccgctgacagcactttgaaggattggtttggccagagacccagtccacagcctgcctcctgtatgactcattctagctgcatattttggtagcatgagggcttgagatgagataaaaggagcacttcttaagagtggaagctcctaggttcttgattagcacttgagaaatataatgttctctgcaggtcctagaggccttaaaaaaatttgagtatatttcacattacataaaattagccattttaaagtgaacagttcagtgaacttaatatcgccgcaatgttgtgctaccatgatttccaaaacatttccatcgctctgaaataaaaccccttacccattaagcagtgattccctcctctccaatctcccagcccctcgtaaccactaatcagctttctctccctatggatttacctattcgggacatttcatataaatggtgtcatgcaatcatgcaatatgtgaccttttgtatctggcttctttcacttagcatattgtttgtgaggttcagccacattgtagcatatatcatcagta

SEQ ID NO: 57194 - DNA, 2924 bp, Homo sapiens
atcttggcttactgcaacctctgcctcccagattcaagcaattctcctgcctcagcttcccgagtagctgggactacaggcacgtgccaccgtgcctggctaattttttgtatttttagtagagacggtttttcactgtgttagccaggttggtctccatctcctgacctcgtgatctgcctgccttggcctcccaaagtgctgggattacaggcatgaaccaccacgcccggctgggtgtgtcttttaaaaaagactgattcctgggctccaggcagagggcgacagagccggtaggcgtggagtggggcctcttaggtgattctgaccttcagtggggcatgggacccccctaggccaggtgatctttggggggtggggtgggaggagttatcttgactcttaacgacctgccaatgagccagatgctgtttgttgtttatgatgcagtttctgtgttcagaggtttctgtggcatgtaatttttctctgtttgccttctgaggggaggcactcggcccctccctgctgccttaacagctccaattaattgtgtctcatttatcaagctccagctatgccctgtgagctagacaggggagagggaaggttgttcacaccccggggttgtggttatagctgattgcacgtcaaggttatgttcctgggaaaaccaccctcccacccactcccaggccagtgtcttctgggtgtgggacctgtgtgggggattggcgatggaaaaaggcttggggaggaggaaaggggagatcagggggagatccttggggatggatggaaaaggaaccaaacaaaccggaagccactgattaagtaaagggatctagggacctgtgggttgttcttgattgctggggtctgccctgggctgctggtgtcttggccacatgccatggagagctagcaggaaaagcctgctttgttgacttcttttctttcccctgggggtgaggatgggggcaaggtggagacagaggagacaggtgaggccagagggtagaatgcatgtcttgataataaaatttacttcctgtcagcctgcctgctggctcccctgtcctgcgcgcatccattcctgattcctgcaactaggtctgctgtggggggatgggcacccgggctgccttggggatcagctgtgactcaccagggagttattcttatgaccaggatgtgcctgacatctcgccaagcaaaggagctgagctgttcctgcgagtgcctggtggccctcgtacaagtcatttcttgccagggattttatccccctactgggctgccccttttcagtctgctcttatgagtaaaagggacatctaataaaaaaagctttccttaaaaaaaagaagagaaagaaacaaagtaacaaacaaacaggtgttttaccaggcttgccttctagaggttttctttttttctttttttttttttttttgaggtggagtctcgctctgttgcccaggctggactgcagtggtacaatcttggctcactgcaagctccgcctcccgggttcacgccattctcctgcctcagcctgccgagtagctgggactacaggcacccgccaccacgcccggctaattttttgtatttttagtagagaccgggtttcaccgtgttagccaggatgggagtttttctttgtagaaaagcccttggatgttttgaggcttgcccttggtgctcttctcacctttcacctgccttgggattggtgaggaggtctcctgtcctctgagtagatcgatttcagcaagttatcttcagaccttttgcccactctgatcactgaaagctttgcaacctactcaaagcattatctgagtgttacctgccagagggagcattttgatgtcatctttgaggatgcccaagttgaatatttgaggactttttatcccagatcccaggggaacatgggtgattttttttttctaggttcctagtcctttattgtattgacatttgcatagttttctatccccactctggttcaagagtgcagatgttttgggaggggaggaaacttttagctgggattcccagggcacatgtgttgtgagtttctgatctccagatggatccaggggattgggctggagaggaggaaaagggaaggcttcagcgaccggaggagattcctttagctgctttctctttgtagcattctggattaaataatttatttacttctatttcttatttgcacttctctgttagtgcttgcctggacttctctatctgggaatgaggagagacattttggaaggacacatattcctaggtccttttctttaaagtaaggtcgcctttcaaatgtttttcaaaaagagtttgatcctggatcaaattaaatgcaggtatttaaaactccaagtaacgtcgttaaggattagctgctttgtccttctgccagccaaatatgtggcacaggtgtttctcttttccctgatgacatctgagagcacctcaaggagtgggtggggaaagttcgagtgtgctggggggaggaagcgagagaaggagaaaggagctgtgggttttctgccgcagagccttgatgagaagacagctcggagggcaggttggcccaggcttgaactgtcatcagtctaggcttactcgtgggtggggtggactgtgcgggctggagtcccagaagcttgatttccttccacgtgtgcctcagacagctgaggttgaggaggctggtggaataggcttctctcagacatcgctcagcaagagaggcagcctgtgatcctggtttcatggcattgtcctgcttctgagtgttggaccacctctcagaattttttttttgagactgagtcttgctctgtcgcccagattggagtgtggtagctcaaccttggctcactgcaacctctgcctcctga

SEQ ID NO: 57195 - DNA, 3194 bp, Homo sapiens
tctcattaccagctgaaagtgaatgacagtaccaccaagccagaaaaaacatagttggaacagaagtttgaaaagcatgtgatctttctggcctatgaattttttttgaacaagggcaatgtttccatgctttggtttaaaatcttaccagtgcatgtcatacatagagtaaggatcagagtaaccagagattggtatcataaaggatgaaaataatcaaaggaattggttatgccaatgagagcccaagaagcttttctacaatctctttacatccaaaatagcaggggactcatttctttgtggggaagttgagtgtgacagaatatgcatgaggtgggaggggaagaggccaccttggcccaaatgctttagatggcagaatcttcatcatttctgcttgacaaaggaggaaagagtcttgatttagaatgtgtgtggccatcacttatcgtgggtcctaattcctacattgatctctttcaggttagtctgaatgattcccacaatcagatggtggtgcactgggctggagagaaaagcaacgtgatcgtggccttggcccgagatagcctggcattggcgaggcccaagagcagtgatgtaagtgttgtgttggctctgggcacaccttggtgccatcaacatgcccttttctggtccactgggattatcatactggaaaaagtagtgggtaattggaacatggaatggatgaattgtatgacagggaagataatctagaaaatgatatatcccttgtttgctgaacacagggaggtgcagtcagtgttgcaaacagatccatgcaatgtgtgattacctttgggaagtaatagcatatggactggattgttgcatctgcccaagaaaataccagagtgccttcctgggcagagctgcctgcctgcagctgagcccgatggaatcaaattggcctttcccatatgctggtttcttctaacccattatagtgggatgagctgttgaaactgattctctaatattcttaatttctatagctgggtatttgtgatctttagtaggtgaggtactttgaagactcaagatgccaagggttataaactcaaaggcctgtgggaggccgggcaggtaaaggacaggagtgaagccaccttcaagtttataacactcttttctattttttttttgagttggggtctggctctgttacccaggttggggtacagtggtgtgatcttggctcactgcaacctccgcctcctgggctcaagccatcctcccacccactcagcctccagagtagcaggaactacaggtgcacaccagcatggctggctaatttttgtgcttatatatattttttggtagagatggggttttgccacgttgcctaggctggtctcgaacccctgggctcaaacaatccgcctgcctcggcctcccaaagtgttgagactacaggcttgagccaccacacctggccattacaacactctacctcctcagagaaatatggtttctcccatttttcttgaagtctgtggccttgttggacaatatatgtcatttccacttttgatggagatgcacattcaagaaacattctcccatatcttaatttgaacatactaatggatacttggttcctgtgttggagagacgtggggaaggggaagggcctttggggaccgggagaagcatgcttccgaggagcattgactgtcagctccaggctctggttgccgtgcaggatgctgggcccagtgttgccacatcttctggttttccagaggaacccagaggtctggagtttcatgtgaaaactgctgagtcttacaagttggcagccagtgtatagtttttacagacaccgcgtgagccaggtaaaacacatgtaagggccaaagctcgcccaacggctggtcccaggtctgcggcctgtgctctggactcctccttgtgggtgagaggagcagcccctgcctcagcctggggtctgacactgtggcagcgcgaggctgcagacggaacaccatgctttacagcttcggtcaccctgcattctggccgggggaaccttctgatgaatttgccagcactttcacactagccttaaggatacatttataattcttgaatgcggatttggtctctgtgaggtccctctctgtatatccactgtctgggttgggtgtgttgagaagcaggtgttgggaagttgtctcagggactgtttccagggagttgaattagggcagccacagaagggaagacagaagggctggctgtcaggatgcatgactttgcccggggtgggttctgagccatgctgtgtgggagaccaccgctactgatggccagtctgggtgtagtgctctggggcagggctagacttgtttggggcaatgactttggcccatttataaatatgatcaggttttgcaagtaaaagctgtggccaccacagacagctgtgtctgaatgcctttggtggccgggtgtggtggcctgctcccatagccccagctactcagcaggctaaggcaggaggatcccttgagccaaggagttcaaggctgcggtgacctatcttcgtgctactgtacttcagcctgagtgacagtgagaccctctctctagaaaaaataaaacaaaaaatagaaaagaatgcctttggccctgtgagactcttcatagacacctgtgtgtagtccctgcccatgggcatatccctcctgggcacaggagatatatatactgtgctatactgtgttgagaaatccttcttggaatttttatgcgtttaaaaaaactcttaatccagacaacattttttgtgaggtagataaagaccttaagcattgttttatagttttgctggacaaacaggagccaagaggtgtaaagagacttgcatgaggtcactcagcatgtcagtgggaaggtcggggctgatgagaatcaaggcccaatcatgtactcagtgtgcgaagatgtggtattagggtgaccaacttgtctaggttttagcactaaaagccccacatcctgggatcctcccttaattctgagtgaaccagggtggtttgtcaccctaagtattgccagtctattgaaacccaactcttgctctctctgtatatttgggtgtgtctaactaagagcccattgaacatgtgaagtgggatacactattgtggaatgaaatg

SEQ ID NO: 57196 - DNA, 938 bp, Homo sapiens
tttgctctttggtttataatgatatttattcatcctagaaatctttgttgagcacctgctatgccccaggtacactgaaagagacaaaggtgagactaactccggtttttcagatgaagagagagaatgtttgtaaaggagtattacatactgaaaaatgctaccttaatgtaaactatcacctttgtgcccctgaagatatacgtggggggttatcaaattatgggatgtcagagctggaagggactttagtttccttcctgagaagccattattttgctccatgtgatgtttgaacctaaccgggacactaatgtccattcttggccggcagaatagaagtgagaaagtgctacttcgtcattttacccactcagattatctgtgaactctcagcctgcacaatttctgaagctgcttttgtggcagctccttactgtgtatctggtagttgggaacacatactgtgtgttccaatagcttcttcaactgtgactcagataaaggcagaggctctgtcttggcctcttctaaccttaacatctagtaagtattaaagacgtgcatgtgctctctgttccctttctacataccttgtgtttacatagggcattgtttgcagacatttacatgtttacatgcccatcgtgtctaaagactatgtcttttattagtctttgtctgtctggtgtctagacaatacctggctcacatggaaccctcaaaacatgtttgctgatgactcagacaagcaaggattggaatacaccctgctccactttgaattcacctgcccttccttccctccctcccttcctccctctctccctcccttctcctccctcccttcccttccctccctcccacgcttcctccctccctccctccctcccttccttcctcccttcctccctcccttccttccttcctcgctctgt

SEQ ID NO: 57197 - DNA, 3056 bp, Homo sapiens
catagatacttctaaagtgacctggaaccaaaggaaaagaaggaaaacttaccttattaaaaattgtaggtagatttattttttgatgcattatctatattacagcttttataaagaaggtgagtggtacatgttaagtcactgagtgtatggaatcaggaagtgggcaggaatggctaacccaggcatgcagcaaaagaattccgatttgcatcttggtcccatatgcaacacactgtcaagatgcacactttagacacagatgctggtgtgctgcttgtgtccactcctggggaagaatctggatgtttcccaagccgttccctaagtggacaagacagtgtactgggtcttcctatttccagttgtctgacattaggtaagtatcttcagcactcaggaccttcatttctacatcttaaaaatcatccacggtagcgtctgtatcataacaggcagcacagtgtagtggttaaagcatagactctggatccagagtgcctgggttccaatcttggttctgccacttgctagttgtgtgaccttgggtgagttacttaacctctctggtctcagttttctcatttgtaaaatttggttaacaagagttctaccatcaggcagttgttgtgggtcttaaacaatacccgatacgtagtaagcacattatacacaatatgtacacaatttatatttgttgagtagaaacagaatttttgtggtgattatgttgtggaacattttgtaaatagccaagaacaaatgcattattagtattattttggagatctaagaggttcatagaattgccatatggtgttgtgaacaatatgaataagtgagcaaattgattagagagcttagttacaaagcttcagtgactaatggtctctcgtcaacaagatgatgatgctgtggtgatacagtcacgtgaggagggagaacagggcgattggtgtaattaggttggcaagtgtgacttgaagactggcaggcttagcccagaagtatggttgttgaagcatgcatattgggagatttagaataaagaaaaacataacaagtaaaacacttgcagatgaagaaacagattcactggagtttaagtaacttgcctgaggcagaaatgtgattccattacacacctcctgagtcttgatttctgtgctcttcacttggtccacaccacatgccaatgaatttgaggtttgtgtatgagaaacaaataggtcagatgtgctaggacctcttcagcatcccctgggtccaacctcccacgtgtcttgtgtgtctggcagaagagaacgagttcattctgtatgctgtgaggaaatccatctaccgctatgacctggcctcgggagccaccgagcagttgcctctcaccgggctacgggcagcagtggccctggactttgactatgagcacaactgtttgtattggtccgacctggccttggacgtcatccaggtgagtcagcgcttggtctgactgtgggagctgtgcatcgtgactgccctgtcctgataagctgcatgcagaatggcctatggaaatgggcagttagaagtttgtaagtgttactcatctcagggctgacaggtgaaagtttccagtcttctgtgttagtatttttctttctctgtcttcatctgttcatataggaaggataaagaaagccctaaatccacagacctgcttgaaagtgaggtcttgcttttcctgctgggaaggtgttgggactagtaatgtaggatgattagttgcccccctattgtgccaactgcctcttgagcatctttcttcccaagccatgatacagtaacacttgacttacccatagctcacataattatccacttcagctgttctgaacacaggtaagaaccaggaagtaagcattaaagagccctggacaggccaggtggatagccatacgctcacacccatgcatttaaaggagagctctttgatctttattcattgtctacttaatccttttagaaaagcaattccaacaaatttttatctagattccaacccaacagaaatttcacagtgcctgggtatttgaggggcttggggtgggggatggcggtgatgctgaatggagctgtccaacaatagcacttgatggctaagagcctcacagggaagaaagagtataaaagcagacacaagaactgaaatgtaacagcagtctggtttcacttattttaaaagcaaacagactcatacaatctcagtaatctctgactttattattgccatacagcataatttagtaaccagtgttcataatgataatgcagagtaatatatatgattaaattctctttattctgctttaaaaaacaaaaatgtagtatattttagaaatgctttcatgaaaacctggcttcatgtgtctggaaagtttactaacgtaaaacatctcatcccttgccagtcctgccagttgaataaagggttacccttcatgggactgacttggcagggggtcgtttgaacagttcctagcatttattattacttttctctcttaagcgcctctgtttgaatggaagcacagggcaagaggtgatcatcaattctggcctggagacagtagaagctttggcttttgaacccctcagccagctgctttactgggtagatgcaggcttcaaaaagattgaggtatgtgtattttcgtgctgttcttaattaagggagcaggcggggcacctgggctttgagccacatttgacacagaggcaagggccagtgtgtcagattactcaggaaatttactgcgagtttccagagaatggaccagctgagcctctggagaggagagaaaagggggtaagtacctgtgagttgatcttttggctagcagaagcttagctaataacaataaatggtaatatttttattttatttatatatgtacttacttattttatttatatattatttttgttttattttactacttttattaaacatgatggcaaaaactacaatcacttttgcatcagcctaatatcatggtattattataatgctataa

SEQ ID NO: 57198 - DNA, 1402 bp, Homo sapiens
gaaatatgataccccattttgagttctctactcttagctcttcttgcttgtttggataggaatatttgctctgcatatgaaaaggttagtgaaatgattttacagacatgatccctgtgaaaaaaatcatcctgtaatagagtagttttttttatttgttcgttttgtttgtttgtttgtttttgagacaggctctggctctgttacccaggctggagtgcagtggcgccatctcagctaactgcagcctctgtctcctgggcttaagcaatcttcccacttcagcctctgaagtggctgggatcacagatgtgtacccggctaattttgcttattttttttttgtggaggcggtcttcactatgttgctcagggtggtctcgaactcctgggctcgagtgatcctcccacctcggcctcccaaactgctgggattacagatgtgagccactgcacccagccggtaatagagtattttaaaataacatcatattccattattgttcaggatcttggaacattgagtgatatattgttctttgaatacaaaacacatgttcccacatccttgtttgagttgtttctcatgagtggtggctctatgtcaattctgcattccctcttgtagccagtggcctgtacctttgaactaaaggagccatctgtgcccactaatggatcagagtgaagggatgtctgggacttctgctctagtcagctggttagtctgctatggtaattaagctgttatgattgattatttactgaaccttttggactgtttcatcatgtggacttcccttcctctggaggtgtatgttttctctctatttactgaatcttttggaatgtttcatcatatgaacctcccttcctctggatgtgtgtgttttctctttggtaatacctcttactcttttccttggcatcataataacgttgttgccatagcattgtgatttttatttttatttgtaatgtaaattaaccaatgatgtgcccacacacccaaagctactgcgtatattatccatatcgacactgattatcattcatgaacttcgtctaacctgtaggccaggataggcatggcttagatgaatgcttggctgggtggcaacagatgatttggatatggtgctgaagtgtgggagggcatctctgtccatgacatagcacgaatgaagaattagcaattgagttttatctaagtttttatgttcatttttcccattttcatgattaataattgcagtcaaaagaaaaaacatgatttcatagtttctgtgaccccatagttgtatcatgtttcagattgttataaaatggtttatgcatcttcttacctgccatccccggaacgatgtaggggataggatggcacttttgccatcctcgttca

SEQ ID NO: 57199 - DNA, 1656 bp, Homo sapiens
gtccaatccttttaatttctactttctaaagtgactgaggtctgtagaggtcagggggcttattcaaggtgacacaattagtttgtgtcagaatggggaactggaatccatgtctcccattttctaatcctccactatttctgttgcacagtacctccttgtcagtttcatgagacccatcttagttaacagtccctggtcccagactcatagttgctgacctccgaaggagacattatgcaatcagcatggtgtgccagattgaggcatgagagggaagtgagagtggaggtcagacgctgacccagacgtggtgatgagttggcggggccctactgtgccctctctccctgtccacggggggcaggtccagccacgctgtgcttacgcacatggacacagcctgcttgattatgagcaggtggtttgactcacagcagctgaaataaggggagcaagggcagcttgtaaatcatctcaatgcaagttaaccagcagagcagagcctaggccatttccacacagaaaatacccctagcctggctcttggaaggtttttaaaaaattcccagttttccttcttcaagtgcctgaaaacatgtccttggaatgtgcaactatttccccttcatccctgccatttccttcccagcactcttagaaggttgaaatgtgtagctagttttgccctagtaagaaggaaacttcacgtggttccctctttctggtatcattgagctcacgtactgggtacatgtttgactgtgaagcagtttcagccccctgatcctctgttcatggctcattcttactagtttgtcctgaattcatcccagggtcccggttagccccttcctctgatgcaggtcctcttcgtaagtttccacactcttcctcaaaaatatctgatttactagctttgccatcaacaagcctcttggcgagaatgactgagacggctgccttgggccccacgcttggctgctcctgttttctgacgctctgtaaactccatgtgaaagttctatgccacagtctatttgggctgtgataacaaaatacttagtgtaggtaatttataaacaatagtattttgtttctcacagtactggagactgggaggtccaagactgaggtgccagcagacttattgtctagtgagggcctgttcctcatagatggtaccttcactgcagcgtcagatggcacctctgcttctggaaggactgcagggaaatgcttctatctgtacgcaagcgtggcagaaggagtgaacagctccctcccacctctttcttaaggacactaatcctattcatgagggctctgcccccatgacttaattacctcacaggggtcccatctcttaataatatcacattggtgattaagtttcaacatacaaatttgaagtttcaacatatgaagtataaacatttgaattttcctagcctccagaaccgagagaaataaattgctattgtttataagctcagcctatagcattctgtcttcatgatctccccaggagctttgaaggctattgccagggcagcctccttccccttcttggtcaagctctgctggttggttcttaccaggcccccacccttctagagacagcgcatccacccgtgtccctggagctctgcccac

SEQ ID NO: 57200 - DNA, 2332 bp, Homo sapiens
tatattttttcagaatatttttgtgcatatataaacaaatttaagtatactctgtattattgtcctatttcatacccataatgtttaactttgcgtattgttttgcaccttgtttttttcacagaactgtttatctagggcataatttttatagagcacttcttgcatctctttatagctgtctgtgttccagtgtacagtaatttattaaacagtctgttattgatggactgttttcaatctattacacagttttgcaatgcaacacttgtacttgtgggcggttttcaacctgttacaaacagtgttgtaatgcaacccttgtacttatattaagta[450 bp omitted]ctgagttgatccctgagtacttggctaggactcctggaggctgatcgtggcagagagacagggtttggttaaaggagagcaggaaggaagaaagcagggttgggggcgatggtgggattagatcgaacttcagtgaaagttattgtttagttgaaatatgttctattaattgaccagttgttttgaatcggccacttatttctacttgattggttttgttagtgttgctgagtatcactgggggtagagtgggggggggggcggggggggggcatttttaggccagatgaccctttttatcttcagttttctttagccccagaaagattgccttgggtcactggtgctcatccttgattatatattggaatcacctggggagctttaaaaccacctggtgcctggaccttacccccagagattctgatttaattagcgtaggtgtggctgggacttgggacatttatggtgctcctggtgattctactgtgcagtccgggttgagagctaatgttatcagtgcagggagtggcaaactagcctgtgggcaaaatccagtccctaacctgctctattaaatgaagtttgatttgcatacagtaactactatttgtttacatattgtatatggctgctctcatgctgtagtggtggacttgagcagttgtgacagagtctgtatgacctgaaaaccctgcaatagttgctttctagttgtgttagttggggttagttggggttctccagaggaataggaccaataggatatgcatatgtatatatatagatttactttaaggaaccatcatgcaattttggaggctggcaagtcccaaatttgctaggtgagccagcaggctggagacccagggacacactgaggctatatagttcaagtccaaaggctgtcaggctgcaaaccttggagagagccagttgcagttcaagtacgaaggtcttgctgtgtcctcacatggccctttctctgtgtgggcattcctggtgtctctctcttctcaaaggacacgaattcttttgagtttaggccccattcttatggtttcatttaacctccattacctttttaaaggccctatctccaaatacagtcaaattggggatcagggcttcaacatacaaattttgggggaacacagtgcattccataatattagttccttacagaaaaatttgcctacccccgtattagagagtcagtatctattaatcatgcttgagattgggggtttgatgccagacagctctggatttcacttttggcttcatcttcatcagctgtgtactcttggcaaaatacttaatgctactgcccttgttttctcattttgaattagcgacaataaaatctctcctaatgttgtcttgagggtttaatgatgcactttatgtcaaatgctttagctctaggcttggcagaaaacaagtgctcaataaattgtggcttttactgttgcttcctgaagccacatctgtactcgtgtgcacttgcccagggctagagggcccagccagccgcagtgct

SEQ ID NO: 57201 - DNA, 1811 bp, Homo sapiens
aataattaccttattgctaggatcctcggagaagaggactgggacttccatatgtaggtttaatcccccttttatcagtaggatatacttgctgtcaactacgcctatctaaacaactctctgtttttactttctccaaataacaaccctccattcttctattggggtgacgtatgggttggttgcctcgtgggactgataggaggggatataaggaatgtagctgcgtcttaaacatcattcagtcagttcccttattttaactccttcttcacttccagttagatgccagtttctgaacttttggaggactgtgtgttgttgatctgattggttctgagctttctcctgtgacggcttagggtaggacgcagccttcgctggcctctttagtcacataccgctatctgtcttctttccagctcccaaatctcattatccatgtcctcgtggatttaggtctttgaaaacaatctcttgactgtggctttagtgggatcctgtggggaagcaacattagatgtctgtatctactctgctctctatccggaactcgcatttgtcttcaggttcccattgtaatttctaaagcaccgtaatctcctagcatattgattggttgctgttattggccagctccctcaatattaaaaagtaaattttaaaaatcttttattttagcaaacgtcactgctgcctccactcccacccaacttgggcgatgtgaccgatttgagttcgaatgccaccaaccgaagacgtgtattcccaactggaagcgctgtgacggccaccaagattgccaggatggccgggacgaggccaattgccgtgagtagtcagagagcccttcaccccctgggcacgtttctgcagagagcacagttctggtgcttctgcttcatttctggatcagcacacgcctgtgtgtgagtctgtgtacttgcgtaaccatgctcttactgcattctccacaagcgctttgccacgtgcacccataccattgcgttagtcaccttctttttaataagttgactgcgttttaaataccaggagcgtgtccaataaaaatactttctgaatgactaagataaatattttaaataggtttcataagcatgtttaactctttaaaaacgcccttggggaaagccacaactcttctgtatgtacattcattcttctggaagtatttagtgagcacttactgggcgtagaagctgtgttattagagggtttgcctctagcaccccattaagaaaattcattctcagtccttagggtaattatggttggtgagatagtgtgccgagccacatggggaataatcacagggccatctgagcccagtgtgaggtgatgcatgcattctctacgggtttggagttggtgggtcctggtgtttggtcctctgatgaacccagggaggatctttgcagtgagtgatggagggagacactggcttctgcaagcgtttatcctcatgtgaccagtcagcgcttttcagtccctggctgcacgctaatgccgccgttggctggtctgtcctactgtagcagacttgggagggcatggctggacggtgcttatgcagccccccaccggcctgcctctctgacggttgggtgctgctctggctcggggatccctgctttgcgggcctcccctccatccagtctcctgctggctgcagacagcagacgtcctagccagtcacactcccttccttgccaggataagggcttcgtccgtgcttgcctgattcctgtcctggtgaatgtagaagacgcccctctcactctctgctgaga

SEQ ID NO: 57202 - DNA, 2336 bp, Homo sapiens
tctcaactcagagctgtcattgtctcaaacacgcacttgacactaaacatacatttttctctgacatatttgtattgttttttaagctgtatgacaaatagttatgctgagtgagttccgggcacctagcaggcaggcagtaaatatttgctgtacatcgaaagaatgccgttggcttggctgtcagtatggctccgattcagaaccatcccattgctgggttcttgaagctgggaggattgcacgttgaagggctggtcaagccctgcctgaccagaaaggtctctgtgaatactttggtcatagagaccagaaaggtctctgtgaatactggaacattctcagacatgccgagcaaaagctaccatcgcaggcaagagggacggtggggggaagtgcagctgggagttttcatagagacgtggttcctttgttctggtagatttcagccagaaagaacagcaaatttttactgtctgcaaaccactaaggagctactcccctccccctttacctccttccttcccaacctgggaattcatttgctgcttctctctcctcctcctctgccctcgggcagtcctcagggacaaagctctttgttgtgaacactccgagacaatacgggattgcacagtccccagggcacaatcggggctgtcctccatggagagtgatcgcccgggcagagacccccacctgttgatctcccccttcccggggcgagtggcaacctgcattgtgctggggacgcacgcgtttccacagcaggctcagcagatggtgctggtgagcaaagccattcccgtccctctcgcgcccctccccaccgccagagcctcgctggtctaaagcaaaaacagatgttttcatcatttctggatctggcatgtgactcgcagttcagcaatgcgccgacataacccagagttgtacgtccccatcatcccccgcaaaataaaaatcctgaacttaaacgagccttcctcctaggcgagccactgacacatgatctgtgtaatccacccggcacgtgtttaatcggactccaactgcaactgcctttgtagccagccccggctctataattgggaagttgtctttttttcagcgaagacacgggacagccagactagctatctttacaccaagggctgggaagaggcgctagccttttaaaatagccctggtctggctggctggcgaacctgtctgcgtgggagccggtgagcggggccagagcaaaacaggaaggccgcggcggcgcaccctgttcccggcgccctcggcaggtggcagcattggcccgagctggcctctgccgctggccagccccaaagcagggcccttttactttcggtggcctcaaaattattagttccagatgagttcttgcaattgtaatatttggtttaacccaatctgcccgactgcgtcagcgcacgttcaaatacagccgtctgaagtctacccagacatcagaggcatgtttcgggggtgtcaacattccttaccctttgaaagaattaaagcaaaacaaaacaaaacaaaaaaaggaggctgatttatcccaaaacgaaagaagggtgaacaggcgtggggctagggtgcctgagagggagcgagcagtggacattcagggaaggcgtaacaatggaactttgtccaggaggcccgctagagtggaactggatttatttgttgaactagaaagggacctctaggttctttgaaggttagagcaaataagcaaaactggcgtgcatttggtttaccaacagcagagtccttcaagtcacgtaggctgctattgtcagacacaaaacgcgttgtttctggggctgggcctctgcttaacacttggcttggtgtcccaggaagggggcagtggaggagggggctccccatcttagcacacagcttttaggggcactctgaatgtctgccaaggatgtagactgggtttcctaaggacagcagcctaggccgcagaggactcgtttagaagacaggagccctcctgcaggccctctggcgagtggactggctggagtcgtcaagtgtcttgtaaacggccctgctgtggttttactgcaacaccgtggagctggacacgggggagactagggacccatcccggtggtctcagggtattacagatgcatgagctgaggctaaaagactccctctgacccccagggcagagcagcaaaatgtgcaaagggagcccagaaatcctgctccaaccaccagccaggaaagggtgtctcttcccttagcagagatggaataacctggccttgaaaagacagcctctgtcaagcagtcccccacac

SEQ ID NO: 57203 - DNA, 1530 bp, Homo sapiens
tctcagtagatttttgctgattcccaagatactgagaaattgctcaaagcatttttggaactcttctggaaagttatgcatggacactgttggtactttcttaaatatcttgaaatgtggtacatcttcatccttagagggtggatttgttgaaagctattaaaagtcgccctgaagctatggccaatgaatatggtgggcaatcaagttggggaacattgctttggaaatacatgtgcctataaggaaattagattggtttgtgtggtatataaactgaatctgatcacaattccaaaaaaggcttattgagcaaacatagccatttcagaatatacactttgcctcccaaggagagtacttagaaggggtcatagattctgatacatttgtcggggtggggagatgaagtttattgtttcatggccactgcttgtaatagccttccctgaatagcttacagtcccagctagaataaaaagacatgcccctgagtgcttccgattatgtgcaatctgaggtccacttcccttgactttgcccttttggcttatgggcagctttagtgcagagtcagtttgctcattttttcaggattgtgcaaactgaccctgcatttactgggtttctgaagttactaaggattaaaactgactaagtcatgatctctgccctcacaggcctcacagtctaatagggaaggcaaacaaatagttgcaatacagagaggtaagtgctataggagagggacacatcaggagtagggcagatcccagaggccctatatgtatattatgctcgagcgtgtggactttttcttagagttggataggaagccattggcctttacagctgggatcaaacatactctaatttggcttgcccttctgttctacctgtccctattcctagcttccacgtcttgaccacaaatcgtatacaccctgcattagccctgaggacagctgaagtggaaattgttttgttttgttttgtttttaatttgaatctcactcccttattaaggagctctctggcagtgaaagagcaagaagagacttttcccaaatcttctccagaaagatttaagaggtgtgatttattataatttcaattataaaaggtttgggtttggcttaaagagttttcacttacaatgtctgagtctgttccaagggctgtaaaccatggcgggtttccagtggccccaggtagcatccccatagtcacattacttacaattggtaatgaatggctttgaccagaggggagtgtagatgagctgaatggaatgcttaagagcctaaaggcatgggagactgcttctggtggttagatagaattgatcatatcagtggcaatatgacacatatagaatatgttggaagacaggaagcctggagtggttttactcattcctgaatgctacgcctctgtgacatggaggtaggagtgccattcctgccaacgcactgtcattgaaatagattcatttgttcataagcatgcagagaaaatgtgtcctgactt

SEQ ID NO: 57204 - DNA, 1772 bp, Homo sapiens
tggggattataattcaacataagatttgggcagggacacagatccaaacaatataaggcatctgcaagccaaggattgccagccatcacagaagctaggaagaggcaagaaaggattacccctatgggtctcagggagagcagggtcctggtggcaccttgatctcagacttctgggcctccacaactgttagatgagaaatctctgttgtttaaagccatccaattggtagtactttgttacggcagcactgggaaactgatgtacccacttttcaggttccacgtctatttccttctcttgtgctcagtcaagataataaagaaaataaaattgtcgtgtgaaaagataaatcctagatttcagaaaacatggcttactagactgactcacttccaggatgttctaaagagtttctttttcttttttttttttttctgaaccttaaatttggggactacatatgcagactggtctcctttgagtaggagattttcatctgatttatgacagtcaacctccacgttagatttactctgagcctaagtcacagcctaatgagttttgaacaaatgggctgccttccagtgaactgcaaggtaagggatgacaatgaggtcctccctggtggccatgactggtcttcatgccatcagcagtgaatttgaattatgttaaattgtgaatgttactggagaggcacaatattttacattattagtatcattggtgactaatccaggatttatttatcaggttagccaaccattagcaggagccagacataagtcggccacaaatagattcacccagtatttattgagtgtctgccatataatcacacactggtccaaagtcttgcatgatctcactgactctgccctacaattctaacacatagttatctccatttagaaatgacaaaagtgagactaggaaaggttaggtaacctgccaagagtcacaccactagtaagagggtaaatggctccaaagctttggagtcagcttattttttgacactaaaatcatagatgagaaggacagagggaacagttcccagcaaggtgccgctctgggagggtgtgggaaaatgaaggatcactgaaagtactgggtcctgggaagtggtattcaaacacagttgagcatgaaggaagacttccagagtagaccatgcatagttgtggtcagcaggtctgaacgtggggtcagaagattcactattcagctcttgggctagaaactgaacctctctgagcctcatcatcctaaactgcaaaacaggcataactataccttcctccctgagctgttctgcggcttgcccacaatagtggatgtactagcatctaacatctagcagatattagataatccatacattctagctttctgtgtttttccccggtgtattttgggctggccctgagctaaagtcatatccctctgagttaaccccaccactgtgaagagtatgcaatgtgtcatcacaaacttaatttttaaaaacagacatttaatttttttaaatgatgaataaaacattttcacaataattgcagtgattcatccatttagtcatcggatatgaagattctacctataccaatcatggctgaatcagacccaaagaattagaagacactgcctgctcttaagaaacactcagttttttgtcttttcattgaagtcctataaggatttatatttttcagtagtctttcctgatatatatatatatatatatatatgtgtgtgtgtgtgtgtgt

SEQ ID NO: 57205 - DNA, 1553 bp, Homo sapiens
gacattcctcccaatgcttcatttgtctagataaatgtagcccatggcacaaaaatacgttcttaggctgggcacagtggctcatgcctgtaatcccagcactttgggaggccaaggcagacggatcacttgaggtcaagagttcgagaccagcctggccaaaatggtggaactccatttctactaaaaatataaaaaattaactaggcgtggtggtgggcgcctgtagtcccagctactcaggaagctgaggcaacagaattgcttgaacctgggggcggaggttgcagtgagccaagatcgtgccactgcactgggcaaaagaacaagagtctgtctcaaaacaaacaaacaacaccaaaagtacattcttaataaagtagaaatgcacggtgattatgctttacttatcatgctggcatttttctagcaatttttatttttctatcattcccaacatttttaattttccatgtatctgggatagaatgtggaattaaaataaaaattaaaacaaatctctgtctaagagctttcttgaagtatgacaaaggtttagggacaagccgtttgtaattcgctgatggcaggaaaactaattcactactggagaattctgacatctaaaatctacatactgatatgctggaggggaatgagagagaatgtctatgattttaatttacttaacctatttagaaaaaaaaaagtcatttgagtcatcctggctcactttctttagcattagtcagattgcatttccttaagcctgcgagtgtgtttctatgtaaataaactatgtagttcacttggggataaaagtcacagtatttagagattataaagacctattagatcatccggtctggcccacaagagataatccctagatagggaacataactgttgatctttgccaagaagccaagaagaaacagttggtaaaaatattttccatacttttttttttttcattttaacttatctaatagtgcttcagtcacttcccaagtggactagtaaaatgatcatgaaacagttcagcttatcagggagatgcaaagtttaacttatctgaattgacaatggtccaccctcctccatttgttaaagaaatgctcttgtttgcaaaatgtgaacagtgaagaatctgctctttgaactagccaggcagtttcctttcagttaagaaagtcaaaaggcaagttgtacctcactggttttcttaacctactttcactaatttcagagaaattagatattaaaacaggaatctgtacagagtagaaaatgaatgatacatttacaatttactgctttacaaaccaaagtattttccatctttattttctatattacataaaatatgaaatattattgaaacttgaagtatacagaagtttggcattagggtaaaagtcaaagtgactcggcaatatgaaccttaagaaataagaatttgcttaagaatttccagagtcagtatgatagttgtatcatgagagattatattccattagaaatgctgttaaaaaaacataatgtggcccttg

SEQ ID NO: 57206 - DNA, 1589 bp, Homo sapiens
aggctggtctcaaactcctgacctcaggtgatccacccacctcagcctcccaaagtgctggggttacaggcgtgagccaccgtgcccagccaaaagttttagttttaagcagaatatattctttattttaaaaactggtcatttgtatatctcatacatggcaattctattaaaaactatattgattaaccagaaaactctgcttcttggtcatggcaaataataaaaagtttactttccataaattcattttgcacctttctcttcagtctttgggggatatactatcctttaattatgcttcattcaatatgtgttttgcagattggttccagtatatcagtagcacttcgttactcaataataaaaagctacaaatagattaaaagactctcaagcccctcgaggatttagaacacacaccacgaatgttccatttatgctttgaagttgcttattggcagctgagcaggagcagtatgttgctctaacactgcaggctcaccatggagcatcatgcatcccaatttggaattcaagttatgacttgaatcctatacattttattcaaatataaaaatggcaaccacagaacacttgaggccttattcatcaaacagaattcatcactgagtcattctggaattgctgtctttctttcctggacttgatgaactttgatacatgaaatttggctgcccttggtacaattcaatcaacaattagagcactagaattgcagtgatcagcctggtttggaaacatgtctaaaagtttttgattcaatgtaaaagctgaatgtgtgtcccactcctctttccccactcccctcatcaaagccctcacagtcatatgacagcaggacttagcagtaataaataatgtatatccctcaaatgtttcaaagactatatataatataaaaagtgataattatttgtgggatccgaactgtgcagataaccctgaaaatggattcctgacccagaatttttttttttaatcacagcgagaaaagtctttagcacttgaagaaatgggacatcttaattttagcttctgatcacagtttataaactataaaacaaatttctttttaaagtcttataggaacaagaagtgatcttgactaagattcccctgagatagcctcgcaagtgaacagataataagatcacaaaaatgtgtttgcctgtgatctttagatggccacacacagcacacagtctactttcaggtaattttcaagtaaaaatctcagtgtaatcataatgtattgatttgttttgccttggttccttttcacaaatatattgatccacattccttctacctgaagcactcagaagagaaaggcaagatgcacaaagtaggataagtcagaaagaggtggctatgttatcaaacatttatttggatcacattttaggaaataccccataaagtctctactgtgcttattcaaagagtcctctttccctgaatttgtatcttgagaagttaagtctcattttcccctgccagaactggaacgatttattaaagcaacagaaagaaaatgaaaaagacagaatccatcttctagacaa

SEQ ID NO: 57207 - DNA, 973 bp, Homo sapiens
ctacccagacacatctcaaagaataaagtaacacaacttctatttccaacaggggtattgggacatgtttgcatatatgtgtagatttgtaagcagactcaagtacttgtcatccaaatctctcacttctagccttgaagtgaaagaacacatctttttcacattgtgtaaagtgaccttcctttactccaccctaaaattcagttttatactctacatacaggttaaggaacagaatgttctacctccatcgtttatgagctaatgctccagattgtgaaatgctttacacatcattcagcaattgtctcccaagtccagttggtattatcactccacattgcatagagagttgacatagaggaaaagttaagtgtctttcccaagctcgtatattattgtaatgacagctttagaattcagatttttctcccctttttaaactggtgagagggttctaggtctggctgaaggaatttggaggtgtcccttccctcattctgcattgtcagtcagctgttttgtataacatgtaatcccaaggtatagaaaaccccagccatgtggccttcagtgctgccatcttgggtgaccccaaagaataagcaaccaatggctcatcttggggactggcatcagagataaattcaggttgagaatggtctccagacatgtattctactcatgccaatccattggcacgtttctgtcattctgatcataagcaacagatgacaggcctcactcacaattctgcaaaatggtttatactatctagactaaaactaaagcccatctttccattacctgagttaattgtcaatgctctccgaatttgtattgtttttatacatggacagggttgaggagaggacaaattcaagatttgaagagagggtatcaagtacaaagtatcctatgtaaaatatttatgttttctatatatccacaagtcaagtggttattaatgtat

SEQ ID NO: 57208 - DNA, 1160 bp, Homo sapiens
tgataattgcaagttcttgggatccaccccacccccaaattagaatttacaaaatcagaagaaattttaagggtagtacccagccatctgtgatttaacaagtcctccagatgactctgatgcccattcaggtttgagagccattgaggaagcagaattgttcatttacaagtttacaatgactttcttagcaaggcaatcttagaatacagacttcctccactgattaatgcaataaatttgctctgttatccaacacccaacaatgactcaacagacttctcttttgcactaacctttgcgaaatactctttctgggcattctgcctcagattaatgagaaagtggtagactgctcacatattccagaagcctgaattaactgatttcataatgctctgagctgcttggctccaggttcttcctgttaagatttatgaacccagactgtaacaccatttctcaacatatcttcaagttgatgatttcatttcaatagtaaagttgaccataatggaaagtgaattaaaggaaatcaaacaaacagatatcgagggttgtgtgaatttgtcaaaaatgacttactaattaaaaatattaattcacaagtaggtcaccaagagcccctttgctttgattattcatgtaaagcccgttagtctgtaaattattcacttaaaaactagaactccatctagtctatgaagtctaaaacaaatattccttaaggtcaaatttcctaggactctcacattcccattaaaggtagacagagatcccatttaaccgatgacaaaacagaagctcagagtcttagctaaggccacatcattatggacaaagtcacaaggctcagatttcttgaattttcttatagatgtcaattcaattgtaattaataatgtattaagtacctgctctgtgccagaccctggattaggggatggggctacataagtttcttttcttttcttttttctttttttttttttttgagacagagtcttgctctgtcacccaggctggaaggcagtggtgcaatctcagctcactgcaactccgcctcccaggttcaagcgattcccccgcctcagcctcctaagtagctgggattacaggcatgcaccaccatgctgggctttttttttttttttttagta

SEQ ID NO: 57209 - DNA, 2687 bp, Homo sapiens
cactgaccacgcactatttaatcaaggcaccaagatgtcctatatcttggtgttgaagagattaaaagtgccctattgtgggctattaatatttcataccataacacaatgtagagataccatgtgaaaaaatgatgagcttgtagaaaaggcagtgagaattggagctcaagctcagagaagaataaaagctaagtatgaacaagtcacattttacaatttaaaaataacatgatgttcagatatattcccaaaacaaagacatagtagaactggtctgcactcttgttattctcttcattatatgagtacaaggttgagtttgggaggtctacatttttcaaaacactagcaccaccactttagcaaatgttcaggttaaggcaataaacttgtgtggctgggaactggagaccaagttctggtctccactgtaaaacttactgactttataaccaaaggtaaggttattttgggtggtggaaaaggtgaaaataagacaactgcagacaggactttttaaggaaattgaagttttccataaagcattaaaagctatagaaatataaggtcatatttattcagtcaccattttaagcacctataatatactctgagtagcaccaagtcctggggatacccaagtgcatatactgtcatcacgtggcatccatgaagaattggttccaggatcccctgccaataccaaaatctgcagatgctcaagtcctttatataaaatgtctagtatttgcatgtaacctatgcacatcctcctgtatactttaaatcatctctagattacatatgatatctaataaaatgtaaatactatgtgaataattgttatattttattgtttagggaattacaagaaaataatctgtaggtgtgcagtacagacacaacaatcctttttttttccaaatgtttttgatccagagttaattgaatccccagatgtgaaatccatggatgtgaaggaccaatggtaacaaaccattggtgttttttattcattactagaatagctgggaaacatccttagaacatcagtccaaagtgacttgaagtgtaaaaaaattggatataagagagcttttaaagagagttaagtttccttcattagaaaaaaaaaaactagggaaggtaggcctaataactttaaaaaattcatggcgtcattttaagaagagcttaggtcagccagtatgaaaacaaagaaaaagaaaagttagcctcaagtcatagaggaaaaaaaaaaaaaaagatttggaaagagattagggagactgatttttctggaacactagagctagttattgggggaaaaaaaaccccgtggaattgctctgctggaagcatttggaaagtaattagctaattctctttctcaatgtgtttaaagataagactaaaagtgggtgctagaatactccttttcttgaagctccgcttctagaactctgaatggcaatgaggtggattaaaagtctattctcttctccctcccttatttggctggcatgtctaattccagaattggaaactcatagacattgctatgaaatgtatcatagatcatgactcactatgaaaaggacaagtgtgcaagttgccttaccagtgaaaaatcctctgcctgccctctttcttcctgagacaagacttcagttctttctctctgattcatatcctgaggaaatcaacatgataaaaaatggctgcgttcaattaaaaaatgtctccaacccacactttaaaaacataagctcttttcaatccagatatggattatcttcctgagaaagtcttttccttcagaagaattttgtgccatttaagataggcaaaacaggcagaatgccattcctgcaatgaaagttacgcatttagccaacagatttgcaaagtgcatctgccatggcaatggatttaaagatgggaattagtaggagaaagaactatggtttatttgagcccaccagcatcaggtattctaggtactcttcaacagcagcagttaacattaattgaatgcttgctaggtatcaggtaccattctaagttttccttgcattatttcatttaatccaaacaagttcatgacataaatcctattatggatcctaactcacagatgaggaaaatgaggctcatcagaggttaaccaattttttcaatatgaggtagcaagtagcagagagggctttcaaatcagaactgtctgacatcagaacttaaacttctaactattcctcatacagtcttttaggaaaaggtagatacaagatctccattgtggatatgagaaaatggaaactcagagaagaagagtagcttgattaagagcacaaagattactgatgtttttggcctaggatttgagctcaggtcaggaggactccaatgttcacgttccagtcatatcgatagaaaacctaggagatgagtagatgtcctgacattcattccacgtagattatttttaattcaaataagcaaatgcccactatgtataaaactctgtacaagtcttactgcatgtaagactttgaagatagtatgaaaaaattaaatatattgtacctgcctccaatgaactttaaattctagttgacagagaaaacacacagatgaataaactaagatcagttgcaaagtattgtgacaccataggtaaaata

SEQ ID NO: 57210 - DNA, 1547 bp, Homo sapiens
tccacagtaacctgagttactactagtcagttaacaatcatttgctcagtaactactcttggccaaagaccatggtaagcatgaggaacccgactaggatgactaggccaaccctcccaggggtcacagagtaacaggtgaaagggagaagcacagcccagtgtaaaactcctgcaaaggattatagggtgctgtgaaggaaaataacagaatatccaaataatcatttctaggttttatgtttttaacagaaaagacatgtcagacgccacaaagaatcaggagcagtcagtctgtaggaatcgtcctggcctgggaatgtcagaaagaacattcctagtccccagtgcccagataagggcagtggaggctgaactcagaagaggaccactgagcaactggccacactgggggctgtactcctcagggcaatgaggaggatgagaatggaaggaggaggcctcccattctacatccttctccggcagaccccactcaccctgccaggtgacagttcagtggatgtgacttccacccgtggctaagcaaggaaacagcctctttggaacttctccaatgtcgcagctctcctgtccccactgctgttccactcaagctcgcagatgagcccagctcctctcctccattctaaacgcctctgtttcagggaagcgtttgcattttccttggcacaggtacagcttgctgaattcttttaggccaggccaattacaacaagccctaaaattgctgagccaagtggtttcttcagagatctgcttacattccctccctgaaaagagcagggggcccacttcgtgctgtctctgcacacaaaaagtgcacgtttcgcttttaaggtggagtaggcataggacagttttcccagagagagggtgagatgcaacctattttcactctgtttttacttcgcctaattgggcttcatcccatttcagaggacggacaagatggctcagggccggctcccttgaagaccgtcttgagaaagggctagagaggcttttagtgcaagccccacgggatcacaagttgaaagaagtatttacatgtgtcagtaccctctcattcctgaacttcaactaggttcagggttcagtattgcaatcacattctcgtaagttctggctttgggaggaagatggagtcagtaatgcataactttgatttttttaagtaatcatgatatttgggtagaaataactcaattccaaagaattatttagattagtctaaagttgtttttttttcctgattttgaaattgttacaccatgacttttcaacaaactcacctctttgtttattttctattatgcttacatcagaatacataacattccctagctatttctagcttagaggaagacattgagagattatcttaatgagaacaggtcaagcggtggcatagccagtttggaatttaaaattatccatgaataataaagcacctaatctggtgcagatcattgagaactgaccaattctgagaggtacttgccagaaaaccaaatagtgtccttc

SEQ ID NO: 57211 - DNA, 2668 bp, Homo sapiens
tgctctgagtctgaaggcattcttcagatggggaaacaggatctcttgaaaagggaaatttgaactcattctcacagatgagatgacctacatgtgtccagagatatgagagcactcatttagagcagaactttcttactcagacagaaactaaagggtcacaaggtaaaaaactgccatttttaacttaaaaggcaaaaaatcagggcaaatctcatttgcagatggataaataaattctaggaacgtaatctggttctaacatccttatcaaaaagcctggcatgatggacaagagggtctctggtggtcaatctcctgggagggggctctaccaagagcccccagtgccactcaacccagagactttcagcccccactgggtacttggcaatcagaagtaaccacatgtctatgcttttgaggaaattttacaaactgaaatttgcctggcttaattacaaggatgcttggtttttctatatcagctaatgaatagtagaggttcacatttccataccaagaagggaaagaacatcctaaactcagagcagtcttcaatgtgggaaaccaaatgggatggtgagagggtcaagtttcttgtctttcatttagaatatagcaggactcaagagctgctcatcttcagggaatttcataggtttttggctagggaccaatctgggtcataaaaagaggaaacccccctgggcccaggtagatctctaaagaaaaagctttggttgcctgggctttgtttagcaaaagaatatttttttcttgtcctagagtcagcaaacatactgccaggtaatctgagaggcccacagggagactccaagaagacaagcccaatagtcccataccaaaatctttcatcttgaaggccattaatgtgccacatcttcactacatttccaaatgcctactgcctttgggtggcatcacagcaataaacacaggacttaattaaaagtcatttccatttcattgctaaagccaaggaaatctggtaccacagccttgaatttataagtaggaaaatggtacaaaaaaagtgagggtgggaactaatttaaaacactaaaagtcactcaacactgccagtgggtggtgcaggatattgccatggcactttctgttaaatttctttctcccaattctttgcagaattctcctcacttttgtgtgcagagagccccactaactaaaagcaacctgagtattagatattatcaccatgaagggttggggcaatgggacgcatcaaatggcatcacccgtcagggaagtacaaacctgcatccactgccctatttctaatcttgactcaccctatgacagggtcatactcccctcatcatgagaggttatgggggagtttgcacagctaacaggccactgttactccctgcttgtttgtcggcaagaaaagtgcagaaagttcagttgctcccattggccattggacaaatgcccagttgctctctggggaaatctgattgtgtcatagttaattcctccctcacgcatgcccctcctttatagctgcttagttgccaagctctgtccattctttctccattgtatttcttgaattagtccctttcttttattcctactgcaattatcctcagtgaagttttcattttttcttgattggactattgctatatcttcttacttggtttcttactgctaggatctatccactgtaatccattttacatgtgacttgtagtttagtctccctaatacatgtctctgattatgtcactcttatgttccaaaactcatggtgattctttgttgcctgcactggtcacaagtgattctgcattgcctactgaccaaagtccaacaaataaattgacagctttcttcacaaagaagaaattgtcctatgactcacatgttaccccataattaaaggactgagacctagaaagttactcaaacttcaagtagcccatgccccagaggtaaatttcacttgccctatttaaacaaggttttcttcgatatattctccttgtcacaatcaaaaagttctttccagtgtctgccttgaattatcccctaagctcttgaactctactatctttaactattatttgttttaatagcaagttccactctcagaaatgagactagcaaataaaaaagaaacaagtgactcccaagaaaaacaccagagcatgacatcatagtgagttgaaaggggctgaagttggaagtgggctaatggctgtttatgatttttgtttgttcaacaccatacgtcttaggaccttaaccctctacagactattatcttgatggtgatgggtatttctctgctgcacttatacttcccttcctcaaatcataaaacatttattatatatcaccacaatcaagttgtaataataatccacgatgatagcaatagtctaatgaagaaatatgctctggtaaagatccttggatatcagagagcagtgtaaagattgtagaggacaggtgcagtggctcacgcctgtaatcccagcactttgggaggccgaggtgggcggatcacctgaggtcaagagttcgagaccagcctagccaacatggtgaaaccccatctctactaaaaatacaaaaaattagccaggcatggtggtgtgtgcctgtaatcccagct

SEQ ID NO: 57212 - DNA, 953 bp, Homo sapiens
agagagagagaaagaaaaagaaagaaagaaagaaagaaagaaagaaagaaagaaagaaagaaagaaagaaagaaagaaagaaagaaagagagagaaagggagaaggaaaagcaaggcaaaatgcagtctaatcgagtattcttcctggtggggaaaaaaaagtaaatccactatcctggaacgagttcaaacatagcttgacaggctccaggagaatttacactgagcatgcttagccccgcactgcttgcatgagacactcttaatgaatattacttccttcccactggctattcctgctggaagtccacacccacccctctttcagaagtcaggaatttagcttcagccaaagtccagaaaacatgcttatgcggagacaaggcctcaccgatccataaactttcaggttgtgacctgccggtcagtttgacaaatagaacataggggtgaattttttttctgcccttggttatgttgccagctttatgcctgtcctaaactgcagttcctctggagaaaagaaaaacagacagctttctttctgaagaacatgacgtcctcaacaccacagtaaagacctttcctgatcaagcttccaaactgaaatcagaataagggtcatctgcatattaaaacacaacactcgatgatttttagcttctggataaaacaaaagtcctaccccaaatgtatgctttttgataacttacataacacctctctcaaaaatgctgcatgccaaagcactctctgaaaatatgttcaaaatccagctttaacctgctatgttgtctaaacattggacttgtatacatttaggtcacactaaaaactgactttctttttcaaacaatgctttctctttccctaaatccctctgtcatgtttaatgacaggagacctgaaattctgaaaatttaaaaatagattacttttctgacagtctgaga

SEQ ID NO: 57213 - DNA, 465 bp, Homo sapiens
aaaatggacaaatgggatcaagttaaaaaccttcttcacagcaaaggaaacaatcagcaaagtgaagagacaaccccagaatgggagaaaatagttgcaaactacccatctgacaagggattaataaccagagctcaaacaactctatttttaaaaatccaataatccaatttttaaacgggcaagagatttatttatttatttatttatttatttttgtgacaaggtctccctctgacacccaggccagagtgcaatggtgcaatcatgactcactgcaatcttgacctcctgggctcaactgattctcccacatcagcctctccagtagctggaacttcaggagctacacactcagctaattttagtatgttttggagagatgagtttctgccatgttgcccaggctgatctcaaactaccaggctcaagtgatccacctgtctcagccccacaaagtgctaa

SEQ ID NO: 57214 - DNA, 2209 bp, Homo sapiens
ggatcatgctggtggctgtaatggatctggcagccccatagtcactccttcttccctgtatttatctgtttacctaatccacttcttgaccgacagctccttgagggcaggggctaaggactagtctttaattgtacctttatatctgcagagactagcaaatattaatacctatgaggcattaacgacttcacggtttccgaggaaagccagaaggtatgaaactgggactgtggagcaacctcttgcttttcatggaacttttagcctatgaggcacttcagggaaaagaagttcttcctggaacccaggaagctgagttcctcacgtctctgagctcagagcgtctatctcatgtcaagatcccttcgacaagtgcaggagagggtgacaggacggctgcataatcaaccccgccagctcacacgcaagctatgacctccagaagggacaggacacctttagaatactttctaccatttcgcaagcttctgggcacgaagttctctaatctcaggtccccacgtgactccacagtccatttttctcttctcacatctcatctggtcaagcttgactaaaattatcttgtgaaccacccaagtaaacacttgcctttgtctcttcaaatggtgtcgatgatatgtcaatgtacacacacaccaaactgatatagtatcgctagcagtgtctctttaaagaggagatgttttggaaggcaggacactctacagtaagagccttttgctgtgcaaggttcacagctgttgctgtggcaactctcacaacctcgctgagtatccaaataaatagtttgttcttttttttcctccctaagtaagatgggggagggggacgatcgatgagacttgctattgggatccatttggagttctggagtcagtgcaaaaattgaggtttcctaaaacgacaaagaaataaaggctttgggaaaagcccacacccctcaaaggctgcagatggaaaatggaagggaactgcgtgctggaaccttagcaggcgccgtggctttgaaaagaagctcccagcagcaaacacccaggcagaaagaaagaaagctgcggggttccgaccccacattccggcggagagctcgggcctctctgcgggggggacgcccagcctcccccggcctgccaccccaacccccctcctccgctccccccacagacacgtctaaacagcccaggatctccggttaaacaaagagagtggtatgccttaaaaaaaaaaaaaaaaaaaaaaaaacaaacaaaaaaaaacttttattttcgtgtgataggtgatatgtggaaaattaattacaggaaatagcactgcgaaaagcagcagcattcgtctttaaatggatatggtcccccccttctccgcccccctcctggctcttcctcagcccggcgcagacagacaccgcccctaccctcccccaaactcttttgttatcagttgaatcacgtctcgtgccaagcaaaaggtcatttcaggtcatcttggagatgaaaggacggggtaatgtatatgaaggtgcgggaattggcaagcccaaaaaatatatacatacacatatacatatacatatacatatacatatacatatacatatacatatacatatacatatacatgcacatagagacagagagagagaggtggggcagcgcgggggcggggggagcgcggtagtggggatgtgagaaacgccagcattctaacaagaacagagtgatgccagaaagacgcaggaaatgtttcaaagcatgacaagcactgtccaatctgtagctaattccttataaaaataagaatgtggcttataattgttaggtgcctggagggtaattagagtttctaattgttctcatccacaatctcatttttgacccttcatcagagagcgagagatgccgcccattgcgaaagtgcgcgttctggaaacgtgctgcatctgcggggctttggcgaacgtgctctgctgggccagagaggcgggacatatcagacttagagcctccaccagaagggggttgggggcagagggttggcctggtccagtcaccctcttgaagggaatttaaccaccagggtatgtgggcagtatatttagggtgtttcagtagcaagcacagatcactttgtttggagataagaagagaaaaaaaaaacgaaacaaaaaaaaaaataccttgca

SEQ ID NO: 57215 - DNA, 1049 bp, Homo sapiens
ctttatatataacagggattttattggcttttttgcttgctagtttgatagttctctcgttttgcttaataattcataaaaatcttgatccaggtgaggtgtggaaaaaatttaaaatgttaaaatcttgggagccctgcaattcggtttgcaagctgcaggtgcccctttgtccaccagatggcagggcagctctgcaggtaacttctggcgccgtctgctgctgcctccgcctctgcctctgccctgggaaagcagcgccagttcatctttcaaagaatacgtcccttcttgtctttagggtttttcccccaaagaatattttcagcagaagtattttacatctcagtctagagatgaacttccccaagagtgttgtgtgtaggcttgccggtttttttttaaattattattattcactataaatctttattaataaagatttaacaaggacctaacccagcagttcagaggtacagaaagtcaatgtgtggaaagaagacggaactgatcggaaatgtttattcctctcctaaatcaccactgacaacgacaaccacacacacacacacacacacacacacacacacacacacacacagctgacgctcagaatgcgtagggacagagacacagggagcaggacaggaagcaaagggtagttatatatggccgagaggaacatggttccttagtaagtctggaaaatacagtattgccactcaggaaaaacaaagaggcgcgccatactgccacccagtggtgtgaactgtttctttccagacttaatgcaaacaaaacccttctttttatgcttctgatggtggctgagatcttcctctcaaagaactacattacacagtactgcttgctcctaccagtacctgacacgggtgtcaggcccaaccacgtgctcggtgtattcatagaccttagtcacggaagcacagtcttgtccggatgcacagcatgtgagcacttgctctccaaacttaccatcttccagctccggttaatacagcagaccattcatgcgtctaggaaccaaa

SEQ ID NO: 57216 - DNA, 1582 bp, Homo sapiens
ctgtgcccagccggtgacaagttaactttagtctctttccactatctcttgttcataacaatttactagtccatatatgtacaggtgtaagccactgtgcccagccagtgacaagttaactttagtctctttccactatctcttgttcataacaatttactagtccatatatgagatgtgattatgaaataaagaacaagatcgatatttcatgtaactatactgaaatgaaaacatctaaatccctgccatccccagcatagcagtacatcttgggaagctacccacttggcctaactccactcactgtgtttgctcaaaacatttttggaatgcttctctctgccagtcagagccccaagcagaagacattcacaggaaatgaaatcaatgatttactattcatccgccatagactgttactcatcctgaacaagtgaatgagtgattattttcaaaacagacgaacagataagagcaagccacaaccctcacaccacttcacagagtggccattcagcactcagaccaagtatccctcagcttcccagaactttttccagatacgctcagagaagcacttgttggcaacttcaccaggagccactttctaaatggggaagagattggctctgaggaacagcatggattagtcacaggaggcgagggatggtgacattcctgaaaacagaggggaccagaaatagatttacacatgtctagggcactcttttctctacagaaaggtttaaaaacactggctctaatgaggggtgggtggtatgtaacaagggtaatgtgggagagaggcaaacccatttcagggaaaagcacttccctggagatgttctcaagagcctttatttacagaaaaagttgcgtgaccgtgagcatcctgaagaagaaccaccttcctcagatttcaaaggccaatcatgttgatgctcttagccagtgattactagctggatctgtggatttgtgagacgcctgtgtggtgatgtgaaaacggaaaagtccaagaaccggaagccaagcagcttagacggctctggcaccttggggccagtgctaggcactcagagtgagagcatcccctgctcaggtgaagtaatctttcctgcaaggctctacaaccactggagagagacccaaggtcctccgtcatttgaaaggcttaactgcaatttcttttttattttactttatgtctaatttttaaaatagaaacagggtctctcaggccaggcgcggtggctcacgcctataatctcagcactttgggaggccgaggtgggtggatcatttgatgtcaagagttcaagaccagcctgaccaacatggtgaaaccccgtctctgctgaaaatacagaattagccagagatggtagtgcgtgcctgtaattccagctactcgggaggctgaggcaggagaattgctcgaatctgggacgcagaggttgcagtgagccgaggtcaggccactgcactccagcatgggcaacaagagctaaatgctcttgttgttctcaaaaaaaaaaaaaaagaaagaaagaaaagaaaaagaaaaaagaaacagggt

SEQ ID NO: 57217 - DNA, 1093 bp, Homo sapiens
gtgaagcacacaagcagcccataaggttgggatcctccgtctccaagtagcgcgactacagctcttgcccgcacggagcagcctcggacagcgcggccgctttaagagaggggcggggcccgggtacaggcaagtcagggccagcccacaaggctccttttcctttttgatccattcaaaaattactcattgcaaattcccggactgctaggcgaggagagggaagggggcggaggagacagggctactgcaggcgcagagctgggggcagccgggggcccgagtggctgaggctggtcccgcagcggccgcttgccggcgttctggctcctgtggcctcaccaggaagcgtcagagtcccgacactggggaagctcggagcgccgcctccgctgccgccgcctcctgcctggctctgggtccccgagccccctcccctggcccagcccgactccctcctccttcccgaaccatccggctcgggctccttccctggcgatggctggccgctgagccatggctcagtacggccaccccagtccgctcggcatggctgcgagagaggagctgtacagcaaagtcaccccccggaggaaccgccaacagcgccccggcaccatcaagcatggatcggcgctggacgtgctcctctccatggggttccccagagcccgcgcgtaagtggccgggctcgcagccctcggcgacccctcccgcgcgcgcggccggccctcggcttcgctccggctcgcctcccagcgcctgcgggacaggcagcgcgctccccgctgcccgagacctgttgggggcgggatgggcgcgctggcaacccgggactcggctccgggcgggggtgcgggggaagacgcggcgcgggggcgttgggccagggctcgccgtgggatgcctaaagctgggggacgagggcgcggggttcgagtcccgggtatagtgctcagcctccgccccagccgggtggagctcagcgtttctctcgcgcgctcccctaggtctccagcgccgagcgcctagggaggcggggccctgcggaggactcgggcaccctctccgtctggaatactgggctggtctg

SEQ ID NO: 57218 - DNA, 3224 bp, Homo sapiens
gccctgttatatttgttctgtcatttaaaattaggaactcaccaaaaactgtgttggtggggttcattgcaacttgattctttgcggcatcaccgatcaaccgttcagtgtccgtaaaggcgacatagcttggagtggttcggtttccctgatcattggcaattatctcgacttttccgtgctggaaaacacccacacaagagtaggtggtgccaagatcaataccaactgcaggtcccttggacatggttgctgaaaaaaagaaaaatctggtttaaaaattcaattaatcaaaatatttccctcatcccttaacagaacacttaaccaggaaaaacgtatggccactgccaagaggtaatagtgcccatcacctcctgtctaagcacgcgcgaggtccagaactagtgctgcagtccaggttgccgtgccaaccgcagcagagcacgccctagatgaaggacccatctacccagacggcgtggggcgttgctcaacacgtggtcttaccccgaactgagcactgtctgttcccctccctcgccaggtgccagtgcccccgggagtcaacgggcttttaactactccggaatgtacccccatactggaagcacgccaagaacagctctgaagaaccacggtgggactggactaagcagggaactgggtgaaagaaaacgctggctccacttccccgcgcgccaggcaaaccgatgcagcaaccctcccccgccacgcggccgccgggcgtctcccagcctcccctggggccactgcggcccactccctacatttccgtcctgccggctgcaaccaaataccgctgccatcccaccgaaaactgaggccctttaagccggtagaaggagccgcacactcgcctcgacgagattctcagaacccccaagcctcagcaagcccaacaggcctgtgtggaggctgcacgctcccagacccacaacccaactcttgagcagaggttttacctggggtgtaggcctggctccaataacgaaggaagccacaaaaaacccaagagctgcaggcgagttcaatgagaccggtttccgcccgccaccctgcctcttataccctatcttagaaccttccagaaggggcccgcccctgctgcctgccattacggcttccccggccaatagacgcccggctgcccttacaagacccaatcacaagcccggctccactcctcgggcctcgcccccttccgcacccaccccaccgcgctccgcctcacgataacgcactcaccgcagcgttctggaactttcaagctcgcccccgctctccggacggccccggggaaagggagggtggggcgcagcgagtccgcgcgcgggagtcctcagttaccccgggcgggggaggggagcgtccacctctacgcatgcgcccccagcttccgcgggagggagggggcggaaaaaggaggaggaagaggggcgggcaaacttggaactaaccaatgatagcggcgctagccgggatcttggccggcacagaactgggggcggaatcgcgcggggcctgaagggaggggtttgggcgcgggagccgggcaggagaagacggaagtggagcgaggacaaaatggctgcgaaggttgttgctcccctcccccacccacgtccgaatcctcctttccatgccccaccttcgtgttccagacgggcctctaagtgccccgggtttcgcgaatctgtatttcatagcgtggctttggacaagggctgaccccgaggggctggggcgaaggttccggcttcagggtgccactagggctgctcgctcacggccccccaggattgggattggagggagccgccaggccgccgcggggtggggcgggttagctcggcaggcctcccagcacctgcatttccctacggcaactgtcgggaggcagcccccgacgcagaggtttaaggggcccggcttttcagaaccgcctcaggacgcggtcgtgtctggatccctccgcggaaaagaaggcgaaaccgcttctctgagccctgaccgttaggccccttcccacctccgtctagaacagattcggcttcttggctcagtccttccccaactagcccaagccctacatttccccgttgtttataaaataaacaggtttaaatggtggcgagtgtgttcttggttaggtgaaccaggcattaggaatcataggttccagtagccgtgcgtccttgatttagactttctgaacgtttgtattttcagtaacatgaggtgatatctttcctggtttgactttcatcaaaaattaaacgacagaccataccgacgctttgaaaacgtgactgagctggtgcacaaaacaatggtgcctagaattttgaattgtgcaatgttgtgcatggccgcggatatgtggggccttgtggttccaagagcctgtctcaggtaccttgaacactccctgtatcctttcaagcaggcgaggtagctgttattcctatttagtagataaataggcaccgatgggggaaaagattttttaaggctacaccaaaagaacttttagtagcagggctggaattagaaggtctctagactgcgaaaaaggctgtcagaagagcgaggacatcttgtccttgtcaaagccagtaaagggtagagacagactcaaacatatgaagaatttccttttcatattttccttttggggaggaatgttggcttagagttcatggagatatattcttagcctctcccacgtcccaagaatttaattttatacaatgctttcactacatacaaaatgctttcatttgtcatttaatcatcaacacaattctctaaggtgtgtattattcatccccatatcaggggaaaaatgcagctcagagataatcatttgtgggaagataagcagctgggtaagctagaatcaaatctagcttttttttggttcaagatttgttttatgttttttgttagttacgctacagtgtaatttccttcctggaaataaattgaactcaactccagaaagagttaagatatgtactgtgagccactgttttcagtttcctttggtatttggaacccccagtcccccacgctaactgctagtaatgttatctggaatctttcttttcacaccccagtgcctagagtttaacaagcacaaattttaaactacaccctgtgctgtattttgcgtttttgtaattattttaatcattgaa

SEQ ID NO: 57219 - DNA, 744 bp, Homo sapiens
cattttttttaagttgtagcacatcctcaaaagttacaaaagattgtgaacatttaagggatactaaacataatatttagatatagtggatttatgtagtacatttcttccaatctcttttactacttttacatgtcatttgaggaaaggaaagacagattttctgttctagttaatggattttaaaaatggcagttcaggaggttcagcagggtatttcaggtcacatagtgagttgctgagaaagctgatttagagctcacggatagaggactattttgttggctcaatagattggtaggaagatgacttaccaatcctagatttgggaggcagacgttcatcctctccctctttctctcggattcgctgccagtaatacacaatgggctctgtgccagaggatgactcacactgcaaagtcaggtcacttccttctgtcagctctccttccaactcacacttgggcttggatggtctcactggcaacagcaacaacaagcaaaagtgtagtgattcaaagatccccaaacaccagattcaatggaaaaattatgtcctattgagttgcttctccagccatctgttttggtcaacttttgagtggggattcaactagccttgctttacactacccccaccaaaacatccacctccatcccctaagcacacatacccgcaactccagtggtgctgttttaatttttggggcagaggctgcctcattacttctcaaagaagaca

SEQ ID NO: 57220 - DNA, 1656 bp, Homo sapiens
gcgcctagaagatgagaacattcattgttcagaaaaacaaaaattagactgacacctttctgaaggaacacagcctatccatggcacaaaaacaaatttttaatcaagacactcaagaagtaggtatactcctgctaaaagtaacgcaggtgctgagaagaggtgccaaaactggctgttaggagtgggaggagaggaaagttgcaagtggagacagcagctactggcttgaggggacctcagggtctgtcacagtggcagctgaaaagcctctggccaaatggacgccaaggactactatcatcacaggtgacaagatcacgggtgagtgtatctgggtgtgtgctggggggctgaggggggcttggtggtgtaaggagatggggctagccggggcaaggagcccgcggagatgatcttaagcaatctgagaggaggggtaagaaaaagctgcggaaaataaaggggcctagaccactcctccctcggttccggggggacagttggcgcggaagcgttaggaggtacgaggtacggactaactacatttctgcaggccccaggagggggcggagggcggtggctggaaaggaaaggaagccgggagcgccatccgtgtccccggagatactggctccggccaccaggaaacacagagaccacaacgtctcggcaccctcagtacaccgccgccaccccttccccaggacacggcgatttccccagactctggggggcggggtctccggtccctccccctcctccccgccctgcccggctctgcccgatctggtccggcccggtccagcccggcccggcccagcccagcccactcaggactcacggctccgacagctccggcggctcctcccctgccccggcttctctcccacccactcccgaccgaaacagcgccgccggatccgagccgcgcggggcctagcgggtcggaacacgtggggcctttgcgcccggaaccggaagcgatcgctcgccccgccttctcgccgagtaggagcctttctaggctgtgggaggtttgatcctctctatgcgccctccgcgggttgcggctcagtgctccccaaggacccagtgcgaagaagcctcggaccccacagctgccgtccgcgacccctaactccactctgcagcgaataaattaacatcttgggcctttcatttacaggcataccttctgcaagggttttctttttcttttcttttttcttttctgtttttgatcttttgtgtgtttgttttcatttggatacctctacgtgtttttcttgatttttttttctttgcattgtccgctgcaacatggtagaaaagggcagcgttaggtttgaatactggctcttgcagtcaccatcagcagcagggcctcggccgaatctctccatctttgaaccctattgtgcatcatataaaacgggcataataataccgttactctgaggactaaatgatacattgcacatgaactgaatggaacatcagaagctcagaaagaaaatagttatggtatcactgttctttcttttcctttgagtgttgcttcgtatttctttactttcaggctgtcttccctgatctcatttgttcatttttgtccgttcggtgacctttctgcccatacttgacattttcctt

SEQ ID NO: 57221 - DNA, 593 bp, Homo sapiens
cttctttggctattgttttaagttattattaccttcttgcttatctagttgctcatttacttctcaaggctagctaggtgcctggaatttcccttggaggaactgaagatttccttttatttccatgtttggggtggcctgcagccctctaagaggggtacctggtctgtctctcctggagctgctgctctttgctgactcaaacgttcttaccaatgttcataccttttgacatttctcatacctattgaacatttactttctcaatacatcttggtttcagttctttatagttgagggttttggctgggaccctgccaaatttccttgcctaatttctgttctattcacttgcctcactcactccctcatttcaaagggcaatcagatacctagctgttctcgtattgctcaatcctgtctaggaatatggatttgaaccagcaaaatctaatgtgtcactacaaaaaaaaaatgtaatatgtaaacaaatagcattgaatcttgtggaagcctattggaaatgcaaaatattgggtctcactcaagagctagtgaattataatctgcattaattttctttttcttttctt

SEQ ID NO: 57222 - DNA, 638 bp, Homo sapiens
atgatataatctccataaagctttgattaacagggcccaggacacagtaagcctttggcaattaagcttttacaaaaatatgcagtttttaatgtcattgttgttgttcctgttgcagcattttcccttgccctctttgcctgttctctgattgttccttagcaaagagcaaagaaaaaaaccaaacgttccaaagtcgaagacttttcctttgatacaaacaagcgaaagttcgattatttgttcaataattttccgttgatcccttagtcttgtagtcgctactttataaccggtccctagaagggggcggttctttccggaaattatgactgcagctgttttcactccgctgtgactcagagcgctccgggctgcaggagaggaaggtaggggaccaagctaccggtgcagggcctggatccaacccctgctctggaagactgagagctccacattctagctccctttccccagtccccaaatttgtaggggctccttgaattgcacgccccatgggtggaggatttcatcctgatgtatgatccccaggaaggttcctgcaagtttggcagtttaggggaatcttttggaggttgaaggagggatttagccatctcctaatctcaaggcccttc

SEQ ID NO: 57223 - DNA, 459 bp, Homo sapiens
tcagttttatgtaaattatagctttaattttaaaaattgaaaatttttgccaggatgatgaaaagagtgggcctgtaaaataagtctgttgattcacagcagagccaggcattttgctgacttatcctccaccagggggtgctggtgacacggatatcatattcagactgcacggtgcatgccaaacctgcgactcatattttacttttgtttgtagtcatggatgctgcaaatctttgtttgtctttcgtaaaatgtgaagttttttaaagatgtgctcttgagcaaaacttagatcaaaccattttaagctatttaatcaggcatcttaatggatgtaggcgagaaaatgatagaggcagacatgaggccttcagatttctgcatggtagagtaagagctttaaacaaatccattacaataaggtaagtttacctaataaatgtatataaatgatgc

SEQ ID NO: 57224 - DNA, 1656 bp, Homo sapiens
ccgcaaggacaaaatacagcagaacagcaaattttttttttgagagaaaaaactagagagttactgaactagttattggcatcgctggaagaagatgcaagcaagccttctgccatccagcctgggtcacttaccaataccgcaccctaaagatttttctatcttccctaattttaaatagaccttggttgtaaagttagaaccatatacatgtacatattatgtacagaaatacacttctggtttcactagacaaacatttactgagtgcctacttagtgctagtattaaaactgcgtgttaaatctctcatcttccctactagaaagagccaaggcctttcttcctgttcactactgtgttcccagctcctgggaagatgatagcattaggaggccctgcaaacacatttctgtgagctgcagaaaggaacgaagcagggaaagaagcagagtcccagcacttgggctcactttgtcctacagtctgggaaagcctgtctgcacgaagcatgaaaaacgtattaaaacgcagtggcccagcgggggagcgtgaatgagagctcgcattggtaagcttcttgttagttcgttggttcaactatagtacccttcagctaagcacacggccgccggccctccctcctctcctcatccagcactagcccccagctgtctctttcctcccggtgcccacgatcgcaccgcccagaccaccctactctccctgccccggaagttacacactgccgacaccgggacgtaacttccgggaagggcttacttccaagacagacacggaagtgctgggaggcgccgggagcccgttcggttgcgggtgtctctggccctgcggtcagccctgggaacgtcccggagagctagattcctagaggcccgattccgctagcccggaacagacaaagccagcgctcccgcccgctccccgacttaggatccgatgccggcagcgtcctggggcccccgtagcggggctggaccatgagcctgctggacggcctcgcttcctcgccgcgggctccgctgcagtccagcaaggccaggatgaaaaagctcccgaagaagagccagaatgagaagtaccggctgaagtacctgcggctgcgcaaagcggccaaggccacggtgtttgtgagtctgacccacgttcagccggtcccctcctggagactccctcacaaaatctttccccaagctgttcccccttcccagtgtgacagtattaatacagtgttggcttttccgtatacgttactacttgttagccttgtgtccttggacaaattacgtaatttctctgtgtcctcatctgtaaatgagctagtaactgtcttgcagaataatgaatattaaatgagtaaagaaaagtgcttggtgcgtaaaagacataccaataaattttagtcatcgttgttactgcaggactctaggaaatgtgtttgattctcgagatacagccctgagaattaggcattatttgtaaaatgagaacactgaagcccagagagatgatttgcccaagggtactgtgtcagagccctgactccaacttagataaacctgattccgttttatgacttccagtacacagactattttctgagcacctcaaatccccataactgaccctttgccc

SEQ ID NO: 57225 - DNA, 1411 bp, Homo sapiens
cagcctagggtattcgaatggcaagatctgacctgcgcaacagccaaagggagccaccagcctcccctatgccactcacattttcccaccaccaatatctgtaagcggtaccagaaatcaaaactgagccttaaatagtcagagctagtgagggggttgtatttcttagccctgataaccacttaaacgagtaaaatttaattcccctaaggaaccccgcctgaagcaaaccctccccaagggcaccactgagggggtagcgctgaaatgttttggaagattcagtcacctgtttccaaatattacctaactagcttcgcctccttccctccgagctcccctgcagttactccaggaccccgaaggcctctttctgggcacatttgggcctccccactcagacaagccgcactttctccctgctcacaggctgcatgtcagggatggtaagtggggggtggagaaagtggagaggccggggttcaacccagcagactcctgcagaccgggcctcggtcggagacgcgagcccctagcctagctaggttccttcgtcgaccttgagaaaggggcgcggatccgtgtcccgcagaggacacggggtctcggagcccgcacaggctgaggggcaggggtccggccgagccgggccgcctcacctgcacttctgtcggcccacaggattaatggcagcaccagcccgagtacaagccccggcgcgaccatgcttgcaaggatctgaccgccgcctaggactgggaaagtgggttcccggcaggggcggggcctgggcgggggcgaggccgactccacccttttgcagtcctcgcagcctcccgcgacctcaggactgggctgtactcgccccttctcggccgccgtagtttttttttttttttaaagaaaaaacggttacccagcaactagaaaaacaaccggaaccggcggcaccagctcggagagaaaggaggtgaggccgcttccccacttcctctccgataccaagacctagccttttcccttcgtctctcttattctctcagcatcccagacacagcctcggagccctgggccgtttgggagccgaggcagcccattctgcgcgagtctgaaatcccaggtcctcaacatcccgcccccgactagacccgtctgccccctccgcccgccctcctctgcccacattggttcagaatctcgccagctcttttcaccactctagaatggttcgatacccccatctactgctccctcagaaaaagcaaaagagaggagtcaggcgtggtggcgcgcgcctgtaatcccaattgctcgggaggctgaggcgggatcatcgctggagcccaggagttcgaggccagagaccccctctcaaagaaaaaaaaagcgatgaaacgagaaccctccatag

SEQ ID NO: 57226 - DNA, 1356 bp, Homo sapiens
ccagacgcccgaggctgcgacggggacatacctggaccaagacatgcgcagccaccccatttggctgcacaagcccggccaaggggcagaaatacatcgcggcgcgcacacgtacctgccgcggggctcatttcagcgctttgactcggggtgggggttctgggtgactggggccctctggcactcaccgcccaaagaatcctggtactgaaagggggaagggtggggggaagaggaagtagcagaagagggcaggttctcagaccttttctctcctcagttcccgaggagagatggatgccgcgtccccttcgcagcgacgagacttccctgccgtgtttgtgaccccctcctgcccagcaacctgccagctacaggagccccctgcgtcccagagactccctcacccaggcaggctccgtcgcggagtcgctgagtccgtgcccttttagttagttctgcagtctagtatggtccccatttgcccttccactccaccccaccctaaaccatgcgctcccaatcttccttcttttgcttctcgcccacctcttcccgcacccagcatgcagctctgcctccgcagcctcagtgcgctttcctgcgcgcactgcggagggcgccctaagcgtcacccaagcacactcacttaaagaaaaaacgagttctttcgttctgtgcgcagctaaaaggggcgccctacatctccgtgccactcccgccccagcctagccccaagactttggatccggggcgagatgaagggaagagggttgttttggtttcggacgacccttgctctgaccggaagagaagtccctatcccacacctgcctgtcacgttccctcccctttccccagcgcactgttgagggcagcctctccagctctcttgtttatgcaaacgccgagcgcctgggaggctcggtaggaggagtcttccacggccccgccccgcccctgtcggtcccgccctcccccccgccgggctcctggggctgtggccgaaaggtttctgatctccgtgtgtgcatgtgactgtgctgggttggaatgtgaacaataaagaggaatgtccaagtgttcagagggtgccgggggagggagtttgggtgcacaaggcctccgcttgcaacttgaacaagcctccttgggccaaaccagaaaccaacaatcgggggctggtggggtgaagtggaggggcacctaggttgaaacccacccctttgacccgaccaaacttcctgcctaccttttctcggacttcaagcccattccttctcttactgttaatactctgagccgcctagaggaattcgccataccagcagaaagaagaaggagacagtatggtac

SEQ ID NO: 57227 - DNA, 1375 bp, Homo sapiens
tgagagtggctatctagatgaaatcactaccttctcagggaattattcctcttctcagaggagacaaaagcacttggtcaattttatgatgtctgattgtggtgcttatgaggctaagacatagaccatatttctgcataggtcgatgctttaaaggaaaattatctttcatagctaccatctttccctgccctcctttgaaatgttttattgatcttacagaggactatgctaaggagttgggatggagagcagagatttttgtctattatgctcaatgaagtatcccaatgcctgacatatagtaggcacttgagaaacgtgtgttgaataaatgagcagactaggggattagccaggttcagctaatcccacctatacctacagagaaaaagaaatcccatgcccaaatcacgttatttttttcagcattgtcatggcactaatgctatagtcagaccctgcaaagaaccattttaaataaactcttgcactggaaaataaatggcctacccagatcttgttcagaatctctcaccctgagagctaaaacctggaggagaggcagcacaggctggatatttcctcagagtctgtcagtttcctgccctgctgatatgagcctgaagctgatttgggctcaagattcaaaccagcatttcaaagctctggagcacaatgaaaactagactcagttatttaaacaattcctgagaactgtctgttagatttcctggtttttgaagttccaatcaccagaaaagtttaagtggtttgagattggtgacatgaaatccataaaatttgagttcattcctagttataccaactgggcctcccttgaaggtcctgaatgattataaggaagagataggacactttaatgaaaaagccagtgacttttttggagaataaaggtttgaaggtatacatttgtaataactctttttttttgtttgtttgtttttttttttttggagacaggatcttgctctgtcacccaggctggaatgcatgactcactggagctttgacctcccagactcaagtaaccccccacctcagccttctgagtagctgggactacaggcatatgccactatacccagtgaattttaaaaatttttgtggagatgagagtctagctatgttgcccagactggtttttaattcctgggctcaagcaatcctcccgccttggccgcccaggatgctgggattacagacatgagccaccgcgctttgccttgtaataactcacatttttttttcgagacagagtcttactctgttatccaggctggagtgcagtggcaccatctcggctcactgcaacctttgccttttgggttcaagcaattcttgtgcctcagcc

SEQ ID NO: 57228 - DNA, 2150 bp, Homo sapiens
gtcccaaggcgctttttctatggctccgctacggccacttattaactattcctaaactaggggctcaatgccccccccttctgcccttcctcaatcctgccccggccggtaagcctctgcctgggagcccctccgcctggaacaaagcgaggggccccggcggtgggggcaagaggcgccagcggcacggggactgccgcacggcgcacaatgagaaactaccaacttcagagcgcaggaacatctcaattggcaagaaagaggggcggcggcaggcacgcccaacttcaaactcaggaaacctacgggctggcggccatctgggaaaaagcccccttcccagggagagaagaaaaaggcggaggagatgcgaatcgcccaccgggccccggaggagagccctgccctcagaccggcccccgcccccgaggcccgcttccccgccttctctctgcctctggttcgctgccccaggccgggcggccggttaccttgatgcgctcccggcactgggacggggtccgctcgtagcccagctcggccagggcccgggacacgcgctcgtacatggctggcccgggggccttgctgccgaacaccgtgccggctccctccagctgctggtaccgcgcctccaccagccgctcgttgccccacactgcgatgagcgcgttcgtctcggctggcgtccacgacatgccccggcaggcggcggcggcggctgccgcagccccgccaccgccgccaccaggggagaaggagaccgaggacgaggcggcgctgcggccccccagccccagcccgagacccccggacgccgctgcccccgagcccgccgcactgcccggcccgagcggggaggcaccccgaggcgtggaagggtcggacagcgatggatttccgtcgctcaggccaccaggagaagccggggaaagcacctccatcttcggaatttttagcggcgagttggcgggcagctccgagccacagggcgcagccatcttccaagcggccgccgctgcaccgcccggaagtgacgcgcccgcgcatccggccaccgcggtctccggggctgccctcgggcctggctcgcccgcgggcggatggctccgggtctctgctgctgaggatgtggctgccgggcggaggtcgtccactcccctgggcctttctccgcgagccctcccacgccgcccgctcctctcccggggcgaagggcggggacgaggcgcgccgaagccccgagctgaagagaagggtgggggcatgagggcgctggagtgaggaacagattggagccttcccacttcctctccaatctcagcccccgggaggaggggtgaggccctcgagggggcccggagttaaggaggaatagaccgtttctctctctcctgtctcccccgcctctgcccgtcttccctctaagccggcctctaggtgcagaggctgacgtccaggatggggaccggggaagcctctggagggtatatccgggaaggcaccaaggctgaagtgagagcggttctggggaaggctttaaaaagcagatatggaccagggtagagttcgtacgctgtagcttttcaagaacaccgatctcattaattaaagaacagcaactatttaattccagttataaactattgttttccagttagtctgggtaggtgtggccgtttgtagaatagttagattacattagtctattgcgttggtacagttgtctatagcttgagcatataaaaactcctgagcccagcagaaaagttactttccaataccagtctccatcctccgtgctttggaagttgcatcgttttccggtttttcgtactcaaagaacactgtcaattatgacagctctgtgacctctggtaatgaattagtgtattagtcactcctgaaacgttccttaaagtgctggaacttaacagtagcacagcacatccagtacacagctgtaccgtatttccatatttttcaaagctgaaaatcttaattggatatcttggatcattaacttaaaacctcagcggatttttctttcaaagcagacataactgaggatgctgaccaatgaatgcaaataaactatgcaatattttttaaaataacaaatgtatgttagttttttttaagctgaggtc

SEQ ID NO: 57229 - DNA, 373 bp, Homo sapiens
agaacaaagaactcgggtggtaggaattaagttggtaggaattaagagggtgcctgccagacgggctggaagtgaaggaagccatgtgcctgcaaagctgtttagggctgccatgtgtttatgccctggcagaaacctctggttagaagttagatcgcttacatttttcttaagtaacccattttgttacatccatatgttttccctctttccagaaggaaaaaaaagtatcagcgagcccttcctcacggatcaggaagctcaagggattactcaagtacattggcggcagttacaaagatattttctttttttttttttttttttttgagacggggtctcgctctgttgcccggactggagtgcagtggcg

SEQ ID NO: 57230 - DNA, 1553 bp, Homo sapiens
atcacggaataccaggtagagggattgaggagggactggatgggagggccaggccgggagggagagggaggacctagtggctagaattagggtggaggaaatctattacaggtttggctttagggttggggatgagtttaggggagaagagagaggtttccaagtgttgtttccaggttgaattacatctgtataaggcttctctaccatttggagccttaagtttcccggtgaggctaagaatcccatttctgactctaaatccgggactcggcctccctagatctggtgcctgggcaatgagagccgctttcacctcaatcgatctgcagcaggctgggcacgctccgcaatgctccgaggactggtgcccggtctcctctatcgaaccctggtcgcggcggccaccagcgcaggcgtgggcgtgcccagtgccccagtgctggtgcagctgcgtgagtccacccgagggcagtgctgaggatcttgacgggggcggggcaagccccccactggggtagctgtgcctgccgggtcgggaatgaccctttcccagttccagggtttcgggcccctcctcccctcacttctctgacccccacagcgtccccgccggacctggagcccgggctggaggtgggcgcggggctggcggtgcggctggcgagggtgctgcgggagcccgccttcctcgcgggcagcggcgcagcctgcggggcgctgcttctcgggctctgcgccgccctctactggcgccggaaacagcgcaaagagctcagccactacacgggtgagctcccggcctcggagcggacggatccgggagggagccaggcggcccatggggaggggcaggggcttagccgctggcgagtgaggaccgggtcgggagaaaggggtcgcacctggagttcagcctcttgggtaggggcgggatacgtggggcgactcgaggagctgccaggactagggagggctgcgggccaagacggggcgggatctggatgacgtttgcctctaagacgccacgaggaggccaggctttgcaaccatctccataaagaaggggcaagttcgaggacggaaagcccactcaaagggcggggggcggggcctggcaagagggggtgtggccaggatcccaggcagtaaattgtgcggcggggtctggatggaaaggcggggcccgctgaaagaaggcgatccgagttctgctacttcctagtaagggacgtctctggagagattctgaggtgtttgaggtcagtggttttcaatcttggttggctacacataggaatcacttgaggggcttgagaaaaataccgacacctgagtcccacccccgagaaattctgatgaaatgggtccagggtgcagcctgagtggtggaactgggaccggggcctaggcgtggacaagtataggggtatttctgacccttctcctcatttcacctcttctttctcccacgggttcctttctggaagcctcttttgcctacacaccggcaggtaagccatctctgccccagtggggttcagaccccccgg

SEQ ID NO: 57231 - DNA, 1198 bp, Homo sapiens
caaaaaattattttgaaaaactcaaagaaaggaggagcttatgggagaaaccccaggcaagaaggaagagcatgctttttcaaaccatctgactccgtcacagagggtatgtacaaatgggcagctcttggtgggcccagatgtgattgggttgatgggcacagaactgttaagacttttttgtggtgaatgccgtggtcctcgtcacctcctgccctgcatcccgtgtgctcactggtgacctgaggttttgttccttctcgcttgctccacccttgactcagtgacttccctggactctctgggattggcagctgccctccagtcccaggccctgacctcgtctgcccctttgacctgtgagtgtacaaatctctctttccctttcagtctggcaaacagggttgggatgttttcaaaaggaattttaccaggaagctaaaaagaaaccaaaacaacctcctccccgcaactgccacaaaatccagataaggaaaagcaaatacagaggaacagatgtgtatgtggaatactgattcttcctcctgagatcacaaaaatctggcccagactgtcctgattaatgtggttcaggaagcccccagtccccatggtcctgcctcattcagcctctcaactcccagtggcctccaagtagagctgctgggtttgagggatgagcacccccttttaggctctgcttcctgtggccctgtcatgctctgtagcatcccctccaccaacttgtggattctgcccccgacctttcccgccaagggaggaagacgcaggcctgcctaccctccagtgcctcctgtggctcaggccctggaagtcctgcttcgaggttcatctctctgttctgtttttttctttgaagggtgttcctaagccaaccgtgacaggtggttctaccttttctggagttcagctgctttgtctattttaagaaaccatctgggactgctgaaagcagttttctcctcaggatgggtgaaatcaaggggttaatttgatcaagtctgcctgccctgcttgctttttgttttttccctttttccatggagcacaaagcttctttggtagctgaaggcctcgctgctgaatgtggaaacaaccttcactggctactttataggtaacattcataggtcactatgagaatgggcgctacagtcatttttcaggaacttgggac

SEQ ID NO: 57232 - DNA, 508 bp, Homo sapiens
tatttctccctgaagcctttctgccaatttaaagttgatttgttctggataaaaatattggagaagttatggcctacagattgcctgaggccttaccctcctctagataagtcccctcatcatgcctatgaacatgggcatgtccgtgggccaaaaggatgtatcacacgtgttcataagtgaatgaaggagtctttcttgaaagctgacagagagagcagtttgctgagcaaacagtttcccaaaaactctagccaaaatcgtactctgtattaagttcagggttccacaactttcaagggacacagagaactgggacaggagccaaagcacgacacagaaatgaggaaatagctcacaactaaggtccagagtggaaataaaaggactaggaccactcaaccttgagaagtgattaacttaattattgtctccaaggcatcataatatagaaagtttctcttcccaccagaggctgaagaaaaggaaatgagatctcagcaagttg

SEQ ID NO: 57233 - DNA, 1543 bp, Homo sapiens
tgacctctctgccacccaactccaggctatgtgacatcttcacacggaagcctcataagtatttcaatctaaacatgtatgatactcattttttttgtttaaggtttcacacagcaatcctccttcccttcctaaatcctcctacttcctacaggtcactagctcctgactttacctctaaaatattttctcaacatgcctcattccttctatctttattataatttcagtccatgttatttctcctatttctctcttgatctattgcaatagctttttgacctgtgttcccctcaaattcatacgttggagtcctaacccccaagtacctcagaatgtgaacttatttggcaatggggtcactgcagatctaataagaagggatcatactggagtaggatggacctaatctagtatgtgtccttataaaaaggggaaatgtggacatagacatgcaaacacggggaatgccataccaagactggagtgatgctgccacaagtcaaggaattaccagaagctaggagagaaccctaaggcagagccctccctagaagcttcagagagagcatggccctgctgacacctcgatctcccacttctggcttccacgactttgagataatgcatttctgttgtttaagccactcagtttgtggtattttgttataggagccctagaaaatgaatacaaacttcctttcttattttatttgcctccagtttcccctcgaatgaccccctgcagactgagtaagctatctgaaaggtacatgtaaccctgacagtccccaaattaaaaaccgctcattccctcacctctcaatccccagattacgagtctggtttacaaagctcttgcctcactcaattcatgcttttctctccagcagtgatgaactgctgggctctgactaaacacttgatgttatttcaagctgttgacctttgctcatttcccaaccctaacacccacttatactcctaccttttttccccatcttttaaaattcagtgcacacattccttctaccagaaaacctccccctgatattcccacaccctgtgtcctaccctaccaacaccccctccaccagcaccagcttcctggatggggtaggtgacctttctctgattgctatgcattctctgcataattgacttatgatagttcctgcagtttagtaaaatgatctccacatctgtttgcctcactaagttgtgaattcctaggtgctctgtaattgtgtgtgtgtgtgtgtgtgtatatgtgtatgtactcataaataggtatatttaaataagatcacttctcaaaggattggtagggggcggtagaggaggtaagcagctatggagtggagtgaattatggataggtgggtatgactatcccacattaggaggctcattatctccaaagcttctttcatctgccttactcttttacacacagagaagccagagtcgggggctggggaggtataaaaagaaaatttcccctacccctacccatcaagccccaccacaatcccttggaaaga

SEQ ID NO: 57234 - DNA, 1345 bp, Homo sapiens
tcctcctgactttttctcaaccaggcaatgcttccaccttggggcgtttatacttgctgttatatctggaacatgtttataaagcctccgttgaagagcacagtggcttcttccattaactcatttaagtctttgctgaaaagtatctcagtgcagcttctctggacgttctaatatttcatccctccaatccccaccctgcccaccacactccctatccgctttctttgcttttactccacatcacacacatttacttactcattgtttattcgcttatttcccctcactctattgtgaattccctgagcagggatatttgtttcgttcatagctatgtatctccggtgcttggaacagtactggtttataaaaagttagtagtaatgtatgttaatcgaatgaataaattatcctacagagataattgagtgtctctggattacagcagagcttgcagcagagagggagaccactcaacaggccgtgatgtccaaatataataagatgtatgaaacagtactgtaaaattagctgcacaaaggatccgaaaaatttgttagcttagtttgtttctccaggaagccgtgccaggctcgcctccctctttcattcttttcccgtgattccctctactgggactcctgaccctcctagtcgccagatcacaggcccaacgcatccctttccggagggatttaggaagtctcggcgttggtccaggaacgacagtcccaccgcgcctcacatggcgcattacccagcgactccgcttacccacacgtccccgccccctcagccggacaggaagaggaaatgacgatacctcgggcgctcgaaactccacctctcacgccttcccagctccgggaggggacgcgggctccggaaagggcgggcataaggctacggatgggcgggacggagcagcccaccgcaaagtggcggtctacttgaggcggttaccttagtactccgagtagactgagtctgtggcgagctgcgggccgattcctggccagtgccatctcagccggagcaggcctcggggcctcagaagcaggcttttatctggcccgaggctcccagccgttcagcgcgtcttcccataacctataccgattattgggactctcggctgcagacacaggtccccgcccctccctctttctccgggttgcagctgtcattcctcccttcccgcctcgctgcgcccacagctgaggacagtcttcgttctctcattcccatcctttctcttccctctcatcgccatttcttctagaaggcaacttaaaaacctttctttgcctctttatttcttcccatttctcttcccttcttt

SEQ ID NO: 57235 - DNA, 1438 bp, Homo sapiens
taccgtcttcatttctgccactagacctatgccccctgactgcctgggattaacagaggcttttacaactctgcttaccctctttttcttgattctagggctggtacgagccaagcccattattctaggtcctaatctgtttggtggagttgttactccacttctctgaccttgcgcgtagggcctgggcactcctaggaattaggggcagggtggggttagggctgaaacccatttgctccgacactcctgttttatgttctattaactttattcctcaggggaatacttccctttgcagccttctgtatttcacccttgggttcatgtacaaggatctcacaattatcagtggaaacataccctgaaatcttcaggctagaggcagtcactttcaggaccacagaagtccctgcctggtggctgcttgcctccagaaaggagagcaggagtgactgccacattgtcatggcgggagcgcgtgggggccggtgtctgtgaagccggggaagagtggggtcctgtggaatatgagcagggcaggaagccccagcctgagcctgtggtgtgtttggggccgaatattgtcccccccccgcccccgcccacgaaaaaaactcctgcgctcccagaaggtgagagtaccgagattagtcatgcagggccgctgagtgtgacttccagccctccagcgtctcgtgtcccgcccgtgtcggagcccatggctttttaggacaggaagcgctgcggggtagtgcgggcaggcaggcacgtcacaccggacagcgtcgagattgctgctttcggttccccagcgggtggtgaggcagaaagtgcagggcggaatgaggagccccagcacctcagagctgtcgggcagtggcggggaagcaaagcacaggagcgctgtggtgccagcggccgggctagggacgactggcgggtttgcgctggacccgaccccgagggcgggcgcaagggggcgggcgctgccgtactcaggccgcggggccagggcgggccggccggcggggcatttaaaccccgctgacagccagtccagcccgggacacgcgcccagctctgtagcctcctccgtcgactcagccttaggtaccggtcaggcaaaatgcggtcctccctggctccgggagtctggttcttccgggccttctccagggacagctggtgagcggggcaggggagggaggcgtgccgggacctcctgggctcggggcttgcaggggccgcggggggcctcggagatcaccccagatcggccccggcgtcgccgcgtggccaggggtgctggggggacttggtcccgagctcctccagcggcgcccgcctcggaggttgataaccctccctgcccaactccgcccgcgctcccccagaccccgcgacgctggctcggtgacactggggaagaacaggc

SEQ ID NO: 57236 - DNA, 1514 bp, Homo sapiens
tcttttgaattttaaaatattagaataacgcctctacctttgtaattagataaaatgcaagcctggggaaaaaatcagttgccaagctcccaaaatgccaccgatgtagcatctgctcttaacacgttgatagaaaaaggaggatcagtaaacctaggtctcttccttgcatccctctcctggacggtgttgtgggttggaagcgctgcagagcctcggtctatccgctctctggatctcacagcactgcagcctgggaacaccccacttgaactctaagcttctccccaaccctgttgcagattcaaactggcgacaggaaaacaatgccccccatgtctcgtcttcagaatgtgcacctggccacctcccaggagctagagagggattaaggtctcggtcataagagatctgaatcaggcactgacacttccttttcttaagagcatgaaacaaaacagtccttccttctctgcctccaattaagtatttattagccgggccttgggtccagatcagcggtaagggtggtctgcgaggtccgtgcaccgccgtccgcccacgccttcttccaaccacctcagcccgaccctccacttttctcccttccccgcagccgccccgctttcctcacctctgcccccttcacctggatccactctcccccaggctctactcacacctcagattccggcgcgttccagcccacggggctctggtttacttagggcgaatcacaagtgggctttcatttaggtgatttaagattcactaatcagcgttgctctttcaacggccaacttcttcctcattagcttacgcctagcgcggctcccggcaacgccgagcgcggtgggttggctcgtcacccttcgttacgccctccgattggtcggtgcctgtcagcctttggaccgacctcagttcggttgggtagcagcggtccgagctgcactccccgcccccccgccactccactgtcaatcacaccatctctccgtaactcattgggccattggtcagtctagcctgagggcgggttgttgggcggaagagagagacttcttccggcctcactcgctgtcaccatagagattgcccatccaggcagcgaagcagcagggccaggcagctcagatctcgaactccagagaactgcacagtcatctagacatcaatgccttttccggggcctgatgaacatctcaatccccaacccactagctcgagtggggcgcaagatgtggtggacaagtcagctcaggcccggtcattaagtgtccccaacaaccctcctggagggaactgaggacgaagcaccagttgtaataacggcacgcttcatttatctttatctcgacttgttttatttggtatttaattcttccattagccttgcgaaacagacaaaggcaaagatcattctacccacgggacagactggggaagaggcccagggtccatcaagtaaaccctctgccgccaggctgctggaactggagctggcccacgct

SEQ ID NO: 57237 - DNA, 1460 bp, Homo sapiens
atgagaccctgtctcaaaaaaaaaaaaaaaaagaaagggaaagaaaagaaaatacatagggtttttgtgagataagtagagaatggagataggaagaaattccagagtggagaaataggagaagcaaagcatagaaaagtgaatgtctttggcatgattcagaaatagcaaatattctagtgtgagttaaggaccaggttcagggaaatgagtgtcaagagctgaaaagtgtgtgaagggtcttgaatgctatgataaggaattttggctttattctgtaggtgaagggtttagctaagtcagaagtatttaagcaggagagtaaataacacaatcagattgatcaacttcataactctattgcacaaggaaataagttcaatttagcaaaacttattcttaatgaatccactttggttctagcatgaattgaccactaaacatctgattaacgagtacgtcaaactttttgtgtgtgttttgccctgctattatgtttttcctgactttcactttgacctgttggcctcttggctttatttttcccttaggcatctgggttctgcattcccttgatttatttgtccacccacagcttgctctgacctttattatttaacgtgtcctctgactttggctcacttactggattctgagccacggcaattccttgacctcagtcctggatttgcttctgctttggaattcccacctgatttcagttgcccaattgtgctgtgacctctgcattctgtcctgccttggatctaacctggtctcatcctttgtgttgctgtctctgcctcagttcttctagtctagctccccagcccgcaagttatacacactgtttgctcacctgggctccagtactggcaataaaatgtaacctgtcctttctagaagctgtggtgtggttgaagagatagtgctaacatgcaagaaattataaattctaactgattgccaaattggacgtgctaactgaaagtgttatacgaacttagagaaaagactgaactgggaaattcaagacccttaggagtaatgttcctttctaggcaacttcctttctgaaagattttgctatctggagcacgggcttttctttggaaggagaaagggaaatgtaaggcaggacttcctctggactttcctatcattggttccaaagctgcctatctttgaggagctaccttgtcggtgccacctagtggctgctgccaccagaaatcctacccgcctcaaggagagagcaatttaacgccatttccaacttaagcaccatatctacagggcgtgaaattagttccagcaagcagcaaatttgctgctaataaaaatatttagcgattcacttgtctttaaatcagcagcagaatattcttttacttgcatcagtgcttgtttctcccaattctaatatttgataatcaagctagacgtgtttagctaaagct

SEQ ID NO: 57238 - DNA, 2023 bp, Homo sapiens
ggatttcaccatcttggccagggtggcctcaagtgatctgcccgcctcagcttcccaaagtgctgaggttacacgcatgagccaccgtgcccagccacttattttatttcattttttaaatttattattattattattattttgagactgagtcttgctcagtcgcccaggcaggagtgcagtggtgtgatctcggctcactgcaaccttcatcccctgagttcaagtaattctcctgcctcagcctcctgagtagctgggaccacaggcaggtaccaccacacctggctaatttttgttattttagtagagatggggtttcgctatgttggccaggctggtcttgaactcctgacctcgtgatctgcctgccttggcctcccaaaatgctgggattaaaggcatcctgttactaatttcacaggattttagaaacgcaagcagcgttgtggagtcaatgggggagggcaaagaacaggaggagagatctgtgagaacgggatcggcgaggaggcgacggggaggaggcgacgcggaggggtgaggggtcctctccgccgccaggcggagttgggagccggacgatcccgcacgcagcgcgaggcgggaccccggactgactacatttcccagtctccgtcgctccgcgcggcccaccccttcggctctgggccccgcctcgtggtgccggctggttcttcgcgctcgcccgacttcccagcggccccgtgcggcccgggcatgcccagtgcgggcgcagcggccccggccctggaagcgccccggcggagctggcctgcggtgggctaggggcagggccggagccgcggcggcggagctgtgggtaggtgcgggctcagccgagctaggcctcggggccgccgcgccgcccattctgagtggcagggaccgggagggcaggcagggcccgagcgtgggttggtggggctaccggcgaggaccccttatgggaaggggccggagggagcgggacggggccgggcacatccccgggcgaggctgccccaggtgcggcgcagctatctttagctccctgtgtgacccggagcgtgcgtgatccgcacctcgcgtgatccgtacctcgtgcacagttgtgcctagggagaccagttttctgccgaattgcctaggagctgtggggagatgggcctgaatggacccgtggactcagaggcagcccgtggagccccgtgggaagtgaggatgtttaccttccctgtacctggagtgggctacgacagcttcctgtttgccgagacttgggtttagtgacttagaaataaaagtgtgtctcagcagatgcttattagcttctaatgactgttgggaatttaatggcatttgtatttccaggtttgagaggttatttgtccatgggatgctcgtgttaaaacaaaaatcttcattgcaaagcttaagtaaaaacaagtctcgaccgaggtaacgttagaacaccgggttctgaggttcactgtagctgccattcatttgctgtcagtctgggcaagtcatttaacttctgagactgggttctctcacctgttaaatgagccagatgcatcttcatctgtctagctcagctgtaggattccccctgtgtcattcagtctgtgtgtgtgttctcaaattgtggcaggttatttttccccatgcctcagctatttgtcagactgggtaattcaccaaatattcctgtaggaaggatgttaggatctaagtataaaagtgaagtgatttatccttcataggtcactcttaggaggtgtcctgccacttggtacatgcagaaaccaggtgttagctggccagggatcaaatgacacagctgttgtggactgagacagaatgtttcaggttccctgtcagttccctgtgagaaatccaggccaagtaatgggcttccttaaacctccaagctggctcactttggtggggttgtgtttatatagaattttaagtttttttcatgctgttgtgccctattagatgcaagaaacctatg

SEQ ID NO: 57239 - DNA, 2760 bp, Homo sapiens
ttgagacggagtccagctctgtcgccaggctggagtgcagtggcacgatctcggctcactgcaacctccgactccctggttcaagtgattctgtgtcagcctcccgagtagctgggattacaggcacgcgccaccacgcccagctaatttttctatttttagtagagacgggtttcaccatgttggccaggatggtctctacctcctgacctcgtgatccgcccgccttggcctcccaaagtgctgggattacaggggtgagccaccgcgcccgaccaaaactcgtattttgaagaagcatttactccaagttctgtaattccttcaggctcagcttcagtttccttttgttaaagtaaaattacatcgaacacttactactaaaaacaaaaccaaaaaaaagcagatctattgaatcataacgtcctggggcgagcctggtcatgtggattttgaaaaaaatgcatgtgattctgaagcagtgatttaaataatgacctttcaataagtggtgggttccgttcatgggagaataggaaactgcgtgagtggtagaggcaacaagttcgaagagctgcgagacgttcccactctctctggtgtagccttggctcaccgaggcgcgcagggagtggaagtgcctgaggataaaggtgtacacgtgcgagtctgagatgatggaattgctgctcaaacttcgtccccttctctgccctcagcaaacttattgggggtcggggagcgcgtggggtgcgagagaagagaggcaagttaggatagggagagcggctctctggccggtattttaacaaagggctgaactgactaagcatggccgggctgcctcccggtctcccgaggaagcccgcttgctgctggggagggctgtgcctccgcggcggtggctgtctcagctggcagtagaaatgcttccagcttagccccgacaacccctttaggcctaggcacgctctttcacaaaaccaggggctgtgaactctgtcaaggttcccaggtccatcgcagttaccaaggcacagtaaaagctcgagtcaactatcaggcacatcctgcaaaagacgaactgtctggaccagtccgcgtttgagttttaattgagaataaataggtagaaaatgcttccctcctctcctttcaccttgtattaggtaacaatttctaccttaaaaaagacgggagacgagcggctccgcattccgagttactgggacttggagcaagggcctatttcagcgtagtttccgcttcttgtcacatgacgggagtcagtgggccgcgccttcccactgcgactccccgtgggtccgcaaaccgacacgtcactcctcggccctcaaccaaactgcttggggcacgttctttccgcgctcttgactcctacgcgccggcctatgacagctcggcgggagcatacagacctgcctctagactgctaagtgatagctgtaatgaccaattaaaaacttgaatcgcggcccggtttacgcctccggatttgacagacagttccgagaccctatcgctctccagaagcgtcctattggcctggagccagccaacgggggagcggtccgggaggcggacccggctcctgccagggttgggtgcgccgctgaacggatggctgagggagccccgcggatcgtttaggaaagccggccaggtgagaaggccgtagaacgtaacttgaaaatcagcggcaggtgcagtccatggcgttgatggggctgaacgaagtgcaggaggcaaaactctaaatgggggtggagagcagagcttagggccttgcagaggagggggcgtggggcgtggtgtgggggcttcctggatggaaggatgcgaaggtctagggagggagggtaaggtgggtcttgagaacagagcgtgggaaagactgggtcctgggactagttatggaggggaaggcgcgtaggatgctggggtgatgagtgtcccgcgctgaggggtatcagaggtggtcagttctttgagggtgggaagaagagggaggtgggacccgctggaacgaccggaagggagaagagagtaaaagatcgtgagagggtgtggaaacgtgtgtaggaaaacggggctggggaaattgcagtctgggaaactagaggcagggtggcaggagatgccacagcttgcagggcacagttgaggagagcaggttggtaagtgttttaagaaaggtgtctttgctcttatttgcttggcggtgtgcgaaagtgaccaaagagcacgagatgaaatctcccttacggccctgccctcaatgactagctcgtttactcaagttttcaagtagagatcctagcagtctcattttggtgtgtggctcgtatcaacgcagtggtgttaagtttgttcctatttcaggcattccagaaaacagctgcaaaccctgagagatatggctggattgttgacctcctggagtagttaggcctttatttttagttgcaaagtaagctttccctttgggactatacttaaacacatttctaaactgctcttctgggacagttaattatggagaacatgcttgacttctcagtgttggggctagcattctatatgccttccacctagtccagtgttgttgttgttttgtttttctcctttattccaataatagtgggaaaaaagattcatggaggaggatagacaaacgtttgttaagggatacacaagtacaactagataggaataaattctagtgttctataggataac

SEQ ID NO: 57240 - DNA, 1064 bp, Homo sapiens
cgtacgcagcttttaaatttgcgttgtaagatttattttggctctccccgcctgttctttgcacattaaaaatgaaaaagtttgtagaactaagctaagcagatggtcttcctgcaaaaagaccgggctgaagtaaagcattgttttggagctggttcacagaaaaaaggcaaaactggttatcctgacttcaagctccaacataaactgctcgctttctccgggaaacttgccccgccacacacacttgactgcgtggccagttctttcgaagcctctcgctcccaacacggagttcctcccatttcttcacagtcggctctcagcagctgctgctggtttctcggctccagcaccacgagtaccgcactctgaggtttacaaagcactctgcttcaccgactgtgatcctcacagtcctgtccggtggcctcacgcaggtggcggtgcagcctttcaggcccagagcggccaggagcgaagcccgcagccccgcctggaagcgcagcgcggtcggtcgcgcgcccctgaggcttggaggcctgggcttcccccagcagcgctcgagcaccgcccagtcgagcctcacaccggatgccacttcatatttgggcccagagctcaattcgcgccgatgcggtccgccgtccttaaatctcttcagccaggatctctccccgactgcaaagcagccctgggcgggagcggcaacatctccacgtcacccttttggagccgccgacattcagaggggcaggacacgggaacgcgcgctgtcttgctttacggcgcgggtgcgcgagtttgcggcagcgtgacgccctcaagttttggcgggaaaagcgctgcatttggattcctgcagtggtgggcaaaggacagtccggtgaggaagggcggccggtagagtagggaaggtttctaaagaaggagttcggggtctagattagtgagggagggcatggtgggagaaagttagcattgactagcgcaggggattggagagactcctgcggaggggcggtttcggagggtggaggaatggtaccaggaggttcccgttg

SEQ ID NO: 57241 - DNA, 1190 bp, Homo sapiens
ggcggaggctgattccaatgaagtggcagaccgttaggcggcctctccaaaaagccagctatgtcgccgttagccaaggtttgagggtcttctccttctcttcgagggcccaacctcccctccagatttagtacaccagaggcgtcgcagcaacggctgctgcctgcgcgcctcagctaggcgggctcggatatttttaaggccacattggaaatcccgggcatgctcccgccggcggagaaggcccagacaaaatgtgcgccaatcaggatacagacttggaggacgtttaccctcaggaccaataagagggagggcggaccgggccaagggtgccggttcgctctccggatttaaacctcagcggtcggcggttaaccgcaggctcggcgcgtgggccggcagtgcgcctgcgcaagttacgcgaaagctaacagaatctgcggtgctctgctggcgactggcaggacgcggtgcagagagcggacttccgcgacgcgggtaagccgggcgaaggccggaagcggagggacgcggggacctggtggctgccggcccactgcggcgggagccctcgctccttttcccaccgtcgggacggtgcagagtggcagcttccctccgtggattccaggtcctgcctggcgagccgtccccaacgtctgcgttcctgagggaggcggccggggcagcgtgagctacaggcgatgtgcgcggcgggccgcagcccctggaggtcacggtgtgcgctggccgccgccgcggtctttgccccggtggcctttctgagctcctgggccgcgcccctgggaccaggcggaggccggggacggccccagggctggaggggagtcccgaaggccgctagcgacctgggtccaagccacgcccacggccaggcggggcgactgcgagctttgccgttgaaaggcggagcgtgtcttgtcgccttctagctgcaccttttgtggactgcagcatggaaccgtccaaggtgtttgtccaccccgaaatggaaataaatcttttttattctaaacagtatacaatctcactaagcaggcaaagaaaaacattaagatatctttttagattggtaagatttttcagtaccccatgctgctgagagagtgaagaaatgaaagcaagcacctttatggcctgtgtgctggggataatctgtttttcta

SEQ ID NO: 57242 - DNA, 2435 bp, Homo sapiens
gctcaccttaaattgtaatttatctgttcttgatatttctgacccaacggggaccatctaaaatctgaaagttgtcagttttaacaccagaggccagaagaatgatagtacagtttgcttgttcacagagaaaaagttctaacataaaggtgaatgaccttgaccgttactatctgcgaaaatcattttccctgtaacatttaaagccacataattcacacattcacccagttctatttgttaggcatttgtctggaaaagaagtaatcaatgactcaggtacatgtaggatatactcaccgcaaaaaagtagaaactgcaaactgtccaccaacagtggaatagtaaatgtctttaaagacattagaatattaaatagtcattgggaatcttgggaaagtaatatgggaaggtgaaattaagtgacatgaatgtatcataaactatacaggatgatctcagtacacacagggaaagatcaaaacctaacgagtagtgggattaaaggtaatttgtatttatacctcgactttttatgaggtcaaaaattacatggtgattttaacatgcaaaacactccagtgattatttggatctcaaagtccaacattaccaaagtctccaaagttcaactcccgtgctaactaaagaactaggccagggagtgagtctagttggtcataaggcagatttgtggcaaaaacaggacttggtacactacagtgctttttccagcacaccttaccctaattcagggtgaagtgcaggagttcccaagcagacgtttaaagtaacaccctggccagggctgcgaagtaaccacagagagggaattcgtgtgtcccctaagcaccaattacaaactaaaacggccatcaccagatgttccatacattgggccaggcgccgtggctcacgcctgtcatcccaacattttgagaggccaagacggggtggtggcgggggggagggggggtcgctcgaagtcaggagttcgagaccaacctgggcaacacagcgagaccgtgtgttaattaaaaaattaaaaactaggctgccaagatggcgcacgcctgcagtcccagctagttggaggctgaggtggaaggatcgcttgagcccaggaggtagaggctgcagtgagcagtgatcacgccacttcactcagcctgggcgacagtcttaaaaaaaaaaaaaaaaaagtcctaatctcaggaaccagtgggttaacacataaatagcattcctcttgataaactttatattaatccaaagggaagaagagggagtactgtccaaaggattagcagacacgcactatgatcactagaaagcaatcgtggtctgtatgtaaggcaatccccaaaataatttgaaaattgctgccacagcctcccacatactcctgggttctcaacttctactgttttatgagcacccaattctaagtggggcagcagagcacttttgtactccacagtacaagtaccactgaagctcccgtcacaacggaattaaagacgaccctactgcggcgagtttccaccgagagctccagaaagtaccaggcacaaaagaaaaatacatggtcttaagcgaggtctcatttccatacggcaatgctttcctgaaaagaccaaagtatgtgaaagagggcaaaaagaagacaacagacaaccgttcagcagtgtgtccatttgtcccttcccctgtggaacccagaaagtaacccactccaaaaatcccacacttactttccggcagccggccgcgccgcgtttccgagaaaggaagctgtcactgtgcgtcttctgcgcaggcgcccgagccctcatgggaggtgtagtccaagtttgtgggaaatgtagttctgagaaccgagcttggtgctagaatctacctgaggttttctagtccagctaccgtttctccgcccacagggcagaatctgggcctgtggcgggacagcaataaaaggaggaattgtagtgctacgctaaaataatagaaaaaaggtaatttttcaaattctgctatccttatacgaaaactaaaagattgaagatcttggctcgattttatacctagttaaatgagaagaaagttaccattgagagacaaaaacatttactattagaattcaaattaaaagctgaaatgaatatgataatctcaaaacaaacgactaggtgccctgagagtgaccgaacagagcggggagcgttgcttcagcaccacggagagatcatgactgcagtttcgtgtgggtttttgtatttttgcccccaattccagaaatgctgatcaaaatctcaaaattacaattagaaaactggggggcgggggggaggtggaatttggttctttcgtccaaattgagcggtcattaaatcattagtaccagggatccagggatctataccggattatgcaaa

SEQ ID NO: 57243 - DNA, 1122 bp, Homo sapiens
taggtagagactagtcccagtatattcttccatattgcatcagactcaatcagactacaggcacgtgctaccattcctgaaaaatttttaaattttttttgtagagaagggggtctcattatgttgcccagtctggtcttgaactcctaggctcaggcaatcttcctacctcagcctcctaaagtgctagaattataggtgtgggccaccacgcctggctaaaacctatattttaaagatggagaagtatcagatcagaaagaaaagttttcatttaaaagaaataaaattaagatacaggaaaaaaaatgcatatacacatatttgccagaatttgaaaacctaggacagttccctacaaaatattagaaattaataacctgtttatacagattgaacttgaatgaactcataatgttgatataacaaaacaatgatgactcgccagacaatgagatgccctcaaagccttctgcttccttctgtttaatttctttttttctgctcttgtctttaatttaaagccaagttacagaatgagattttttaatgaagtctaaaggcagactaatagtttgtaaagtacttctgtcagagtgacagtgaagttttacacatggggcaggactggaggagcgggcgagacagaggcgcaagggccaaccacaagtgtggttatcagcgtgtcgacacaggttttatggggagctaacaggcgtatgaaatacacacacttcttaaagaaattccagatatttagcaagagagaagtacaatttcctattacctactctttagcatctgtttttcagataagtaaaacaggaaatcatagcagtgtttactttattctgaactatgatcctcagtcactagagtggtgttgacggtaacatacttgggagttagatctgtaaagcaactgtgacctgaatttcagcatcaaccacattgatttaaaattttctagtacactgaatcttaactcataatcatcagtaattaaccaattagctaaccaaatgtaaatgattcagttaaattacttttagttcaattccagatgtctacatgtgtcagcataaaaatggctttaacttaggggttacatgttgagataca

SEQ ID NO: 57244 - DNA, 974 bp, Homo sapiens
gctttggtgtttatgtctgctgggcaatttaatttgatgctccacttactctggctgacagctagaacagttttaaagtcatctcctctgaatgaagagtatctaatgtgtttcataccatgacactaatatacaacagtgttagaaatcaatatttattctgacaatatttgtctacccacctttagaaaaagagaaggagatatttatgagtgacttactttgtatggtattctgctggcgattcttccacaggcacattgcaatgaaaaccatcagaatgaggaccatgacgcccagcacacagccaacgatcagatataacatgtcactgcttctggcagggctggttgcaggccccacatttcctccacttcccaaagaatttggaggggtactcaagtctttgacaggatattcagaagctccaggaacacgtttcactagttgaaatataaaggaaaacatgatgtcagagtgaatacagactccatgaaatggtttactctctgaaggaggtctggttaggaatgcaagccagtctgtttactcttgttactgagatgacctgaccaccaatgagtcacaaagagggctccaaagtttaaaaacttgatgtgccaaagttttagtccacaaactttagagaaatcctaaaggcaaaggaacatatgcacttggtctaatccaaactgctatatgattatctgcttaactgtacttggagaaaactcccagagttgaaataaaagtgtttccacttaggccgggcgtggtggctcacgcctgtaatcccagcactttgggaggccgaggtgagcagactgtctgagctcaggagtttgcgaacggcctgagcaacacagggaaaccccgtgtctactaaaaatacaaaaattagctgggcgtggcggtgggtgcctgtaatcccagctactggggaggctgaggcaggagaattgcttgaagccggg

SEQ ID NO: 57245 - DNA, 684 bp, Homo sapiens
tcaggttatgaatctgcttttccagttttttcttgctgacctcctttaaaaagtgggagagggactactggcaatgactcagcggcagaagagtccagctgtgtgaaaacttttttggtttatttgaattctcacttggttcaagggtaagaactgacacaccactggaaagcagtcaaggcaaagtaaacattcaaataacttgttaacaggagacattttcctgagagaatgaggacaagaaggattgtttcttccttttgccaaatctttcagctatttatttattaaaaagcagtgaaacaaatttcagagtcaactttaaccctagtgcatgacctactcagtgactttatagttgtccttgaaagtttcacagctcattacagctacctaaatattatcacacaggaatcttctttattaagtctatctttctattgggttactctctacgtgctctcagttgattttggaagttggaaagaacctatggccagaaaaggcatttactaaacacgtgttggcttggtttacatgtacccaaggcaagcctgctcagtttgttaaagagctgtgataatgacaacaaggagttggattctgctgttttatggagttgggtagctcgacattagagtcaacagccagtaacagcaccccaggcccaacctcacaaataaa

SEQ ID NO: 57246 - DNA, 3225 bp, Homo sapiens
tcctatcttaaagtgaacttaattcttttcctgcaaagtcaaaccacctgcaaagaaagcaaggcgtaagctagatttagaagccaagctacacaagctagatcagtatccaagtcctaagggttctttgtacttgaaggcttgagagtcagagctgtttaagtactttgcacagaagaggaggctgatgagaaccatggcaatcaatcaaagcatcccaagtgagttattacacaaacaacagcacagtacctctagtaactgattctcctggctgactaaactattcaaacaaagacagatttcccaaacactgggaagtttttgcatgaaagttaaacagtatacatttgtgtgtttcttaatagaaatataaatgtttctgttctacacactgccaaacacacacccagggcacgtctttacaaaatgaaacaggttttctccatccttctcatataacttcaagtatgaggcagttcattccaacatgtgcataacagagactgcagtatttggtgcttctcgggttccaaagaatgctttctagttaagcactaatttaaaatttccagaaaattttttgaaggttttctttcatcttatcttaaaagttgaactatccccaaattttcagctaaaaatagactgagggtgggggagaactacaaaatgtcatagaatgtttagaattatgctgacaataaactcatttcattttctaacaccctccccaccttcctctccttggagacactgtccactaggtatgccaagtgtcagttgggaatttgagggttatgttatcagcgccgaaaggaatcagaattcactgacttggcgtctttcatctttactggcataggcctgaaaataaatctcatgtgagcttttagtccaacctcctgtttttcaaggtgtctggtttgggacacaaaggctgactttctgttgatgaggttctctaaattctggattcccactggaaagcagtctgcccttaaagcacctgccaccctctgtcgtcctgatgaggaagggcaggcattctggaaacagctccttttggagagccttccacctgatttggtggggttagggagaacaatgaagggaagggcaagagagtctatctatccccctcagtgatttattgctgaaattcctagatgtggagagaaagcaacaaaggtctggaagctgccgactgaaataaatagcgagctgtaatgtatttagcaaatgataatgcaatccacagaaagctttacagaggagaaggaaaaatacactccctggggctgggaagtcagtgagtcttgtgaaggcagagaaagatacattgtgcaggaaatttctcttgcttctccctacacataaatcactgtctctcgcgggcgctctgcagggatggagattgagagaggccagggacccggctcccttgggaaaacgcgcgggcgccctagctccccgctctgcggcatctcacctgcccccgaggaccatcgtcaagaagaggtttcgtcgtgtcactgacacctcaccccgcctcctcccgcgaggtgcctccgagcccccgaggacgcggaacgccggggctccccgccgggcaagcatcagcatccagaccccgcacgcagccctgcacccccacgccctccagggaacgccggcccgcccgtccccgggacctcccgtcccctaagccaaggccccccaagcccagtgcccgcgcgccacccctccctccgaccctgcggcgggacccccacccccgcacctctccgcggggctggctaagcctccagacctcctgcgctgcagccggctcggaaagccacccccaggtcatccccccgcgcgcgcgcggcggcggctacggtggcggcggctgcgatccgaacgggcccctccatgcaccgcgcagggcagaggagggagcggcgcctcgcacgccggggctggggcgctgggcagggcgggcgggcgtggggtcccgggtctcctcgcacctagccgcgcgagccgggctcccgggctcaggggaggggagctgaggggcggagtcaccggggcgcgcccccgcggctgcgctcctccccgccggggagcgcgggcacgtaactcggagggtgctgggccggcccggagcacgcgagcagcgggaggagggaccggggaatgactgacggaggcgggccgtagaggccgctgtgccccgccggcccgcacccggccggagtgtgcgcgcgcagcctgccagatcagcggcgggggcacgggccgtaccaagtgacggaggggggcacgctctgggcaggaccctctcctcgtcattgacctgcctactctgcaagagagataccccaggggagcatagaagaggcttttcttgggtgtaggacaggtaagggtgagttgccttaccaagtcacggagattcccatcatgcctgcactcacgctcccctcacctttcattcccttggagagacggctcttctggcaggtctccaaatggtcgactctgtcccccgaggccccgccctagcctcgttcgggccccgccctagcctcgttcgggccccgccctagcctcgttcaggccccgcccctcgccccgccccgcccctcgcctctacctaagttctctgagccgccaacgggtgcatcccttctcccggttcttgcctggtctctcttagggttccagcggcccaccgcttatacctccttcgcctttccaccactttccatgtttaattccttaggcagcttcatctgattcccccaccaccacccacccgccctgcctgcacataaacgcaagcaggtagcaaaactcaggggctaggagaggcgtggtgtgagcctttggccccagagtctttccaactcgtccgttggacctgccccaagttatctgaactcaatgaacttcagttgttcaaacagaaaaaggaaaaataaatttctattcaaaatgttgctgtgaagcgtaaatacgatactttgtgaaaagcacctgccactcagtgggcattcaaggactgtaacttctttataaattgttattattagcagttagctcttttttttccccatcatcattacttactattagcttaactacaaaaggatccctaataatagttaagtttataaatactcagtactgaacttcaggagaaatatgccagtcctcccttaccttcttacgtga

SEQ ID NO: 57247 - DNA, 1581 bp, Homo sapiens
tggaaaaaatggagctggcccttagggaactcactataggggcctgagacttgggccatgctctcactaaaccctctggcggaagaccttcgggccacccagccccacctggaggtggaaggtgattaaatggatgatctcacccggtcccttttgagagggcctgagtctgtgatcctgtaaacagactcctatgcattgcaaaccatgggcgtttttgtggattgttctttgttcagaaaaagccagagcagttttgagaagtctgcagaatgttagagctgtcacttctaaagtaatgtaacgctgtctgttaccccacctatcagcaaagcaaagcaaggtatatgtctccatgagtcagggtttatttaatattcacaaccccggcagttttttgactgatgaaaatattttgcaaacagaacctggtcctgtttttctcctcactctttccccctgccaaatgtagagtgagaggttggcagaggcagtgctaaactagtagggctgaggagatactatctccgtctccttgtaacacaaaacatttattttgctgggagtgaacacaaaattgaaaaggggccaagatttctgggagcaggaggtttggttttccccctggctggactgcctggtttgttgactttctgcctttgccaccccctgagccacacaccagccttacctaagacatagaccattacaaaggcagctctagaagcaccagactacccccaccccagctccaggggagaggaccagccattattcagcaaatgagtcagccgtgagtgacaaagccaggcttggtgactcccttccccacttgttgccttgccctctagctgtctgtccagggacccaaaagccgagtgatggatgtcccaaatgcagacaccactcggagacccacccggcagctaggcagacatagcaggcactttgctgagggcctaactcccatgctgcaggatgactgtatatcaagatctgtgatcactgcggaagtctcattttcccagacttggttccgcagctgtgctgccttcagatgctgccttggttgaaatcctggctcttactaggtatgtggccatgggcaggttatttatctttcccatgtttcaatgtccttatcttcaaaatagggataataatagcacctttctcctaggctgttgtgagaattagaccagcacgctcaccataggtattagttatgtgagtactattactgtcaaaggtaaggtaggagtatagtttcctcttatactctcagcttcacagtgccagagtcattgacacctgctctcaactgcctcgctgtgccctcaacgctcagccctggtgcctctgccagggctctctgcatgaagagtcgccttccccttacatcagggctggctttgtgttgtctctgaaacttcttggaccttgccagcgtgttctttggtcctcttcttacgtggaactgccagtatcagtgtgccactgagcctcagtctgttccatgatttgtttatttttaaattttattttattttatttttagagactgggtctcactctgtggcc

SEQ ID NO: 57248 - DNA, 565 bp, Homo sapiens
aggctgaggcaggagaatggcgtgagcccaggaggtggagcttgcagtgagccgagattgcgccactgcactccagcctgggcgacagagggagaccatctcaaaaaaaaaaaaggaaaggggaggatttctttctctctccgttgccaaaacatcccgttgccacacactgacgcacgcagctcccgcccccactcagctggccatttcccgagtataattagatcgtaattttcattagatcaacattcaatatttactttatcatgaatacataaacgctacccacagccaagtcgtgagtgtacaatgattattttccctctgcgaaattttcctcctagagttaaaaatcgtttggttttgtttgtttagttttctgtatatttattgctggtgtattcccaaactctccccagattgagtaatctcgtttcaattccctcaaatattgagatgacttagtctatctgcctcgttttctccaggagatcatccctggatcttctggctgggccagtctgcactggttgttcccagggtctgttacaaagctggtggcttg

SEQ ID NO: 57249 - DNA, 1204 bp, Homo sapiens
acagaaaagtgactcccacacctgagagaatggaaggaagtaagggggacatctcagaagagagcagagcctcctagaaagcaccccctattcccccagctcctaaagattgacagagggttggggggggcgggcgtgccaaagtcaccactaaaggcccagctggaagccagccaagacagttggtgcccaccagactgtttggattccccctgcactctctgggttgctggcagaaaagattccgtggaaaggacgcgagatttcaagtcctgccacctactgcctgtacaacctcagtgaggccggtgacttcccagggcttccatcctctgctgggtggagctaacactaacttatctctccaggctgctaggcggagtaaatgccacagggcacgtgggagcacttggcacattgtaaagctctgtgtccaagctgttgaatgctgttgtgactcaggcagagagcagcaggcaggccagggagaggttgcaggcaaaggttcatgtgaggagactctggtttttctaatgacactacacccagattttccgatctaaacaaccagcttcagttgtgatttcccatgttggaaagtttctggaaaatgatccatgatagaaatgggtttgggaatggtccacctggacacagtggcccttacttggcttggagcattccccttgggaatgccagaaccaattcgtggcctagtgggacaaagggagccgttctacccaatgacccttgctcctgaccctcttcagtgaccacaatcccagccagcacccctccaccccccaccaccaatcgggagcatgagccaggtctggaagcggcccttaaatgaccttttagacccaagtgaggtttcccagctcccttgggaatctagggatcttacaaactgagatgaaaccagattagcttccatttttgctgttgggaagagtgaaattcaccccactcatcccaagttcaaagccttactttggtaccatgttgcaaggaatgtggatggaggtgagacagagacaggtagggaaagcaagaaatggctcaagccttggtgctcagcttccccagtaactgccaagtgtagggagggactggctcagggaatcctgttccccaaacccaggaccaagacaagaccactggaggagcaaggagctgtcagcccctcacaggtggcacacca

SEQ ID NO: 57250 - DNA, 692 bp, Homo sapiens
gggtggacaagctcttggacagggtaggaatgggactgagaacccactgtctcctcctcataccactgcccacattttatccactttctctcagggacccccgagaccccgtagccaggaaccctcccccagccccatgaagggaaggagggcccactgccctgtggggtaatgagcagctccaccctgcttgggaggagggtcagtgagagagccgctggcacatcaaagaaggcagggcctgtgtcccggaaggcagctctcaacagccagcagcacccatagaatgggaccacgccagacggcccccaagaccaattctcatctcacgctatgtgccccccaccaaacggctgtagcctgcacttgtctgtccgatcacccttccctgcactgtgctgagtaaacaaacacagcactcaggcagccctctgctggcaaacacgtctgacttagcaaccgctcctagaataaataaacaccacacgcttacacacactcagacacacttgctcgtgctctttcctggaaccggggactgctccctgtcccacgtgcggctcccactgggccccagcctcaaacaggctacatcagagtagtgcctgagactgtcaccctttgcctgggtgtggggatgagctggggcctcaggtgcacagagacctggacccaggcttggagcttcctca

SEQ ID NO: 57251 - DNA, 1270 bp, Homo sapiens
gagagcggacattggcggcagcgtccccctgcagaggggctccccagacaccagagggaccgtggctctcatcagtccaggcctctctatcttccccattcccactgttctccactgtcccccctgttcctcagagcagtgatgagacaacttccagtcctccctacctgcctctggccttcttgctcgctaaggggtcttaggaagagactcctgggaagaggttcattaatcagcagatgagtcatttacatgtttagactagacctctggccaaagcaaacaaacaaacaaagttcatattgagacaagtcaatatttgacttaatgagagtgccttgccagttgaatgctttgatggtgacctttgacctgggagctttggaaggcatttgagctgcagtcccatggacactgcactttgggaggggctccagccccactcctacagcacctgccagcaattaagtttccctccccagggatctaggccctgcctctggggccatggggtctctcacctttcaggagtcccaggcagcccaggacttctttctttctggaagctgctagagaaagcccagtttcatgtcccctttgcaaacccccccacgctaataactcaccttcttcaggaagtgaagtctgatcagagacagcctggcaagaggaaagaacgagaaattggggacaggaccccgatcccagctataccttcaacccctgtttgctgtctgactttggtgaacattcctgttctccagcctgaattcctcatgacagtgtggggactggatttctttctttcttttcttttctttctttcttttctttctttctctccctttatttcttttttttggacagagtctcaaagagcagagtctaaagtgcagtggcttgatctcggatcactgcaggcttgactcaggctcaggcaatcctcccacctcagtctctcgagtagctggaaccacaggcacacaccaccacactcagctaattttgaattttttgtagagatagggttttgccatgttggccaggctggtctcagactcctggtctcaagtgatccacctgcctaagccttccaaatgctgggattataggtgtgagccaccacttctggccccatgtttctcaagagtttagttcccacttgtccagtttcagaatcccctggaggtctcgtcaaaaatgcagacttcaagtcccctccccagacccgccactaaagcagaatttctgggggtaaagcacagtctgc

SEQ ID NO: 57252 - DNA, 544 bp, Homo sapiens
cctagttctcccccaaactgcagtcagaatagcagagttagggctgttcttcattcccattaggactctagaaaaacagactaatggccccaaagagcgtaaccgcatgaccctcctcctctagagaaagtgctagaaatctaatcgggcagcaacatagtaccgtgggtaagtccgtgcgtccaggcctgtttcctggctttccaggtgcatgccctcaggcagtctgcccaagctgatttcctcatctctgaaatatctccttcgtggaagcactgcgggattcaatgagctcacacggcacagccccagcaccgtgcctggctcgcggcaagtgtccgatagaagccagcctctgctgctgtgaccaccttccccagcagtggctggtgtgtgctatgggctgactgtctctcccaaattcctgtgttgaagactcaaccccagtacctcagaatgtgacgacccttggagataagcctttaagggggtgagtccattgaaatggagcctcgaggacgtgccctcacccactctgaccagt

SEQ ID NO: 57253 - DNA, 2047 bp, Homo sapiens
atacaaaaaattagccaggtgtggtggcaggcacgtgtaatcccagctactcgggaggctgaagcaggagaatcacttgaacccagggagcgcaggttgcagtgagctgagatcacgccatcacactccagcctggggacaacagcaaaacttcgtctcaaaaaaaaaaaaaaagaaaaaaaaagaaaatacctgggaaagaagaacttcacccatctgtataatcacccctgattaaaatccctttcccactgcaaggatggcagcagatgacagtgttccacagcaggtgccaggagggaagtgaacagaaatatctcaaggcttcttgcctgaaaggatcctaaggccacaaccaacaggggcatctatgcagacagccacctaggctggtcactcgctgggggacagcaagatgaagggatccctaagagaggacatcaagagacgcctaagggagtgggggatggagaggaaaactcagagttctataataatttgccttgctttcgtccttggttcctgggagagagaacctaaatccttggaatttcccaagtgatgttaacattttttgttattcatgatgagccctaatagtttacgctattaaatgtgaggactcacggtggggctttagtttcaggatgggtagtttcaggctggccatgcaaaaagaccgaccatgtgattagagggttggcactttgaacccagcagaaccgagttcaacaatgtagccaattgttcaaccacgacaacataatgaaaccccaataaaaactctggacaccagggcttgggtgacattcctggctggtgatgcacatccatgtgttgggagggtgacacggtgggcagaggacacggtagcttcatgctggagactctcccagaccttgcccatgcatctcttcttttagctggtcctgattcatatcattttattgctacagcaaaaccataatagtaagcatagctagtgctttgctgagttctgggagtcattctagtgaatgatcaaacctgaggggtttgtgaacactcttgaattcatagctagttggtcagaagtacaggtggctggaaaaccccagagcttgcagctggtgtctgaagtgaggcaagtcctgtggaatgtgccattaacttgtgacatctggcctaacgctgggtagctggtgtttgaattacattgccctgagccagcagattttgctccgcactgggagaagctgtctgcacccacatggcatgctttgcacaagcacaagcaggaggccatgtttttgtatatcctaccaggcactctggctaaaagcagtccagagagccaaggagagcagacctagaaaacatggtgggaggctgctctatttgcctgtcttgtttaaaacaggtaccccctcccacactgctctatccccaggaacctggggatggtctcaacaccccgttgtgagtttggtttctggtgggaactagcaggttgcctatgatcctatttctaacccactatgcccttccacctcccagacctatcccatcatagctgaagggtggggacggtgaaattggtgctcaggagatattagaattaaagagggaagtgcattttaagagaagggttttagatggaactggcaaagaattagtggctaattggatttggggactggtgcgagggaggagttaagggtgattcccaggtctctggtgatgccatctaaactaaggcaggtaagaggacaggagcaacaggcccggagagggagctcccaaggggagacgatcacaggcagatggatgtgaagataaggagctcaagggggagatcaaggtcagagacagactagcgagtcgtcagcacacaggtagaggcttcccaagttggcccagctctccctctgggagaggggcaggatgccaagatggagctctggggggcaccatgctggggcccttcaaggagcctggaaggaggtcagacaaggagatgcaggaggagttcatggaatcaaagcgagtgaggagctcagagtgggca

SEQ ID NO: 57254 - DNA, 1054 bp, Homo sapiens
ctccttcctgagacctaagaacagaagatacgcttccacaacagagatttttgattttttaatggcagcactctcataactacattcacggaccaaccaaagccatctccaagcctagaaaggatacatactacacgcagcgaaaatgccaaccactgatccagaattttcaagatggcacctttccccaaacttctataccattcattaaacatagactgcaaactgctagcctgtagaccaaattcaacctctaagtattatttgcttaggtgcctaagcatctttaaaaatttgatttagttggcaatacactgggaggtttcacataaatatctaggtttccagcttctctgaagaaatgagaaaatccattcccacatggcaacaaccagctggagctaacagctgttagacagcatgccgctccccgctactgccttacacccagccagcttcatgtgtgcatgttatctgcctgccattcacatcggttctccttgctcagcaaatgtcccacctcaacctcacactcaatacccttatacaggttccctaatcagagttcagtagggcacccacactatagctgggcaatccctggatgctgtgatatttgttaaccattatgttctttccaaccacgggaaccttcctaagagctcaagagcttcactgctggataaaaacagttcctgatcccggattctgacctttagttttccttttccagtcactgccccagtctgcctggccctgggctctgttccatattggcaatgagagcccacggcagggagacttccagcaggcttttccacagtgcagccaaactatcagtaaatagactttgttctccattaaaagccctgtagcagctgagttgctttaccttatcccacctggctcttacgcagtctgttccaagtgagaagttagcagagtcctgtaaacaaagaacagttcaggggccaacctgcgctcccaggtgccaggatgctctcagggtcttcactgtgctcccaggtgccagggtgctcccatggtcttcact

SEQ ID NO: 57255 - DNA, 1954 bp, Homo sapiens
gcaccacaagtaacgtctcagttttcctcggttgtagcagaaagcagctgcaggttcctccacctttcccgcgtggtccttaccatgcacagggagaccgtagggcttattgatgaccacaaggttcttgtcctggtggagaattcctcgggtcagtgccttagcaagcacgttggggtggactcgctgcagctgccgtgtgaaccgcactatttcttgcactctccgctgaacagcgtttgtggacacctagggagaaagaaggagccgtggggaatgcctggtgcggaagccgtggagaagaccttccataaaggtctgggtgagaatctgagtagggaatgactatctttgcatcagacccgcgccgccttcgactaatttgagagcagagatacccatctgtctaacctgcgtaccgacgcagtggttaggactgagcctgacagtagccaaagatccagctcacgggaaaacaccgtacccttactgacccctcccctccgccttctccccattctcccaccttgcgtccgggctattgactcacacgctttcactcagaggaccctcctacctactccccgtctgggaaaccaatgagcgcactgcctctagggagttctggtccctttggactcaccggctccttctttgtgtcttgttcccgtttctgggctcggagcttctccgctaatctctgggcatttatggccgtagaggcagcggcagcggcacaaaatggctttgagacgagagtgaagagactcccgcaaccttggccgtttccccggatccaggggcccgacgcgctccacctgggcgccgccatcttacaaggaagggcggggcgagccaagaccacgtggagaagggcgactacaatgaggcgggagtgggtgggccctgcaggtcacgtggtgcggggtggggcctgggcgagtcacgtggggacggtgcgcgctcagtgcggctgcgccggccggtagctgcagctggagcagtggcgtttggaggagactcggtgagtgtgtagggaagccgggctggggctgggaaatgccggtgcctcaacggtttaacgttttctgcgtccccgggatttccgttcaagaagagcactggtctgagaaacgtttctccttttggtacacgatcccactcaaaaactcctccccgcccccgcgcccccttaggagcgatgtcccataaacgctcgccccagagccctcctaggcaccgacgccgtccctcttagccactgaatctccggtgatccgccagtcccctgcgggacgcgtcggggaccctcttgatcggatgcccggatctctgtagtctctccacccttcatcttccaactcccagcctctttgtttcgcgttgtaacctgtacccttctcctaaggatgacggccccttcccttatccagggcccccagcacctatttcctacttaggaagcactgtgagtgttttttctgcccttcctcaagaattcatttcttgggggtctcctccctaccttccctactcctcctaaagaaaaagctgaaagaacggagcacagaccttcacttttcctgtttcctttatttttcctctccatagtttgcaaccacaccatacctcctctcacgagatgcgatgttgggattcccttgcccgaactgcaggcgactccctctgatttcactcaggggtggctgggaagataaacatctgtttgggatggtagtgttaaaaataacttgggatatacctgccatttgttaagaggaaagcttatgctgagttcagaaagaatgtcctgaaaactaatggatctgtgacgatagaaggaacaattttttaagactgcttggaatgaaggctgcctgaggagttattagagaataggtagttgaattagatttgggttctacacctcctaaagggtttggcagaagggagc

SEQ ID NO: 57256 - DNA, 2605 bp, Homo sapiens
agaatggtttatctttctaccccatgcagaaggaaaaataacggtccagagaaaggactctcacacccaagaggacaatgagaactgggtagcaaattaggaatgtctttgaacacatcaatttaccacctttgaaccaccttcagagaggtcatcaaatcatggaaataaattgattttagagaaggcaggtctctcaccgaaggagccgcaggaagtcattttggaaatcaaaagtgccatttaataaacttaaagcactttgctgttggatctctgtgcggtacttgtcccgaaacagccgatgcacgtcatctatcaatttgtctacatatgtcagtgtcaggatcttctgaaaaccaacctgtttaggggaagaaacagccaacagatctgcttacatactagcctagaatggagggacgccaactcaaccctggctttcagagataggttcagctacctggccggtttccctgtcctgagaggcagccaagctccctgcctgggcccagtagctgctgttttcccccatctacctttctagttttttcagttacgtcatcatatacactggctgcaattaatcagagttctcttaaaaatcagggctatgttaacaatgcaatcgtccctctacaacaccccacttaccacaaacaccagctcaaactggttgtccagtttatacttgagtgtgagtgcctcatgggtgaaggagttgttacctccccgttcctggagaaagagtatgtctcagtgttcagactatccccagaaaacccaggtttgggccctgggtttggataacctttgggaaagagccaaacatttcccccaaactcaaatctgtccccaggacaagaggatgttggggcacttctctctggcattccaccagaaataagataaccaagttgggggaaaaagatgagagagagagcaagacacatgggagccaaaagggaagtagtcatgtaaacaatcagattactagcagctatacaccatttagttttgtaaaggtgttttcccatctgttatttcacctaggctcgaaacaacaaaaccaagctgctggggataaatagagggagcggaggagaatcccaaaggcgccggaattcggctagagttgagacaccagaggcgggggccgtcattaagttgcggggtagtctgaaggggacgagaaaacgaagcggagtccgggttacgcgtgagtggtcagtgtgaggtgggcggggagggtgggaggaggcgcggaatagagtcgaaggggaccatggatcgggtcaggaaagaagagcctggagttctgatcccacggggacggtacctgcagcagcacggaacgaatcaacgcgttaacgggtccggtgcatgagtcgctaacgccctggaagcaccagagcacaagcccgcccttggagaaaatggtgaagaagtcgagcatggcggcagcggcagaggagctggggccggcgccgggaattcaggccgcgttcgccgccgcttcctgctgcgccaagcgcgggacacgtcacaccagtggccccggaaatcggctcaaccgtacttccgctcagaacgccgggtgccctccccatctccgcccgggggcgcgcaggactgacgtatcgcaaggccagccaatggcgggtgggagcgggcctgggtggggctccaggagaggtcacggggagacggccacctagagcattgggcggggcagagccctgagggccgctggccaattggcgcgctcgtctgaatggcgtttggcgcggagcagtgacggctgcgataatagcgaggcagcagtgcagctttcagagggtccgggctcagaggggttatgattcggagggttctgccgcacggcatgggccggggcctcttgacccggaggccaggcacgcgcagaggaggcttttctctgggtaaagttgaggacgacagagggtattgtggttctgggttgtccccaacctccgactgtgtgtccttcaggacccgaaaccatggcccacactggcaggacagtgggtcggcttggggaagggggttagcttacctaccagagcttgtaggggctgtgcaggtgtatggctcccaaggcggcccttttcaggtggcaggtctcacatcattctccatttaagcttacagtcagactgattgataatcggtggcacagatgtgcattaagtcctgcccgtgttcaggatgctgtacttagtgctgttgcggtaaaggagtgaagagaagacgggattcagtgaatgttctggaaaatggctagagtgtacctagagagggaaaatttcaatagacagtaggccagttcaagactggatagaggccgggcgcggggcctgtaatcctagcactttgggaggtcgaggcgggtggatcacctgagctcaagagttcgagagcaacctgaccaacatggtgaaacaccgtctctactaaaaatacaaaaattagctaggtgtggtggtgggctcctgtaatcccaggtactcgggaggctgaggcaggagaatcgcttgaacccggaaggcgaaggttgcaatgagccgagatcatgccattgcac

SEQ ID NO: 57257 - DNA, 1986 bp, Homo sapiens
cgtagccccactgaggtaagctgagtggggtgggacatgctggcaaggagacatagaataattgtcacgaaacaatcaggcttttggccaggcacagtagctcatgcctgtaatcttggcattttgggaggccaaggcaggtggatcacctgaggttaggagtttgagaccagcctgaccaacatggcaaaaccccgtctctactaaaaatacaaaacttagctgggcgtggtgctgggcgcctgtaatcccagctacttgggaggctgaggcaggagaatcactggaacccgggaggctgaggttgcagtgagccaagattgcgccattgcactccagcctgggcaacaagagcaaaactccatctcaaaaaaaaaaaaaagaaaaagaatcagccttttttggggggctgtgtgctgtgttaattgatattagagccccctccagatttgaactgggaccatttctccccatcccctacctgcacagggattgttaaacaagtctgggcctgtccttgtgtcccaggcaatgtaagcgttgtccccacctctcactccagcaggaagaaccggacccggcgaacctggaagtggaccatgatttcttccaggacaaggtgtggccccatttggccctgagggtcccagcttttgagactctgaaggtaactggcaagggctggttttcctttttatttttggacattggatgggacagatgacagtggagcacattggtcccctcggacccgtgactgccgtagtccctccatgtcacaactgctaaggaatttcttggacacatcccatcccatagacccctcagcagcaggtagagggtactctgtgctgagccctgaggggagtgaggatggagtgtggctacagccttcccgagaaccccagtgttttgtgcacccgcaggttcagagcgcctgggccggctattacgactacaacacctttgaccagaatggcgtggtgggcccccacccgctagttgtcaacatgtactttgctactggcttcagtggtcacgggctccagcaggcccctggcattgggcgagctgtagcagagatggtactgaagggcaggttccagaccatcgacctgagccccttcctctttacccgcttttacttgggagagaagatccaggagaacaacatcatctgagcatgtgtgctctgcactggctccactggcttgcatcctggctgtgttcacagccttgtttgctgcttccatcttccccagtactgtgccaggccttctccccctccccagtgtcctctcctctcaggcaggccattgcacccatatggctgggcaggcacaggcagtgaggccgaggccaatagcgagtgatgagcgggatcctaggactgatctgtagcccatgctgatgtcacccaccagggcaatccatctggaggcctgagcaccctggcccaggactggcttcatcctggcactgaccaggaaagactgcctctgaccctcttagcagacagagcccaggcatgggagcactctggggcagcctggctcaggtttattgattttcgtctgtttaccctatccattaatcaatacatgtaattaactccttccctccagtcttctgtctcttcttttcattgtacagcaggagcttttgaagcaccccattagccttataccagtacagggagtttttttaaaaaaaaacaaaacacgagcacaaacccacctttcattagttaaatccttgagcggtgcagtatcacacagattgtgtgtctgtagtcttagcaggaagattgggaatttggcataaaccatgccactgtttccgtgaacccaagttactttttcccagattactctggttttgtttggtgtgccaccagaagtcgctgtgtggttctttgctttgtgtacatgagcacatctcttgcccaaatagaattcagtttatcccaggcataaatgctgaaat

SEQ ID NO: 57258 - DNA, 2267 bp, Homo sapiens
aaaaggaggaaatcaaattggagggggagatcatgaatcttacatggcctaattaaactacctccactctccagcatttcgtgcacatagttttaggatagggtttcccaaactggcatggcctggagcaagacgctcaggaagacattcacatttcttgtagagtgaaacaagtgtggggaatgctccgttcccttctccccaaggtgcttcacagcgctcacgaacatctgaagagctctcagaagtgggaggcaaaggcatctctttcacccaggacttccagcatcttgcctacaccacgctgtttgcagcggctctgcagcatactgcagcgctgttcataacgcccatgtgggatcaccgcttagagaagcaaagaaagcactttggcagaagacggggtttccaccctcctcggcatcaaccagtgtctgggacgggaactggcggccgctgcggcctggcttcccagctgccgcccgggtctgcccctcccacactgcagccccgtacacccctcgctgtgtgtgacctttggaaaagttccatctctccaagcttcatgtttctcatttgtataaaaggaaaaaggtatgaacaccccccttgcagggtgttaggaagattaaatgggcggaatagggtgtttttttttccttctcccccgcctagaacaaaacccaggtttcaggttgtcacggtgggcgccgggggaccctggccacgggctcctctccgagttgctgcggaccgccccaacgcaagcggagaggacgggagcccggagtcatgcagaagccaggctggcaggggctcgggccgcagtggacacaggggctgccccgtcccgcgtctcccgcagccggattgtgcccgagagtctcccgggtctggactgggcctggcggcgtgggaggggcagtgcggcgggcggcgcttccggagagcggggcctgcgcgctgctcttccccgcggagcccgcgcagtccgcgcagccctcatcgcaactgggcccgcgcgcaggtgagcccggggcggggtcgcgggggaccgggaggcgcggcggggctccgtggggtgggcgacggagcgcggccggcctgggccccagagtcccggccccaccgagagccgcaggggtgcgcgccgcctctggtccggccttgccctgctggcggcacatccgcttcccttcttcacctttctggcacccgcaacacgcaagcggcatgaaagggccctccgaggagaatgtcaccttttctgtcgcaaagaagctcgcgcggggcggctcccctttcgcttgcctcgctggaagagcctggcgctcagtgcgttgtggatatcgtttctcctcacgttcttctctgctccggtcacagcctcttcctctgctcttcgggttgtcattgtggcagtgattcagcaagtgcataacattagttagggtcagggacctatcgaggcattacaccacagtcatgggcagctacacacgggctgggcagccactgtgccaacgactagggtgaccgcggtggaccagacagatccagtcttctggtccccaggggacagacaggtacgctagaatcacagcataccctagaagtgcaacagagagggggaagtgtggagaactcccgttgaaacaccaaacctaggggacaccaggatcaggaatgactcagagggaaccacatctagttagtttttagatttaaaagagttgatacgtaggcacacaaatcctaagtgtacagctcaaccattttccacaacacgcacatttcctgattcagagcaatcaataaaacatgactacatccctggcttctaacgccataaaataggtttgcctgttttggattttccatccatggaatcatatatcatgtacttcttttttttttttttttttttgagatggagtttcgcctttgtcctctgggctggagtgcagtggcgcaatctcggttcactgcagcctccgccttgtgggttcaagcgattctcctgcctcctcccgagtagctgggattacaggcgcctgccaccacgcccggctaattgttgcattttcagtagcgacggggtttcgccatattggccagggtggtctcgaactcctgaactcaggtgatccgcctgcctcagccttccagagtgctgggattacaggcgtgaaccactgcgcccagcccttcatgtactcttacgtgtgtgacgtctgacattcagtatgttttgtgatattcaccca

SEQ ID NO: 57259 - DNA, 1248 bp, Homo sapiens
cgaatcatactgcaaatcatatccctgggtagcagggcagaaatacaggtaaacaaaatagagaggagggggatgcctctagcccggaaataagtgggtggtggagatggttcttctggccatattcgtttaccttttttgtcagcagaaaagtactgagtctacaaagtaaaaaactgaccacgatgaaaatttctgcaaagtaattaaaatgggagaaaaatggaaatggcttaaatactcggtataaaaaatcgaccaaggaatcaaatgggctcacggatttgcgtcagaaacgttgcttccccgataattggtcaacgtcggtgtaactatgattaaaatgtcagtattcaaacaagggctccaacactaccgtggcccaagggcgtcttcggctcccaccccggggcgtgggcctgggggtccctcttcactgcgcagccacctctagcccgccgctttcgggactctcagccttcttttcccttccctgagggccggccggcaccacaacggggccaaaggcagtaactcggttgaaaggcgcgccctgggacaggtcagcgggctccgccatgcgcggcacgcatcccgcaggagcgggtgccagagcagggtaggccgggagttagcagcccagccaggccgctggactcgggctaggggcggggccagcgcagggggcgcaggcgcacaccgcctccgcggcagcatggcggacgcagctcctcaactaggcaagaggaagcgcgaattggacgtggaggaggcccacgccgccagcacagaggaaaaggaggcaggagttggaaatggtacctgtgctcctgtccgcttaccgttctccggcttcagactgcagaaggtgctgagggagtctgcgcgggacaaaatcattttcctacacgggaaggtaccaggaggcaaccctgaggtgggatgcgggaagcagtgaaccaatcatcgcctcggaggcagatttttttttttcggatctcggctggaaaataccaatcattatcactccggggaggcgggagtgcgccactagaatgcatagaggggcggtgaaaggcggcaagattgcctttgaaattaaggcaatgaacacatctagctctaatttttctaatgtctccactagaaatatctactgggagagtgcattgcagattaaagatcacatgttacattccccaagccattcatcatccatttatgtatacagggactaggaacccagtc

SEQ ID NO: 57260 - DNA, 3709 bp, Homo sapiens
aagtattagccaggcgtggtggcgtgggcctgtaatcctagctactggggacgctgaggcaggagaatcgctgaaacccaggaggcggaggttgcagtgagccaagattgcaccactgcactccagcctggtgacagagcaagattccatctcaaaaaatacatataaataaataaataatgagaatcccagcaggagggtgggactggggagttggtcagttctctggctaccaggaagagctctgggcaggggtgttgccaggtatcactcatcctgagcaggcggtgccctcagtccacttgccagacagcgtatggcagggagagcctggcaaggccaccgggcctcttctgctgacctgccgtgggcagatggggctgccagtgtgggtcccggccctgagcaccacacggggctgtgggtccttgggggccactccaggccctgggcctcagtttcctcatatgtaaaatgcaatcataataatacccgttcatgttggtcataaggagtaaatgagttcatttttgcgtgtcaggcttagaatagtgttatagggctgaggttccgaaaggtattgacaccttaaaaaaaattttcctactaaaaaaaattccaatcctgcagaaaagttgtaagaatagtacaaagaactcccttataaaaggacttcacggccgggcgcagtggctcacgcctgtaatcccagcactttgggaggccgaggcatgtggatcacgaagtcaggagatcgagaccatcctggctaacacggtgaaaccctgtctctactaaaaatacaaaaaattagccaggcgtggtggcaggcgcctgtagtcccagctactcaggaggctgaggcaggagaatggcgtgagcccgggaggcggagcttgcagtgagccgagatcacgccactgcactccagcctgggcgacagagcgagactctgtctcaaaaaaaaaaaacaaaaaacaaaataaaaggacttcacctgttaacatttgccacattggctttttctgtctccacatatacgtagaataatgataacgatggatataaaaaagggtaaaattattaatttcaggagatttcccattcgtatgagacttctgtgacatacagtccatagttaagttgtgccagttgcttcagtgcagggcgcccctccccggatcccaaccccggatctaatccaatccctttagtcccgtctctttagtctcccttcatctggagcaattcctcagccttctttgtccttcctaactttgacatttttgtagtgttataaagccactagttttgttgaatgcccctggattttggtttgctgatatttcctcatgactggactcaggttatgcgtttttggccagaattccacatgatcaggaggcacatgatgtcggcgtgcccagcaggggtgacggtgacgcccatggcctggccgaggtggtagccttttgctgctgtaaagcgactcgtgttccctttgtaattaataagtaatctatgggagatatttttgagactgtgcctgtgtatcgtgtttcccaacgtgttttcacctgatggtttgattgtttattgagcattgactcctgaccaaactcctcctgaagttcagctgcaggtcaacatcttgacgggcattgaggtaaacaccagcgttcattgttttttggctgccatcgtaaaccttagcattaggaaatatattgatttgtatcagagaggttttatttcatctgggacaaaaatgctcttcctgggtttaagtcgaaaaggccagattcattgattcatttgttcactaagtatttactgagtgcttactgtatgccaggcactattccaggtgctggggacaaattgttttcttccggaagctgcatagtagttggggagtcagacagtccatccacctgctgctgtgagggagtgagaagtgaagaggaagcaagctggtggaggagacagaggaccccgaggttagggctgctgttttaccagagctgaccgagcctgaggagctggcctcagagcagaggcctggatgaagcgaggagcagcgtggctcgttgggtaggagggtcagctcggccgtgggagcggccagggcacggcctggagaggagcccatggctgacgcgagttagtgggtcagtggggagccggcgcggctggagcagaggccctaagcgggagagaggcagtgcatgaaggtggaaagagggccagggcgaggtgaccaacagcctcgtagtccacggcaggaagcgcgggagctgtggagcaggggacagtttgagggtggcagctcccacctcagtgtggccctgactgaggctttcggtggagacctgagggaagccaggccccttaggagtgagtgctctagggggacgtggggagctctgagagtcctgcagtcaggttcccatccctgcaggtgcacctcaggaaaggcaggaggatggcaggaagtgagcagttggaaaataagcacctgtggatgctcttgctgctgaggggaggcgggaggggctggctgggtgagacgccagtttccctgcaccctgggtggctggggcaggtctcccacaggcctcggcagaccagggcatgctcacaggccgggtggctttctgatctggagcagccaggagccccaggctgggagcccggctgggtgaccctgcccgcagaacccggctgctctccagcgcccgctctgcctctgtgccctgcccatctctcccccactctcagggagctccactgcccaacccaggcaacggaggcaacagcggagagaatccaagctagcctggggggagcgcttttctccatgtgaggcacttcctgaatctttccttctactgactcgtttaattctcccaacagccctggaaggtaggtgctgttattgttaccccagattgtagaagtcaggagactgaagccacagacagtgtcagtcactagcctgaggttacgccactaataagtgcagagccaggacttgcacccaggctgactggctccaaaatctctgttctcatccaccaagctccactgcagatgtatggatttccctcaggtccactgcaagggccaaggtggtgccgttcagtctacttcaagcagtctcccgcctcttgagatcttggtgtgcctgacctctgacctctggcccatgacctatgacgctgagctgttagagaacagagtgagaagcaagaaagagtcttttgctgctcctcagagagttgtgaggaggccttcatgcccctttttcagggtcagatccggggattcccaggattgggtgacatttatttagcaactcgtgatccagctgacacgttttattgaatgtaaacaactctgtgaggcagatttgatgaccaccctttaataggtgaggaagccaaggctctaagacgttaagccccatgcccaagggtacacagccagtatggagagtcatgtggccagcctggggccagtggccatgtcttcccactgtgctgctgtgccacccagagctgagggcctgggatgtttgatgggacagaagccacgtgcctggtatgtcatctctgtgcatccccactgggacttggaagtagaaattggaagtagcctgtggtgttgcaggagcactggctttagggtgagatggcctcagttccag

SEQ ID NO: 57261 - DNA, 1318 bp, Homo sapiens
ggattacaggtgtgagccaccgcacccagcctcacacctcatttattcttcacagcagcccttttggagacaggtctcaaagccaggcagtctggtcccagtatctgtgccctaagccagagatactatttggctccttagatgtgaggtacttataacttcccagtaaaaactgcagtgggatgtctggatctggagcctttgagatcatctagttacaaatgtctgtttgtgagtcatccagctagacttcaacctcagcctggtgtttggattctcagtctgtcatctaagagcagcgtgacattgtccttaatttcggagccctggtttccttgtctgaaaaatgtaactaatggctcctccctcctgggtgttgtggaaattgagagaggtgccatatatcatgtgcctgctattgtttccagcacagaatgatgccaggatggcagccaccatcccctactctaggtaactgttcagagggacaggcacagcaatgggcagagctaagacacctgggagacgtggccaggccacacatggctggaggggaagtgcaaggcagcaggcagaagcagagagcaggaggtgatgaggaaggagcaagatgtctcacgggaggtcaaggcgggagagagggtaccgagggagctgccaatgtcacctactgcaaagaagtccagccaggtgagttgcagaaagctgatggcatcaccctctgcccagtttatcagcagggctggccaagttcttgggcatggtttcagatggtggcactccccattacatagctctctgtgtttgtgtgaattttgttctttcattctcctttttttttatctgggcccctggcctggaggcttcccgtggatgcagctccctgccactgtcccagaggcctctcccaggagacaggatgtaccttggcccagggtgcaggctcaggagccagatactcatggttggaattggctgacccagcgtgaacttccttgcacttgcattcttcttaactgtaaaatggggacaatgtccaggcgcggtggcttatgcctgtaatcccagcactttgggccaaggtgggcagttcacttgaggtcaggagtttgagaccagcctggccaacatgacgcaacccatctctactaaaaatacaaaaattagctgggtgtggtggcacacgcctgtaatcccagcttcttgggaggctgaggcaggagaatcacttgaacctgggaggtggaggttgcagtgagctgagatcacgccattgcattccagccaagtgtgaaactccgtctcagaaaaaacaaaa

SEQ ID NO: 57262 - DNA, 2300 bp, Homo sapiens
gacaccgttccccgtgggatagagcactgcaccctttcttgattctcattgttcccgggagcgagcgccttggctgcgctgggcatacccaccctggcgccattcacaggcagtgcctgccctggccctgtgctcaccccatcaggcctcctcttccgcctctctggcacccacggcgcccctgcttgcctctgtccgggtctcggaggcgcgaacaccatcccaagcctgcgaccgcgcggcatcacccccgcccttccccctcctccaccccgccctttctacccctcccgggagctcctgggagtcgggccgccgtgtgcgcaagcgtgtccagccccttccccgcccccaacccgggcccgggtccccgcctcccctgcaggcggactcgcccgctcccaggccggacccgcgcccgggacagggacccggccgagtcgagccgtcgcgccagcgctgcgccgccggtcggtgcgcctagcggatcggagctgcgcgcggaaccgtgctgccccgccccgctccacccgtgagggtgagtacgcggcggcggtgcgcgggggcccgcggggcggggcggggcggggagccgcggggtcctcggccgcctgaccccagccggcgccgcgcctcccggagggggtcgggccctgcacgtgggcgcagcgcgggtcggggtggggctgccacagccctgcggagctgctttccggggtccctttccctggaccagattttcgcgggaagccggatcctctccgttcccttggagtgagcaagcgggacagttctgcggaaagtttccgcccccaatcccccagccctgcgcccggactgaagcggcggcccccacctccagcatcctcgagcgatggtttctcccacaactaccccggtcaggtccagcacttgggagctgactgtgctggaggtgacaggctttgcggggtccgcctgtgtgcaggagtcgcaaggtcgctgagcaggacccaaaggtggagttgtcagtgggaggccggctgtgcccagggtcctagggccacgttatgggggtcgtcaggcctaggccactgtgcctcagggctgcatgggtggtgagcagtgggagggatgcgatggggggagtgggctcagctgtctgctgtgggtgtttcctcggggacctggctggcagggacctcccggccagcccagaactgccaacatgtctgccagcactgcccctccattcccagtcctggggggaggctctgtctgggcagcttgaggcctgacctactgtggctgcttcctctgctccccagcctgggtcctgagggcctggcttaagggaactgctgccagaaggctgggagtgtaggcagtgttcgggtgcccagctgtgccctgtctgacctcatggccacccacaagctggcaccccccacaggcctcttggggaagcctgtactttccaccgccggaggcgggtaccgcgtggaagccaggctcaggcggactcattctttttgaactttgggaacaggcctggtacaggctgagttctcacaagagacacacacccgtgtcactgtctcctgagctgtgccggacccgtcctacagactccacctcctctaggtcctggccctggcatctgccagggggattttaaatgagttgatatatgctaagtgctttgaaaggcgcctgcacggagggagagctgtataaatattcactattggtaatatttctcccatgctgttactctccaaagctgcccgataattctagagtgggttccggggacgtgcccgctgtttggggcctagaaatgaactcgggaggttgttttgcttgctgagagctggtctgggaatgccccttgaccgttccctgccctgctcctggcccactcccagactgctcctgtgcctggccccattgcgctgggtgggtgatcctaagctgccccatgggccctgggctctgtcaagacatggggagcttgccaggagttggggccagatcccccagactccaagatggtaaccgaggttgtgagggtgcacatggaaggaagagttagaagagtgaattggaaattgccagcttggactttgggcagagtgggtgtctttagcttggggatgggttgttgttcagagacaacagggccgccttctctgtgagctggcggcccaggctgaggtgcctctgggctgccttccctacgggaagcagtgactggccctctgcttctcaggaagagagtgccgtgcccccgccagcctcccaacctcgttagactccta

SEQ ID NO: 57263 - DNA, 955 bp, Homo sapiens
tagggcaaataaattggccctgtgagatacatgtttctatagtcctgggtctaggagggacccttgggggcttgagaactggaggcagaaaaactgtccttcaactcagcagcatgctggggtcttggagagagtctctggggctgggtgtgccctttaactaccatgtcccttgaaaatggtagccctgagaacatatgcaaacatgtattcccttgggaaacagagtctgacattctaatgaagaaccagcacacttgactttgatcaacaccagccttataagcagcatggatattgaaacattcagtaaccagcatggcatgtgcatgggtcagtcagaatgcacacaggccacagggctgaagcagaggtctggagggctccattgtgccaaccattaactctttagtagctggacagtagggggtatcttggaggagggtctgagaatagcaggagaaacatgagtaagggggcttgcagcggtgactactgaccagccagtataaaaatatttcattattttaacaaccggccctggtactgctccaccggtgcctatcagcccgttgataagtcttgttaaagaataaccacagttttggctgggcgcggtggctcacgcctgtaatcccagcactttggaaggccgaggcgggcagatcgcctgaggtcaggaatttgagaccagccttggccaacatggcgaaaccccatgtttcaccccatgtttctactaaaaattcaaaaattagccaggcgtggtggcgcatgcctgtaatcccagctactcaggaggctgaggcaggagaatcgcttgaacccagtggggcggaggttgcagtttgcaccattgcactccagcctgggccacaagagtgaaacactgtctcaagaaaaaaaaaaaacaaaaaaaaaagaataaccacagttttgaagcctcaaaggaagg

SEQ ID NO: 57264 - DNA, 1487 bp, Homo sapiens
aaccattatttttttttatttttttatttttttacaaccttgagtgttttaacgatttgcttctttaaaggctttgcttccctctgaatattatgactagcctattgggtcagaggccaggagtctgcagaggaccattcattcaccccagaggccgctccttgcttttatcctgtcctcaacatgatagctcaaactgccagattttacataggaggaaggaagacaccgaaagatgttcctagctggcacaggctgtgctgaacacaggtctcaccccactgtgggcaggtggtggtggagcacatctgtctctctccgtgttggtggctgtgatttggcagctctgccgaagatttgtgagatggagaagaaagtgcagggttggggtacggggaaaggggtaagaaaggagattagtcacttgagtcaggataatttttcctgatgtcaaagcctcacccaggagagctctcgctgttgcctgcttttatctggaaaacaatgtgagcagtatctctcaaaattaggtcagggcttgcagaggcagggacttgccaaggtgctaactgcctgaatcctcggtgggtttgcacagctctctgctctgacaaatgcctcctttgtctccctgaaaagcctgcctcttttctccttcacccctccactccccccacaaacaactgaatttggaaggttaaaaatcacttcacttgtcaactcgaaagctctccctcccacctcaagttgtttctcttcctgcccagggaaggcagctactgtgtgtccccctggggactggaaccactttgcaaagagcgcagatctgcagttttcacaacgcagttgtcatctcgggagcagtgtgtgcccgtccaccctgggagaggcttatgaaggctgtgtctcaagcatttcagggggctgcagatttagggggacagtcctggtggcttggtcttaggcttgtcttggctcaggtttctgtgtggcaacagcatgataaaaattctgtccactctaccaaaatgggagaagcaatagcaagacagcagggcagcaacagtcagttcttgtctggctttccaggacaacgtgactttctcttattttttgttcctgacactgtttgcactgactaagatatcacgatgatgaaacactgttgaatctaaaaggtgggtggggctgaaggaggggtgggaggaggccttagaagctaattagaatcctctagaagtgtgtggaaatgggaacctgagccaggagagtcctgtggattcactagattctgggactataccttatctatgctgtgcaaaggaataagaaactagtgctgtctcgggaaccagcaacacagatgttcccaggagcaatgtttgcaggtgagtgaggtcagggagggctacagagttaggactccgaagtcagaaagatgcctgttggttctgccgttcatatctgtgagatatcaggctggtttc

SEQ ID NO: 57265 - DNA, 620 bp, Homo sapiens
tgctgaatcaggtgccagactcataggcctgtaaatctcctgcttgctgttcaggtcggggatgttatctccaccccagccatcccctcatgtcatggtgcctgctgtttccacaacctctcctgctaagaagatgaccctaggtaaggcattctctccaaatcgaaactagcatggccctgagtcctcattcaggaaactggtggcagtggggagctcatgttacagacacgctctccagattgccagatccggctagtttcaaaacatgcccaggttctcattgctgcatgttcattgatggggctgagaagagggaaagtggaaaccagaccgtctaggggaattccagtccaggtgttcccggagacccaggctgtgaataggagagcaaggattgtacaatcaattctccagagacctttagcttagcagagtgtgttcaataaaggctgttggttaggataaagcagagagctaatcagccgagggagatttcctttaagtgggagttttcagaatctggtgttaggcttgggaagtgtcaggcttgggaagaggcaagattgacaagagctcagacccccgaatcactgcttatggcccaatttgacttagta

SEQ ID NO: 57266 - DNA, 643 bp, Homo sapiens
gtatatttcatagagtaccctgttggtctggacagagggagactgctagtcacattgcatttgagggggaagtgcagattttgcattgtacatctgaaagtttctgtgacagggccctctcttattactgcctaaatcagccatttgtccttgtcctgaccttgcaaaaaagggtgtttacattgtctgcagctgtctgagccatagtctttctgagacactgtcatccttgtgaatgtggcactgctgcctggaatagtaacatagcagacacatgtgtgcatgcttgtgtacatatgtagtcttcctatcagttcaaggggaaaaaggggacaaacttcccacctgttctcttctctcatgctggagtttttgcttaggatgtgactcatgagaagagggaagtctaggtttacaatacagctggtagacagaggggaaaccccagaagatttactgcattctttgttttggtgactgaggccacagtaaactgaaattcaaatgttgtccttatgatcagtgggttaaaatgagagagaaagggaaagagtaagcctcacctttctttggttagcttgtgtgtccctggaacatcttattttatttgtttacagtagggtaaacaaatttaagctggcaa

SEQ ID NO: 57267 - DNA, 1061 bp, Homo sapiens
ttggtatttacaacattgatttccagttacatagaacaaaaatgggaaacacactttagaaggtggttcaggactcctcttcaaagcataatagagcagaggcctggctaggcttttagtttctttttcactttcctttactgaatttatctgaactcaaaactaaccatgtctaatagggcttcataataaagttggagcccaggtcatatctatactaattataaaaattaacattggtaaagacttttacagttcacaaagttcttccacatatgttatcttgcttcatataacaatatatcaagaggatattattataactatattacagttgagaaagctgagattcagaaaaattaaatggcctactcaggttcatataatcagcaagctgtagaacctggatttgagtccagattttatctcaaaagtcatattctttaatctatatgactctgcatccttatgaaagtagactgtagactatgtgtagcaattctgtgttgccactgaatatccagcaagtactaaaatctaccagtaaacagggcccctaagcagactcgagtttgtgtcttcgtggttaatatgtgacagaggaagcttcacaaatcaatgatgaggggtcaattgttcagtaaatggttctgggaaaataggctaagtttatgaggaaaaagaaatcaatttagatcctcatataaaactaaacatcaaaataaaatctaaaatctagatgaattaaagattcccattaaaaaagaaataaattggaagaaaatataaatgaataattgtcccatccttgataaggcaaactgttcatgtttaaaactaatgggagatatctctaaggaagcaaacgatataattgactggataaaattttaaacttttttatgtcaaaacataaataacaaataataaaaaaagtgaaaacatttgcaacatatatggcagaaaaggctcaatatccttaatatatgaaaagtttatgtcaatcaatgagaaagtaattagaacagtttaataagaaaaaataaaagagaaatataagt

SEQ ID NO: 57268 - DNA, 1388 bp, Homo sapiens
tttagctcaatgatagcccactgccagatgtgagagtgaattcagctaaggccagaatacccagctagtccaggctacaccactggtccacagacatgtgagctaaataaatgtttaatgttacgatgtcttgagtcatagggtgatttgttatacagtactattgtgacaaacatgtttgagtcacagggatataatgactctttgttggttagaaaggtcacaataaaattatgcttcagtgcaaggatgtttaggcctcgttgaagtctgcatgaaacgtttttcttgacaatcgacttcccattgttcaaattcttgtcagtcaactcatagcccacagttcatagattcttggaggaaaacatgcctcagtaaaatgcttgaacactgtttcctggaaacattttcacgccaatctccatcaatattaataaactaaactggcattcagataatttatatatctattgtgtttagttagtcttaaaatatctctgtggttccagtaaaattggggcaatgacaagctatactttctgaaactagggagttgagactagaccctgaaatctgggcagtgtaccaggatactggcattgtatgaggcttcacagcaaagcaaaaactaatttttgcctggctgttgctataatctttccacaattctttaaccttcaatagcaaacattaaaccaagttcatgaatcagaggagagcaaaaatttaaaggtaggaatccactacttatgaacccattaaacatcagcaagtttctattccaatactgtttcagaggagaaggacttagtctgagggccacaccagagctgatgtcatcatctatttgaatgatatgagtaatgataaaaaccaccatttactgtttgcctaactagtatcaatactgtgctcttctctttacacacatggtatcataaccctttcaagtaagaactatttcctccattttacagaaaatacagaacaagtgcattagctgaggtttagaaaggttagaaaaccagagcacaagctggtccgtggcagagacagggttcacagccatgtctatgcaactctcaagtccatccctaaatgcccagatcattcagcttcccatgtggctaccctggagtaagcagacatgctggtttcctcttatcttggaagttacatttacccttgtaaatcaccagattggcattctggttttagaataaaatttagtttctgattagcccagctgtctcctccagggtctctttcatttgatacacaatgaggacttttatacttgcttttcatacatatccaataatcttaaaacactccaaaattataaattctcacctagcaatctgtagtcactttaatatgaggactta

SEQ ID NO: 57269 - DNA, 1056 bp, Homo sapiens
aagattttttttaaagcccatatctctatgtttaactgacatgagatttttatttatttttactacttaaattttttgagcctacaccgcaggaataagcagagtctattaaagagtctgatgctgcaaatgatcttacagaagatcactagaatttatgatcagctctgcccttgcaacctgccttccctgcagcagcaggcgaggaaggcagagaggctgagaggtcattggctgacatcagcaggtacaaagtatgccatccttccaggtttggagacgtggaagtaaacacggattgtgccaggagcaagctttgacctgactgtggggttgcgggtgggggcatgtgtgtctgctgggcagcaggagaagaagtttctctctgtactggggctgtgaaaggctgggctgccctcacactgcaggtgtcgggggctcaggagcctcttcttatcttttgtgtgactgcaactattttcccaagaaaattaaagtgacttagtcagttaacctgaaattcccagcagcagattagaagttttgtcatcagactttggtggctgagagagcagaaagtgctgagtgtgacagaggtgggattccactaccacctagtgggcagcaaggggccacctctttgcccctcatggctccaaggaacatcaagggaactgggagggaaacagtcaaaaaggaagttaatataagttctaggtagaattagaccatcttgtagtgcttccatcagccacctgatggggtgcattctgagcaccccatcaggtgttgatagtaggttggagagctgctaccctccctcagaatttggttcctgggccctggaatgacaggatgcacccagcctgcttcggggcagtcgactggccaaagagaggcattggacctgattcgaggaaacctattctcatatttgaagccaggggcttattcatccactgcaaaatcagttcactgctgtcaaagactatagctgagtcatttctagtttcctccctgctgcctgccttatgcactgagcatgttgctcttgaa

SEQ ID NO: 57270 - DNA, 2401 bp, Homo sapiens
gacagtttcaggagtgaagggcgtttccccatagctgctagcagctgactgcctcagctttcagacctctttgacgactgccttggctgaagaaaattgtttcacccaaagtcacacatctccttctcagggcaggcttcatctaaagcttgatcaatgcagggttataaagatgtggctcccttgttccaattcatgacaactccagtgaaccagcctagctctcaagcttcctatggcattggctgtgaggcttccttgcaaatcaactcaactttctgtccaatcttgcttcctctccctctttcccccatgtgttgatccaacaatactctctgatacacattctgctctcttatctctgcctcagggtctgcttcctgggaacctacttgtgattttaactaacattcattgcaacctattgcttcaggatctgtgataggctttccgcatgcatcatctcatttaacccctttaacagtcttgcacaggaaggtaaaatggggtacaggataatattgtaggtacagcactcccccatatctgtggggaatatgtttcaagacccccagtggatgcccagtggggaatatgtttcaagacccccagtatgaaacctgattgctgtcaattggaacatatttttgttcgtgtcttccatgcagaaatttagtgccttttctaccttaactaaggacttatcatgcaccgtagccaaaacttttgcagtgtgagaggtggcagcaaaaccagcatcatttgtcccccttcttcacaatgcaatggatagaaaattcgttcctaccagaaatctcagtcacctcagcaaacaactttttttctttccttattaagttaacctttctacttgaaggaagccttttatgacgctctttggcatatgtgaactgccaacgtgactactcttgcattttggggccattatgaagtgaaataaggttgactcaaatacaaacactgtaatgttgcaatagtgcatctgataatgaagacagccactaagtgactcacgggagagcattgtagacagcgtggacacgctggacaaaggcatgattcacatcccgggagggagagggacagcacaagatttcttcatgctactcagaacagtgtgcagtttaaaacatataagttatttatttctggaattttccatttaatatttttggctcttgattgaccttgggtcactggaacagcagaaagcaaaaccacagctaaagagcattattgtcttggcatcagctagaccaggtcatcctactgcattagaacttagtatagaatcttgggcaatattttattttttctaatcctgttttctcatgagtgaaataagccttattaatagaactaagttttgatgcctcttggaaacattaaataacatattttcaaggggaagcatcccaattgcagtaagttttacatgaattcaactctacatctccggtgaggttttttttgcaccatttatattatgtaggcagtggaaataatcctgcctaaataatcagcagagtataatagtaataaaaggaactctatgatctacctgcttgggcccatgtccactgtcacatcgtgccagattttccacctgtaaaaggaagataacaatagtaactaccatggcatgttttgaagattgaataatttgatatatgtgaagctctcagaatagaacctgacacatagtaaagttactaaaatatcactgcatgttggataaagatacagcttttgtttaaaggtaaagaatgaattgtaagggcttttgaccattgatatggaggtaccatcggtattcagatggccaggaaagacaggtaaagttatttcaccaacccattggagggcaaaactaaaacatcagctgaggctcgctgagaattgctgacttgaaacgagataggagagctcatacaagtctaaattcccaaaccctgtaaaaagtaataaccttttctgagaacttggcattttcagggctgcgtttgcctgttttgcattgctataaaggaataccttacactgggtaatttataaataaaagaggtttatttggctcatggttctgcaggctgcataagcgtggcatcagtatctgctcagcttccggggagttctcaggaagcttccagtcaaggcagaaggcaaaggaggagcaggcacatgacacagtgagagctgaagcaggaaagaggaagaaagaggaaggagggaggccccagactcttttaaacaaccagatctcacatgaaccaacagagtgagaactcacattgctgcaaggacagcaggaagccatcatgagggatccgccccaggacccagacactaaagaaaagtgtcatcaggctccacttccaaa

SEQ ID NO: 57271 - DNA, 2214 bp, Homo sapiens
atcgggatcattttaaatgtatatatacttcccttattcatgaactgactctagaatttaatgctcttgtaaacagtatttcttctataaaacagtacttgtcatgataaatgtaaataattgatttattaatattaaataaatataaagcacttaaaatgatgccaagcacatggtcattgctataagaaatttagtaatgattattgttatccccattttacaaattgaagcatatagatgctgaataatacaatccatcccagttatctgtcttaaaactctgggatcttatccactttgctccatttcaaaagatacagtaaataaaagtagagcgcctggttgaagttggctgatcactggcccctcaactgccccctgattctgcaactcctgagtgaactctgtggcccaatagtattctatggagcacagtttgaaaatccatagagcttgatgatccttctagttccaaaatcctatgatcaccagtaagatctgggcaaatccagtcctatcccctacccaggtggctattggcaagatggctgctctgacataggtattcaggtagccaccttaaaataaaatttctttctgtaagctacacaggtttaatctatatccttagaacagataaagatagcaattggtattccaagctgtcatcccatctagaccaggatccgctctttagccgcagaagccaaagaaatgtggcaaatgttccatcaccctcatctctactgggtcttccctggaaatttctgagaaagaaagatgtggttaaagaggctcagctgtgtagatatcaggggcaaagaagaaaatgatgcagtttatcaatgcttgttagacttggcccttggaaaagtatagaacctcccagtagttgggaagaagtccttgccatctgctcccttacatagttcttttacatttttttcctgtcagccaaaagttccttgactttagctctccaagaaggacttaaccctgtacccaaaagccactgtaggaattaccactctatttgcccatctggcagcccctgaaccaaatctgttgacagctgggactattgactcattattttgtaacttttatcactgaccaatggacacatgatcctgccatgttgataaagggaatgggacaggagatttctctagggggggggccacagggggacactcctggtttgtccctgtggcagcatcctgatgtttagaagaattatagaaagttaatttaggaggactgacatgccattttaatgcaggcaaactaatctgtaaaaagtcacccacccacatgttaagtacctgaactcctggctggatctgggtctggagttacacaagaccacgtggccacaaagaaggagcccaaagccaagtggcatgaagccaagggagagtgaaagggcatctgggggaaggatggaagcaactgagctgtcccattaacaatgctatccacggggcctggaaagagaagtaaaaaaattagaagtacaaggtgcaggatggaaatctccaaacaggtcttggaacaaaggggaggaggcaagtcctggaaggagaccctgagctgcttaagggaacctcaggggccttctatagagaggctgcacctcgcctgaggagggtggcagcagcagttcaaggtcactgagctggcggagacatgatgggcccaacagaaagggagatggcctgaggagaggggtgatttgctcagagccttctttgcaatgcattcctcctggtttttatttcagcatgaaagcttccagggaagctgggatgaaaacgtgcaatgggtttgctacacacagctatttgtatctgttctgagcatcagggagtggataaagaagaaagaatgaatacaaaggggtaccaaggaagaaatggggccagggtcaagctataattttctggcctgagtagaatatctgtggcctgggggttccagaaaatgattcacaaaactaacacactttgaccatgcaggttattgtcaactcttatttaaggcaaaatgtggtttcttttcctctaatggtttctatctcttgaatttttattctctttcaaatctagttgatattcttgagagaaatattcttgatataaaactatttaaagcagttatagaaggaaaaggttggggaaaggttgtccttccgaattgggacagcctctt

SEQ ID NO: 57272 - DNA, 531 bp, Homo sapiens
actgagaaaattataaggttttttgtttttagttctgtttatgtggtgaatcacatttactgatttgcatatgttgaccaatcttgcatctcagggataaagcctacttgactgcggtggattagctttatcttgtgcttctagattcgatttgctagaattgttcatgtttatcaaggatattggcctgaagttttatttttatgttgtgtctctgccaggttttggtatcaggatgatgctgacctcataggacaaactagggagaagtcactctttctcaattttttggaatagtttcaactggaattctaccagctcttctttatatatctggtaggattttgctgtgaacttatatggtcctggactttttcttgctagtaggctttttattactaaatcaattttagaagttgttattgatctgttcaggaattccatttctgcctggttcaatcttgagatgttatatattctcaggaatttatttatttcatcggttttctagtttgtgtgcatcaaggtgtt

SEQ ID NO: 57273 - DNA, 776 bp, Homo sapiens
gtggatgggagtggtttcttgcattcacatttcagttttatatgttacctcaatttgacaactgaaaagaaccagtgaggttaagcatcacagggagaagaaatccatggttgagaaataggttgattttgtcacatactgttggctcaaggttgtgaaaattaagtgtaggaatgttgctttctttttccttctggcaaatgaaaaggccaaagctcagaattgttggaaatgacagtccaattaatcaggctccatgcttcaaactaggtgctgagcctgtccatggttgtgaaatttttaaatgacccctttgtcctcggtggtgccaaagtgaaattcctttgggatcacttgcttcttggcacctggtatctgaccaacaagaatgcgagacaaaaggttctttcaaaaaaaagagaccaagctgtgcttttgtttcctctgaaagaaaaaggtaattttacagaaatacagcaggattatccaactacactatatgcctctggcaggtatcgctctataaacaactgaatccagttagacctacaaatgttgactccattttttagaatgccaacagaaaagaaggattgtaatattcttagacttttagaatggagagtcgagatcaaatcttcttttcttctactccctgaatttcttttgtcatatggggaacaatttttttattaaatggagaacaaagagataaaattaaatgtctaagatagcacaggaagatacagttagaatgaaaaccatgatctcctaat

SEQ ID NO: 57274 - DNA, 950 bp, Homo sapiens
gagactattcttatcatattttcatctaaaattgcacatttaaggtcaagttatctcttaccacatgaaaagctatacttacacatatggaaagtaagataactttttgtgactattcttttttccatgggacattatcttatttcacacatgtgttactgcaaatcttttgaagagagagatggattgacactaagattttaaattctgtcttggattgtcacacttagtaaatttctgtggaaattccaattgttggtttaggaaaattccagcaggtggagctgtaacagcgctcaatttcaacagagttctctgttattggcaagatggtctggagccaatatggactccaagcttctgtttgtgaactctgtactctcagtgaagggctctctctatctgaactcttgctatattcaagaaaagctggtaattttggaccctaactcaatccttgatattttggggtctccggagaatcacatagttgaggtactagttagcactctcactggaaaaagcaatttgataacggccccctagtggtctaaactggtacatgtggctttgtaaatgccaacccacccattcattagacctctgagggcacagagatgttttcaatcattggctctgtcgttttgacttttctcgccaaaagcttaagggaagaaaaagtgtgtgatacataaatacaaaacatgcaacagtcagtgggacaactccaagtgccactatttattaattttataatattaggaagttcgcttttccctgagcctcagttttttaaatttcccaaaccaaaatgaaaacaacatctactgcaaaggattgttgtaatggggagcaaacgacatgatacacatgagagaatatgtgatacacttgagaatgtttgatagaacatattgtgcataccaggttgttttttattattaatagta

SEQ ID NO: 57275 - DNA, 642 bp, Homo sapiens
ccaggtcagttgaaaagtagatgaaacagcaaagacttaattagcaaagctgacatttctggctcagcttcaatcatggtgagtgacaccttaaaggttctgaaccaaaagcttagattgttactttatactttatcttctcaagagaattgattaattgaatgcagtctattgagttccatctaactgatgtatctaaatgacaatgaactcacccctgaagaactaaaggccaggatttttcatggtgttgctgttgtcagttttgtcccagaagacagctgctccctgaagctgctcttctacaacccccaaaagggagattcactattaactagtagcataaaaacatgtctgcctctccaaaatccaattgcctcacatggctggaatttgatctgttgccggtaggtttactttgatgtcaaaagtaacatctctgctgactagatttcttgattaaatatagtctgttaatattaaatggaatgaatcagagacaatatcttatgcctatctaatttagaggctatgaacactctattaattagccagcttctctttgggatggatattttggttcatgagtttttaaaaaatattaattgctagtcaccaagtctttttgaatctataacttgg

SEQ ID NO: 57276 - DNA, 641 bp, Homo sapiens
tcaaagctctcacttctggggtccacacggggtcctccagcggattccgtcagcgtttgcttgtagtcttcatgcatgatgacctcagagtccagtgctttatgtttgcactgcatctctacccaggcaagctcattaccattcaaaatccctttgtgttacttcgggaaaaacagattagaattcaaaagtctctggttgttcattgactgttaacatacataaccatatagatataataatacttcagagagtgctgaaagtataatttggaataagtaaataaaacaaacaaaaagactttagacttgagcgaaatgcttgcttgcatgtagaaagggttatttattaaactggctccccaaacagagcaaaggaaatcctactgcttgggacaattgaaactagattgaaagaacaattccctattgtcagaggctgagacttgggtgacaaatactgtatttctttctccctcttcacaaaaggaagtactcaaaagaaactaagaagtctgcttctcattttgaaccccaaagttgccttaaagtgtacacagcctgctgttgtaagattacacatacacacacacacacacacacacacacacacgtcagtcacacagtcaggacaaagtgaca

SEQ ID NO: 57277 - DNA, 6397 bp, Homo sapiens
agactatgaaatacaaatgttataccagaacatttaagtgtttcttctttcccttacagcatcctaattcacatagcattctatcttacagtaggaatagtcaagtctcaattatctaacatactctttaaaaaaaggtgtgctattttcctcttgggatatattcttccattaacagtcaataaacccatagattaatggagagacaagagagatgctgacaaaaataatgaaagttaggccctttatatttttaattcacaagcaaatattttccataatagccataatccatatcaaataactttgatatctaggattattttgtttctggatgatactaaactagactttgatctgtatcatccttaatcactaccatcactgtctctgtcatcactgtctctcctatccttaatcacttaatcactctatttccactagtttttaattaatagatgagaacctctaaagtcatgatgattgtatctcaaatacactacatattgtataaatatatcttgtattagtctgttctcacactgttataaagaaatacctgagactgggtaatttatatggaaaagaggtttaattggctcacacttcttcaggctgtacaggaagcacagcagcttctgcttctggggaggcctcaagaaacttaagaaacttacaatcatggcagaaggcaaagctggagcaggtgactcacatggctgggggaggagcaagagagggaggagggatgtgctacacacctttaaacaatcagatcttgtgagcactcactatcatgaaaggagcaccaagaagatggtgctaacctattcatgagaaaccacccccatgatccaatcacctcccaccaggccccacctccaacactgggtattacaattcaatgtgatatttgggcaggtacacagatccaaaccatatcacatgtatgtatttaattgggctttcagaagacagtggtgacacctaaagtaatgacctctgcaaaagaagatagagtaaattttgagattgatctttttggtggactaggggagaaggaagggcagaaaggattatagggtagttctcattaagcaacagaataacattcaagcaaaacaagtctttacacttagaaccaatttaaattatccagttcttcacccacacacattaagctagctgatctcaggactgaaaataaaacaaaactttgtgtaactcataatatgtaatccataaagctcccaggaaacagattctagtgtcttaaggcatacttctccaatacaatcattctgacaccatcacatttatgaaatcaaactcagaggaatgggggtgctagggtttagatatggtttgcttggccccaccaggtctcatgttgaaatctgatccccagtgttggaggtagggcctaattggaggtgtttgttcttggggatgaatcagtcatgaatggattgatcctatccttgcagtaatgagtgagttctcactcttatttcctgaaagagtttgctcaagagctggttgttaagaagatcctggcacattctcccccttttgatttttctcttgccatataatctgaacatgccagctcctcttgcccttctgccatgagtggaagcagcctgagtccctcacaagaagcagatgctggcaccatgcttcttgtgcaacctgcagaactatgagctaaataaacctcttttccttttgaattaacaagcctgagatattcctttatagaaacacaaataaacaaatacaggaggtacaaacataaaggggtagcatgaaggagttattctgtggtgatagaagaattctgtattttgaatgtgataatgattatatgaatctgtatatcggacaaattgcatagaactacatacatacacacatgcatgaatacatgtaaaagtactgaaaactaaataagatctatagtccagttaacagcaatgtaccaatgtcaatttccttgtttgatgttgtactaccattataatatgatgtcatgcttgggggaagctgggtgaatggtgcaggggttcctaggtactcttttgcacaacactctgagtctataattactttgaaagtttttttttaagctaaggaaaagtttctttcattcaataatcaacatcaacattaactttcaactgttgacctacattaccacaggggtgagcagcttgggagaagagggctcctcagtcttggtgccaacgtgttgtttcttggcacccccactgttaatcttgagcagacctccagacctactccaaataagcacaccagttgtgtaaagccaagtatcctgttcaagatcttttctagtcttcatccttccctagttagatcgctacttgaaacactttggaagccaccattagattgagggctactactggtagttcagggacccagatggaagaagacacagaggtcagctggagaattataaggtcttcttaatcttatccaatgtttttcaaggatggcaaatcaaattctgtcactaacttggttgtatttatgtgacaaacgtttagtcagtgccttccctgaaagtcctgaaacttgtgaaaatgattcctggttgcccagtgcctacaggataaattccacatcactgagtcgctcacataaactctttcacaatatttgcccaacctgcctctctagacctattttttttcttactcctttcaccatcattcttcttcaggttacccttaccccagaggatatgatgcattctatattcatccacgtacatttacttgcagtttcacaaatattgcaccacccattgttcctgctaatcactaagtttggaatgttccctctgccattcctggaatatcccttgtcccaacacacacatacatacacacacacacacacacattcaagcacagaaaacacacacaaatcttttagggcccagttcaaaagtggttgctttgacatattccctaactaacccctgtggtttagaatggccacttctttcagctcctcgcattaggaggtggagacagttttccccattcttgattctggaatggcccagttaattgttctcaccagttgaatgcagtagaggtggcactgtgtgactgtccagtctcactcaagaggccttgcagtttttgttctcactctcttggaaagctgctgcccccatattaaaaacctgggtcaatatgctggaaaagccacatggaagagagccaagacactcagctgcaaattcgatgttactgccaagtatgtgaaggaaactttcttggatcctctggctgcagccaaaacaccatgagtaatcccaagagatgccaacagaagagctgtgtggctgagcccagatcccagagcaaaatcatgaacaataccttttgtttgaaggttcttttttggaatgatttgttacaccgtactagacaattgatacagcctcgccccaactccaacctcaaaaaactagtcattcggaattctgaaagaccacagcactctatgtctacttctattatagattcatatttgaccataattatttatttcaacatttctctgcactaccagactttgagttccctggaactaaaaatattgcttggacctcacgctgtacctgaatacctggtaagcactaaagtagtaattggcaaagcaatgaaaagctaaagaactggccttactcaggttgatcctgtctgagtgtgttcgtcaaaccacaggcagaaggaactttcacttcatacactggaaagaatagtgaacctcatgcctcagtggtgtggctcacctgaggttaagtttagcagcagtagtagactggaactttttagaatgctaagattcaacagcctcagatgaacagtattttactagctctgccaatctaaaagcctagggaactctttgcttgcaaataaaagaatataattccaagcaaaatcctgtaagacttggctttgagtcaaaattataaaaataaaaacatttgatttttacaattcctctctagagttttgtccagcattatccagatgaagttgaattattcaatataccctatagttatttacatataactggtgacatggctgaaaaaaggaggatcttatcaattgtcttcagataataatttctccagtttagaaccatattttgcctatatgttagctggacgagtccaactattgaatcattaagtaatccatttctaagcatggatattaagttacttttttacatttagttaaggttgcattattgcatttagtactattttcatcttatgtgttactgttaatattatgttatctttaatcactagatgaagttggaaggcaaaaaatgagtaaggggcttggaagaagaaattttcaattcttgttttgctttgtcagtgacttgctccttgtcccttttcgtcttaaatatttgtccctagtttcattactggcaatgccttttaatgaaaaaagaaatgttttaattaaccacaatagtatttgtttatgttaacttaaaaattacagcatttgcaaatttttaactataaccaaaatcaacagctagcctaattttaaaaaagactttagaatgccttgatatctattggaacattacatatttgtgatccattttactttctactgttgaacagcagatccttctggttcaagaaaggctacgactccttattaagttgctgtagtattggcaaaatacaaaccaaactctatattagtgaccctgtatttatttgtaagaaaatttaatccatatgattttgagtcattgtcacttacagtaatacaagcaaatcatgctgcgtaagtgctacttgatttccaagatgccttttgaaccaccttttgaggtggtcttttttatttaggacaagaaggtttatttttactggttgaaaaaaggctcaagtttgagtaaaaatatgggcattcatcaaaacagaggatgaaaaacagacttcttcagacaagtaacagcgtaagtgttgaggagtgttctagacagatagactgactcagctgtgacatgtacactttctgggcaaagattaaccctcctgccagcataagccgacagtaataagcaagtcaacttttcttttccacattgtccaatgtagacaactggtgactgaattaaaaatgcaaatcaaattattgtaaagtgaatgtgtgttgattttgtaacatttatttaggtgggagagccagggtttgaatcagtcttgtgttgtctgttgaactgggtgctgaatggaatccacctaaactggctcgtcctcaaacttcataccagagcaatgaatcaccttcaaagctaactcagggagcatattggctccaaagaccattaaccctgggaactccccaactgaaaggtgggactggagagatttagaactgctggcttggagttgtgagtcatggttgaatgccaacaacctggcataaatcacagaagcacttgaatttcacattcattacttacaacagtgtggaaattgctcaacatttatggcagacatgcattccacagatataaaaataaaactttattagaaaacttgatattaaatttagacactgagaattaaattccaggagagccaatctttatcaaatcataaataagaaatagagtggttccattgtttaacttttctttttcataatctatatggctaaaaatcttaatcaaaagacatgacatttagagacaaaaaaacatagatttaagatcctactctgctgatcactagttaattgatgttgggaaatcacaaaactctctattgtagctttagttttttcagcctaatgtgcatcatagggttaacatcgagatccaatgaggtactatgtctagcaaccttttagagacattaatttagagtcattcatttattctttggattatatgtgcaaaattgagaaaaaggcgtaagcacaaaatttcatgtgactaaaactcaggaatctctgaatatttttaatctctgtaggaaaatgttgtaagatctataacactgtatttcaatctgtttctaggcattaagaacttatttgcctcataacccaaattcctgctccccaataaaaaatgagtaacatcagggtataaaatgccagctggaagagtattcgcaaccatatacaatgaagagtcacacttccaagaagaaagccgatgtcccacttcagcatcaaatctaagacactgcatttcactttttctgtacaaatatcataatctgtttgttaatctcttggttttatttcaaaaatgaaactatatttagagagggaacaaattctaccagttgctgttg

SEQ ID NO: 57278 - DNA, 493 bp, Homo sapiens
ttcatttggccactctctctgtccctgatcatccacacttccttgggcacacagctgaatatggatgagtgtttggcctgagctgcctcatcctcccggtccaatagcctccacccctgccctctctctcagcacgcttcctgtttcattcccagtccagcggctgtgccagactgtgaagctcccagcaggcagcaggccagtctcaggaccatgacagggtgagtaatgcacaggccagccagcaggtcagagggcagccgctcctggaattgcatctccttagatgaggaggccggtaactgtgatcacccagtggaattagttcccagagctgatgggcaagataaagcacattagcaaaatgtgtcctctctgactttataccacagggggcagggccttgcctggaggatctggactcaccattgactctcccccaagctcccgccactacatgatcatcttatcagcaccatcgtagtcatgtaac

SEQ ID NO: 57279 - DNA, 456 bp, Homo sapiens
actaaatttgattaaatgggtctctttcaacatcgtaatgccattccagagtggaagtctccactttaggacagctaatctctggtttctaagtttccctaagggatcgcagacaggaatataatctgttccacaggccctgtcctctttccccttttggcctctgattcttagcattgcagaaatattactcacagaaataaactgaccttttgaaaagtaaccgaaatcatgcattccagctgaggacaatgaacttgatgtttaaaaaagtataagcttctgtgccaacataatgaacttgttggctactactatgttctttcaattttggaataaacataaatgtgaccctcaaacacttgttttaataaaatcatttagtgtgtgtgttttttcttcctaccttagccaaatgttattgaaagtccagtggggtggttaaaccctacctta

SEQ ID NO: 57280 - DNA, 2612 bp, Homo sapiens
ggcaaaactatgccaatagaaatcagaatagtgattgacggtagggtgtggatattggaattttctggggtattgcttacacaaatgtacctattaaaattcatcaaactgctcaaaatctgtgcatatcactgtatatcaattttacctctataaaaatcatgtttggtatcaaatatatgtgtacataattaaatgctgaaaagatttatactaaaatttcaatagtgaagaatatcaggtagttttctaattggcttctgaatattttcatgttatctaaattttcaatatatataaccttttaaaaatacataaaactaatatttaatgaaacaatttaagggggactctctaccttgtagaatggataaaggagaggaaacaaatatttattgggcatttgccatgtatcaggtcctttaaaagtcactttattacatgattctatttaaacaatataacaactctatcaagtaggtattatcccatttgcaaaagagaaaacagtgattcagacttatggttatgtgtccaaggaccctcaacttgatcttaggtctgcctgcttctgaagtcggtattttgattctaagagaattaagccctcaagacggatttctgaaattcagagagtaaagaatgcttggtaggatagaagaatcccagaaatacattactgtctacgagcataggaattggcacattggactctgggagttaactattaaaatgggaaagtgaattatccaaatgtcagagtcacaaatcaagcacagttaatctgaaacccaagaaagtctgacctgagacaaggaaagaggtgggtggctcagaggaaaaaaaaaaaaaaaaaaaacaaacctaagaccaagtatggcagccggtgggagagggaagaaaagtgttccttccttataacctgtaggcaagttataaaaacaagggttgttttgtcccctgtcggagtgaaacctcagagaccaaagttcaacgctttcaggttacgggaatggaaatggtgaattccctgtatcagctgcctccagcccaggcaagcctgactcacaggttggtcacctgtttggaatgggctgtgggagagcacacccatgaggttgctcagggagcaatgggccacagcagttttccctgtgaattgtgttcaggtaagaccctgcagtcagaccagctcactcctcctttgctatttctttatatatagtctctttccattccgaaaatgtactctgagccctggcctttaacagcttcatttgttttccttcatctcccagtttacaactgtgaaggaaacattcattgatcaagttctttcagcttggaatggagtctctgactcccaaaaatctctcccaggaccaactgcaagggggtagtggatctaggattaaggctggagcctgaagcactgctgagaatggggagtctgacacgtaatgacctccatatatacaagctggtcagtgctctctcagagcctgcatgtggctttgtccagagaatatgaatcccagtttgagcagcaatatggatcagagttggtagagaggaagattgaggctctcacactaggatgtcttcagcatccttcttgtatccttgtgtgcaaaatgggagcctgggaaaggaactagaagaactgaaccccatccctctgatacatacacattgcttttttccttctttatagcatagcttggctgtccaaatgttctggcagagaccaagctccaggctcagtggggggttctaattttccatggctcattcacttctgagaactttggctcagttgcataatggggggctacttcctgccagttgtggccctgttgtgtgataccttctgacacatacgtttttttgaaaaaagattgtctgctgggaactggactgaaaccaacatataaccgtttgtttcatactggttaggaagccaccaggaaggcctacccaaagtggttttaaatacatacacacacagtcctctcctcttagagccaagaacaggccattagtgatgtgttagaaaatccaggctgaccttctcagtcatgagggaagctccctgggcccaccagcaggcttttgccaagaatgggctccatcttgagcccacagctcttccctagcttcccagcagaagcaaggggagagtggagaagtcaaacacttcttgagcattgcttactatatgtcaagttctaccctggaccctcaatagaaagtatttcactgatcctcacaatagatctgtggggtaagtgtcactattgttattttgaggaaactgaggctcagaaaagttacatgtattcccaaagtcacatagtaaactgagtgtgtaaacttgagtggtagagtcagaatttaaacactgatttttatctgttgcaaatgttgggcttttcccaccaccagcagaaatcttgctggccctcagcaaatattcctttacagcagtcatttcaaaacttttctgaccctatactcccatcagtaaacatttttaagaaccaccttcaatacagacatatttatttatttataaactccacgcactagctaatatctgttagcattgcctg

SEQ ID NO: 57281 - DNA, 3066 bp, Homo sapiens
ctaggggaggggtgcgtcggcggcggcagcccagttttctggatttctttatttctgagtccaggtctttcagaagcctctctcctaaatgctcaaataccagagtaaatgaaaacactctgcggcacaatgatcccttaaggtttgttttccaagatggaaaagaaaggcatttcagccttttcacggataaaaataacttgctgttgattttgaaatccctttcatttgtctcccacagaccagccccatacaatggtactttgtgcaagagctctctgcatgggccggccgggcccccttccctccgcctgccaacgggaggagacgcgaggcgctgggagctccagagtgggcgaggacttcgggcagacccggcgttgctgttggacatcattcagaagtccccgctcagcgggggcagcccgaagagcaaaacaaacagagcgaggagtagtggaaaatgctgagtcctggagctggccggaacggccttcgcctttccacgcccaaagccagccgctctgcccacctgcagctgcaatagcaagcagggccgcagcaggcagggaggccttggcaccagagcccgtccagggctgggaaggcggggaacagacactcctctctcttcagacaggccctccagagtcctcaccctgaaggctgaggtctttttcttgttccaggagtccagtgaaaaaatagttctcaaaaacggagaaaaagactttcttgaactgcagtttcagatttactaatagagtccatttacatagcacttactaaatgtcaagcaccaacacagatgaattggcaatcaccatgtcagtcctgcaaggttggtacttttatccccatttcacagatgaaaaaagccaggcacagagaagtcaaataacttaacccaagttcacaatgctcaacaatggcagggccaggatttaccacctggtttaaaatttaaaacgtaggatttaaaacctactttacagtcttaaaggtgactgccttttctcttcagcttattagatttcctctctaggaatacaagatgtgcaacacaaagagaggaaactcaagatggagagtaaagggaatgaatgagagacaggagaatcaccaaggactagaataatacaaaagatttatttaaaaagcaggtggccatcggcccaggagaaggagtgtgagaccaaggtacagaagtggcaagaaatgctgagctggggctggaaggtatgacagtactagtcagacaggcacctgttctgtccaaaacaggattccagaagtaatgtgaagaggtcacttggcaaagggggctcacacagctctagggggaaactgaggatcagcagctggagcagagaaatagagaaatgaacaccttctttctttccaattacagccgcagtggaggcagatgcccagggctcctaggagagacagatcgcgattagaagagagggcctatggctgtcatgcagggaggtctgtccattcctctaagccaagagctcttgtccccagaggaaagaggagaaggaagaaaggaacaaacaaatgaacagaggaaggaatgaagagagagagagagaaggagggaggaagggctggaaggaagaaaggaaggggctgttttttttcttgtgtttggaagaacaagctgccaaccctcattaaatgcataggattggctttagagttactacacctaaattctaattctgtctctgtcaccggttagtaatgtgatctcatggaaatcactgaaactcccttaacctgaaaccccatgtctatacaatgaggacactggaattcacctctaaggttctctctggatctaaaatctacactctgatgatactgagaccaaggacagggactttgattgttgccttttcatgccacccaaggtctacatcctagcacagtgcccaccacccatccacaccgaccagacacccagggctagtgattctgtgttctcaacacctctctgatgtgccatagctgcttctcttgcatgcaactcttctgagcatgaaacagttttccaactggtctccctgcctccacccttgtctggctctgattcatgttctgctccacagtcagaatgattttcctaagcacaggtcggatcatgtgacttagcctgctggaagagcctcaggactccacgtcactcttcacacagcccacagggccctggatcatctccacacattcttgctgtcctctcctcacacccacactcttttgcactctgtgctctagatccataaaactacttccagtttctccatcagtgtacacactttctcacctctcagcctctggacatgcattccccaccactggaacctctttccctccccacttaactaactgctactcacctgcaggccacacattccttcaggttaggttcctcctatgtgtcaaatcatattgttacttcactggatggtgttcccctttatttgtctataaattgtaatttactggaagtagacggaaggaaaaaaaagtgtgtttaccttcttccttatggtttcccttgtactgaacccaatgccaaccacacggcaggtgctcaagggatgtttgttatctgaataaatttgcttggtggcgtcactatgtagggcaccttctagatataacatcctatagttctgtaaagtgagatgtcagtgactctgcattttcagtttctaaaaactgagagagataaggccttccaccacccagtgatccaactttcttagtctcctgttcccagcctaagcaccattatttagcagattcttgtgtccatcagaactaatagaaatgattatcatgatcaatactgaatcaactgaaatcggctttaaatcaggatgcattccctagaaatcggatgaaatttagtacagtgtgggactagagacagggctaagggtatctgggaagagagagatctgcattctagtaccagttctgtcattaatgaggtgacattgggcaagtcctctggcctctctaaaccttgaattcatgaatgcctaattg

SEQ ID NO: 57282 - DNA, 3616 bp, Homo sapiens
caacacagttccaaaaccatctggaagctcccagtcccatctcttcttctaaagttaggaatatccttgtttcacagaggcaatcccagaccaaacccagtactcatcattagcttttcaggtttgcaaagacagttgccacttctttgagtatacctgtacatgtgctatttctaggtacatttgggggacagcctttgacaaggtacaaggagagtcacagcttaaattacaggtttgcctataaaaaggttaaaaagagcctgttactgcccagggccagtggctcaggctgaccatgtggagtggagagagagaaggtagtgactctatcttgaccctcactaattcccacaagaggctgctgaaaacatccttgtgccgctaaattgtatcacatggaatgaccagggctgacctgacatcaaagctctgtagaaatgctgtcgtccagagagcacgagagtctgagtggcagggcagagagattagagataggactgtaaactcaaacgggctttggggattttgcagcctgccacaagcctggcctttgttgattccctaggttgctgtgggcagatgatcatcgccatcattactttggatgtcaggacattgagatacaccaggcaatctgatgcaactggctttcccagggcagaagcatttgccaggaaagtggaaacagggaaagggactggaacattgagtaaatcaggaaatagcactgaccaagggacagagaggccagagccactttaccccctcatttggggttctaaattcttatcaaattttttttcctcaagttcaaaccttgtggcattttcaccaattgatcaacaactgcctttatcagactccttgaatctctgcctcactgcaaaaagtgccaggggaatgcttttctcttctattatttaggtgaggattctcacggcatggagggatctcacagagtagtgagatgccagcagcatgccgagccaatatgcccataaatgcaagggccaggtccttaatccagccatgaggatggtcaaggatccctgtatacaagccagagaagggactttgtacaactagaactgagtcgcaaaccatcttccagagcagcccctggggaaaagcagaggccaaacagcagtatggaagtgaaaaggctcacgtactgaaagaagactttgtccttgtcccatatttgatgtgtgaaacgtaccccttagtaaccaggcctgtggctcccagagctggtgagccatcagccagcatcatcaaaagagacttttcagcgttctatgccagcaatacggcatcatggaaagaacagggcttagaagtcagatggttctctgatgaacctgatgacctcttgtactctcttccaccgtaggctctagaataaaatgagcttcatgccaagtaaacatggaatgtggatagatatctacacaggggtcacaaaattaaattctacagggacaaggcaggaatgtcaatgtgtgggcctgacctatgagagttaaaataggggactgatatgcacctaaaggaggcagcttcagttcagtgcccatggtggttgctatgaaggaatatgctagaatccaaagacatcccattaacctactacggtacattcttcttttgggttgcgtggggcaaggggttcctacactgtgaaggcaaaagtgcacatctctatggcatggaaccagcctgagtgtgacctctagttcacattgtttgcctcattgtacccaaagcacaaatcacaatccttttcctttttaggtttaaatagttacatttcattcatacacctctgccgatccatttgtttttcttttctttttgtcttgggtgctgcagcttgctccaaagttatagcagtcgagtcagagtagacttggttaattttcttatcccatcaccttctgaaagctgttcaaatctacagagtgtgaccatcacctcctctttcccttgtgtctccttctatcctcaccttacccgatcctcccaaattctgcaactgcttttgaagatactgtctcctctacagacccccatcactgcagcttcaactgtggtctcagcagtattgttaagaggaatcaccaaagcccggttgcctgagggctcctcatctgaactctggctcctagtgggagaagcgtaagcctaagctgaattattcaagtacgtcttgtatctttgaccctggtgagcactgagtcgggtacttggagggataactgcaacttggcactgaagaaaagctctctggttgaatccttgactgaagcagaaacctattctctgtgtgctgtttattcgggagaagagttcaaatgtggcctcaggttggctcaggagttgtggcttttcccaggtttgcagctgaaaactaaaaacaaaatataaggacctgaagccatttttcccaaagtctcccagtgagtggtggtggcttgaccaggattgaggggctgaagccttcttcgcggccagtcctgctccctgaccaccagaccacacagtccgtgcttaacatgtactcagcaaacctcaagctccaggcctgaagaaacagattttccaaaaacagagctctctttgtgaacaattcagcaaaaattctctttccagctgtgagctgggattcatgttgcaaatgttggtgttaattaaaaacatccaccttctacagtttcagcaacaaggaaaaagcaccatgcatgaggtgttcctaagcactcccctccaaagcacttataaacatgattttatttatggcatgtgttgctaggggttctgacagatattattattcccaatcttcagccccagtgaaagagttggggccaaggagatggatgtgaagggcccaaattgccatagagcaaaattagtatcagtggtggacacaagaatactgttcatttcccacaggatccactaaagatgttcaactttctgtattcatatcaggaacggtacgtagctgaaatcaaatgtttatctgttgagtcattaaacgtttccttcacatggctcttagtccttcggacatgaagaagtgaggtctgacaaggccagggacattccacaaaggatgacacaatatattcaaagattgggatgttcgatgacttccctatattcctgttatatttctcaccttattaggaaatctttatctccaatggtcctgagctagtgagatcagaaagactaaactgcatccctctgtgcttgcctctggttggttgatttgtcctgctttaatacatgatccagacaagaaagaatcaagccaaagccacagcattatgaatgaaattctttgtttttaatttcacacagtttaaaatacaatatgaaatcaggctacagtatataaaaaactctccagcaaaatgatgtgccagcatcagctactaaaataaacaaacaaaaaactccgccataagaatttttttgcatttttttttaaaaaaacatcgacacttacatcgctacatctctaagctacctcagttctgatttttaaaaagcacctgcttttcctttttttcatcttgcttctaaattttcagcttttaaaaaa

SEQ ID NO: 57283 - DNA, 2106 bp, Homo sapiens
tcctttgttcaaaaggaatgaaagaaaaaaaaattaaattcaggccctagaagcccaagtcctaggtgcagagctctctaactcttttttttttctgtttacacccaaggaaagagggaggatagataggaaaagcagatacctaaagaaataatgggaatatgaatgggaagaaatctctcccgttggcttcataataggacagtcaacataacagagatgtcagttcctggctccctcccccgattcctgtagagaaaccccacaggcgcactccagcctaactggtgcacacagggctcacccttcagaaagcccacatttttgtaccaagtgagaggagttcatgatggccgctgaagcgtcccctctagcacctttttgctgactcctaaactgcctttttgttgtggggagcaagagaactaggaaagacatggaaatgttcttccagccagaaacactgggccagggtgggcgcagttcctggctgggcccgtggatggtctaatacaggagcctgtctccacagcaatgcatcaccctcacttcaggtctgggaggggacttcagggccacttggaaacccaaagcttagaggcagctctggggttggaaggcacactggctacacagatccaccagcgacacccacatccaggcccatcagaagttctcacacccaagattggtgcagacaatgaatgagtccagcactcccagttacgactcttctagagggtgtttctgtgtgcttagcggaggtctgcccaaatccacagggctccaggaccccatcccttgcccttgctccaacatatcctaaacttgtaaagcctcttcctccattccccctgcaactcccccttatccctgtgcccagcctcttccacctacccaaatggactgtggtctcagtgacctttgtcccctagagcagaaaacggtactaataatagcgccagtcatgggaaggggagctcacatgttcaatgtgactcataatggtgtccctgtctgggatctccaaggcagtcaacagcacccttcacgatgctgcccgggagtgtcacacatcaggaatccagtggcatcactgggaaagtatgcttctcaagtcgaagctctgagccacaacaacagaggggtccctgttagaaggaggtctctttccagagccatgcgggcgggagagcaccacacacacactccacacacccatctcccatggcacggagcctccacaccccctgctgtctgctccctctccaccctccctctcaggcggctgcaggggaatttccttctactgctttgttcttctcagcctctggagaagaggacagttcttactacacactgacaggtctgatttgaagaacgtgctacaagctctgaagaagaaataccaggtaggaacttggagagctcccaagcctacaaagcaaatcacaccaaggatgttcaccccctaaggggacccccaaggctcctcaaatctaaggcaacaatctcactttttaaaaaaagtaaagcttcaagtaaattactgctcatttgggtcatatttccttgtctgggagctgcaaggcccactatctgtctcaatgaggagctggttattaaaaatcccctgctattctggtcccttgccctgaggctgagaactgagcagcataaatacatatatagcaatgggctaggacaaggtgttagtaacatgctcttgatggaaatcccttccatttcccgatttgtcagtatcattcttctcattttccagatctgggagttgcctgcctgtgacaaggacatcctcacagcaagtgaacagggtcaggttgaacttcactttttccttctactccttcctcatttccatttcaaccacaagttctcactcttgtcacctgtgctctgctgagaggagaacacaggagttttcttccaaacagaaggaggtcaacgctgggcaggcaccttcccaggcagtctcctcatatttccatagtacatggcttacaccaagaccaccccattggtttggtctctgtccatttctcccatcactagaatatatgctgtaaggacaaggactttgttttt

SEQ ID NO: 57284 - DNA, 477 bp, Homo sapiens
ccttgagaggcctccataagaaactccaccgcctcagctctgaatgtcaaacacctccacagacctgtgccctgtgagcatctccaacaaagcaagtcccatccttgtttcagagtttaaactttcacattcaatcactctaggagaactttcactctcattatctctcagggagaggtgagtcatacaaaagacaataaagtttggggagttacagtcaacaacatgcattgaactcagaagcccatcacggactactgagagtgtcgggacacatggtcttgagtcctgccacatggaaaagctgtgctggtctcaacaagccatgtttacagctcaggtccctgcagctgtcacactacctgttctactcagttctcctgcttcagggaacataattgactggctctaccatgtccacaccagcacccctcatcctggggactgctccagccagggactgagcacagtgagggc

SEQ ID NO: 57285 - DNA, 1416 bp, Homo sapiens
aaagactcacctagttctttcctgtattcctttatgtcttatttttcaacagaaagtgaaaagaaggaataaagataacatttttgagcacagagaaatctagtttgggtctctcttgagcactgcagaatggaatatattcttaaccaaaggaaggtataatgcggggtaaaagtgctaatcctgagttttgctcccctcccccagcgtctgtgccaagggttagagctgatgaccacagggaaaggatgggcctgggttagagagggcaatgggcttctaggcttacagtcagctgaagggcactgctgactgctggtaactgcaatttattttaagaaaaaattcaaaaaaataagcacaaaaacacccaagtttgccgcctgctgctgtttctatactcagccaggactgtggtacatgagtcacttggtccaaaaaggttggaagaggctgttaggggaggccatgtcattataaggttgcaacatagcgtcctgatataaccccagttcctgctccagatgtaaaaggtatgatgcactactgcaattccaattcagttagtgggcagagaaatctgtcttattaatacggtctcagacgctaagctttcccgggatgtgatgaggtattatggggcatgcatcaaggcagtgtgtattaagattgcagaaaacaaaaacaaaaacaaaaacaaaaactattcttgggttggctgtgggcactgcttgttcaaccagggcatgggtttgagataaggacctggattagaatgttgcaatccaagaagcttcagtggtacaatcttgctgaagattaatatctgaacccccaatatgtagaagaaaaagaaattacactcatctaagagtacctgctgtatgctgagcagtgtactaggcacattcccacatacgtcctacagtaggacacccacagataaaggcattgacgtcccaccattgggtgagccccctacctactctcacagcaaccccacataacctccacctctctctgtttccacatatttacctttctgcaggatctctagatgttcccataagatgtccccaacaaagtctggggccagctcgagaaagcagtctttacccagggcgcagagggctgctccattcatacagaacttctggaagtctacacctttcaggctgaattcattcacagcccacatcacccagtcccgaacatgggtttctgtccactgccgggggtctgaggaaagagatcagatgaagatccagcaggtcgggcttttaactcctatccaagcctcagagaggacactgaaggagctgaatttagctgagaatgctatctttattcatcgaatgaggaagcatcagcctagcctgcacatcattgagtgccttccataaccctcccctccat

SEQ ID NO: 57286 - DNA, 2580 bp, Homo sapiens
tgtgccaccatgcccagctagttttttttatttttaggagagacagggtttcaccatgttggccaggctggtctcgagctcctgacctcaagtgatccacctgcctcggcctcccaaagtgctgggatcataggcatgagccactgtgccagcatgagcaggcaacatttaaggggctttccacattgtgctaggtctaaaatgtcctgcatccctgacaaacaaatatgtttactcttcctgaacacctctactagtttatacacagtccctgcttatctttcacatttaccgagaatattaatgttactacatactttcagttacctatgaaaatgaaataacaatattcattcattcaacaaatgattatctagcacttgctttgtgcaaggaattaaagaaacaacagtgagcaacacagaaatagtctccacaggagctagctatctgattcttgcagtagattcagccactaaaaatctatctacacagttaaatgttcaaatgcaatgtcaataagggcttcaaaggagaagtacatgatgcaacgttaatgtgcaacaggaattcctggaagtctgaaggaaacaggaaaggcctcccttagaagatgagagatgtttgacctgaattgtgaaggatgcatgagaatttaggaagaaaagaatactccagatcagtggttctcaaagtgtagtcctcagagcagggacatcagcatcaactacaaaaagatcattttgttttaagatcaccttatccgttctgtaaagagtgatttaggggtgagtatgaatggatgagcaagacattttagaaagttattgcatcagtcctggtgagagaggatggtggctttgactacaaaagtggcaaggcagataacataagtgaacatgacttcaagtcaacttgaagtgcatacaggacgaaaaatctataaagcttggttagtgtcagtagtgaagaagagtgaggcattacagcctgcagatttgcaaatgtatcatcatttgccacacccacatgcaccttaatctctgctatgtccatccagatcctcctgtatttgcagaccatgttcacgatgttggtacataaatacagctgaacgtaaacatcttctgaattaacctcaggcacagtttcccacaaaaagtgaataagcaaagaaatgagctgagaatccctactagctttcctgttaccttttgacagtgatacactttaccaaagtgatttctagaaacctgaatcttcagtgtatcccatgaaactgacttataaaatgactaagttccaggcaaggctactacagaaattcttcaactggccatttctaaactttgcttcgttaaaaaatattccccggacacaaacaatgtgttatgggctgaatgaaattaagcataggataaacctctgaagaaaggagcaaatatattgcctctgaatgtcgaactaagtggagattacactgcataaaagaaggacaggtggcactttctctcttgtttgcttttagtgatgctgtcaggaaactgctagagtccaggctgtgccctggaagaacagaagggctccctagctgctcttccaggccttgccaatgacgaggaatctgaagttccagggagtggtaagtttgggttgccctgggacatgcccaaaaaaatctagtggaaaaaatcaacatgtctccaggaaggttaacaaaatgatggaaaatcccagattgttagggggaagtaattgggggaggggatagaatgttgattacataacatccagcccttcaaacaatggagtaatcatcaaatgagtcactaagaaacacatggctgctccccatccatccccactctacacctccaagaacagctaagcggcaggtccagaaatgtcttcccttagagtagaaatcagttttactttagagaaaagggctctctagttaaccagagagtattgcttctgagagaagaaacaactgtagcagccccagctcccagcacatggctaaacacacaagtcaatcaacaaatgttgagtgaattaaatttttccaaatttgaagcaactttcctcccttcacccccatccaacacaaattcattaacttgaactgtgtgggttttgttgtgtgtgtttgttccctccattagatttatgacttgatgaaaaggaccttactgatggcggaaattggccaggacaacacatgtggaaaacacaggccaggccaaatggacaagcagtggttctgctgtagcgggaactgaagaatgagactgactaggaggcccccagaatcttctcaacatgaaagctgggacagtgggatgccagtgtgaggtgacagccaaggacgacagcagaaagcctgaaaaagaagttccttgagtctgcctcccataactacacaagccctggcagtgtggtctggacaggactgctgagctgacaattctccacgtaggtttctgcttcctgtcagggggcaggcacttctgggttctcacttgttctctcccaggaaagcagctagaattacttttgcctttccacctcaatgcc

SEQ ID NO: 57287 - DNA, 2765 bp, Homo sapiens
gcattgttgataacttgttgatcaaaatccataggttctgatttcacatacgccattagtgtagacacactggataagtcacttactcaattcactttgaaaagaggtctgttcataggtggtgtctatatccctcatagagttttacattttttatttggcaattttcaaacatacataaaagtagagagaaactctactcaaaatttatcaatactacccgtttttatttcatcttccacacacatgcacacccatacacacacgcagaagaattatacacctaatcccagaaaacaagtcatttcacccacaaatatttcattgtcacaaggatattttttagataaagggagatcatagagttaaagttcaataagaggcaaataaactcaaggaaaaagaaaaaaagccttcaagttactttctctcatgcttaaatctaggtctatatttcatgcattggcccacttgaaccacagaacttctttcaaagcaacactgtcatgatctggaaagtgccaatgttggatcacagagatgatttcaaatcaagatggtaagccagttccagggacttccatttcctacaagcagaaggctgcagtgatatttcctcttaatggtcaacatcctcatgaacttacaactgtaactaaagtgtacaaaacaaataaaaaggctcggagttctggccagcacagaagggcagtgtgaaaggtaatatcattgccaaactgccgacaacaagtcccagtttaggagataaggtgcctttaccccttcagaccaacacaaatagagaaatggctgcagccacactgacggctctgcttctgaagttgatgacccctggagggtggtcactggtctacaagaggattctcctgataaaaaagctaatgatctcagaagaatgtgcaaaggaatctcaaagaaagacagtctctattgccctctctcattcatataaaggcagggttgaagtagagtagaagggagtggtaagtgattcctgtgataggcactagaaaccgggcaggcaggacttccagcttagggaggtactataatccacaaagcttctggctaaggttaatgcaaagaagggagggaagtgtccctcctcagcccctcggctgtattttcataaacccaatgatgtgacaacacaatgggggacacgcaggactcttggctccagcaagagtgaagcaataaatgactcagtgcccatgctgaggccacccatcccaaccaaaccgtctattattgtcccaaacaacaggacactatgagacctggaagagactcatatgagttaggaaacatacaactgggtttctgaacttcttttaatacctaaccctttcgaagtcaccagccagtaaaaaccactgcaaagaagggagaagaagctgcagagaaaatccccaattcaccctccagtgacctgactgaccaaaaatgcaagccagtctcaagttacagtatctcggtttgctgccaatgcacacagtcactagggaaagcacgctctttgggtacaatgtgccaactcagaggagatgcctctccccagagggaagctgccctaagacaaaagagatggtctcctgcaaggcagctccaaattgcatggagaagctggtttcaggtcctgcagccaggcctgagaaagaagcctgtagagagggctcagcacactgaacatctgtaggaagtgacctcagacttctccctcttcccttcatccacctcctgccccatcccccaaaaggagttttaacacattattaccactgaagtcctgaggatttggtgactcaccaggctcacacatggttccaatgagcccttgaccattacatggtagggaagcaggaaaaacaaatgaaagcagttgtaattcggcagcgccggagttcagacctgccagacaaaagggattgcaggcatgttcccaaattcgttcaggcacctgacatgcacaagctatttttaatcactggatttatttctttcctacctcctccaccatcctccacctcagcaaatgtttcgaagtcagagcaaaacccaaatcaattccaggtgttcagggaaacccagagaggctcttccgttccaggatcccagccagaaagcagaactgcccccttggtcctgtagctaaattttctcgctcattccttagactagttcaaatctcccaccctaaacattgggcaaatggcctaaaataggaaatacatgaatgaatgtgtcctgctggaaaggcttttaaatatgtgtttttctctagcagcctggcaagtgaaggtacataaaccaggtctcaaagcccctcagatgaagctcgctttcattctctaggatgctctacccaccatgctgtgaggattaagtggactatgtgtgacaatgccaaagcttaagacatagtaggtgctcaacaaatcattggctacttgattatactgaaaagcatcttataaaatataaagacttaaaaaaaaagattttatttcccaatgcttacagaaacatcaagaaggaatctggcaatttctccaggtacaaataagcgactgagaaaataagaaaaacaaacgcaaaaatcagattctgagatataaatggaaattgacatcccctgaaactggcatttttttctaacagaatagactaatttcttacctattctgcatcctccaatctgctaacgggaaatactttttgcagcaataagcatctaaaatatg

SEQ ID NO: 57288 - DNA, 3494 bp, Homo sapiens
attagacgttgatgatgatggcacaactctgtgaatgtactggaatgcactgacatgtacactttaagatggtaaattttatgttatatcaattatatctcaatttaaaaaaaagtaaatgttagagagagaaagagctactggcccactgctatgagcccaacaatgaataccttggtgatagatccctcaggcagagtttccctctagtgggagaagcaaacaccgcctaagtacagaagcaatagctatatgctcacaacagacgatgagtgctgggatcacggctgaagcggaaggttttgcaatgcagagtgagtgaactagcggggtccagaagcactaggggagggggtaggaaggagtgcacgtaagatgtcctgggtgtagggcgtgagggacagaaggcgggcaaggtgtccaggatggcgcccctggcagttggtggcattactgaaagggaagacgagaggatgagatctcccacagccacctccgccacctggaaatccttgtgagatggaagccccgcgatgctcactgggagaccgaccgtgggagaggctgggcacgggccatttccagaggcagacacctggtaactgcaatttctgggaccacttatgtgaggactaaagaggaagggccacaggttctaggagacgaacaaaatccctcaagttccctaccctaaagatgctcccagaaaaggctgccgagtgctcttttaaagtgatatgtgcatctttatacttacatacaaaagattctcaaggggaagaagtctccatcagacagggctctttcgccctccagtccctggtgggggagacagaggaaaagctgatagggcggtggggtgtgggggcggtgaaggctcactgcacaggaactgaggaaggtgcagtcacaacactgtgatgccagggatctttttgggaaattcttttccaaaagggatcatgaattttggcccctggaatgccccagagcacctctgattggttccctggccctgactcagatcgagccgggctccaccctccatgagtaaataaaggcagggacggagggagggagagggaaggagagggagcggagtgggcagacaggaaccagaaggccagcgctggttcagggaacacaccagatgagatttcagcgacgggtggtgtggcagaattcaagacataattctctgagccttacacaccactccagttgggattcagccctgccttggcagccggctcagtgctgctttataatatactgaattagtcactggattagcaagcacatttacacacagtggcgcacagctgtttaaagacgcaggatccccttttctaggtgccagattctggctataaatcaaccattgcaatcagcaaccagcaaaccccagaggtgcatggttcctgcagacatcttccttaggggaagcctgctagaactgcgatggccattttctggggacaggagggacatctgtggcaaagaaggaaaggtcggtgggctttttctgtcttgaatcttattatcttcagggggctgccaggtcttcactgacctggaccttcccggcagcagcctagctcaggaaatgacgcctgggagaacaggagttctaatcctgcctggctgtattatcaagtacagagtttttctcctaaaccttgaatggctgggtcacctcccagaaaagaaaagactccagggcaaagaggacagtacttcagcaattaaaataattttaaatcctgataacatcaattccaaaaaactgccttgttgaagtggcaagggcaatgtctaaaaataatgctttagagttggaatcataactcaagccctaactcacgttcggtaagaatgcgtgagaggcatttgaaaataattgaactggccacagggacggctctggcccacttggttatggaggtgtcaagtggaaaattttctgtaaccaggttaatagtaaccacagttttaacaaccgctgaagtaataacagcgacagcagcaatgaacttttgtacagaatttagtgacctacaagataatggtttattgagctcctgtggcaatgaaaaagtataaaagttttcacaggaattatctctaatcctaacagccctgaaagctctttattattacctcctttgtaaggatcagaaaagaaaggtttacagaagttaaataatttgtctaaggaaaaattagtaaagatcaagcctgaattcaaacccagggctgtcttacctcaaaactctgctctttcaagacatggtgctgcctccagtgaggaatatcattataaccaacataatgaaagggacgctgtgtgattcagggactcaattacttactatcaagcaccctaaatgtaaatccctctcctttgtcttagagggcttaggtacccaaagagaaatagggtttatctaaactctgtatcgtaagatcatggtaaaaagcctgtggcataaataaatccacctgacaaatataagaaccaagaaccaattactaaataaggcgaatttcatttaggctcctctagaacaggaatttagagaagattcgtaaagagatttgtgactagctcgtgtaggcagagcctagtgtgtattctgcaccagcttttggaaattcaagtattacttccttagaacttgtttgcccataaaaacactgaaaatattttcttacgaaccaaggcagtcgggggcaactgaagacttgcatcatctttgctcatcactctctgcctgcaccatgccactaggcagatattttgatcaaagccaggagaaaccagcggcaagtcacccagggcccaatctcattaaaaaaactaaatcgctgttcggttcacccagcaccccagatcctttggagactttgcagtcagcctgaaatttcaaagttctttcatcagatcatccattacagaagaggatgggtggaaggcatggaaaagccacaaagctccctgcaagagagaccttcagaaatccagaaatagattctttatttttaaaaatctccaattgaatcagaggttaacattatgtccaccgtggagatgctgattcattctgtgtgtgtgtttacttttctacaaatgtccctcttgcatcaagtagcttcaagccctaggcttgtgcctctgaacatcccctccctggagaactctcaagctggggtggagctctcacttcattcctcaattgtctaatctggagagtgggggccaaagcaccaattctgtacacaagtttagtaaatttggctagccacctttcatgtgtctactttggatttgaaaatgcaccatggaaatcaggtgaaaattttttttttttttttttttttttttactttcccactactaacacatcccaatggtagatatgtataagtgaaatgagtgcgttcttcctgcccctataatgacaagcctgacagagaacacatcacacagaaga

SEQ ID NO: 57289 - DNA, 3760 bp, Homo sapiens
agtaagcaataaattatggcagaggcaaagaagtgttaaccacagggggcagcaactaaacttattgataatcagatacaacagaggagcctgttcttgaaattaattattttccagggtgcactgccttctccctagatctttctatatactttcacctccaaaatcactcatctctaaggatagctggcagtgccttatcctaaaagaaagcatctttccctctcaaactacatttgtttcagaaattctgtaaggccagactctcttaagttgcttagcaccaatatttgtgtcaaagacaaaaaaaaaaaaaattacttcctatccttctcttcttcaaatgcatataaatgaaagagttggacaacaccatgtaccaaagacacaaagtcacatttgggtgtttgatgctttccttccaacggacctttggtaccagaagaaaaatttatggcagattagaaacatgggtaaagtaagtaacctacatgaatagggtcggacgtttctcaaagttaagaggataatttcaattctcctccgatctccttaccctcaacccagaaaagaggggcaaggcatgtgacagggacgcttggggaggcaagaccttatttgaaaatctgcctgaaggccaacccgttagactgcccggggccctccacccagcctcagttctatgggggacgtggagtcaggcgatgatgtcctctgaggcagcgtccatctccccttaacattaaggaataaggccagagggttctcgctcatttgggaaaataaaaaaagcaggaatggggcgctggaaattctataagcttttccccaccactcacaaaaacacagctgtgaaaataaataccaccccccaaaccaagggtctagggccaccaacagtcctcctcctcctcctcctcctccttctcctcctcgtcctccagatccagctgccaacagcatcccccgctcctgaagaaatgcaccgcccagaagggaacggcgaaagggggaagaagtccaggggacccccggcctctggccgagagcttgggtgggggcctcggccgtcgccactcacccggggaggggaaaagctccagatcgactttttccgtcttgatgatggtgagagtcggcttgagatcgacggccgccttcatggtgccaggagtgggggacgtacgggatggtagcaagtttgcagttactgttgtttttctttttaatgaggattagtaacagggggaaggggacgggggaaatccgactttcttcccaaaaatctcaaattcccgctgcctttctttcccccgcgcccggacggtgcgcgcccggcactccaggggaagttggcactttgcggcgaagtgagcgcgctcgggtcccagcctcgcccgcgccgcgcccgctcctcctgcccggccctcgcccgctccctcctctccgccggcggctgcctcgttcgctctcgatctcccggccgctctccctccctctcgccctcccgcgctctcccctcctctttagggcgtttctcgcggcgccgcgtctcggccgctgggtccgcgcgccctgggccgggcgatgtccgcttgggggagcgaggggcggggcgtcggggcagggcggggagccgggggcggggccgagcaccgcggccaatctccgcccgcggcccaaagcgaaaggaagggctggcgagcgcggggccgggccgcgaccgcggaggagcagtgcgtggagccccgggcctcggagcccaggcaggggcgggaagggccgggagcgggtgtgcaggctgggtgcacaggccgcctccaccgtttcgggaaagtccgtctgattctccacgcattcttgagggcttggtcacccgctctcgccccctcccagtagcagcatagttttccaagtgcgtgtacatcattcattcacaaagactgacacacaggacgtgaggcatgtggatgaaggcgagcgtgcaggcaggcgcaggggattcgtgagcccgtgtcctcaaagggctttaggagtattggactccagccggatcttgagtcagggcgtgtgtttctgaaggaggcttcagtttttcagagcccacccatgtaatgctcctgcgttggcaggggagtccagaacgggaccccaaactagaacccagccatgagcttccgtaagcttccaatttacctccagcagtggttgggttgaaggggaagttatgatttatttctaattattctgttcctctaattatgtcaccattggccaaagctttgtctttcctttcacagactctcctcttttagataaaactaacaaccctcccacgaccgccaccaaaaaagtgatgcagaggctctgtggttttgaatttctggagtacatcattggcagccatgacagaatcacaatgcacagtttctgttccatttgggaacccccaacactagagataaaacaaaatgaacccgaataattcatggtttgccactaatacattggttgtaatagagatagtttgtcctaattaacaaatcaaccagtacatgtatatatctaaatacatagctagaaccaggcactgagctccatctttgattaacagaaagattaaacataaatcttcctgagcaatctcagagaaagctatttttaatgtttcctgatttctaagcacatttgaactcccagcatttgactgtaactgtaacctctgcctctggtaagttttgacacacaggcttaccttcatctaatcccagttttgtgcccttgaagccttagtaatttgcagatttcccacagcaaatcggggaggaagccaggaacagaaaaatctgtggctcctggtctaaactccagattaaatccctccttagtgaccagaggaaaatatttgtatgtgatagtcctaatttttgaaagaacaaagactgttgcaatccagctgtgtttccacaaggtatgagaaaacaatgctggcctccagatgacaagaacagacccttctggtcctgggaaaagcctagagaaacagctgatgaatgaattgtacatttacacgtccaaatgaaccacaaaaaaaaaaaggttcttgaatcaattctgccttactcactatgaattcatcaggagaagaagtgaacaaatctagagttgctttggggaattttgttttgttgatgttgtattgagaaaatgttggcattttttaatccaagtgtgagtacttctctattttcaaatgcagattcctcagagcaactcctttctctcttccccagtttgctcctcaactttcttccccagactagcctaaacactgctgctaacatccacccaaattagatactaaaaaagcccaccatgattaaactgtaaacactttccactctagcaatgaggaaaattattctttctaattcttccatagtgacaactcagatagtcaatcatccgtttcctaatccagtcctgaagcacagaaacaaaatgagtgaatgtccaaatcaaggaatagggttgcgtaaagcagcagtttggagagatagccaggcgccaccacaggctgccaggaaagttacctccagatgatattaattatgaatatttatgccatcagaagttatgcatcgaaccctggatttggatgaagagcactaataaggtcatgttaaaatattttttacatatttaagatataataatctgatcaggtctgccagggtcatgtttcattaatctaatcaat

SEQ ID NO: 57290 - DNA, 806 bp, Homo sapiens
tgttattgcatcttacattttcctcggctgtctcttttcctgccagccaacagttcttgttgtttttgttattttgttttttgagacagggtctcgctctatcacccaggctggagtgtggtggcatgaacggtttaacttgtgctataaacctaaacctctatctatctctaattgtgccatacacatacattttagctacagaattctggacctagatagcactccctgcaagcttggacttgccacctggaattcagaaaaagtattctgctccctggtgttaactacctatgctgaccagttgcccaaaagaaccttagggaaaggtttctcttattgccccttgggccaccagtcaaaccatcggtgctcttaggactgccctctaaaaacacagaatttgccatttacatcagctatgtaatctgcattctggcactaccattgcctggcacccagccattaagcctggcagcagagaacagtcatagtcttctcgctagttgcccgctccattttggcaagatgaatgctgtatcattgggaaagcagacttaattggttttctgggggtgtttagttaagtcaccccacctcagctccaagttgatggaagtgtcactttgccctttccaacaaccagagcaaataaatgatggggacatactccaaaatgtacatggctgagtcctcttgctctcctttttttttttccccagtgactttggggaggtttgggcagtgatcctgcatacacaatactgttcttgttcttcttttctcttacagagcagccttgaata

SEQ ID NO: 57291 - DNA, 1104 bp, Homo sapiens
tgagaagtgtctattcatgttctttgcccactttttaatggggttgttttgtttttcttgtaaattcgtttaagttccttgtagattctggatattagacctttgtcaaatggatagagtgcaaaaattttctcccattctgtaggttgtctgttcactctgatgctagtttcttttgctgtccagaagctctttcatttaattagattccatttgtcaatttctgcttttgttgaattgcttttgatgtttttgtcatgaaatctttgcccgtgcctgaatggtattgcctagattttcttctagggtttttattggaaaacaagaaaaattaaaggacttggcaaaatagattttgaactctgccaaatcccaaacatttaaaaacaaccaaagtcaatgagtgggtctcatccctgacacatcaagtcttatggcaaaaatcactcactgcctgatgaatcctgtgtaccttcatgtctatgcatgatgacatttagggccagctctttccttgctattttaccaccacaatctcaacttttgaaaagttgtgtctttctaatattcatgggcaccttccagatagaaagagaaattaagacacaaagcaacaggaagattccatgatcttgtagttaatcagtaattgtatcagtaagagtttgcaacctccaacctgagatgaagcaagcaaacattgtcattcatttggcagtcactttgttctggcaaggttcctacttgttaaagtggaatgctcactttataatgatcataatggattaaaagctgtaaaattagactctggctggcagtaagttctttattactctcccttaccacagtgtgcctccattctcagatgtttccttaaagaagagtaatctaagacctctaaatacataaaaaataggataataagtaaagacaaagagaccctcatttttatatagatttgtctcctccagatgcagcttggcatgtatacatgtatacaaagcagccattgagaattaagcatgtgaaaatcacacctgttaatttgtcaaggacagaccaagtaaactataaggcagaaataaaactgtttcaacaaagata

SEQ ID NO: 57292 - DNA, 1187 bp, Homo sapiens
aaagaagtgggggagtgagagacgaaggaagaaaaggagggaggggaaccccgggcaattacagtaatgtatgaaaaggtaacctacgaaatcagagttaagagccttctccacgccatgcctggtgctttgccatttccacattcaatacgtttttttttttttaatttcttccttcacagtaattctgtgaggtgggcactattatattacaaatgaggaaactgaggctcagagggttcagtgattcgtccagggttgcacagctggtgggtggcagagctgaaacctgtgccccaaacagccctacccagctctcttgatcctttgttaaacggtaacgacacacactcttacctatctctctatgtccccaacctatctggaactccctgtaacctcttgcaaaactaaatctaagcccagaatctcttctgttccaaccgtctatttcttaagccccgcttggggcccaggcgctgccacaggccgaagggcgaggttcgggccgaggcagcccacgcccgtcctctcctccctcctctcctgggagtggaaagctcgtcccgggacgccccagctccgggccggcttcgcctgcgcccgcgttgctggcagcgccggggttaaccctcccgccctgcggagcaatgatttctgttttatttcagcaggggaagtgtgtgctgcctgattagcctgatggtttcctcttttcccataacctccagacccccatggcccaagtgtttactctctgaaataaaaaatctgctggtgtttttctttttgtgtgctcgtgtattttgggaggattgcaggggaggaaggcggggtggggttagggaccgggaggctgggggaggggagcgggccgcctcctccagctgcaggctccgggctgagacccctggctgcagtgcaagaaagcaacttattaatgagggagctgggtctcctgcctcggcagctataaacacagtgaacatctggagagagagcccgtgtctctaggcggccagacacagcactacaggctgtccctgcggcgcagcccgcccccaccctccactctcacgcgcccctcgcccctcgcccctcgcccctcgcccctctcctgggctccggctcccacctcatcggcccacccgaagatgtccattcacccagtgccgcggccggagccg

SEQ ID NO: 57293 - DNA, 555 bp, Homo sapiens
ggctaccaaggcaacatctttaatctacaatgtatagagttttaatttcttttttctgaatactatagaaatgtatttttgaagactcagagtatctcctctttcaggaagctttcccctcccccctaccctctttggcaattgcatggacctccttgatgcccctccatgggatttactgtaacggtgtaacaaagttcatgacacttcctgtatctatgcctgtttctgctcctgaatgatgagtaacttgagagtaaggatggtgtcttttcagatgacacatagtagccatgcaacaagtgtctgtttactaaatgagggaaagtacctaaagtacttgaaacagagttggtgtgtacaatccttgtgcgtcctgagcttatccaagagagtaagttatcgtttggacattaaaaaaaaaaaaaaaaaaaaaaaaaatccctgtgatgaagtgtgtccttgtgtgaccctgaggttaggcttctcaagagttaactacaagcaagatggcacttttctctaaactataggatgtaccagattgatgagttc

SEQ ID NO: 57294 - DNA, 1105 bp, Homo sapiens
atttaaaaaaaaaggagtccagaatctggggccttatcctttattccaacccccaaagtcaactgtctacctgcagtatgggctcctcaaatccctgggaggggctctaaacccaccattgacctttcttgaaggtctacccaagaagcttgactctgaatcaaagagtaaaggtcagggcgaaggagaaatcaagaagcttgggagaaaacaaaaagaacatgcccaggccatccagggatctaacttgccaagttttaaaccaaccttctgagctctaacaaaatgcacaccccagggtattaggactgatttactctggcctgaggtgacttcctgtttttgaagagaagaggtgggtagcaactcagagatgggttctgggcaccggtcggctttgacaaaacagtcctcgcttgacttcagcataactggggcagatagggcgagataggattactccccaaacaagaagtttcacaaccaggcaggccgcgtgcctaggagagcgggcagcggggttggggggtggggtggggggatgccaatgcaggggcggggctcccgggcctgagagagaggtgacaggcaccggtgaacttgcagggtgactggcttcagttgtcttttttcagcaggaaaccaaaaaacagtgctaaaagaaggtgactgagaatcaggaagacatactagctgctactgcctgttgccggccttcttgcacttactccccccatttaatcaccagaagggaactcacagagggcagcagctcattgcagggaccatagaactaaggtgcacaatcagctcagtagggcaacaacccacactgaattttttaagtaagaccaagtttcaaatacctcagtcaataaaagccagcaattagaccacgtgtcctgtttcaataacgagagtgaggttgccaccaccatgggcagcaataaagttgtgagcttggctctgactttgcatcaggggtgcccccggctcggcaaccactctacatcaaacagctcacagatcccctcctccactcacccttttcccccccgcaggtgttctttttctgaatagcaacaactaccacaccccagcgtgt

SEQ ID NO: 57295 - DNA, 1976 bp, Homo sapiens
aataattggaaacaggaaagaatgttttgttagtgtgcacagtacaagcacacttacaagggaaggagagacacagcctcagtgaagggaaactcctgggaaaacaggggtatccctgaaggtgggtgccttggtttccccattgccgtgcatgggggaggaagctttcagctcagagctaccaaaaagggagaggagcgttacatgagacacaagaatccttcttactgtggtcagttaccatcgacaagcagtcagttgagtggtcagtctcatccaagatggaacaggtggattggcattttccatatgctaacactacttttaactcccttctgattggaaggagttggttgtctgctattagagcaagcctcgttctccacctcctttaaaaactttgctggtgaagctgtctaggtgcacctgtgcctagctcccctgagagagttttatatatcggtccctctaaagtgctaatgtgggcaccggcttgggtagtctgagttctgtacctggttttgccttaggctggcttcgtgacattggacaagttactctccccttctcagtgggtccatttacccaaaaggattaaggcttcttgatgatcctcttcttccatggatttggtaaaaaactggagtagtgagttgctttgagtttcttcaagaaaagcgtgaattaattactacactttgactaactactgggtggctcattggatggctttcttgttgccaatgtaacaagattgctgtaaatcatgcggcatttcagattccgagccttatttggactttttactaaagaaagagcacccgccccgtctttttatttgtcaggcaaagttcagtcagccaatattcagttagccaaagttaccaaatgtgacttcatgcccacacaatgtaaatataatgtgtcaatgctgtgtgctgtaaggtgcttcttgcctaaaaaaggtgagacaaaaccttaggaaggctggcagtaaacctctggagtattttgccagattactgtgacagtggcagaatgattttgtgaaagccacatgcagtctgaagtttggaaatctaggttcagacccacttattaattgtgtggtcttcggtcagataataacttctccaatctcctttcctacctgtaaaataatagtagtactggtagtaataatgcataacgttaatttttctaccaaccttactaataataagaatcaaaagtagtatggaagtaaaagcactttgtaattgtaaagtgctgtgcaactgctagttgttattatcttagttattattctcattcaagtcgatgcatgaatataacagataataaatgtaacttaaatctgttgggttgcttttttctggccttagtgatttcaaagacttgcttgcatgtggttaaattcaccagttagtgacttattcatatctctttgcccatgtagacaccatcccctacaaatgcacaagtacagatcaaacatcccatattcctcctttccctcccacgtatccggccattgttctacttgtgaaactcccatcccaatcaatggggggtttacgtaaaaaccgatggcaggatatgagtgtggcttcaggaattccaggcttgtgctgctgataaagagagttgtgtcaaacagaaaacaccagagaaacaaattctcttgtccaacctatgctacagcactcccttgtgaatagttttaaaacatccgtctggctgaccaaatacctatggctgcctccacccatacatctacgccacctcttctattatcttccccatgtccttgtggtaatacagtacagaaccaggctagaagtaggttaattcagagggagataccagtagaactgagctccctgattaagggatgtgaatttaattgggttgtgacagtctgtattaagtgtaaatgctactaataggtttaactgactttggtgtgagtgaag

SEQ ID NO: 57296 - DNA, 1069 bp, Homo sapiens
ctgagccaatactgattgactatttaggctggaggtggaaggatggtggagagaaggcaggggtcagggaatccataggtagttcaaaggggccatttttggatgaaaatgttcactgtgtatgagctatagacaggtcattgagggctggcagtgtttccaagtgcggatctgtcatcagataactgttaagatagtcgtcagccacgaaggaatctttctgtgttttgtttttattttctaaagaaaaaaacaagaagaatgggagttccagttcaaaagattgtagtgaggtatttgagtaagaatacctgagtgtatttctcaaaaagacttgtgaagtggctttccctggaattgttttaaaacagagtggacagcttccacttctgacattctgccagccagggctggcgtgagcggctgcctctgaaggccctgcctgtgcagcagcagcttatctagttcctcctaccttgacattctgataagggagctattctagtcaacagggcccaggatggcgggaacccttgccaagagccgtgctaagttaaatggtagagccaaagctttaatatgtgaccctggagatcctggctagtgcttaaaatgttaacttccattatcgttccaggccagagcaagctgagggcaaaggtcatggatcatctgaacagttggcaggtggcaacggcacttcctggtcaccagggatcaatcaatagggtggccagatagtatgggggacaggaaagggtgagggtgggggagaaatggaggggttggggagggaaggagagagcaaacttggagtctcattctcatcccctgtgacttggcggtccggggctgggtgtactgctcaccctacaccttctcccagatttcaggcacccgactttacagtcagggaggtccaatgccatcatcctacattatttcctgctgctcagaaaggaaaatgggagtggggtgcagtgcaagaaccaagaggacctcagatgcctcctgggaccaaacctgtgtcttccccttagagtgtgcccccaccccccccccaacccca

SEQ ID NO: 57297 - DNA, 576 bp, Homo sapiens
aacacgacagcagaatcacagccctcatcttactgatgctcactcaagaacatatacttgtcaggaaactgcttcatacatattttcacatttcagcatggtcagggctttctaagcaaagagcactggcacctgggctaagggactgaacttaacccagtaaccctaaagatggagccctctagagataaaagttttctctctcccccaagccatgtttacattccagagtgtttgtgaaatacagatccttgcttctttttcccagagattttgtttacatttcagagcaaaggtctctctctctctccatctcgagaaaggagaatgggcaggaatgccagctatcctgtataagcttcaagtttcataagtgcagagttctcttgtggtaccaaatcccacttgtaaacacaggatatctctggttgtcaccatatcactttatggagaaccagggcctagggaaccaacataagttacttttcaagtaaacaagggcttaatttctggtccagagacttgatgtttctgctgggggaaagggaggctacagagagacagagaaagagagag

SEQ ID NO: 57298 - DNA, 1188 bp, Homo sapiens
agaaaggcaaacaggactgccagtttcctgcagtttaaccataagaaacacacataatgaatttctgaaatgacatgttttagaagattttaccattggtctaagtattgtcccctttcttaaaaagaacagagacaatgtaggggaaatccaataagtagtcctcctttatctgttatttcacttttcacagtttcagttacccatggtcaacctcggtcaaaaaatactaaatggaaaattcctgaaaaaaacaatgtataagttttaaactgcatgcagttctgagtaatgtgatgaaatctcacacagtcccgcaccgccccactccgtcccgcctggaacatgaatcattcctttgtccagtgcatctacactgtggactacccgccggtgactcacttgggagtcatctcagtgaccagaccaactctcatggtattgcagtgcttgtattcaactcacgcttctttgacttaataatagccccaaagcacaagaggagtgatgctgccaacatggatatgacaaagaggagctggaaagtgcttctgtaagtgaaaaggtgaagttctcaacttaataaggaaagaaaagaaatcatacactgaggctgctgagatctacaggaagaatgaaccttctatccatgaaactgtgaacagtatatcattataactgttctgttttatattagttattgtaaatctcttactgtgcctaatttataaattaaagtttatcaagtacatatgtactagaaaaaccacagtatatatagtgttcattactatctgcagtttcaggcatccactgggggtcttggaacatattccccttggatggaaggaaactattgtaccatcagaaagatagatttattaaaactgtgttatattattttgaacaacaatgttactaaagtgattcttaaaaaataagtatgtcacaaggaattcaaataactgagttacatgtgtgaatatccgcaaaagaattttgatataacaaaatagacttaatgctaaaaacaaactacaattttctttacttattcaaaattgttgcaggtccttagaaaaatcatcactgtacagtactaaggaaaaaaataattaggcttttacatgtttatatattgtgagttcaggtatgagtctccacagaatatggcaataattatttaaa

SEQ ID NO: 57299 - DNA, 937 bp, Homo sapiens
gaaatctctgaggtcccacgacattaattagtttgtccaggatcaatgtttataaatatcatagctggtatgtgaactcaagtctatctggctccaaaacaaaaattagtacctttccaggattcttaaccttataatggctatgataggaaatagcacatatgctaattaaagtaaaaaaaaaagttaagtcctaaatcgggggttggaaaacttttcttttaaagaaccagataataaatacttgaggctctgcaggccgagctatgaaagtactccactctgctgctgcactgccaaagtagccacagacccaagaatgaacgactgtgttcctacaaaactttactgaaggacactgacatttgcgttttatatcattctcatgacatgaaattttatccttctttggattgttttcaaccatttaaaaatataaaaatcattcttagccatgggccagatatggcctgcaggctacagtttgcccatcccttccctaaataatgcagacaaatttaaaatattttttactaaacagttcttacaaatcattaacttgtaacctcctttggtattgtgaactgatactttaaagaagttcaaagtcttgtccagccttggcacaggccagtagtcccagctgctcaggagggcaacgcaggaagatcgcttcagcccagaatttggaggccagcctgtgcaacatagcatgaccctgactctattaaattttaaaaagcagcagcagcagtagctcacagtctcaataaatttgatctgtctccaagtaattgaaaattccagagagttcaaaattgcaagtactaccggtggattttctaaataagacagagcacagaattttggaactagaagaaatctaacacgttctcattccttatctgtttttgttgttgttgttgttgttttgaga

SEQ ID NO: 57300 - DNA, 2142 bp, Homo sapiens
cttcaagtttcacaaacagaaggtgaagctacaaaaggtccaaggtagactaaagctaagaaaccaagtctgattttctctccctaccgtttcttgtgtactgcttaagaaaatctttaacataaatatttgataaagtcaaaaaacgggaaaccaaggtacaggggtggcgaggaagcgagggggaaaaaaggcactaatgcaccaccgtcgtccaacatgcagcggcaacttcagtcaatcggaaagacgaggggggaactccacgggagcctaagggagcagagacctctggccccgcggggcccacgcacacctgggggcgggacccgcgatgtcgcccgcgggcagcggagggaaacgctcccgcggctcctccgggagcgccggtgtccctggagcccccactcggccgctcccaggagtcgcggctgccgcccgccttgggcccggggcggagagcgctgcggcaggccagaacgccgtccgaacgcccggctcgcggaggccgcggggagcgcggggcgcgggcgcgggaggcggtgggcccgcagcgccgtccgccccgggaggccggggagatggggccgggggcggggggacaaccgagaggctcctccgggagcatgcgatccggaaccctcactctaaaaagaatattttaagaaggaaagagaggccccccgcagccttccccgcggggcctgcccacgtcaccggcgcccccggccctcccgcgcgcccgccttaccgagccccgcggccccgccgcgccgccgcggcgtccctgcgccccgctggccgctccgtgtctgccctccgcgggccgggcccgacgccctccgcccgccgccgccgccgccgagcgccgcccgcgccgccgagcctagcgcctggccgccgagggcagccgcgggggctcggccgggcgtcccccgcgccagcgcctcatcccgcctcgcgccccgtcaggctcgggggcgggggcgccgggccgcggcctccaagtccccacctccggcacgcaccgcgctcgccctcccgcggcggagtcggcccccggggacgcgggtcctcgggctccagagcctctcaccctgacgccttcgggccgcccccgcagcgcccccgcccagctggccggcgcgtgcccccgccggagcccgccgcccgcccagcctccgcctcctccgctccgcctcctcctgcacccgcgacgcccgcagcggggagaagaggcgcgccgccgcggccgcgggcacgagcacgcgcgaggagggcgggcggcgggcggagcgcgcgcgcggccgagggggcgggggcgcgccgaagcctcgcctgctgttgtcccgggagcgcacgtgcgctgcggtggggcgccgaggggcgttcggcgggtgcccctaggggactgggggacagggaacgcgaagtgggtagagacgctgcctgagaggtcccgacgtaggctgttgcctcggccccggcattgtgctgcggtgcaaaaataaaaaaccggccgccgccgcagcagcagcagtagcaccgggaagaggcatcctccgagactacggcagtggctcctctctactcccagctgacccccagaacactgtcaccgcgccgcggaggagagggggctttgcctcaagtcaggaagatcctcgcctctccatcccttgcacatttgggtctagaatggacgcgccccggttattatttggaatccgggggcctaaaagttccttcagttggcttcttcattcagagttatggaccagaaaattgaaagtggcatggcaggggagagaaaggacaagaaagggtgaaagagtggccaaactgaaggtgcgtggctagactgaaaagaggttttggagacaagggaaggagctccctgggaaccccctgcctgtggatggcactgcccttggtgcttcccctgttccttttgttcagcccccaaaggcggtgcagcacttccacctgcaacgaccatctgtgtcacagaatacaggaaagatatcttgacattctaccgcgttctattttcatttttttctttcaagcgtgtacctttcacttctgactcagtttggtatctaaataaatgttgggggtgattaacctacagaattcact

SEQ ID NO: 57301 - DNA, 362 bp, Homo sapiens
ttaattgaggtgacttggaggaagctaaatctcccattggtggctgtgacagtggtgagaagttgctattactcataagcgcgcacacacacacacacacacacacacacacacacactttactgtaaacacattgaatgctccactcctccctccaagcttggcctgaatcagcactctactcagtgatgctcccaaccccaaaggcttttattagatctaaagaactgaaaccagtgttgaggaaatgcatgggaaagtgacttgggaaagctagagatcaaagagaggtcactcaactccagggtggctgctttcccagggtgctcccagcaattcccctcccacgattttgtctttta

SEQ ID NO: 57302 - DNA, 1385 bp, Homo sapiens
cacaaaataaacctttaagggaaaaacattcttagatctccaaatatttttaaatgtgtgagcagcactagaacatgtaattctctcatgcataaaatggggataataataagagtcttacaaggctgtcaagaaaattaaaagaaatcatatattagatacccaagtggagacatacccagatgcaaggtggttgactaggctccctagctggtgaggtgactcactgtgaactttctgccactctcacagtgtttgtgttcaatccctgcctcagcaaaatgataaatcattacatcagggactttcaaagtcaagcaaatagtcaaaaacatacgcagtaggttaaatcctcaaatgcaagagtatacagtcctgctccctgttgacttcagccctacggagaaaataatacctctgttgatttcagcttagagaagcttattaccagcaatattattccctacagtcagtgttagcccaactcaatgcccctttctgaacagtactcaccagagaagacagtccagccaactcagtgattaccaagcagcatgcgctgggtggtgaaggctaaagtagccaactgacaccgtagggaggagagaactggccaaagtataatgacctaaactggcatttggtcagatcatggggattttctggccctttgctcaaacgcctggcactgcacgcttaggtcttttggaaacaatgtcatgcaatagcataacctgaaagagtaatttagagcagtttattggaggtgatgcattgttagtagccatatttacaaagaatactggcctgagaaatattacagtgtccactcttagatacctctttgtggctaaggacacaatcttactaaaattgaaataaggtgttaccaaaatactctttgctaccaaactggtgtatatgcaggaggaaagcagtttacctttccaccttatgaagaaactttttggatatcttgtctatcatcattattcataaaatctgtgaatcacctactacttagcttcaaaaaggtgggacatcttaaaggatttgataaactaaaagaattctcacctagttactatggaggaagtctggctaaaatccagaattccacatatgatcccacaagatctcttcccggcctcagctaaaagattatttaggctatgaataaggaaaaaaattacaattccatagttgagaatttcaagggatcgtagaggtcttccagtctaacttctttttatctttgtaggaattatggctcagagaggataacttggccagtgttgagcagccagctcacttccattcaacatacgtttactgaataaccacgagatcccaggcatcctattcaatactggaaatgcagaaaa

SEQ ID NO: 57303 - DNA, 917 bp, Homo sapiens
aaggaggaggaaattgggctgagatgaggccaaaactaaaagttgccctcttctccctcctgactctttaagttaagcaacctacccatgcatcatgctcctgttaatgcacaaaagtaggtttcaaaccatagtgggagttagaagatggaagaccgaggactgagacatgacaagggctgaccagaagaagaaatgaggatttctgaggggccaggaagcatgatacagacctctcccctgagacagtgagaataccaggaagaacggtgaaccagccagaaagtggggaggagagccaaggtccaaagaggacggagaaaggaagactgccagatttgggcagtgccaaaggcaggaattacagtcagaatagatagccaagaatgtagggtgtggatggaagtgggattcgagcaatttttttctcaagaaacagcaggctgtgatgtgtagtcagtttgatttaaatgatcatggggtaagacagccaacagaaagcaccccagcagtaccatggcccacagaaagagcccacagtctaaactagggagcagcgctgcatggaaaatccccggctgaactgggcataaatccagacataaactggggacaggcagtggagacatgctgaagatggttgacatcagggaggcagcaggtattccagatgataggaatggatgaatcaggatctcagcaagggggctgggggtggcgagagcaaagtccagcccctcgaaagaaggatctagcaagagatactgtgattggggccccactaaaggacagggcttcacaacaggtggcgctccagaagtagaactggtatgaaaacgaggaaaatagtcattttaagcacgtaggaagaagggaaggagactgtagccttggggatatgtggttgcctggggcct

SEQ ID NO: 57304 - DNA, 2623 bp, Homo sapiens
aggaaaagacaaatatgagaatgatcttaaggccgaatgacaggttccataaaaggtagatttgctggaacactaagtccagaaaacagttcatgagagaagtatccttttacctaaatttgggaaacgtctaagccagttgtggttgtgagggcctgtggtcccagcctatgcaggaggattgcttgagcccaggagttccaggccagcctggacaacatagtgagatctcatctctattaaaaaaataataataataaaaccaataaatttgggaaataccacatatttccctttttggaaagtcacactgtacaggagaaggctaaaagagcctggaagcgctagagtagaaaaacatgtcaatatttgataaatgcagtgtttcggaactagtttgatcacaggacatctctgcccccctccactgttgataacacagtttaacatctcgaagaagcagcgatcggtaggaccccctctggaatacactgccctgaagtaacatgtgtgaactgtataaacagagctggagagagaagaacacacacatacacagtgcacaatgcgactattttccttctctctgttctctggtgggctcgagcagtggggagcccatgaggatagtttaaaattaaatgctcatttccctttccttgcctggtgtgaatgtggcctctctccctctccctcctacccacttccttctccgacagagtccgcttgccccagagagagccatctggagagtcgtgttgcaatattgactattgcaagggacctccttctggcattcagtctagttcatggtgttttactttcatctctctgggttagaaaatcatctgacgtctctaagcggtttctttgggctaataacattattacaatttttccttttctccagaatcaaggctgttttccccccgcaaggacttcttggcatttccgtgaggtttgttattcggttgtgcttgaagtatgtggcatcctgtttgtgctgcaaacagtaaaataaaatccccctcaggatcactagctgaacctcggggacacttctgctgaaggaatcccatctgtcctggatcagatcctggccctggggacagggctgggactggcagggaaattcactcgcactgtcaacgctgaccttttaggatcatgtttgagtagtgactgtgagtaaacaccagcaagaacgttgcagacagggccagaggtaatgacatgccgttcaccagggagtgtcatgaacttggaatggatagcacaggctggacccacgctctggggctcatgcataaagaaaagcctccagaggcttcctctgaaaatcagttctcttgccccagtaactgagcccaagcaacctcaaatggcagcagcctttcagatgaggtctctggccagttcttctgctgtcagcgtttggccctcactagtcttgtaccttccaatgaggcctgttctcttcatctcctcccataaccttccttagcagaatggagtcattagtgcatttctgctcgtttagctgctaacaaatagacaaaagaggcaggggccgggtgcagtggctcacgcctgtaatcctagcactttgggaggctgaggtgggcagatcacctgaggctgggagttcaagaccagcctggctaacgtggtgaaaccccatctctactaaaaatacaaaattagctgggcgtggtggcaggcgcctgtaatcccagctactcaggaggctgaggcaggagactcacttgaacctgggaggcagaggttgcagtgagccaagatcatgccactgcattctagcctgggcaacagagcgagactttgtctcaaaaaaaaaaaaaaaaaaaaaaaagagggagggacttggggttatggagagagatcaatcactcttcttgacttgaaaacagtctaatacatagcttaacaggcacaggtgcctttctcacttccacgcttctcccgcacgatgccaacattcttggcccgcttctctaggggaaatcaagtcctttagggttcatattcaggtaccatgcccagttccaggttaaaacgatgcattcagcccctaaattctgaacgtgttttgccaccctcaaattctcctgatcgacctcacccatgaagtagcctccctccaaccctgcgccaaattccaaaacaggcttacccccagccgtgattataattctacagcttgctctgtcatgattgtcattgccttctgtccttatgctccttctttcccctgttggtcagataagaaggctttaccccaggagacagataaataattgcagatcctttataggaggctaatttctagaatttaggtgggggttgagggggcagagcgggtaggagtttgtgctaaaataattttagtatataaaaagtaagtttagttttattttgttgttataggctggtgaggccagtgatatataagttattcatactcttgtaaactgttgatatctttttcctgtctaagactgcaacctgtttagctttatgtctccagggcctagtcccctgtttgaccacagaaagtgttcaataatgattggattattttcctcttcaaaaataattcctc

SEQ ID NO: 57305 - DNA, 997 bp, Homo sapiens
aaatgtatactggagttaatgtaaatgcaatatatgaacatagtgttgatcatattcaagatctaccaccataaactaattagatccctgagaccaactcagagaagcggagcttttactcacggttgaggtccacaaagcttgtttatactggagctgactttgctcttaaatggtgacatcagggcacagtcctagatcttagagttgtatgctacagagttgctaccggtattatgtgctgctttcaaatcctccttgttcaatacccttattaatcagaagtagagctaagtcatgtacaacgattttcggtggagaattcaagtccttgatggtgagaatgatcagaactaaccctagagtgtaggacgggcaaagaggcttccctgtccagtctagagagtcccttgatctgttttagggaagaatagcaacaggtgacacttctgacagtgctgaggtcaaggagccccccaggtggccttcccaagacaatgttctgggacagtcactagcgccgacgcagcacctctggagagcctgtctttgataatgtacctgcttcgtgccgatagagggagaccggattccacagcacacacgccatgcgtccctgctgtccggtagagggcagtagcggccacgctgcaaccctgagaagtggcgggtaccttaggatcctttctgattgcagacgtggtccagagccaaagcggcttggctgggaaggctccgtgagacgccggggcttgattgctaggaggtgaaaaactttcgagaactcagagcaatccaatggacagtccatgttccacataattatcaactcactttccctgctcgtgaaattgctgttaatttttaacaagtgattgggactgtctatatttagaggattacctagtaaccaaagctcatgacacatgagatggttaagttttcctaccagacctaactgtgatatttcctgactttaatatgtttttatgtcagc

SEQ ID NO: 57306 - DNA, 784 bp, Homo sapiens
cagaaatattagttcttcttaaacctcctggggctccctgatacctgcccaggcatctctcaggtcacctacacaggattgattcacttatctgggaggacaccattggctggcatggaagctgccatcttcacctgccctctcagatgttcctcgcctccctacgtgaccagggccatgagcactccctcctcccacagctctcaccctcctcctctgtgtttgtttctccagtttcctaggtgaccccatttaagcgaatatgcagggaagtgagaatttgtaacggtggcaggtaatgagagaaagctgatgacagtgaagcatgtttctgtagccagagtgagtcagggctgcatttttcccaagtgagctaacactgtttgctaatgcagttgcagagctgtgaactgagccttccattgactaatgcacctgatggcctcaggtgaactgggctcgggaaggcaccgccagccagaaccatggaggacccgtctccagggaggcctgggagaccagaagtctgtggggtggccccctgggttcttggttctcaatgagcgactgcttgggaagcagtgcttcatttgtgggaagagccaagtgctgttggcactgggaatttattggctttagcctgttaatcactttcaataaaactgccagcttctagtagctcttctacagggatgaccagagggatgtgagtactgatttaagaccacttccagggtcccctgaaggaagactctgtgtattattggggctttaaattatgcag

SEQ ID NO: 57307 - DNA, 652 bp, Homo sapiens
aattagggctttgctgaagacaacgacttaacctaaagatcgagtccacggtgggagtactgggctccaagtcagggcagtgaaggcgcaaggtagtagactaacacccctccacctgcactggcacatcctccatgcatttggcaatctcatcaaacacagggtcaaggcagctgtgttccagccctggctctgccacttgtttgctgtgtagctttagacacaccactcaccttctgtgaaccttgagttcctcatgtgtgaatcaagatcacggcatctcccctgcttacctcacagggctcctgtggatgaggcaacgtacaaagtgctttgtcaactataaagcattgatgaaacatcaggaactgttgtcatcgttccaggtaggcacagatgtcctctatttctgcctcctgccctttgcagctgaccacatccccttctttccatgggacactctgagggtctctctcctctgcagtgtctgctcactgccctgtctgtctgagtcaaccacagcgaggcatctagggttagggttagggttagggttaggttagataacctaacttatctggggcccctgtcccagaatacggacctcccacgccccttgggtcagcgcacacgacaggggagacaccttggt

SEQ ID NO: 57308 - DNA, 565 bp, Homo sapiens
ggaaaaaacgccaagaaaaagccgagcagaaatatccctcgcgtcccacaaagaactctgtgctgtattccccaaggacacttcaggaccctccgggtacctgagttccagagacttctggcagaaggacctccagtctcaaggtcacttaacacgttgcctcagaagccactctcctgtgcgacccctagcccgccagggttttctctattggctggctccgttcgctctccacacaggtcatgaacagaactgacctccctgactcagcagctctgacaacatctctgctccagaaggtcaggttccctggcaagcaccagcaccctggccacgcctgatgtcaagagagaatgatgcatcctcctgaatggtttgggctgaattgggagaccaagcccttgtcagtcaaatgccaacagggcagttctgaacctgccgggctgggtgagtcatcaccttcataaaacaaaataccccaataattaatacagaacaaattaattaaaggaagtgagaccattgcagcacccactgtgaacggatgataattatttgcaaacac

SEQ ID NO: 57309 - DNA, 930 bp, Homo sapiens
gaatgaggggtcttaatctgcaactgacaattaccacttgtcatcagtggcctatggcttcttggagagagtgaagcaacatcgcttctcttggaggaagcaaagcttcacagggctttgttggtctcatcctgctgaatgtccccactcaccattcaggcatcagagaggcctcccgtgagaagtgacagggacctgtggcttaaaggatcaggacagcatcaaccttgcctaaataaagctaggacaattacaatatttggccccttgactgggtgaaaatggtactcattcaacagctctctggcactcctaccacaagccaggaagtcactgttccaggcataggagatacactggggaaccacacagccgctgctgtcacagggcttccattctagtgtcactgggacttttcctgggtcatttccacaacttcctgactctgtgtgtgggaattcaaaaagggtctggcttgagaaacaagtatctgggaaacggagtccaaaatgtcatcatggaggatttcttctaggcttccccaagaacactttgggtaccaggcataaagacaaatcttttgccttccaaattagctgataaaagtagaagggataagaactaagagctatcctgtgtcgcagtttcgtcattttctggcccacatcctggggcctctgccttgtttacccggtgttttaaaacacacagctgggaggggcgcagggcttgcagagctggctctgtgcccaggaaggacacgcactcaaaatcagccctgcagacacgcacctgggagccgcttccctcccttggcacgtacaggtatcttcattaccagtgtgtctctgctcagattctgctttcagcctaattgtttctgtctgggatttctttcactgctcacttggcagggaagcccagagatta

SEQ ID NO: 57310 - DNA, 1098 bp, Homo sapiens
tgccattcatctatcagaaacctgaagccagcatatgaaggaagcaagtgtggcacaaatcctgggctgtcaccgtaaacagctccagtaggaagttcccattctccgctattgccattccacccacaggctggatagtgccgaagttacacttctgaggagtcagcatcctgacgcagcctaaactttacactcactccctgctctccagaatgcacacgtctgcctgtgcaaaaacgacaagcagagtcaggtgacctcagctaacaggaatgtgggcagggctgcggctgaatgccagagctacttttattaaattccttgttaagtaaattcaaaaggggtttgtttgtagctggcagtaaatacctaagacaagatctctggaatttctacctttttttttttttaatttaaaaactgtcacatggctttctatgtgaaatgtgattcttgaaaataacagatacgcaaatatcaaaggattatcaaacgcagacacactcgcctttctcaggtggaaaggcccatttccccgcactgcatcctacctctccccactgccaacctcatcccgtgccagtctacttgcccatcacaagctcaacctgggaggcccattcacctctgctctctgcaatgcaggcctcccacctcctaagactggatcgcccccaggctcgccaggatacatcacagccctcctgcccggaggaaggcaacagagagagacttgacttagaatcagaagcttctctttaacttcaactcagactcatgtcttccaacggttaaaggggaatgatgacactgattttacaaaattgctctaagaattaaacaaaatgtctgtgaaacagctgtggagccaaccagcctcccagaccctcctccgcttcgcaaccccctaaccacccaacaactaagccaggctgcctccatcccacatccttcagctccacctcttcaacccacaagagcttcaatacactccaaaaattaaagatactttttttttttgagacggagtcttgctctgtggcccaggcgggagtgcagtggcgcaatctcggctcactgcaagctccgcctcccggg

SEQ ID NO: 57311 - DNA, 1169 bp, Homo sapiens
ggtccccaagcaactgtgccccctcatcacccttcagcacatggtgaaatgacatcctcatcatgcctatgcctaaataagtgaagcgggtgagacagcacatagcatgtgagtttaacaaaacttcaaaatagcaccaaaaaaaaattgcagaagcaacctgatgctcagaataaaaccttcttaacagaactggcatagaacagactatcaactgcaaagtcagtgtcctacctgcctcttaggaggtctctatacaacttgctcacaagtttcttcagtgacggtgcgtgtctagctaaagttaatctagtccactgacaacctttgcactgccactattctgaacagaatctcaaaataccaaaaccaggcagctgccagggagttggaccccggaagccaaggatttccagatcttcgggcgttctgaacctcttcactagaccacgaaggcctctcggcctctcatcactggctttcagcacctggtctaactttccccgctggaccctccccaacgcagaagctaaaccctcgggtccttccagagcaaccgccggctccaaagccctcaactctgcagcaaattcccctccggtgccagcccggctggcccaaggcccgggtccaatcctcagaactgcacggctcggccccgcccctcccccacgccgtgcctaaccctaacccccagcctcacgcgtcgcaccgctccccacgccccgctcccgctccccacgcccacacgggcagcgacctcgcggacccagccgcccgctcccgctccctccactcccaggagacacttcaaccctttcgccgccccttgcccgccctcacctgaaccgcgggcgccggccccctaacccgcagcccttctccggccgcgggctcccagacgcactcgctcccgcaaggagtctgggtgcgcgcacgctctgggcctgcgcggcggaaggggcggggcagcgcggggcggggcctggagggtgccggggcggggccacagcgggcgggtcctggagcggctcgggagagcggagggtcggcgagggtgcctgcgcgcggctgggcctggggatgcaggttccagcctgcttgcgcgtctcacctgatttaggagcttccagaggccccagacagtgcctgtctttgcctgaccgcga

SEQ ID NO: 57312 - DNA, 1460 bp, Homo sapiens
actaagactttatttatttttatttttagtgacagggtctcattctgtcacccaggctagagtgtagtggtgcagtcatggttcactgcagcctccacctcctagagacatgaccgcaccactataggcatgcaccaccatgtccggctaatttttctttttttttttttttggtagagtcagggcctcactttgttgcccaggctggtcctaaactcctggactgaatcgagcctcctgccttgccctcccaaactgctgggaatggcatgaaccaccatatttggtccatactgagactttttaatcataccagataaccaattttatttattgtatatttattatattgcttaaattaaatagaatctgcatacttaaatgtttcaatgtaacttcttgattttgatactggtactatggttatgtaatttaatgaaacattacacgtgtatgtttactacaatgtttaaaaattaagttttatactttggtcacacataaaacatggctccatatgactgctaatcatcccaaattcaattccataccaaaaatgcagagatttgccttcgctaagaacagccaaaataacatgtggttggttctagcagcaatctgaaaggcaaaggtcatcgatgacagcagcatttggtcaagtgactaacctctaaagtggctgactcataatggaacaactttgacttagaggtttacattctgaatttaaaaagaaaagaaaaggccactcactttatagacatacctgtactcattacacacaaaggaccaaactactatggataacgtaaaagaaacaaactatagtttgaggttttcagcagcaataacataaataaagcggggtagtaaaacagattatgacagtaaattgcagacaaggcggagaagcctatagctggtggtctagctctcctaactcacggtgagccacatcgatggagcattcaaggggccaaaacagtccctattccttgtgtacgagttcttcatgtcggctcctaacgactagtcactactagatagcagctgtatttctttgctgtcagcaaactgagtccagctgaaaacctctcaataccaagctggaaaagaccagtcttcacctgtgcggcattctgttcatgctctgcagatgtcggccacacatgcgagctttcatctttggaatccatcttctcccaactggacagctccacgtctggcacacctagagcagcacagggtacaggacagtcatctgtctaccacacgtgtgttcatgaaggacggaaaggtctgtctgcagcatgcctgagaaaacacagaaaaggaaccaagactttcagtagataaatacattttaatatattataatttcaaccacaaataataaaagaaagctttgtcaaaaagcaacacgcctgggcaaaaaaatgtaaaaatgaagacattatttg

SEQ ID NO: 57313 - DNA, 723 bp, Homo sapiens
aaaaattagccaggcttggtggcgtgtgcctgtagtcccagctgctcgggaggctgaggcgggagaatcgcctgaacctgggaggtgaatgttgcagtgagccaagatcgagtcactgcactccagcctaggcaacaagagggagactccatctcaaaacaaacaaacaaacaaataaaaaatccaaattacctgccctgcatggttgctgtaaaaattaactacatgttatgtatttcatcgagtctacaaagtacgttccccccatgttttaacatttctgaaatagggatctattttacaatcagtggcatcttgcagttactgtcatccaggtggcagtcaggacatagggtcactgcccactcatgtgtgatctcacttcgaatgagtcatgtgcactgttgacatactgagcctaactgccactttaaatgtcttcaaaaagatgacacgataacttggtattaaaaccgaaagacatgggaacagtagcagggcataaattttattagagaagcaaatatctaccattggaaaaatgaccttaaccaaccgaggcccttacagaacctgggtataaaagacagcccatgtggatgaagctgcatgatgtgttgttattactgagattcacggggaaaaaatggcctgaggttgagtgagaaaacagcaggattaaaatttgcagaacaggtaatagatgcttagaggagattcctg

SEQ ID NO: 57314 - DNA, 5581 bp, Homo sapiens
tggttgcccaggctggagtgcagtggcgtgatctcggctcactgcagccgctacttccggggctcaggtgattctcccacctcatcctcctgagtagctgagactacagctgtgggccaccacacctggctaacttttttgtttttagtagaggcagagttttgctatgttggccagactgttctcgaactcctggactcaagcaatctgcctgccttggcctcccagagtactgggattacaggtgtgagccaccacacccggctgtgttataacattaagaataaaaaagaaaagaggccagatattcctaagcagtgattcaactaaaccacgtgaacagtttaatgctagaacagcgaagagataagtgtcaccaatgagggccaaaataagtcacgaaaagttcccctctcaccctcctgcctctacctatcccccaggagaatttgagtgggatcattctccaaagatttggttgtagcaaacatttctttttggctctttctagacaccagatcgaattctccttcattaatctattaaagtacctataataagttaaaatggtagacaataaattctgcttgtgaaaaacaaattgctggactgggtgtggctacactatctggggtgggatgtgatgggagaagactatgtattttagtggcaataggtcaaagtacatcagtgttcaagtttaaaacaaactgaacaactcaaacactgcaacaacaggatgtttaacagtttctttttaccagatataattacgcggttacgaggtgtttaccagtgcttaaaatgaaaaattgaggaaaccaaaattatagctcagtacttctcagccctttgatgaattatgtttgttatccagaagcctatccctatcaattagattacgcttttaaaaagttacaagaaatcaaaatattataattcttttagttcggcggacttcatgatgcccccttcaaataatggaagtaatgaaagtgcccaatcatcagcaaagtctttagacacctatttacgtcttgttttaaaaactagatattaaaccaagattatgtcgtttgtacaaatattttatacacacacaaaaccaacttgaaatacaccaaagtatcagcaaagattatctctgggtaattatgggttttgttttttttcactcgcttctaaattttttttttttttttttgagacggagtttcgctcttgttgcccaggctggagtgcaatggcccgatctcagctcactgtaaactctgcctcccgggttcaagtgattctcctgcctcagcctcccgagtagttgggattacaggcgcctgccatcatgtccgtccaatttttgtatttttagtagagacaggctttcaccatgttggccaggctagtctcgaactcctgacctcaggtgatctgcccgcctcgcctcccaaagtgctgggattacaggcatgagccacagcgcccggcttaaattttatgttttctccaatgatcacgcattattcttaaaactagaaggaaaaacaaaacaggcaagcagaaacttaggtagtgccaatcaatttgggattatattgagttgtgctatcctttatacctccataacctctaagtaaaaaccattcagagcccttgaagacaggaaccttgctttttctaaaatatatactcaattacattgacatacaatatatgattaatatgtggtggagcatgctacaaaatattagaaaaactaaaaatgaattctttgaaaaagcaaaacaattttgccttgcaaaacgaggaacagcatagcagagtgggagcttacggggtagaaggcacaagacatttgtcttgatccaaaacaaacaaaaatgtaatcctttcactaaacgtccctgttcactttaaaatggttcattctgtgtcaacttcacctcaatttattgtaaaagtaaacctaaaggccgagcgcgggggcccatgcctgcaatcccagcacttagggatgctgcggcggtaggattgcttgagctcagcagttcgtaaccatcctgggcaaaatgatgaaaccccgtttctacaaaaagtagaaaaattagccaggcgtggtggtgcacgcctgtagtcccagctactagggaggctgaagcaggaggatcccttgagcccgggaggtcgagtcggcagtgagccaagatcgcgccactgcactctagcctgggcaaccagagaccctgtctcctaaataaacctagcaaagttcctttctaaataccccatattgaataaacactgtttaaacgctgctttgcccccaaccaatcctaattttaaaaaaaaatcttgttttctctattctagaacaacaaataagtactgctcatcaaagtggaagctattgtgatgctggaatggtaggaagatacaaaaaaaatacaatgtaataatacaccttcttgccttacagcgatggaggagtgatagaaacaaagagaacaggtcagaaaaagaggccacaaaacagtcatgagtgattctgctgtttttaataaaggttaagtactgctaagtttagagaatttggggtgacgagacaggcaaggtttcaacaggcaaagcagcagaattagggcacagggcagagctgggtgggtctcatcacacatctaatcctcgatgacagcacaaagccacctctccttgtgcttaagtgtacacgcacattgattgaaaatgcactaaaatccaactcatccaccaagcaaggctaaaggcgcgcacacaaattcaacagcgctgcgttcgcgtggctggagggcagacggggaatattccattttacttagtagagtatcaacacctagctgcagggttaaacctgcttaacaaaagctggcgaggggctggagaggtgcacaccatcagccctctcccgagcgccgaccggcctcgccctgcctctgcgctgcaccctgggtgcaggcggactggggcagggccgcgaccccggcctcggcctccgcctccgcccggccagccccgacgcggtgccacgggacagacccgcaggggccaccccacacccctgcgggccggccccccgccccggtcccggacgctagcttgggaaggcaggccgggggcccagccatcgatggcaagtgggcggcgcggcctccgcagacaaagctgggcgccccatcgaacaggaccctccgccccacgcgcccgcaaccggccagccccggagccctgcccgcactgccacccccagcccggcgcccggcccccagcccccggtgctcggctcccggccggcggagacctgcccgccgcgcccggagcgcccgcgcaaccgccgccgccggagcgcgcaggccgcccaaccgccgtcccggcccaaccaacgcgggcaggggaggagaggtgcgcgcggccggcggagcgtgcgagccactcgggggtcgcagggggaggctgcgcgcggcgaaggcaggggcgacgagacgccgaggccggcgctgaacgcggcgccaggagggcctgctggagggggccttgccctcttccccttggaaggtgcagatggtttgaccccccaccccgagtgaggtgcctcgtcccagccccggctggactgtaccatcgggcggtgccgccgggatttctcccccccaccaccaccatcaattccccccccacccgggtccgcggtcggttggccccggccgggctctgagacgcggaaagagctgggcgccattttgggtgggactaagcaaagacgaaacaccctcccagtctatggggtagtctggaccctggcttatctggttcccttaatcctttaggtacttacacgacgttgggtgaggggagctggaagatcagcgggtccccgatcctctctccctaggggtgatagaaatcaaccccccccgccacctccaggtggttcttcccgccgcagagtgggagcagcataaaaggcggggtcttattagcataatctgcctggcaacctgatctcgacgttatatgattggttaaactctgtaagccccatgccgtgcctagagacgagaaacgctggggcgaactgacaggcccagatttaggagtcatgacgaagatcctgagacgcttattcagtctgcagagaagccaaaaggagattcacataatggcccaatgactgaaggcctctttatttcgtgctctgctgttcgtgtaaaacccaatcgcagagcgggtctcaggcggcgctcgcctgcgtttctactctcagccaatcagaaaacccgactcttcgcattggggtcaagcccccgctgcggcccgcgtgctaacggggaggaagcttccagctgtgcctgggtgtctcgggcgccgagggcagcctgcgcccgtgctaagcccgcctcccgcgcgcccgagggcccggtgtcccggaagacgcgcgggggtgaggcggccctcgcgtccgcccgccccgccacagattgcctccgaagtggcctggccgtggagcgccggcgaaaaccgaactcccgcccggctcccggagtcgggagcctgccggggtctcgccctcaggacccccagggagcggccgggcgccgcctatcaccctgacccaccgcaccttgagagcgctttcactgcgcctcttttttctcctctaccaatctggaaaggaagtgagtgtcatttcagacattgagaaacattattcaacactggttacccagtgactcagctcactccttaaccgcaggcttccacatcctgctgtcccttaaaattgccttcacaaagggcagccaagagcccagctttggagagatacccagctccaactacccactggcaggcaatacgcagggcagctagatggcagagagaccttggaccttcggaccttcggggagcggttttcccttcggtgatatctaccttgctatgttcgtgatatctaccttgctacgttattttgaagattaagtgagctcttactttaccgagtaaagtgctttgcttagcacactgtctggaacttaaatgagaagtactgacaatataacttacaaaaatcctaaactattgcctgagaaaaagagggagacaggacagctaagcaaaagacgagaatagaaaacacccacagcgtgaaaaactgtaaaattaactcaatagtattctctttactgttttttgttttgttttgttgttttgttttttgatacggagtctcgctctgttgcccaggctggagtgcagtggtgagatctgggctcattgcaacctctgcctcccgggttcaagcgattctcctgcctcagcctctctagtagctgagattacaggcatgcaccaccacgcccggctaatttttgtattttcagtagagatggggtttccccatgttggccaggctggtctcaaactctaacgtcaagtgattctcccgccttggccttccaaattgctgggattacagatgtgagccactgcgtctagtctaccattttgtttctttaaatagctggaaacaacgtggaaagaaaagagagct

SEQ ID NO: 57315 - DNA, 2977 bp, Homo sapiens
catcacactggggttcagcgcttcggcacacacattaggggtggggacaaaattcggtccatagcaagagccaaattcatgccagttccagaactagtatcagcacccaagataactgggttcaataacactgggcaaacatttatcgaggactgcactgtgaggggcactgcggcatgacagacccaagtcttgtcagtgacctgagagaggtatggaataactagggagcgagtgccacagtgggaaacatccctctgagcaatcagaagcgatatttcagccgactgagccgaggaacagtgaaaacgcttccaacaggcagatgttggggagaggacattgcaggcgcagaagagtgttaggaagggctgtgaaatggaaaggtgtcgtcttggaggaatcgggcagagccagtttacccacagggaactgggcatgtaggggagagtggtgcagaataaggctggaaaatcccgagttcttacaggcgcactcgtctactccgcggacagtctcttcctttctattgtcagcgtcctgggggtagggttgtgttatgcatttagttgaacctgaagggactagtccaggtctctcagaaggcagtacctaactcacaggcgactgaaaggaaacaaggccagcggagccctggcggtggcgaggctgtgccaattgctaaatggggcagcaggacgtttttctctactgaagtggcaatgccgcggagcaggaaggcagagtagcaggtctcccgctagtgcgtctcaaccgaagaagcggcgtgatctcttcctaaaacacacgaggaagggggcctgggctgtgaggccggcgtggttcttgcacccctggtctctatccctgcctgggcaactgctgggaaggaagggtcggcaagaggcctaaagaccggaggccaagggtgcggagcgcggccggactcagaggcgaggacccggcggagaggcctgggcggagcagggcgggagaggcgcgccctgagtagggctcgggggaggacgatggctgcctcctgcggtcctccccctgcctcgggggacggcccttggcagaccgtcccggactcctaattcatcctgtttttaataaaaccatttccagaatcaaaaagagggcggtacccaaaggagtctgaagaatgcccagcaggggcaggggagcggggcgtgcccgtatcgggaggctgaaggctgacggaccagcgcagcagggacagataaccgcgccggggggcggaggccagagccagccccgcgcccacagggttgcggccccagacccgccgcgcgcacgcccccgcgcctggcggccacagggtccggagcgggggcggggccatccgcggccgggggcggggccgggcggggggcgcgcggttggaccgggcgggaggagcaggctcttccatctcctgattgggtctggaccgcaagggggcggggtcttgaggggttctgcgggccggcattgggagccgcagaaggagggcgtggtaatatgaagtcagttccggttggtgtaaaacccccggggcggcggcgaactggctttagatgcttctgggtcgcggtgtgctaagcgaggagtccgagtgtgtgagcttgagagccgcgcgctagagcgacccggcgagggatggcggccaccgggaccgcggccgccgcagccacgggcaggctcctgcttctgctgctggtggggctcacggcgcctgccttggcgctggccggctacatcgaggtggggaccgggcgaacgccggagagtcgtctccttcgcccgccggaggagcgcggactgcgggcgggcagcggggtccgcggcagggcgggccggcggtgcggcgccgggggtccggctctgcggcgggtctggcgcgccctcccccgcccgtccctgcttggcgcagtgcttagcgctggaggtcgggctgcctcagccgccgcagaggccaaatgaaaggcgtcggggctgctgggggcggccgtccgcctcggccgacccagcccccaacccgcccgcggcgccgccacctcctccggggacccagtgcccccgggcgcccgccccgccctcccccgggacaatgccagggcgctcctctcccgccggagtccgcggctgggctttctccaggggcggccccgcgcggaccccgtacgctccctcgcgcggcaccggggcctcggctccgggcctcccacctgcgagcggcgggcttcgcctttgttgccaggtggacgcggccccggccttcgcgcgcggcagggatgctgcgagccccgggggagctcccgcgccaggccgcccgctgctccctctgccgcctggggccgggtcgcggacgcgcattttttaagtggcgctgtttgcctgcgtccgtagaccgaggaaacccgctctgggtgcgttgaccgctttcgtgagggtttcagtgagtagggaaggtgcccgcgaaggcgtgtaaactgttggaaaaatcgtcctcttcgggtgtcagaattccatcagtggttgtgcttcgaggtcgcaccctgagcatccccgctgcgagaaaggcgaagcggcagggccgggggttggggaggccgcgggagggggcgggggcggcggggtccgcggtgcgggccggagcgggcagccttggaggagccctgctgtggccgagggagacggcgagcttgatctttacttcccttctcgaagtggtgcttgaactgctggtctggaatgtgtagttctggtgtcgtttatttcttctccctcttcgctcttttaaaaattacaactggtttctgcatacttagctaatttcagagagacctgaagactggatttgattgggcattaattgagagctttcttttaaagacctcaggtttagaatatatttacttctacagaatgttcaagtatttccacgggtaaaaataaatctaataaaaagcct

SEQ ID NO: 57316 - DNA, 1838 bp, Homo sapiens
agactccagagggtgccaaaaaaatatttatcccagttcctaaatgtctctactctgtggggaagcaacttgtcctcagcaaggctggcctgagctggagctttcggccaccgggcctccaggctccgtccagtctcaggcctcccccagcccatcccccagctcgccagcctgtagcattttgaagcatttgacgtcactgcctctgtcctgctgacactctgaccattttcacacagctgtctgctcccaggaggcgatgacggggccctgccgggccgtgatgcctcgttggtacttcgacctctccaagggaaagtgcgtgcgctttatatatggtggctgcggcggcaacaggaacaattttgagtctgaggattattgtatggctgtgtgtaaagcgatgagtaagtcctgcctcgcgctggtcccgtgcggcagcaccgtcctgtctggcgtccgtctccctgccgtcttcgtggctgcatctgtgtggtgtccctgcccactcgggtgtttgctgtcggtcgtcttcccctcatctttgtgctttctagatctaggctttgctctcctgccggcagtggtaagctcagttctcgtgtcctgtgctcaccgtgtgtctggtggtgcttggtggtgatggtgcgtacccaccttggtatagcgggcagcacagccaggggcttgttctttcttgtctggctttggagtctgcaggtccccaggccactgtagtattggtggggaaggcagctgtcccctgggctggctctagcttagaggcactgaacattcctgtctttgaactgccctgtcactgacccctgtgatgcatgccagctcatggggcgcctcctctcgaaaggagtgacagtgaagtactttgggcagtctagaatattgaaatatcttgcataatgcactctagagagagctagcagccaagtggtagtgactcactctgtttcttcaatattttgcaaccgggtcacacagctttaggaagtgagaggatttcagttggtgtgtgctttggtgtgacaggaaggtcagtggttcagttgagttgggtttatgctggacgttggtagaaagagtttctaccaagagttttcccttttctccatggctactcctttttctcgttaagaccttcagtctctcaccttgcagcactaacctacacattaggaaaatcctcaggccagacagtttttcttggttcctactctggaatttgttggagtaataatttgctatgaagaatttggctatagcttctgacggtttttcattcacatgccttcatgttccctcttccttccttctaccaaaagatctttcaaatcttaatgtaatatggcagtgccttgagtgcttcccttccagctccaggaaagctgtttttattcggtaacagttgaaaggtgaaagaaaaggaggccttagggaaccttggtgaataaactttgcgttttcaggaaagatttagaaatagaaattattgtgatacttactgctttgtaaaacttggactgaagcctgaggaatcccactgagtgtggaggtggtgatctctacccgaagggtcagctgggtggtgctgtgagacatgatggagtggcaggtctgtaaaactcccgtttgctgtggcttggatgagatttgcctcggagaagctttgtgttcatgttcttgtggggcctctgcctggagggctttgcaggttgagaagcatcaagtttacttccagtgggagcgtttttgttcttctttgaaggggctgaggctggcggatgtgccggcttcatgagtgggtgattccacagggaccg

SEQ ID NO: 57317 - DNA, 943 bp, Homo sapiens
ctttttaaatgagctttcaggaagttgctgagaaatggggtggaatagggaactgtaatggccactgaagcacgtgagagaccctcgcaaaatgatgtgaaaggaccagtttcttgaagtccagtgtttccacggctggatacctgtgtgtctccataaaagtcctgtcaccaaggacgttaaaggcattttattccagcgtcttctagagagcttagtgtatacagatgagggtgtccgctgctgctttccttcggaatccagtgcttccacagagattagcctgtagcttatatttgacattcttcactgtctgttgtttacctaccgtagctttttaccgttcacttccccttccaactatgtccagatgtgcaggctcctcctctctggactttctccaaaggcactgaccctcggcctctactttgtcccctcacctccaccccctcctgtcaccggccttgtgacattcactcagagaagaccacaccaaggaggcggccgctggcccaggagagaacacggggaggtttgtttgtgtgaaaggaaagtagtccaggctgtccctgaaactgagtctgtggacactgtggaaagctttgaacaattgtgttttcgtcacaggagtctttgtaatgcttgtacagttgatgtcgatgctcactgcttctgctttttctttctttttattttaaatctgaaggttctggtaacctgtggtgtatttttattttcctgtgactgtttttgttttgtttttttcctttttcctcccctttgaccctattcatgtctctacccactatgcacagattaaacttcacctacaaactccttaatatgatctgtggagaatgtacacagtttaaacacatcaataaatactttaacttccaccgagactgctcgtttcactgactgcggcattgatctgcgtgat

SEQ ID NO: 57318 - DNA, 846 bp, Homo sapiens
gggcatggcagccaatacccatccagctgctcagctctcgagtctcttacctgttactcacattcctgttgctgatgggttagagaggagtttggggctggtgaaagtgcagtggtttctatttacacgttcattacccaaatggggtcattgcagagacagtcggggttagctgagaactggggaggcctgagagatgacgtggaaatgaatgagaggcagggctgccaggcggcctcaccctaggcaggctccactctgctccctggtggctcacccacctcccgggaactgagagaagctcctggtttctgccttggtgactcagccttgacctctggggaatgtggccctgcccaccttgcggccagcctcaggtgctggtgctgacaggtgcgaaggtcctcctacctgcctgtctgctttcagttgcaaatcagagctcagcagctgaggtttgagccaggacatcagatgccctgatctctggtttctgttgctgtgacaactgacaaagctctttaggaggtacagatgaggatgtaatgagtccctaagttttggagaggcccaagggtccactatcataggagcaggtgaaaaagtatttaaaaaaggaacatgctgtcttgcggtactttgaagtcatggacatagacagaatggatacagggaactggaagggaccttatgactcctgattatttcacagctgaaacatggccacagggtcacacgctgttaggggcagagccaaatgctgtggttatgtacaatggactcttttctggggcaaagggtaaagcggtccttataagacaaggaaatgggtgtcagctggtatct

SEQ ID NO: 57319 - DNA, 972 bp, Homo sapiens
acatgggggtcttgctatgttgcccaggctggactcaaactcttgggcccaggtgatcgatcctccttgtctcagacttctaagtagttgggattacaggcgtgagccactgtgcccacataaaactttagagaactgccttttttgttctctagagcatgtgctgggcaggtgtgtgcagtgggtgaggaagagggttgggaaggcagaaagcagcaggaagctaggattgtcctgtaggtggggcttcagctgctggagtggaccggaaatctgccttctccaggggctttctggagccttccctctgccttggtcctgagaacacctggaaattcctcgtttaggagttgagaaaactgaggaagaggagaagatgcccctagtttgatggctgccttcgcctgctagcagtggaaatggtcagagggtggacctgctcgagccgacttgctggcctgttgccacgttgtcaccggctgcggaaggagaacgagtcacagctccctccccctacctgaccctcactctgctccctgggaaccagactaccagactgcctactgctgtggccagtggcttctgtccctcggaacactgtggccctcaagttccctgatgtctgctccttctctggtctgtggttctgccaaggctggtggctcatgtctcttttaaaagagaagttgtctttggaagaggaagggaaacgtgacagagtcccctgggagcccaggtcctgaagatgatgttgcttctgatattgtgcaatgattactggagtgtctagaatactaataatgatgaacactaataatcgttagcatttattgagcatggctggctgcttgtcttttttcctgccaagcttcattgaactaactgtgtacctagtcctgggtcaggcatggctgaagggaagtaagatgtggtcttactagtctttgagaccaagtattacccttctcagag

SEQ ID NO: 57320 - DNA, 2497 bp, Homo sapiens
taaaaagagtctcctggtgtgagctgggtcatttgtcggtcttgccgggaagagtttctgatgttggcagagccttcgttggcagatgctgggtgcttatcacgaatgacagcaaaatggtgtcagtgaagagggcatcttgaggtgccgaagtcctgctctttttaagatgaagtctttttctaagatggcgttacttatgtcaagggtgctctgtacaaggctcctggtcccttgggctgcgtggggagggccctgggcagtgctgggagttgggacgggacttgaaacctgcaggagctggctgctccctggcagagaaccgctgggtttctgtgttgacaacgtcctcacagctgggctgagtcaggtcctgggggactttccttcaggctgtaaccaggtgtggggacttgtggtttacttccttcagtgggagttcttggccgtgggtcagctttgtgttcccctgatgggctggggttacagatctacagatatttctggatcttccttggggccctgcagccccacctgttttccagcagctccttctggcggggcggctgagggcggcgacgggtcaaagggaaaggtgggcgggccggggttttggggtgtctgccagcagctggctgggtctgcagctggccctgtgctctcccaggaggagctggagtgtgtatttctgggaaaagtgatagcctcagggacttctgggatgatgcttataaccaattgtgggagggtccccagggcgtggaagcaaagttcgacctggcacagcagcttcccttcatcccaggtggttgctcaaaatagaccagctgagactctaagccagcttctcctcctggtgacaggaaggggtgagcctcctggaaatggtgggtggagtttctccaactttcaggttcccaagaatgacctggagcacttgaataaaaacttccacatccgaggccctgctcctgatgcatgacatcagcacctccagggagaggggcttgggaatctggatgtggaacaaacactgcatttgtttcagttgattgttattgttctttttcatgaccagacaagtccaggaaatgctgggggttgcgatcaatgggaaccataggcttttgcaggtttcgtgaaaattggcttctagagagatcgattacccctggttggggagtgggtgggaggattccagtgtggcctttcttttcctttctcatttgcccatcggtcatccccagataagcactcaagtgtcctcttttatgaggccccgtgctgggccctggactgccatggtggcaggtggggtgaagtcccgccctcaggagcctgctgaccgcctgctctgtgcacagctgctggagcttccccggggctgctgatttaactggggagggcctgtctatgtggggtccctcctagccggagacaggtcccttttatgaacagcagcctgatgaagaggccttcctgcaacatgcctctggtatcattctcagctcagcattgcccaggggacaaacacagagtttgttcttggcagtcattccctgctgtcatctcaggtgggcttgagccgtgctgggtttccgggaaatctggccaggatccagcacaacctttagccagtccggcagggagcggccacgaggttgtgctggctcggtctttcccttgcaaaggaaggcatcttcgacctgccacagaatgctttcttccccggggaaacccttgcaggtgctcgggctctactttcctttctcgcttgaacaattacagggatagtttatggttctcatgaccctggtgggggtgatgacatcatgggattgaaatccgtcccaccttggagtcaccgagcgtgtcagtcaagagccttggccacaaatcagtggcacttggcagcagcacacaaatccagccaccctgtccttgtctcaggtctgggcagcacagctgtgtccctagctggtggcatcgcccctgccccttgaccttgatcttcagcctcagaagcaggctacccattgtcatgtgactgcccttcacggtccctccccaggattccaaggggcctcttgaggtttccaggttcagccgcttccttcccagcagatcacacccaaccttagccacatgaggaacgatctttagaaagggtctggcccgaagcttcatttttccctgtctgctttggttggaatcttgtgtggctttgtgtgcagttggtagtatttttgttgttggtaagtgtaggggcccttccccattgcttttctctaaggataaccatgctctgagcagcccatggcaaattctggctttggacttgttggtccccagagccagtggggtcgtgggccctggagagtttgcactcagtggcaggtcttagtgtgtgtttgaggaaccaggagagcgttcctctcagagggaggattctctggttgactcacacagagttttgttggctcagcatttagctttc

SEQ ID NO: 57321 - DNA, 1757 bp, Homo sapiens
tctctgacttaatgggagtaggctggctgcaagaatctttcctatattatcaaataaaataggtctcttttttggccctctagaaatcagtgttttttttcttttcgttttggagagcccggccttggggaggatatgcatcagttgctctagtgtgcctcagacaatgagataagatgaaatagggcgtgctctaggacctctccacttccccttcccgggtttctggatctgacccttcgctccctgcagaaagttgggtgagatggcaatggtccgatctcatccctgctgggtgggatggcagtggtccctcttgggtgagatggtggtggtctgatcttgtccctgctggatgggatggcggtggtctgattttgtccctgctgggtgggatggcggtggtccctgctgggtgggatggtggtgatctgatctcgtccctgctgggtgggatggtggtctgatctcgcccctgctgggtgagatagtggtggtccctgttagatcctggccctttagggtctgtaccctgcttgtcctgagccctttatccccaacctcccgcctggaagtcattcctcgttcccttgtctgagtggcctggagccgagctgtgtttctgggtcctttggccaggatctaactacagtgggccagcaggaagaggctgtgatatttacatggcctctatctgtgtttatggtaagcagacacacctggcttcatagcaccgttttatgtgtgcacctgcaaagatgtttacttttaagaaagagagacaggagaagtgaaagcaggcgcaggcataggatctctcctgtcggctgtggcccagtagagaggtgttatgcctacagttgtctaagtgtctaagtggatgggagttccctgagacctccccctcccacctcccccacccaggagttaaaagagctttgctgcttcactgactttattaactttgtgaccttggacaggccactccctctctttcatcctcagtgttcttatcaataaaacgatgggattatgcaacagtatctctgttacacctgaaaatggagccaagagctaaggttataaaaggaagcagcccagttactgattagacagcacttttaggctgggtggagccacagaactcacactgcagggaggacagaggacccaccattgagctagcgccactgctgacagcctcgctccgtggcagagtctggggtgacccctgagtcaatgccctcagccaccttaccccttctcatgggagtctctgtcttctgtttccctgaatccttgctcccagaattctggaacctaaccacactgggaggcagtaaaccaggaccagattctggatctgccaccaagtactgggtgaccttgcaaaatcagcattcttccctgccttctttatataacacgggtgatagcaccagccagtcttgaatgagtcacaggactgtcatgaagatccagtaagaaaatggttgtgaaattaccctgtgaattggatatacatctaaacatgataaattattatttcattacatttctttttttctttgtttctttctttcctttttttttttgagatgaggttttgctgtctctgtctcgcccaggcaggagggcagtggcatgactatggctcactgcagcctcagcctccctgggttcagatcatcctcctgcctcaacctcccgagtagccaggactacaggtgcatgctgccatgtctggctagtttttt

SEQ ID NO: 57322 - DNA, 2279 bp, Homo sapiens
ggggaaatgaagatttatacagtattttttaaacccaagaattccaactgaacacctagagaaaaggaaatcaaaatcgtgcagcttgcttccggtatcagccgatctccaaataaagcattaagaaaataagtggaagttatggagaatttcttcctgacttcaagagattatctacttacacgctgaaaaagaaattaagtttttgtcttcatttttgtaagttccaaaaaaaagcacacaattacggggttttattgtaaattctgcttggattcatagaactcacatggacgcaatttccttttaatcagttctaacgtacctgtcatttctcgaggtaacccctttttctgattaggccagcaataaaacgactagatgcagagtgatcctcaggaaggaaaggaaaagaggtgtgtgtgtgtgtgtatgtgtgtgtgtgtttgtgtgtgtgtatatatatatatatatatttttttaaagaagtgccatctttttctttctgtaccagagaaaaagcagaaggggaaaggaggaaaaaaaacaggtctgagcctcccgggttcgaccaggtgagaggtggcaacactccggccgctccgggttagggtgttgggcaaatgggcgtgcaaaggacgggcagctccctggaaggtcggggtaactgctccgggaccgcggggcccaaggccggtctcctcccagaaggattaaatgccaccgaggggatcccgtggggtgtctcccggcgcggactaggctgacagacccggctctccgctcccttcggcgccaggtgggggccacgcggtgtcagccacgggcagcgtgcaggggccgtcccccgcgcgaccggagcccgccctcccctccccgttacctgcgggcggcggcgccgggcccggaggcctgctgctcctcctccttctcccgccaggctggggcggcgaggcggcggcggcggcggcccggggggagggggcggagcgcggctcgctgcctctctcctcccccgggaggctcaggggcccctatctcgggccgccgcgcctaggcccgtgagcagcctgtggtggggcatggcggcacagccaccggcgtgcccgcgagtgggagtgcgaggaggcggggagggaagcacccccagcgctcggaggggccagaggggaggagcgagggggcccgggagccgcgcgctggcgaccgttggggacggttggccgagggcaggcggttgtttggggagcgcggcgacggctcgcgtgttcccagcggggcggggtggggaaggggaaggggactgaggggaggggagggggaggttgggagggagccgccgccgcgcgcgtgcggccggcgccgccgccgttgccgctccgctcactccagcctgtttgggggcactttgtttgtgtcccacaatgctctgcgccggcggcctggctggggaaggggaggagaagggggcggggcggagcgcgctcgggggcggggctcggggcggggaaggaaacgtgatgattgcgcaagcgcagaaaatgggccctcttggccgtcgggacttgtactgttggtgactccgtctccttagacggtggagcctgcgtgacccagaaaggccgtgagtcttgacactgtatttttgcatatgtgcgcacatgtgccgatttacattcacatgccccataagccctgtcccatttgtccttcctctaagccgtcctcttacccagttcccctctcacacctgagaagcatttctccgcaggagtcacatttatagcattatttttttcttcgaactaaaaacataactcctattttctcgggtagtttttgtagggaggtcgaaatagaaacacttcagcccctcttcggcgagggaggttagttggtaaggtgcccattgttcacccatggaaacaggcctgccaagggccgccccgcagacaggtgagcccgcgcccccgtcctgggcggactgcgacatgcggcgggtgtctggattgcgtggctcctcgggcctcctcgcagtgcttgctctcttccgttctagcacttgcctcggtgacctggcaggacgtgcggttcttgagatgagtggagaaacggactcccaggtccctctcgttcttccaacacagggacagctagagctgctccaaaaatataccctacttcttccacaaccgtgaatctgtcatttttactgcaccatcacttacttcctggccttcccggaggaagtgtgcgggcctccccgaagtaaccggtac

SEQ ID NO: 57323 - DNA, 959 bp, Homo sapiens
tggagagggtgtgagaaaatctcaaagaagattaactttgcaggagccctcttgtctgctttggctctgggcagggtcagtttctgtggcttctgcagcctcccacctttttccttcttgagctggtagagacttgcctctgggttgctggaatatacacacctttctttgacactaggttaaataatactgctgggaggattttgtgaaatcagaatcctgtacacaggtgaaaaaaacaaatgtagacagtatgaggaacctttaattattaacttggtgtggatgattctgaggaattcaaattccaggcaaattccaggagttatatttcagccacgagctctttgggggaataaattctgcaaaagatggcacttccttgtggaagaccattataactgaatggaaacttagttatttagtccaaaagcattagcattaaggcatgaatcctttctacccgaccttgcctccttattagattagattatacaactacatatataaaaaattaatctcactctcttaccctaaaatttatacctcttctagtgttcacattttaccattcacccagtgaagcagggtgactttgctactttactactgtatctcaattccaatccatcaacaagtcctgttgaatgtgtccctctccactgccaccgtcctaaaataagatgatactagcttgtgcctggagaattataataccactcacgtggtttcccaaatgcactctcccttttcctcattctctacatggtcgccagagttgcaatgcatagcagtgatgtcagccaacaatggcttcctattgctccccggataaagtcccaaaccctcagcgtggctttcacaccgctgtgcaatctgggccctttcactgtcttgagcttcatctcttagctatgcttttttgggaaatgtgccagttgcagaggcagttttgtttt

SEQ ID NO: 57324 - DNA, 579 bp, Homo sapiens
cacactccagcctaggtgacagagcaagactctgtctcttaaaaaaaaaaaaaaaaaaaaaaaaagatagggtataggtgtaacagctgggaggaagagagtgagtttgactttgagcaaattgagtcaggtgggaagttggaaacatacccagcctgtgcagaaaggagttatcacagcgggcctgacactgctgttcatagaaacacctgcctgcaaggttggcccttggctggcatctgggaacttggctctcagagcatccctagttaacagttaactgataaggtggttccccatggctagactgtctgtgcagacaacacaatttatgccaaacacctactttccatctgagagtctaggattttgctaggcagagggtgcccatgtgaccagaccccagttaagacctttgggcactaagtcggtactgggcttccccaggcagaaatgtcacacgtgtgttgctgcatttttacggagggacagtgggctctgtgggaccctggtggtcggaaagagcataaggaagcctggcatgggttcctctagactctgcctgtgccttgacccctt

SEQ ID NO: 57325 - DNA, 1246 bp, Homo sapiens
ttctgttcctgccatttgtattcttagtgactaactgccaagtattgggttcccaaagttgcagaagagatggttcctgttctcccaagatacagtcttgtggaggagtctagcaagaaactcgtaaaaggttgcccaagactccatgtggaatgcatccatgattacaatctgtgcttactacagtacctggccagtaagagttacttgcacattttagtattataagcagtaacagttgccaccatgagaaccgagacataggtcatgcctgtctcaccacattatggccaggaggtggcactgttggaacttgcgctctcgctcgctctcggtcgctcgctctcggtctctcgctcgctctctgtctcgcaactttctaaaaaattaggcatcactgccgtgtcatgccagtctaaggaaacagtccttcaacattgttcaaaaaatctcagcacacagcaattcctcatagccaatcaccggagccagctgaaggaggctctgtcctgttcctttgtttagcgtgagtcgtgcgtctctccttcctatttattcttgtttcttcactttgatttctgctcttcatgacaccagtgcctctcaactctaatgatctcacaggctgggagagcttgcaaagctgagatgtctccagggccggggtcaaccttaatcatgaggacggcttggtttctgtacaccccaattaattaatgcaaacatgtatttctcccaaatcttcactattgattgtaaccagcaggtgggagtgttggcatatttaccttttatgggtcctggaaggagagggtctgaaaacgccctcaacaatgcatctcactagccactaaccacttcggagtttatatatacatgtaatatgtgtaaatgtattatacaaacttgcaaaactacacttatttatctttgttttagaaggaaagaaaagggaaatgcaggaaaggagccaggatcttcaggatctggggtgatttctccgagcagataagctgcttattgaaagtcactgtagcaagtcccaatgtaagtcccattgtaacaagtcccttttacaaggaacttggaaaaactacccagttcttataaatgtgcttacagtgagttagagttgaagtgctaagaagcgtgcctggcacacagtaggcatgtttattgttttctatcatcatcatcctatcctcatcatatatattcccatctggcctggtgcaaagtatttaaa

SEQ ID NO: 57326 - DNA, 1748 bp, Homo sapiens
cagcgagctgagatcacgccattgtactccagcctgggcaacaagagcgaaacttcatctcagaaaaaaaaaaaaaagttaaatcagtaaatgtcatgttatgtgtattttaccacagttaaaaaaaaaacaaaaaacagcagccaaggtggatagcaaagtacaaaacatgcaacagcaatgacagtagcagcaatgatttgcacccagttcttaagtgcaagcagcataacggggaattaaacagctccctgtcaaggaaggcttgaggagaagaagggcaagcatgtggaagccccctgtgaaggctctccccatgcacactttcatcactagggccttgctctgtgactctgacctctcttcttgcccagcatggtccctgggacctaagagtctgcctttcctcaccagaatacagcccccctccaaggctgcaatttttctccaggggtcctacctgggagcttagctgtcaacaccaccctctcagatgctcaccgcctatggcatcctgcaccactaaagcttgggcaaacatcttgcgctttccttttccttagttaagagtatgatatttgcaaaggaactttactaaaaacaaacaggaatagatgaagaaataatgacccaagttacaaattgcataagcagaaaagtagctctactatattaaacacataatcctacattcatcacaaaattaagtgcttgacatactcatttttaatttttgcaacactctgaaaggacgttgtttttgtgcttctttgagaatcaagggagctgttgctcagaggtcttaggtacacagcaaagctaaaccaagactcgcaccctggcctgactggctccaaagtctttctttttacctctgtactgctcctagggttctcattcaaaggaggttcatagaaacagcagagagctttaacagatgccacaggctccgtgagaaccatgctctaccccttgcttgcagacacattttaggccgtttgcctgcctctttgtctcttagctcctgcctcatcagtaaactcgtgggggtaggagctttcctggcattgctcaaccctgtacccgtaacaccacaaacagagcttggcatatagtaggtgctcataaatatttgttgaatgggtgaatgaatgatgactgatctctcggcgacattacattctgccccagcattcacagacttctctgcccgtttatcttgtgctgctgtccacagacagacgtccactttcaattgtaactcagttttcagaccccacagccttcttttttaataatagtttctgggtgactctattagctcttagttaacttatgagctccaccaaatgagctagtcctttcgtagcccaggttaccttcttgaactctctctagaaccacacagactactgtttacttaggtgagtcataacggtggttgtgatcatggtgatgatgaataactaacatttgtggggcagttaaatattctaggcatcatcaagtgaaggactatgcaggcatcattgcatttctttgtttgtttttgttttttgagacagggtccctgtctgtcacccaggctggagtgcagtgatgccatatcagctcactgcagctgcaacctcccagggttaagcaatcttccagcctcagcctcttgagtagctgggactacaggcatgtgccaccatgcctggctaatttttaaatttttattagagacggtgttttgccatgttgtc

SEQ ID NO: 57327 - DNA, 472 bp, Homo sapiens
aactttattcacaaacactggcagttggattggctttggcccagcagtttgtagtttgccaacccccatctagatgtggagattctgagctatgggcatacagtctttggggttgtaagtcagtcttcccaagatgagcttttatgtacactgggaagctggtgttgtaaggggcctcagataagcctagactggtatgaaatctagtcccaccctctcattttacagatgaagcaatagaagctcagagaagtgaagcaaatcacccagaatgaggcaacagaactcatgctcctgacactgagccagggcacagcagttgctacatactttctttgagtacttccagtatgtttccaagagctttaacaataataacacctaacatacagatgtttgccagtttatcatttagaatggtgagaaaatatatcttgttttatatatgaacaaattgaagctcatagacttt

SEQ ID NO: 57328 - DNA, 669 bp, Homo sapiens
gagaatgcaaggcacttgctgaatagtggtcattaggtatggaataattcaggtagacaagctcagctttagagatgctccctgcagcttttttcctcccgggggagagaggtggagagtaactgtgtcttggtggtcaggtacacctagcacagtacagggtgcacagacagcaggacactgcctggtttatatcagtcccaccccttccaccctctcagtgacactcagtgacactctgccagggcaatggtgcctggcgacctcttcccactcacattcctgagcactgctgaacccagcccagctaagcaaagcctgccaagcaactcggcacacagagtgcagtgaactgcctagaagaatgcagggactgaggccaaggtctgcttggctttgttatcatttattttggtgtatttatttaattgtatttgcaatttcttcttcattttccttctttgctcttggatggcacgtgacaaggacttcctggcatcacatctaattatactatttttaaattttcccttcacgccccatcactggcaaatgtttttcaaaaaacttgatgagattaaaactaaattgaccagatggcttctttgcacctaattaacacagtccactggtgccagatttccagggcacagggacccattatcctca

SEQ ID NO: 57329 - DNA, 926 bp, Homo sapiens
ggctttgtctttttcattcctgaatccgaagcttacctgctactagagaatttgtgaatttccgttgaacacgtggaagacctaggaagctgtgggggagaaagaatgaatgactttcttcaaggcctcctggcaaagcagcagtgcagcgggaaccggagccggaggacgctggctcctcacctagagccctcccttgggtcagggtggctcttctctcccatacctagcgtccggcgcttggctttgtttcccggagtgggtggcactgtttggccgccacaggcacagcatcgcccctaggcatcgccctccgcacccggggatgcggcgtccccagccttgcctttcttgatggctaaagcaacagcgccaccttccggcctcaaggccaccgggcgtggccggacttgggagaccttgggcgccctcttgtggaatttcagaagttgggctgcgaaaatgactccgttatccccagctgaccatgaggcccgctgggcacttccacctctgaggtttgagtggttcagtgggcctgtgcagggaaacccagcctagaaagcaagcctttatagctaccttggtgtagaagatcagaggcatatgaggtgagaaacaggtgacatgtcacgctccctggagacaaaatgtccagaaagctcctctaggcagcaaataaagaagttatgaaaaggaaccgtggagaaaaaagaggtgaagggaaaagaaagggaatgttattctgacccacatgcctcaccgccagggctgaagtcactactaacaaggccatttaggaagagcaggctggagttgacagcctttccccaggagtcctctggtttccaggtcccccggtttgaagcactcaggaacacactcagcccctgaatcttcactcagttccgtggtgttactggcaa

SEQ ID NO: 57330 - DNA, 1870 bp, Homo sapiens
ttcaggcaaggaaggagtgagcagagggagtcggcagaagtgggcatggcctaattggcaatggcttggttggaacaaaagcatctcacagcagagccatgggaaataagaggtgtgaggaagctaacccaggaggaaggaagtggcctgattcctcgaggctggataagaaggcgctcctctgaattcaaatgagactccatgatcaacatggtcaggactttgatgctattattctaggaaagggttaatggtttccccttgaggcgtcattctctaagtgctgaaagggctgtatacctcacaggccactaggccccacctgccccagaggcccagttaaggaaggatggctgcttagcgctgcctccagggtggagtcttctcatgtgaatggctgctctccgcactctgcctaagtcctccagctgctcaagggccttgtgaccagaaatcacctttctgaaagccaacctgactggcccaggagtgagcccatctccatcccagcctgtgtcttcctgtccctactcctgagtatgaagatgtgcaagaccctaacttactggagcacggcttggagcctcgggcatcagaccctgtgtccactgagaactgtggatgtggaatatgcccaggactgcattctcagccgtgcctgccagccgcacactggtgcccgcctgctgcaccatctatgagataatgtctctccattttgggattgtgacatagttacatcagacctcaatggccagtgcttgcattccaggcctgagatcagtgtgacagcagagaaacctgagccgcgagggacattctcaggctcaaaaatcacaaacccgacagggaaaggaatttgatcagaaaacgacaccatttaggttattttaatgcctggatctgagctgccctttaagcagagccccttctgtcgcaggactttattaccaagtgaccccggcagatgactttcatttgtttttaactgtagaacaaggtcatgtttgcttcgggcatactacatggagtggactttgggtgacagggtaagccctggctcaggcctgtttttccatgcacgcagcatgcaggctgacagggcagaggccaggttctgaggctttgtagcagatggcctcctgtgtgtgcagggagaacttcttccactcttgcacatacgactcctaaaccttctacctttacggaggcatatactgttgaatgccacctaggcattctttgatcatctgaaacttgcgactaagaggtgggaagagacaactgtcaaccacttagaagtgaccattagttccccgaacagtcaatcaatttaggaatcaagaaacatttgtgtatctatttactaagcattttttatgtgcaggagagagtacaaaccaacatgcaacatagtcttcattcttaaaaagtacatagtaaaggtatgaaaaacatttgtattcagagaattctaagacaaatggtcaaatattcaaatggcctggcactagtggtaattccagcagacaaacagcatgagaaaaggccgggagacagtaataaatacgtgcccattgcaatgagttacccaatcaagcccttttacctccttaagatggcagattagaagaccctcttccccaggagagtgggagcgtctgccttcgggctgtcagtaatattaaataagagtgcttgatttataaattttaaaaacataagaaggtttgacattctgcccagagcaacggagggcagcgtggtttaccagcgaaaggactgaacagagtgccaggagcccttagctctagacttactgaacagaaagaccttgggtgaacttttcattgaaacactgaaggcttta

SEQ ID NO: 57331 - DNA, 2502 bp, Homo sapiens
agccatatcttctggtcctcatgactgtcttagggatttcctacatctgccctttgttcataatagttctctcactaacaagggcctcttctcgccttgcctgaagagcaagtctcaagtctgcccttctggcaagacctgtttcaaccctacttcctccatgaaatccttgaccatcacagctggaagtgctctccttctccatagacctcctttggcaggtagctctggaacaattactttggaatatgcatctttttaaaggtgtttatagctttacttcttcaactaaattataagctgtaagagttctgtgtcttgtactttaaaaaaactccccgccgtgcttggtgctcaagaaatggttgactgactgataactgttcttatttcaatgaaaaattttccctttgtcttactttcgaaaatgagtcaaaattttccctttatcttactttcaaaaatgagtcaaaaatgagggggaagatataccaaatctggagttcagctggaaacctagaaagtggttcaacgttattcttgatctgttcctgaatttttttcaaagtgatatggtcagaagtgaggttcaaggctgttgaggcctccccttcacccacctcatttaagactgacatagctgtgtgggtcatggatggacaatcaaccacttctattcatgcacggaagactcgtttgatcctgcaccacatggcagctcatgccatcactcctcgctcctatactcgagtcacttgtcactcatccaagagcagagggggctgccaaggcaaactttatttaacctccactctgccagacagtctgcattccactcaagctgggcattccagccatgagggctgcaatcccccaagcccaaggctcacaactgattctaagaataggaagtgtgtaaggtaatagcagggcaagaatggcagccatcgatggagatcaagagtggcacaaagctgttcttgtccaaaatagccaacacgatcgtatttgttattattagggccgcatctcctttttatagggcttttcattcagtgagcctaagatgcctgatgaaaggaatccagtagcaagaattcctgttcctgtttatgtaagagggtcactagagggaggtggctgcaatgacctgatcggcttctctgcaggggattaagtgacccaaggtctcctttcttcacctcaagccatgtatacttctgcaatttttgctgaggagaatgatgtgtcttagggtctcatctaactgtcttgagggagaggggcaaagtcttgcaaactaaaatctttagccacatgatccttcctagactgaacatgttgtaacatgccagcaagcctaggtacctcagccatcttctggcatgtcttacaaagcaagagttacattcttttgaatgaacattaatttatctgatggggacaggacctcacatggcattaggacaaggatatcctccttgttctcttgcatggtgattaagtgtctcatgtacatgtgtgggatgcaaaatgaattttatcatgtggcaaaatataaatttataaacttatacaaatctataagacagcttttcagactctaaatggaaatgttggggagagacataaaagtaggaaaagtaaaaataagcacctgatgatgaagatgagtctatgagtcaaataaatttgtggaagctaataagcacaactcaccgaagaaaaggagtgccatctctgagtaagtatcagctgctgatgagacaaagacactgtcaagcactgtacatacaaggcacagaactggccaacaggaggccctggaaaaagtcaggcccaggaatataagaaacaggactttcacaaactggcagaaataaactccctccaggcctacaaagagggacagagtttggaaagtgacttctagtccctgggagctgcagagtgccagctttccttattcttctccacactctgaagataaaagacacaaaccacacacttgcaccacgcatggtttaaacatttgctctctttcctggattctcctcttgcctacgttctgcccacccttccccctgtcagcaaacagaggctttatcctaggcctttgggctcagcatggtcttatttcctagtcccaggcagcctgtgtagaagaccaagtgcaacaaatctttcttgttcacagaacttctgagcgatggtgtctcgttaaaaatgatgagcacgccaatctggaaggaaaacatgataaagagcaaaccaaaaaaatcaccaccacaactgccactgccctcacacaatacaatctctaaattttttaagctgtaattcaatttctaagacacactttattatcactcactatgcctttcttaagttgtaaatggctgtatattcagggatttggtatactttgccttgcccaacacctggatggaaccaactgccactggttcttgagagcaatgaagaaggtggagatttcttcat

SEQ ID NO: 57332 - DNA, 1520 bp, Homo sapiens
atcacttaacgaagtgcctaccacagagaaagcaatcaataaatattggttactaagtgaattcatgctgtatatgggacaaacactggtcttaaagcatggcacacagttcaaaataggttctgcagaaagcatacatcccaatacttacaacagcaaaaacattgagctcttaattattcatgcttacagaggaagacaattatagattttaaaaaatcatggacaatataaaaatcctttatatttggcattccatatatgtttatatacacgtctgacagatttactttcctaataatcttttgtttaggctaataataaaatgaaactgtgggctaatacaccagcgatagagctgatgttgtaacgggtatgctaggtaataagtcaggtggtctagaactaagaataatccatgaaatgggcattcacacctggctatgcattcctctggaagggaagagagctggaaggcaagggagtgggtcagccatgctccttatctcacactataaatcctggaggagagagacagctgccagtagcttatgtttggtcaattttcctgggaaataggcccagaggatagaagagattgaaagtcaaacaaaaagcaaaggggggttatgaggactatgagtcacacttgtattttgggaagtgcctctgacggatggagcagcattgaattgattccaacccattatttgaaactagtaagaagaaaagaagagaggaaggtagcagaatgggggaggaaagaccaaaagcaaaggtcaggttacctttctaacaaatgtagaaagagaaaaagacacttggggtctgtgtatttttaggataaataagactgattgtaaagggaaagctctaacaatttctatatttgagtattgtgacatgtttaagatttcattctgaaagttttttcttttttttttttttgagacagtctcattctgtcgcccaggctggagtgcagtggtgcaatctcggctcactgaaacctccacctcctgggttcaagtgattctcttgcctcagcctcccgagtacctgggactaagggcatgcgccacgatgcccggcaaattttttttgtattttcagtaaagacggggtttcaccatgttgatcaggctggtctgaaactcctgacctcaaatgatccacccaccttggcctcccaaagtgctgggattacaggcatgagccactgcgcccggccaatctgaaagttttctatgcacaaatctagtgtgcctctgaagtctttcaagtcaacctttttttggccccatactatgttgctaccgacatactataatccagttctgagaaaatcaggactgacagactttaaaaatgacactgaaaagcgacagacaggtttgaacctggcttaaccacataaaagttgaacaaactctctgagctctggcttccttcattataaaatgggcaaattcttgccttgcctttttcacaaagttatcatcaagatgaaataagaaaaa

SEQ ID NO: 57333 - DNA, 2349 bp, Homo sapiens
cccagttctagtggccactgctttgtgggaaagcttgcatggaggggaagcatggcagagcagtgggaaacacatgagctctgaggccaggatgacttaagtggaatcttaaggtgtggttgttacgacttttatgattttgggaacgttattttatctgaatgtaattttcttcacttatgaaatgtagaactacatgtctatctcatagaattgaacattaatataaacagtacatagctgctttcctggtattaatattgtaataagcgtcagttcctttcccattgcaattactcgtgcacttttggtggcagacctggaggttctcttaagaaataaccaatgtcacaaagaactgttatccacctgctagttagacatgcccaccaagaaagaggcccttgaagtagagttccacagaaagcgccttgattctggagcgttctaagagaacagtggaagcaagagggttcatggtcaacctttcccaactgtccttaggggaggtggacgttgcgccttgcagcacagcactctccagtgctcccagactctgccgcagctctcctgacctttcctaggagatggtttagagagagacatcttctctaagaaagtgattccaaggtctggtgtaaggtctagagcttgccatcaagtttctcctgggtgccctgcttgttggactccttaaacctgcacaccctttcttttcttcttcctctctggatacttcctaactttacacacttcacgctcccctctgccagaacctttccccctggctttctgccaagccattccattcccacatgcccccaacactcacacacacacactctgtctctatcttacacacacacacacagacacacacacacacactccctttttaactgagaaatcctgacgcagatgccaggaatgtgtctgctgcccttttgacacaggtctgatgccatcgttggggccatggggagggcagcgccgcggacgtggcattcacgcattctgctgctggcatggttcctatttttatcgtggcattgctctgggtgtccaggcagggcgccggtccagcttctcattccttcactttccatcaggactccacaccaatcctaccccttaccttggctggatcttcctgccccaaaccccctaccatcaatgcagcacagtgtatctctcctctttccctccaacccagtctaactctgagtacttgcccagtttgctaaatctgattctgatgtttgcagagatattttcaagtttcttctgttttcgggcatgagcagagtttgcacaagccggatttgctccttggctcagagtgctacccgctctccccttcccctccctttgtctctcattccaaataaggagtgcttcttgttacataattggatgttcccagcacagaagctgacacatgaggttaggcgcacatgcatgcaagacttccctttgacttaacaatgccttttttgggcatctaacttctcttcagctcccctcccacttctctccacatcatcaacaatcaacggagatttataagcctggctcagatcagagctcttccaactttggcttagaaggaggggttatgaggtcgaacttactctgttttttttttttcctttgcaggatagagagtgtgcttataatttgacagaagtctatggcgtccaaggcagtaatgtacacaggtcttttaaagttgcaagatgggtatacaaagttggaagcagaggaataaacttgcctgcttggggataataatactggaggttggaacatgaggacattttaaggaggagatgcactcaaatctggtgactacagcatccctgatggtcaaactgcagtgagttctaaataactagagaagtggcagtaccacgtgtggcaccaacaccaactatcctgctcttttaagcacggaacttaaaggaagagaacccaagtaccctgcaaaagcatatggctcagctacccgtggtttcagggaggacaaacatgtagcctcctaggcagcagtcatggggatgggaggcaacgggacctcatatcatgcctcttgtgggagatgcagggggtacagtggagaggtgctgcagctctggagatgtcaagtttccagcatattggcttaccaaagcaaataaagctgaagcatgcagcaatgcatacaccactttttaaaattaaaacctgcaactgtcccagggatagtaacatgggctgtctttagactgcagcactgcccttaggttagctgcaagtgtgtagatacggagatgcagtttggattctacaaactgcctgataatctccagt

SEQ ID NO: 57334 - DNA, 1394 bp, Homo sapiens
aggctggctcctggctcacggaacggtaccaagataacacaaaatctcgaataatcatctggatggtgcggttgatctcccgttccagctgcctttctgcctcagggcatggaggacaggtggccaacgggatgaagcgttccagatgcagtcgacctgaagccactccagcgaggctggagcccagccatcctcccagcaccactagcaatgccgacagaaggcacagcagccacacgttgaccagaaggtgtatgaccaggagccagccaagcaagacccccacagccatcagcttccggctactcaacaggttattgaggtgacagctcgatccagctggagtttcctggaacggtggcactgtttctgtcttcatggctgaacggacaaggtggcttccccagatgacagccctcaagattttacttcagagttagggaaggggggcatgaactgtgtctcagatatggggcgatctgggtgctgttcagggaaccggggctccaggccctcaaagtcctacaggcactgcaaagcgacagctgcagctccgcgtctccccatggctaccactaacagagccctccaactcgccccttccagctgaggtgtggctttggaggaaaactctgtggccttcacactgccccaggcggaaggcctcttcggggcctcggggcgggcgctgcaaggccctggggcccacggacacttacacacgcagcgggcagcggccggcgaagactgggtcacacgccgccgggaaccgcgcgcccacactcagccccgacctgaagtggactcatcgcggtcctctccgggagcctcggccctctgccgccgtaaacctgggcgactgcgctccgcagccgggcctgtgtgaaggctgaccgccggccggccgccggcgacagcttccgggtcgacgtcgacgggagcgaggcatgctgggagagcgtccgcgcgcgccccgaggagcggcgctgcccggcgccctctgctggcgaggagccgccctgacggccctgcgcgaggtagtctctgagcctgagcgtgagcctgagcgcgcacggggcgcgtgctcgccaagagctggcgcagatttccgaagtgccacgaaacagccgccgcagcaatcaccgctaagacccagacttccaggcgctttaaaacgcgtcctagttctggttattaaatgaagcctgtcctttactgcttaggcacgctgtcaataatccggtttattttaatttcatggaggcgaagtttcattggcctgatgtgtcttaacatttatccggtttcccctagagccggtaccccgcgtccccagcacaaagaccctcatttgttgtcaggaattgcagaatataaggcatgaaacgatacag
